United States Patent Application Publication US 2007/0060743 A1 - sequence listing, part 4

SEQ ID NO: 6132 - DNA, 1388 bp, Homo sapiens
  SIMILAR (89)..(712): 901254mologous to Homo sapiens Icln protein,accession number X91788,Smith-Waterman Score=966.
gtgactgcctcttccagggcgggcggtgtggtgcacgcattgctgtgctccaactccctcagggcctgtgttgccgcactctgctgctatgagcttcctcaaaagtttcccgccgcctgggccagcggaggggctcctgcggcagcagccagacactgaggctgtgctgaacgggaagggcctcggcactggtaccctttacatcgctgagagccgcctgtcttggttagatggctctggattaggattctcactggaataccccaccattagtttacatgcattatccagggaccgaagtgactgtctaggagagcatttgtatgttatggtgaatgccaaatttgaagaagaatcaaaagaacctgttgctgatgaagaagaggaagacagtgatgatgatgttgaacctattactgaatttagatttgtgcctagtgataaatcagcgttggaggcaatgttcactgcaatgtgcgaatgccaggccttgcatccagatcctgaggatgaggattcagatgactacgatggagaagaatatgatgtggaagcacatgaacaaggacagggggacatccctacattttacacctatgaagaaggattatcccatctaacagcagaaggcccaagccacactggagagattagaaggaatgctttctcagtctgtgagcagcccagtataatatggctgggggtcaggacaagaagattcaataagagattattgaagatggggatgggaggttggataccacacccaacagtttgcttgggacagttttgaggatgcagatgtttgatccacttgaaaatgatttatgcaagtttaagatcctgctccctaagtgtaggagagaacttggtgcctcttccactctggagtgaagttaatgaaagtctttttccttttccaaaacccaacctggaaccagttctttcttgagacagactatactgagacaacaagttgtcaccagcagaagatagataatatgacctttattaacttgatgaattaactttaccaagagggtatttgtagtttactatttaccctaaaactttctgtgtctggggtaccctctgagtaggcctataattcctaccttgactgtgtgcatcatttgtaagctagcagatctatgtggtgaaaatgcacaggagcttggtagactgcgggggaaagagagagctcctttcgccatgttttaccagtctgctgttataacctcttaggttgtatcctttaatttccagccttttaggttagtttctgtaacagaacaagtgagtctgggatgaagtcctcaaagtacttcaaatggtaattgttttgtttttgtaatagcttaacaaataaacctaggttttctatatta

SEQ ID NO: 6133 - DNA, 554 bp, Homo sapiens
  SIMILAR (40)..(369): 651254mologous to Homo sapiens hMpv17,accession number X76538,Smith-Waterman Score=357.
  misc_feature (1)...(554): n = a,t,c or g
aaaaccacttgttgaaaagcgggttcttnaagaaacaccaagagagcccggactctgaccatggtgtcccctggnctgtgncttttgtggcccctgtggtaggaggctggtacanggttttgaatcggttcatccctggcacccacccaaagtggatgcactgaaagaagatgttgttggaatccaagggggtttgccccgtgttttctaggctgctttctcccactggtaggggcacttaatggactgtcagcccaggacaactgggccaaactacagcgggattatcctgatgcccttatcaccaactactatctatggcctgctgtgcagttagccaacttctacctggtcccccttcattacagggaggatcctgcttctaccacccttgtctccgatcccacctgagctccgtctttgatggcatatctggagggacagtggctggggtgctgcagcctaggttagacagagaggtagaccagaaggccaagtaggagcctggtcagacactcacaataaagacagttgctgaactgcacccgaaaaaa

SEQ ID NO: 6134 - DNA, 941 bp, Homo sapiens
  SIMILAR (829)..(698): 591254mologous to Homo sapiens Human secreted protein, SEQ ID NO: 7870,accession number AAG03789,Smith-Waterman Score=149.
tgcaaatgtttgctgattcctgcattactgatatcattttcataacagtcttaaaaacttggcatttttaaacttaaatacttttttctttttgtcgctttcttctctaccctatctctgccagcagttctttgtgaattaccattgtgatcttctaaaggcaaaaaaaatggtaggtagtcaatgactgatagctatagacctatgaaactaacatttcctatcttgtctcaatattctgatgtatataatcattttaaaacataataaatttaggccttttttgtttttgtttttaacacaagatatgccactaatgtctgacaagcatttaatctagtggctttcctgcattttccatggatcagatgcattctaatcctctgaaatgattattaaatacagattgccagcctttatataatgcctgctaaatttaccagttgggatctgcacatatattggtaaagagtgcccctagcagtttctgaccttctgtctgctttcagaatccacatgagtcaaattatctccttttatgtataatcttatcaaggactattgaggtggcacaggtggggatggaatcctggatgtgttcagaactcctttcattttactaagcttcctttatactaccagaggaatccacttccagtctcgagtcacttagaagagggggccgggcgtgatggctcatgcctgtaatcccagcactttgagaggtcaggagatcaacaccatcctggccaacatggtgaaaccctgtctctactaaaaatgcaaaaattagctgggtgtggtggcatgcgcctgtaatctcagctatgtggggaggctgaggcaggagaatctcttgaacccaggaggcagaggttgcagtaagccaagatctcaccactgcactccagcctgggtcacacagcaagactccatctcaa

SEQ ID NO: 6135 - DNA, 495 bp, Homo sapiens
  SIMILAR (12)..(422): 761254mologous to Homo sapiens similar to tumor suppressor p33ING1; similar to AF044076 (PID:g2829208),accession number AC004537,Smith-Waterman Score=528.
tgcaaagaaaaataaacctgagtggagggaagagcaaatggcatccatcaaaaaagactactataaagctttggaagatgcacgatgagaaggttctgttgtcaaaccagatatatgacttggtagatcgaggcgggagaaagctggatcaggaactggctaagtttaaaatggagctggaagctgataatgctggaattacagaaatattagagaggcgatctttggaattagacactccttcacagccagtgaacaatcaccatgctcattcacatactccagtggaaaaaaggaaatataatccaacttctcaccatacgacaacagatcatattcctgaaaagaaatttaaatctgaagctcttctatccacccttacggtcagatgcctcttaagggaaaatacactaggttgtcggaaataataattccacagcctcttctaacaatgcctacaatgtgaattcctcccaacctctgggatcctataac

SEQ ID NO: 6136 - DNA, 690 bp, Homo sapiens
atcctgatgcccttatcaccaactactatgtaagagctgacacctcaactgcttgttctcctgcttccttaagtctagaactgtcctgggattggggggtcctcctgacatgggaaacccttccgttgggattactctttcattcccaggatgggcaccataaatagggaagccatcacccaactgttcacctttttcttgtgtgcagaagttggggtagggccaggcaagacagtgagtctggggtcaggtggtggggcagccatccaacctttacattttctcttgcagctatggcctgctgtgcagttagccaacttctacctggtcccccttcattacaggtatgttgcacccctaccccacccatcaaggaagacccacgttaccaacagttggagacaaaatgattctcatttcaaccttgagctaccttagacccccaaacggaacactgagccgtgatcagagttcctcagattcccaagcgtgttattcagaatgtcttgccatttccggaaactgtcccagagtgtctgcccactgaccttcttcatctccctagggaggatcctgcttctaccacccttgtctccatcccacctgagctccgtctttgatggcatatctggagggacagtggctagggtgctgcagcctatgttagacagagaggtagaccagaaggcc

SEQ ID NO: 6137 - DNA, 408 bp, Homo sapiens
  SIMILAR (49)..(393): 681254mologous to Homo sapiens chorionic somatomammotropin,accession number K02401,Smith-Waterman Score=369.
caccactcagggtcctgtggacagctcacctagcggcaatggctgcaggaagaagcctatatcacaaaggaacagaagtattcattcctgcatgactcccagacctccttctgcttctcagactctattccgacatcctccaacatggaggaaacgcagcagaatccaacttagagctgctccacatctccctgctgctcaatcgagtcgcggctggagcccgtgcggttcctcaggagtaccttcaccaacaacctggtgtatgacaactcggacagcgatgactatcaactcctaaaggacctagagggaggcatccaaatgctgatggggaggctggaagcggcaaccaactgactgggcggacctcaagcaaactacaacaagtttgacaaaactcgcacaaca

SEQ ID NO: 6138 - DNA, 542 bp, Homo sapiens
  SIMILAR (509)..(541): 1001254mologous to Homo sapiens chorionic somatomammotropin,accession number K02401,Smith-Waterman Score=55.
gtataaaaagggcccacaagagaccggctctaggatcccaaggcccaactccccgaaccactcagggtcctgtggacagctccaggctcccggacgtccctgctcctggcttttgccctgctctgcctgccctggcttcaagaggctggtgccgtccaaaccgttccgttatccaggctttttgaccacgctatgctccaagcccatcgcgcgcaccagctggccattgacacctaccaggagtttgaagaaacctatatcccaaaggaccagaagtattcattcctgcatgactcccagacctccttctgcttctcagactctattccgacaccctccaacatggaggaaacgcaacagaaatccaatctagagctgctccgcatctccctgctgctcatcgagtcgtggctggagcccgtccggttcctcaggagtatgttcgcaacaacctggtgtatgacacctcggacagcgatgactatcacctcctaaaggccctagaggaggcatccaaacgctgatggggaggctggaagacg

SEQ ID NO: 6139 - DNA, 600 bp, Homo sapiens
  SIMILAR (1)..(597): 1001254mologous to Homo sapiens chorionic somatomammotropin CS-5,accession number J03071,Smith-Waterman Score=1028.
atggctgcaggctcccggacgtccctgctcctggcttttgccctgctctgcctgccctggcttcaagaggctggtgccgtccaaaccgttcccttatccaggctttttaaagaggctatgctccaagcccatcgcgcacaccagctggccattgacacctaccaggagtttataagctcttggggaatggactctattccgacatcctccaacatggaggaaacgcagcagaaatccaacttagagctgctccacatctccctgctgctcatcgagtcgcggctggagcccgtgcggttcctcaggagtaccttcaccaacaacctggtgtatgacacctcggacagcgatgactatcacctcctaaaggacctagaggaaggcatccaaatgctgatggggaggctggaagacggcagccacctgactgggcagaccctcaagcagacctacagcaagtttgacacaaactcgcacaaccatgacgcactgctcaagaactacgggctgctccactgcttcaggaaggacatggacaaggtcgagacattcctgcgcatggtgcagtgccgctctgtggagggcagctgtggcttctag

SEQ ID NO: 6140 - DNA, 793 bp, Homo sapiens
  SIMILAR (3)..(548): 791254mologous to Homo sapiens hGH-V2,accession number J03756,Smith-Waterman Score=737.
cccagacctccttctgcttctcagactctattccgacatcctccaacatggaggaaacgcagcagaaatccaacttagagctgctccacatctccctgctgctcatcgagtcgcggctggagcccgtgcggttcctcaggagtaccttcaccaacaacctggtgtatgacacctcggacagcgatgactatcacctcctaaaggacctagaggaaggcatccaaatgctgatgggggtgagggtggcaccaggggtccccaatcctggaagcccactggcttcgagggctgggggagagaaacactgctgccctcttttcagcagtcaggcgctgacccaagagaactcaccatattcttcatttcccctcgtgaatcctccaggcctttctctacaccctgaaggggaagggggaaaatggataaatgagagagggagggaactgggcccaagcgctgggcctctccttctcttccttcactttgcagaggctggaagacggcagccacctgactgggcagaccctcaagcagacctacagcaagtttgacacaaactcgcacaaccatgacgcactgctcaagaactacgggctgctccactgcttcaggaaggacatggacaaggtcgagacattcctgcgcatggtgcagtgccgctctgtggagggcagctgtggcttctaggggcccgcgtggcatcctgtgacccctccccagtgcctctcctggcctgaaggtgccactccagtcccaccagccttgtcctaataaattaaggttgtattgtttc

SEQ ID NO: 6141 - DNA, 822 bp, Homo sapiens
  SIMILAR (63)..(518): 911254mologous to Homo sapiens placental growth hormone isoform hGH-V3,accession number AF006061,Smith-Waterman Score=693.
aggatcccaaggcccaactccccgaaccactcagggtcctgtggacagctcacctagctgcaatggctacaggctcccggacgtccctgctcctggcttttggcctgctctgcctgccctggcttcaagagggcagtgccttcccaaccattcccttatccaggccttttgacaacgctatgctccgcgcccatcgtctgcaccagctggcctttgacacctaccaggagtttgaagaagcctatatcccaaaggaacagaagtattcattcctgcagaacccccagacctccctctgtttctcagagtctattccgacaccctccaacagggaggaaacacaacagaaatccaacctagagctgctccgcatctccctgctgctcatccagtcgtggctggagcccgtgcagttcctcaggagtgtcttcgccaacagcctggtgtacggcgcctctgacagcaacgtctatgacctcctaaaggacctagaggaaggcatccaaacgctgatggggaggctggaagatggcagcccccggactgggcagatcttcaagcagacctacagcaagttcgacacaaactcacacaacgatgacgcactactcaagaactacgggctgctctactgcttcaggaaggacatggacaaggtcgagacattcctgcgcatcgtgcagtgccgctctgtggagggcagctgtggcttctagctgcccgggtggcatccctgtgacccctccccagtgcctctcctggccctggaagttgccactccagtgcccaccagccttgtcctaataaaattaagttgcatca

SEQ ID NO: 6142 - DNA, 1221 bp, Homo sapiens
  SIMILAR (422)..(928): 401254mologous to Homo sapiens chorionic somatomammotropin precursor,accession number M15894,Smith-Waterman Score=178.
atggagctgggtatgtggaacatttgcagggaagtttgtttctccgcttgtttttccaggggtattcgagatgacattgaagaggaagatgaccaagaagcttattttcgatacatggcagaaaacccaactgctggtgtggttcaggaggaagaggaagacaatctagaatatgatagtgacggaaatccaattgcacctaccaaaaaaatcattgatcctcttccccccattgatcattcagaggttgaccaacatggcctgcggccagagggcacccacctgacccttaaagagaggacaagttgggtggagtctgtggctgacactctgtgcacaatccttacaacactggtgatggatcccaaggcccaactccccgaaccactcagggtcctgtggacaggctcacctagtggcaatggctccaggctcccggacgtgccctgctcctggcttttgccctgctctgcctgccctgggcttcaaggaggctgggtgccgtgccaaaaccgttccgtatatccaggcttttttgaccacgctattgctccaagcccatcgcgcgcaccagctggccattgcacacctaccaggagtttgaagaaacctcatatcccaaaggaccagaagtattcattcctggcatgactcccagacctccttctgcttctcagactctattccgacatccctccaacatggaggataacgcaacagaaatccaatctagagctgctccgcatcgtccctgctgctcatcggagtcgtggctggagcccgtgcggtttcctcaggagtattgttccgccaacaacctgggtgtattgacacctcggacagcgattgactatcacctcctaaaggacctagagggagggcatccaaccgtttgatggggaggctggaagacggcagccgccggacttgggcagatcctcaagcagacctacagcaagtttgacacaaactcgcacaaccatgacggactgctcaaggaactacgggctgctctactgcttcaggaaggacatgggacaagggtcgagacattcctgcgcatggtgcagttccgctctgtggagggcagctgttggcttctagggtgcccgagtagcatcctgtgagccgacccctccccagtgcctctcctggcccctggaaggtgccactccagtgcccaccagccttgtcctaataaaattaaggttgtatcatttc

SEQ ID NO: 6143 - DNA, 411 bp, Homo sapiens
cagccttccaaggtagggcacaccaaggcctaaggaatcagaaagggcccgagggtgggctgtgtcctggctttcaggccctggggcgaccaccagcctctgctcactctgaggctccagccagggcgccaagcctcaggaccgtgggtggggcccaaggacactctggacccccgttccattcatgagaggccctcagcacgccacgtgtctgctgtggcagcccgcagggagggtggaagccttctgtaaattccacatgtggccccagggcatgacgtccttgatgaaggccgcgctggacctcacctaccccatcacgtccatgttctccggagccggcttcaacagcagcatcttcagcgtattcaaggaccagcagatcgaggtgcacccccacccacgaaagat

SEQ ID NO: 6144 - DNA, 1784 bp, Homo sapiens
  SIMILAR (3)..(1148): 631254mologous to Homo sapiens neuropathy target esterase,accession number AJ004832,Smith-Waterman Score=1275.
  misc_feature (1)...(1784): n = a,t,c or g
ggggagggggagcaagaggctgtgcccatgtggtcgttctcaaggccttggcggagtgcggcatccgtgtggacatggtgggaggcacgtccatcggggccttcgtgggtgccctgtactctgaggagcggaactacagccagatgcggatccgggccaagcagtgggccgagggcatgacgtccttgatgaaggccgcgctggacctcacctaccccatcacgtccatgttctccggagccggcttcaacagcagcatcttcagcgtcttcaaggaccagcagatcgaggacctgtggattccttatttcgccatcaccaccgacatcacagcctcggccatgcgggtccacaccgacggctccctgtggcggtacgtgcgtgccagcatgtccctgtccggttacatgccccctctctgtgacccgaaggacggacacctgctgatggacgggggctacatcaacaacctcccagcggatgtggcccggtccatgggggcaaaagtggtgatcgccattgacgtgggcagccgagatgagacggacctcaccaactatggggatgcgctgtctgggtggtggctgctgtggaaacgctggaaccccttggccacgaaagtcaaggtgttgaacatggcagagattcagacgcgcctggcctacgtgtgttgcgtgcggcagctggaggtggtgaagagcaaagactactgggagtacctgcgcccccccatcgacagctacagcaccctggacttcggcaagttcaacgagatctgcgaagtgggctaccagcacgggcgcacggtgtttgacatctggggccgcagcggcgtgctggagaagatgctgcgcgaccagcaggggccgagcaagaagcccgcgagtgcggtcctcacctgtcccaacgcctccttcacggaccttgccgaaattgtgtctcgcattgagcccgccaagcccgccatggtggatgacgaatctgactaccagacggagtacgaggaggagctgctggacgtccccagggatgcatacgcagacttccagagcacctcagcccagcagggctcagacttggaggacgagtcctcactgcggcatcgacaccccagtctggctttcccaaaactgtctgagggctcctctgaccaggacgggtagaggcctctgctaaagagcccggatgcagcgtcttcccgtgggactgtcccccaaggctgaggctcctgccaagtcctaggggcctctggtacctgcccctgctgaaagccctgacttccccgggggccccaggctgtgttaagggttctctgggccctcttctttgtaccagcagccctgcatacagggccctgtgagcccccctgcagtcctgtgaggcccctgaagctttgtgaggcccctgaagctctgtgaaccccctgcagccctgtgaggccccccgaagccctgtgaggccccccgaagccctgtgaaccccctgttgccctgtgaggcccccaaagccctgtgaactgcctgctgtcctgtgaactgcctgctgccctgtgaggtgtggggacccctgatgctgcccgtgggatgtttaaataaagggggatctcactgtggaaaataaggaaggaggtcgcggctgggggtgctgatctcgcccccccctcctcaaaaaaaaaggggggggaataaccctctgatgggcccggtggtggcttattgggagtgcgcacacnnnnnnnnnnaccgcccgcccgctgcggttgttgtcccctggtaggggccccc

SEQ ID NO: 6145 - DNA, 1842 bp, Homo sapiens
  SIMILAR (2)..(262): 901254mologous to Rattus norvegicus rsec5,accession number AF032666,Smith-Waterman Score=396.
tcgactgatgcagtgtgtttcatccttcagcaaaaatggagctttacaggcgagacttgaaatctgtgctttgagggacactgtggctgtttacctgacacccgaaagcaagtcaagttttaagcaggctttggaagccctgccccagctttccagtggagcagataaaaagttactggaagagctcctgaacaaagtcaagagtagcatgcacttgcagctcaactgtttccaagcagcttcttcaaccatgatgaaaacataaatatctgccacataaaaggagtccaggaaaataacacgtaataagactgttcactctctaagtaccctaaaggtatttggtgtattaaacatagggtttggcatttttctcttttttcttcctctgacttcgaaaattgttggtatacatttcaaccaaaatgacctcatttgaaatgcccatggaagtatttgttttgccattcttactagatcagatcctgtatgactttaaaatacattttaaaatatattttgcatctcagcagaaggttgagtgctgcaggaagagctgcttctgcaggggagttttctggaatggcgtggcacatattgaagcatttctcagtgtcccgttcacggaaagcgcaggcagctcccacgacacacggagagactgactgatacgagatttggaaagctatgtagacatctttgggagctcttactgtcctaaactgtacagctgtgcttaaaaccctcatttcatataaatggccctaagttttctaattcaagcggggttttggaaaaatttatggtctccattaaaatactttatttttactggggtagattatttgtggtccaggtgtctgtgatttaactttgcgttttgctatctgatttttatttttcacagggctaagcatgagctttcattctcactcactcttaatttgtcgtgcgtcactacacatgcacgtgttgcagtccctgaggccctgtgtgttatctgtgatggagtgtgaatgtgtaacgggcactgtgttacactctcaggtgttggcggggcggtcgcagactttcagggtcccctaacggaaaggccagggtccgcgtgggacgggccaactccctgcccgctcctttcagcaggtgactgtcttctggccacttcttacctgctgaaggatcttgctcagtagctggaacaatgctgctgtcacacagtctcttctctggaaactttcaggatgctccttggtcaccaggcaatggggagctgtaggaccagccgcatgcacttgccccacattcactgctgactggcttcactggaataggttcaggtcaccgggacttctctcagagtcagcagccccaccccaactccctcaaaaccgtcgcacctgaaaattttccagagaggaattcctctttgtagtcggcttgtccagggttttcaagtttttctatggttattttttaaaatcccctttttttaaatgcctaaaattaaatggccctcattaatggcaagtaattttaggaggcacagtgtaggccatgtacagtttccatttattttaaaataaattaaatgtgttgggttcatttggtgtatgggggggacatcatggtaactggaaatgaaagtttaatctttcaccaaatgtgctttgataaagcgtgttaagaattgtctttcctaagtatggttaactgttgtatctaactcaactgtgagctaagtttaaaaactgcaatcatgaatgtttgtgatattttaaatatctactacagcacattcagccaataaagaatctgcctttaatgtaagttgtaatttacttg

SEQ ID NO: 6146 - DNA, 391 bp, Homo sapiens
taaccaaacagctcatgcttctctgaagacttgcagcaaggcttgctgaggctcacagaagatagccccagtgttttggagtggttttgaatgtgattctgagatcagactgactgatctggaatcctggctttatatcttaccagctacacaaccttggagtcttacatatttttactttcagttctcttttatactaacttttcttcgttatgacaaactgttctttttttttaccctttatctttatttaaatctatacttttttttgtatgtatttctttttattgtataaatttgtatcttttgttatatttatctagtttttatattcaagtgtgttgtatgattttttatcttcttttttgtttgttttatgttattttttctt

SEQ ID NO: 6147 - DNA, 365 bp, Homo sapiens
  misc_feature (1)...(365): n = a,t,c or g
cgatactgccactgcctctgcagaacgccacggtggaagcggggaccagatgccaggtggccggctggggaaggaaatggagccaggggagggtggccctggtgactggggcctcatggggacccctgggagcagaaaagtcagcgacatgaactgtattctgtaagtggcccgcgtttaattcccggtannnnnnnnnnnnnnnnnnnnnnnnnnnnnnnnnnnnnnnnnnnnnnnnnnnnnnnnnnnnnnnnnnnnnnnnnnnnnnnnnnnnnnnnnnnnnnnnnnnnnnnnnnnnnnnnnnnnnnnnnnntttttanattccttaatggatatccttgagattaaggccaacgcggccgccg

SEQ ID NO: 6148 - DNA, 372 bp, Homo sapiens
  SIMILAR (339)..(371): 1001254mologous to Homo sapiens Similar to RIKEN cDNA 2610005L19 gene,accession number BC004403,Smith-Waterman Score=61.
  misc_feature (1)...(372): n = a,t,c or g
attgaaactgctgtgccatcattattgatacctgacctcattgatgtgcatgctcagtccctggctgcgctgcaggcttactctcactggttagcacagtattgcagtgaagttcaccggcagaacacgcagcagttcgtgacactcatctctactaccatggatgcaatcacacctctaatcagcaccaaggtccaagacaagctgctgctatctgcgtgccacttactggtctcactggccaccaccgtgcggcccgtctttctgatcagcatccctgcagtgcagaaagtattcaacagaatcactgatgcctctgccctgcgacttgtcgataagagaatgagcagcagtggcccgtgcgctccatcn

SEQ ID NO: 6149 - DNA, 377 bp, Homo sapiens
tgaagctctaggcctgctactgcctggggacacggacttctgctgctgccacctgcgccagccctaccttccacctggaaatcccgcggggtggcccatgcagaccaggcgcacgtggctcatggggcagaattgccaaggacagctcacgacagtgccaccttctcaccattccagccaaggagagatgtgacgttggaactgctctggcacttctgtcaagcctcccccgccccaattgccttgagatctctgctctttgtcagagatttgcaaagactcacgtttttgttgttttctcatcattccattgtgatactaagaaactaagaagcttaatgaaaagaaataaaatgcctatgttgttgttctagaaa

SEQ ID NO: 6150 - DNA, 256 bp, Homo sapiens
  SIMILAR (110)..(256): 1001254mologous to Homo sapiens Similar to RIKEN cDNA 2610005L19 gene,accession number BC004403,Smith-Waterman Score=234.
gtacgaagatgccctggtgctcctgctcacagaggtgttgaatcgaatccagttcagatacaaccaagcccagctggaggagttggatgatgagactctggatgacgatgtccaagacaagctgctgctatctgcgtgccacttactggtctcactggccaccaccgtgcggcccgtctttctgatcagcatccctgcagtgcagaaagtattcaacagaatcactgatgcctctgccctgcgacttgtcgataag

SEQ ID NO: 6151 - DNA, 350 bp, Homo sapiens
  SIMILAR (1)..(189): 1001254mologous to Homo sapiens Similar to RIKEN cDNA 2610005L19 gene,accession number BC004403,Smith-Waterman Score=329.
gcccaggtgttggtgtgccgagccctctctaacatcttgctgcttccgtggccaaaccttccagagaatgagcagcagtggcccgtgcgctccatcaaccatgccagcctcatctctgcactctcccgggactatcgcaacctgaagcccagtgctgttgccccacagagaaagatgccactggatgacagacacaggttgaacatcacggcggagaacgactgccggcggctgcactgctccctgagagacttgagctccctgctgcaggccgtgggccgcctggccgagtactttatcggggatgtgtttgctgcacggttcaatgatgccctcacagtcgtggaaag

SEQ ID NO: 6152 - DNA, 6098 bp, Homo sapiens
  SIMILAR (923)..(1684): 791254mologous to Homo sapiens Similar to RIKEN cDNA 2610005L19 gene,accession number BC004403,Smith-Waterman Score=935.
  misc_feature (1)...(6098): n = a,t,c or g
aagatcttccggactgccatgctgttccagtttgtgaacgtgctgctccaggtcctggtccacaagtcccatgatcttctgcaggaggagattggcatcgccatctacaacatggcctcagtcgactttgatggcttctttgccgccttcctcccagagttcctgaccagctgtgatggtgtggatgccaaccagaaaagtgtgctggggcggaatttcaagatggatcgggtgtgcgagggaatcagttctctaagtcgactgcagaatgagctcagctatatcgagaagtttactgactttcttcggctctttgtgagtgttcacctaagaagaatcgagtcttactcccagttccctgtggtggagtttttgacacttttgttcaagtacacatttcatcagcctactcatgaaggttacttctcttgtttggatatctggacgctgtttttggactatctgacaagtaaaattaaaagtcgtcttggagacaaggaagcagttctcaacaggtacgaagatgccctggtgctcctgctcacagaggtgttgaatcgaatccagttcagatacaaccaagcccaggctggaggagttggaatgatgagactctggatgacgatcagcagacggagtggcagcggtacttacggcagagcttggaggtggtggccaaagtgatggagctcctgcccacgcacgccttctccactctgttccctgttcttcaggacaatttaggaagtttatttgggattacaacagtttatagtcacttcagggtcaggacacaggttgaacatcacggcggagaacgactgccggcggctgcactgctccctgagagacttgagctccctgctgcaggccgtgggccgcctggccgagtactttatcggggatgtgtttgctgcacgggttcaatgatgccctcacagtcgtggaaaggttggtcaaagtcactctgtacggatctcagataaaattgtacaacattgaaactgctgtgccatcagtattgaaacctgacctcattgatgtgcatgctcagtccctggctggcggctgcaggcttagtgctcactggttagcacagtattgcagtgaaattcaccggcagaacacgcagcagttcgtgacactcatctctactaccatggatgcaatcacacctctaatcagcaccaaggtccaagacaagctgctgctatctgcgtgccacttactggtctcactggccaccaccgtgcggcccgtctttctgatcagcatccctgcagtgcagaaagtattcaacagaatcactgatgcctctgccctgcgacttgtcgataaggcccaggtgttggtgtgccgagccctctctaacatcttgctgcttccgtggccaaaccttccagagaatgagcagcagtggcccgtgcgctccatcaaccacgccagcctcatctctgcactctcccgggactatcgcaacctgaaagcccagtgctggtgccccacagagaaagatgccactggatgacaccaaactgattatccaccagacacttcagcgtcttaggaagatattgtgggagaatatctcggggggagtccaccaagtcttcgacagattttgcttaccagttcggttgcagggaatctgtttcaggtctccctgggcctctttccagctttttatccatcagtcagatgtgactgatgagatgctgagcttcttcctcactctgtttcgaggccttagagtacagatgggcgtgccttttaactgagcaaatcatacagactttcctcaacatgtttaccagagagcagttagccgagagcatcctccacgagggcagcacaggctgccgggtggtggagaagtttctgaagatcctgcaggtggtggtccaggagccaggccaggtgttcaagcccttcctccccagcatcatcgccctgtgcatggagcaagtgtatcccatcattgccgagcgtccctcccctgatgtgaaggcccgagctgtttgagctccttttccggacgctccatcacaactggaggtacttcttcaagtccaccgtgctggccagtgtccagagggggatcgcttgaggagcagatggagaatgagccccagttcagtgccatcatgcaggctttcggacagtcctttctccagcccgacatccacctttttaaacaaaatctcttcttacttgggagactctcaacaccaagcagaagctgttaccacaagaaggatcttccgggactgccatggttgttccagtttgtgaacgtgctgctccagggtcctgggtccacaagtcccatgatcttctggcaggagggagattgggcatcggcattcttacaacatggcctcagtcgactttgaatggcttctttgccgccttcctcccagagttcctggaccagctgtggatggtgtgggatgccaaccagaaaagtgtgctggggcggaattttcaagatggatcgggtgaggagagaaagaggccgggctaagaggagggcagagtgggcacgcaagcctggcacctgtgcagcaaggagggggcacattgaggcctctgggcgtggtctgtgcccaccctgcagcttggcggcagctcacgagatgcctgctgacctggtgctgtagcctgattgaggggcacagccttttccccagtcttggtgtctgtagcacgtatgttcttagtctcagccatggaggtcccgagttcctggctctgcagcccctccatttgtcttggcatctttgttcatacccaggaccctgccgttctccctcctgggtgatgagccccggtggggccagcattggagtgtgcccaggcttgcattcaagctgagatggttggtgcttgggagctgcacttctgggtccccagggttagaggtgggacccaggttccccggctgtcttgggctctttccagaccagccccagctcagcttgggctgagttgctgccaggtcctgggaggagccctcctagtactcaccctcttgtcccactgctgccacctgtgcagggactgtcaggtgggctgtccccacccgtgcagcacctcggtgggagctgggtgctgctggctcttggtgtccatgaggccatcttgttggagcctgacagtgcctgggacctccttccccatggggctcacctgttctcttcttcctgtgtcaggtgaccaggcctctctcttgcctgataggaacttctgggaacttttccttgtaccgttttatacttgatgaaattaggaaaagaaatcgctttctccctggtcctcttggggttcttgacctgagtcctctgtgaagcagcttgtccacggctccaccgtagtgctcagatgcacacattgctctcactggtgcaaacctggccgcctgctttcctcatttgccacgtgtggcagggaagcttttgcttagactcatcctgttctcctttgtcttggggtcttccttttcttgggacttgttctctcctaagcctcttccagttcacttcagcccctggatatgttttttcctttttctagaggccagatcctaatacttaatgatcagcttctaacgacatcaatatcagtcaactttttgatttaaagctgtggtttcaaaatctagttataggccaggcgcggtgtctcacacctgtaatctcagcactttgggaggccaaggcgggcggatcacttgaggttagggggtttgagaccagcctggccaacatggcgaaaccctgtctctactaaaaataaaaaaaattagtcaggtgtggtggcacacgcctgtaatcccagctgcttgggaggctgaggcacaagaatctcttgaacccgggaggcagaggttgcagtgagcggaggttgtgccactgcactccagcctgggcggcagagtgggactttgtctcaaaaaaaaaaatctagttatatcagaagcacctggggtacttattaaaaatggagaaacagacttctgtgttctacccaggaaattctggtttggcatttgggagccactgatttaaaagacatcccttagttggttttttgagggtaaaataaaagaatcaccaccttccattcagtcacgcactgtgtgtttgaagccagctgcttctcaagccccgggccaggaactggggcaccagtcccagccttcaccaagtctttcatggtagacaggccaatacagcaccctctgtggaccacatagtgccaagcatgtgacatgtcttggctcgagtaagccttctaacaagcctctgaagtgtgggtcctgttactcccccatttcacagatggtgggggctcagaaggtgagcagttcacagaacttggaagtggtagagctgcgaagcaggaggcagacctgggtgttctggccccagagcctgcacacactccccagaagcagattgctcaggacagaggcgctgagctggctgctggggccaggaaataggaggcatctgtgcagactttgggaagaggcaggctttgaatggagttctggaagaggaatagtggttgggcaggaaaatgaacttggtcctgctcatggctctgctggggcttgctgggcctgtttgagtcctcaccgggacctacactgaaaaaaaaagcagggtctcaccagtgtgcatgatggcggaggtcagggcctcacttctggcccagggccttccatggcccacgctgcgcccagtgggacaggccttgggactgtgtttgctgctgctcgggtggctctcgaggggcaggggcggcctgggagccccgttgggtaaagggtcttgcagacattgctcggtgttgcgcgttcacctcaaggggccatggtgaagaagagggttttcaccacagccatgtctgcgtttgaggggccggactcaggagcaagtgtgctggtctcttcagtgtgagctggggccagcttcttcatggtgcagcgctttggtctttctgtccttagactagtggttctggtaaggcttggtggcagccttgtggtgaggactcagtgagttgatgtctgtatgttgattgcagcagtgtctggcacccgagaggccctagggacgtattcctcttgttctttttctcccacagcgcctggcacagagtctctgtgacacgcagtgcaacagtgaatagaagttttgagttttagaaagtgctcccctatcttcagtgcacactctgggatggaagtagctgttggggtctggtgggtgggtgacctggtgtgttgttggctgcagctatgcccctgccttccaggacctgccctcattcacccagaatgtgcacaggctggtcaacgacctgcgctactacagactctgcaacgacagcctgccccctggcactgtgaagctctaggcctgctactgcctggggaacacggacttctgctgctgccacctgcgccagccctaccttccaccacagatgtctcccagatgggccttggtcacactccttggcttttcccacccgcaagcaacgctgcctgcctctgccgctcctccacatcttgcccgcttgcccagcagagctggcttctgggtcccacccttgagcacttggacggtgctccccagggcgttggagcaggcggaggggtgtgtggcccaggtacctaggaggcacccaggaaattcccgcggggtggcccatgcagacccaggcgcacgtggctcatggggcagaatttgccaaggacagctcacgacagtgccacctttctcaccattccagccaaggagagatgtgacgttggaactgctctggcacttctgtcaagcctcccccgccccaattgccttgagatctctgctctttgtcagagatttgcaaatgactcacgtttttgttgttttctcatcattccattgtgatactaagaaactaagaagcttaatgaaaagaaataaaatgcctatgttgttgttctagaannnnnnnnnnnnnnnnnnnnnnnnccctcgggggggggccgggaccccatttccccttataggggggggtataacaattccggggcggcggtttaa

SEQ ID NO: 6153 - DNA, 321 bp, Homo sapiens
  SIMILAR (115)..(321): 1001254mologous to Homo sapiens hypothetical protein,accession number AL136784,Smith-Waterman Score=365.
aattcaaaaataatggaattgcttcaggtggtaccaagctgtgttgcttcattagatgatgtggctgaaactgaccgcaaggagtatgtcactgttaagatcaggaaaaaatggaggcaaagtgtcacactgagacagaataacctgccagctcagagtggatctcatgctgctgagaaaggcaacagcgactggccagagaggcctggactgacacagactggccctggacacagacggatgctgcggagacacacggtagaggatgcggtcgtgtcccagggcccggaggctgctggccccctctccactccccaagag

SEQ ID NO: 6154 - DNA, 1873 bp, Homo sapiens
  SIMILAR (1)..(255): 1001254mologous to Homo sapiens hypothetical protein,accession number AL136784,Smith-Waterman Score=424.
  misc_feature (1)...(1873): n = a,t,c or g
cacggggcctccattaacgcttctaacaataagggcaacacagcgctgcacgaggctgtgattgaaaagcacgtcttcgtggtagagctgcttctgctccacggagcgtcagttcaggtgctgaacaagcggcagcgcacggctgtagactgtgctgaacagaattcaaaaataatggaattgcttcaggtggtaccaagctgtgttgcttcattagatgatgtggctgaaactgaccgcaaggagtatgtcactggttaagatcacgaaaaaagggaactcaaaactgtatgatctaccagatgagccttttacaagacagttttactttgtccactcagctggtcagtttaagggaaagacttcaagggagattatggcaagagatagaagtgtccctaatttaaccgaaggttctttgcatgagccagggaggcaaagtgttcacactgaggacagaataacctgccagctcagagtgggatctcatggctgcttgaggaaagggcaacagcgactgggccagaggagggctggggacttgacacagactggccctggacacagacggatgcttgcgggagacacacggtagaggatgcggtcgtgtcccagggcccggaggctgctggccccctctccactccccaagaggttagtgcttcccggtcctaacaggaatgaggagttgttgaacccactgctaggaagcaaggatgcaacaagatgatgctgagcgtggaacacatcttgagaactaaatgttgctttccatgagattggctttgaggaagtctttcagcaccaaagttcctcgaaggcttttcctgtgggcagggaaagattgcaacaaaaaagtttaaccaccaccatctctctcctcttcaaagctaatgaataccattggaaacagacaaaaattccagtagcatccagatccttaagccagaggtgcatgcttctttttaagtatgagggtttgttggtcacagtgggagaggtttcaccaccgcattctgacctcctcctcccaaaaggtgctaaacctctctgacctgtgtacattcacaaaccacagctagaattcctccacctaggattaagctggagagaagtaagtaatttaggtttcatggtactgtagaggccaggctgaaatgtcatatctgaaaggaagaaagcagcagctggacaatgtttctttgcaaagcaacactccgaaccaaaagatgcctcaatcccatttttgatattccattttagtgaaaggatgcatccagacctgttccacatcatgcacatggggaaaggggtgggttatcattttccttctaacaagtgggtacagatattccggttactacacgtgcacctgtagcagtatttctagaaacatcccctttttggttggagaccctccccttgaatgtctgtcacactccaccacctgaccgggatggttactggattagagagtagatttggcacatcttttcttagtcttttgattcaaattcaaaacttaacagcacaaaccaggtcaagagttactttcggttagaatttattgccatttattcctttttataaatttctatagattatactgttatttttatgttattggcctagagcctacacgtatatgggtttgnccctgagtcccgttttcaaatgaccttgtgattgatagggaaatggttttgtcccatgttcttggaaactacttgtgtatgtacagaaggaagggagggattatttttctacaaagtaatttatgatttctaattttctaatgtgccttggatatgtgccacaatgatggaaaagaaacagtaaactttatgattccttaaaaaaaaaaaaaaaaaaa

SEQ ID NO: 6155 - DNA, 3377 bp, Homo sapiens
  SIMILAR (406)..(3018): 1001254mologous to Homo sapiens dJ93K22.1 (novel protein (contains DKFZP564B116)),accession number AL050333,Smith-Waterman Score=4490.
  misc_feature (1)...(3377): n = a,t,c or g
atgcctgactgcacatcaaagtgtcgatccctgaagcatgctttggatgtcctttctgtggtaacaaaggggagcgaaaaccagattaaggcctttctctccagtcattgttacaatgctgcaactatcaaggatgtttttggcaggaatgccctccaccttgtttcctcctgtggaaagaaaggagtgttagattggcttattcagaaaggagtggatctgttggtgaaagacaaagagtctggatggacagcattgcacagaagcattttttatggacatattgattgtgtttggtctctattgaagcatggtgttagtctgtatattcaagataaagaaggcttgtcagctttggatcttgtaatgaaggatagaccaactcatgtagtattcaagaatactggttgtttgctagatcccaatggagaaaagtgtgtaactgctcctcgtcaggtctctgcccttcaccataaagacattgctctgtctttggttgctgcaagtgatggagctacagtctgtgttaccacaaggggagatatttacttacttgcagactatcagtgcaagaagatggcttctaaacagttgaacttgaaaaaagttcttgtgtctgggggtcatatggaatacaaggttgatcctgaacatttgaaagaaaatgggggtcaaaaaatttgcattcttgcaatggatggagctggaagggtgttttgctggagatcagtcaacagttctctgaagcagtgtcgatgggcctatccacgtcaggtcttcatttctgatattgctttaaatagaaatgaaattctatttgttacgcaagatggagaaggatttagagggagatggtttgaagagaaaagaaagagttctgaaaagaaagagattttatcaaaccttcacaattcctcatcagatgtgtcttatgtctctgatataaatagtgtgtatgaaagaattcgacttgagaaacttacctttgcacatagagctgttagtgtcagcacagatccaagtggatgcaactttgcaatcctgcagtcagatcctaaaacaagcctttatgaaattccagctgtgtcctcatcatccttttttgaagagtttggcaaactgttgagggaagcagatgaaatggacagcattcatgatgtgacatttcaagttggcaatagactcttccctgcacataaatatattttggcagtgcattctgatttttttcagaaattgtttctttcagatggtaatacttcagaatttacagatatttaccagaaagatgaagattctgcagggtgccatctctttgtggtagagaaggttcatcctgacatgtttgaataccttttacaatttatatacacagatacttgtgactttttaactcatggcttcaaaccaagaatacacttaaacaaaaacccagaagaatatcagggaactctgaattctcatttgaataaagtgaatttccatgaagatgataaccagaagtctgcatttgaagtttacaaaagtaatcaagctcaaacagttagtgagaggcagaagagcaaacctaaatcttgtaaaaaaggaaaaaatattagggaagatgatcctgtaagaatgttgcaaactgttgcaaagaaattcgacttcagtaatttgagtagtaggttagatggagtcagatttgaaaatgaaaaaattaatgttattgccaagaacactggtaataaactgaagctaagtcagaaaaaatggtataatgtatacaaagaaaaagtgatgcttgttttctttctttttttagaatctcaaaatgtagattttatttgtagtgttcttgtggtggctgatcaacttctcataacccggttgaaagagatttgtgaagtagcattaactgaaaaacttaccctgaagaatgctgctatgctactggaatttgcagcaatgtatagtgcaaaacagttgaaactgtcttgtttacagtttataggattgaatatggcagctttacttgaagcaaggtctcttgatgttttaagcgatggtgttttgaaggatctttctgagttttaccggaaaatgattccagcaatggatagaagagtcattacaccatatcaagatggaccagatattagctatttggaagtagaagatggagatatcttcttgaaagaagaaataaatatggaacaaaatcattcggaaactatgttcaagaaagcaaaaacaaaagctaaaaagaagccacgtaaacgttcagatagttctggaggttataacctttcagatattattcagagtccatcatctacaggattattaaagtctggtaagaccaattctgtggaatctcttccagaactgttgacatcagactctgaaggaagctatgcaggagtgggtagtcctagagatttacagtcccctgatttcacaacaggatttcattcagataagattgaggcgaaagtcaaaccgtatgttaatggtacatctcctgtgtattctagggaagatttaaaaccatgggaaaagtcaccaatacttaaaatatctgctccacagcctattcccagtaacagaattgatactaccagctctgccagttgggttgctggttctttcagtcctgtcagccctcctgttgtggatctcagaactatcatggaaatagaagaaagtagacaaaaatgtggagctacaccaaagtcacatttaggcaaaacagtttctcatggagttaaactttctcagaagcaacgaaaaatgattgcattgactaccaaggaaaacaattcaggaatgaatagcatggaaacagttttattcactccttcaaaagcccccaaaccagtgaatgcatgggcatcttctctgcattcagtttcatccaagtcattccgggatttcttactagaagaaaaaaagtctgttactagccatagttcaggcgatcatgtcaaaaaagtttcttttaaaggaattgaaaattctcaggcaccaaaaattgtcagttttgtaggaggagagagaaggtgacatttgagccaactgtaaaagagtgagaagacatttgaagtggaatatattccagaataaggggaatagtaaaaataaagatgctctacccatggtaccccaggaccagaaggcaaccatatttcagatttaccacttctagacagtcccaatccctggctatcttcttcagtgactgctccatccatggtagccccagtcacttttgcatctattgtagaagaagaactaccacaagaagcagctcttattagaagtcgagaaaaaccgtngctctgattcagattgaggagcatgccatacaagattattggttttctatgaggcatttg

SEQ ID NO: 6156 - DNA, 1542 bp, Homo sapiens
  SIMILAR (4)..(1149): 991254mologous to Homo sapiens dJ93K22.1 (novel protein (contains DKFZP564B116)),accession number AL050333,Smith-Waterman Score=1948.
ggggaaactatgttcaagaaagcgaaaacaaaagctaaaaagaagccacgtaaacgttcagatagttctggaggttataacctttcagatattattcagagtccatcatctacaggattattaaagtctggtaagaccaattctgtggaatctcttccagaactgttgacatcagactctgaaggaagctatgcaggagtgggtagtcctagagatttacagtcccctgatttcacaacaggatttcattcagataagattgaggcgaaagtcaaaccgtatgttaatggtacatctcctgtgtattctagggaagatttaaaaccatgggaaaagtcaccaatacttaaaatatctgctccacagcctattcccagtaacagaattgatactaccagctctgccagttgggttgctggttctttcagtcctgtcagccctcctgttgtggatctcagaactatcatggaaatagaagaaagtagacaaaaatgtggagctacaccaaagtcacatttaggcaaaacagtttctcatggagttaaactttctcagaagcaacgaaaaatgattgcattgactaccaaggaaaacaattcaggaatgaatagcatggaaacagttttattcactccttcaaaagcccccaaaccagtgaatgcatgggcatcttctctgcgttcagtttcatccaagtcattccgggatttcttactagaagaaaaaaagtctgttactagccttagttcaggcgatcatgtcaaaaaagtttcttttaaaggaattgaaaattctcaggcaccaaaaattgtcagatgctctacccatggtaccccaggaccagaaggcaaccatatttcagatttaccacttctagacagtcccaatccttggctatcttcttcagtgactgctccatccatggtagccccagtcacttttgcatctattgtagaagaagaactacaacaagaagcagctcttattagaagtcgagaaaaaccgttggctctgattcagattgaggagcatgccatacaagatttattggttttctatgaggcatttggcaaccctgaagagtttgtcattgttgaaaggacaccgcagggaccactggcagtacctatgtggaataagcatggatgctagttcactgtggagttgagatgcattttacataattatgagtttgttcatatgaaagaaaagctgtgggaaaagagtcttgagagattttgtaatatcattctaaatagattaagaaaagatataatttctttactgcagttaaatcatataatgtttgtatgattaaaaataaatttctcagaattgtgattttagtaactttatataaaatgtgtgagacaaaaacttattaaggttaaatagaattgtttcttctgaataatctaacaaaggaaaatataagtgattgaatcataagatataaaggggggtaaagtattagaaataacttttttgtttgataacttgagaatttagaagattttgccaagtatgtgttgttgcttgact

SEQ ID NO: 6157 - DNA, 546 bp, Homo sapiens
  SIMILAR (388)..(2): 961254mologous to Homo sapiens unnamed protein product,accession number AK022941,Smith-Waterman Score=629.
tgccagcccctccaggaagggtttttgcagcatggccaggcagcgaagaggccagagtgctggtagtcctcaagggctgtgcctgtagggccggcttatttaagatgtatccgttgctgccgatgacagaagtctgcacaaagtcgtcgacagtgacgtggttttgcttcgccgcttatgagtctctttttgaaaccccattttccgctatcggagttagtgtgttggtgccatcctgggggttgacccttgcgctgtcctgagtgtgctttgcagcatttgcatgactgctggcatcgctgttttcacaagacccattggtctcaccgtccgcagccatgtgggcctctcctgcctgtttctgtgctgagccttcatcggcagccataggtgtctcttctcccagcagctcggttttcacacagcaatcctgatgaggctcccccctcgccggaagtgcctcggcatcggcgaagaacatggcccgggcacgcagcgtggccccgccacgaaatggtcggcccggtaacaccaatgcggatagtc

SEQ ID NO: 6158 - DNA, 2970 bp, Homo sapiens
  SIMILAR (459)..(2663): 851254mologous to Homo sapiens Human P300/CBP-associated transcriptional cofactor P/CAF,accession number AAW40052,Smith- Waterman Score=3164.
ggggccgcgtcgacgcggaaaagaggccgtggggggcctcccagcgctggcagacaccgtgaggctggcagccgccggcacgcacacctagtccgcagtcccgaggaacatgtccgcagccagggcgcggagcagagtcccgggcaggagaaccaagggagggcgtgtgctgtggcggcggcggcagcggcagcggagccgctagtcccctccctcctgggggagcagctgccgccgctgccgccgccgccaccaccatcagcgcgcggggcccggccagagcgagccgggcgagcggcgcgctagggggagggcgggggcggggaggggggtgggcgaagggggcgggagggcgtggggggagggtctcgctctcccgactaccagagcccgagggagaccctggcggcggcggcggcgcctgacactcggcgcctcctgccgtgctccggggcggcatgtccgaggctggcggggccgggccgggcggctgcggggcaggagccggggcaggggccgggcccggggcgctgcccccgcagcctgcggcgcttccgcccgcgcccccgcagggctccccctgcgccgctgccgccgggggctcgggcgcctgcggtccggcgacggcagtggctgcagcgggcacggccgaaggaccgggaggcggtggctcggcccgaatcgccgtgaagaaagcgcaactacgctccgctccgcgggccaagaaactggagaaactcggagtgtactccgcctgcaaggccgaggagtcttgtaaatgtaatggctggaaaaaccctaacccctcacccactccccccagagccgacctgcagcaaataattgtcagtctaacagaatcctgtcggagttgtagccatgccctagctgctcatgtttcccacctggagaatgtgtcagaggaagaaatgaacagactcctgggaatagtattggatgtggaatatctctttacctgtgtccacaaggaagaagatgcagataccaaacaagtttatttctatctatttaagctcttgagaaagtctattttacaaagaggaaaacctgtggttgaaggctctttggaaaagaaacccccatttgaaaaacctagcattgaacagggtgtgaataactttgtgcagtacaaatttagtcacctgccagcaaaagaaaggcaaacaatagttgagttggcaaaaatgttcctaaaccgcatcaactattggcatctggaggcaccatctcaacgaagactgcgatctcccaatgatgatatttctggatacaaagagaactacacaaggtggctgtgttactgcaacgtgccacagttctgcgacagtctacctcggtacgaaaccacacaggtgtttgggagaacattgcttcgctcggtcttcactgttatgaggcgacaactcctggaacaagcaagacaggaaaaagataaactgcctcttgaaaaacgaactctaatcctcactcatttcccaaaatttctgtccatgctagaagaagaagtatatagtcaaaactctcccatctgggatcaggattttctctcagcctcttccagaaccagccagctaggcatccaaacagttatcaatccacctcctgtggctgggacaatttcatacaattcaacctcatcttcccttgagcagccaaacgcagggagcagcagtcctgcctgcaaagcctcttctggacttgaggcaaacccaggagaaaagaggaaaatgactgattctcatgttctggaggaggccaagaaaccccgagttatgggggatattccgatggaattaatcaacgaggttatgtctaccatcacggaccctgcagcaatgcttggaccagagaccaattttctgtcagcacactcggccagggatgaggcggcaaggttggaagagcgcaggggtgtaattgaatttcacgtggttggcaattccctcaaccagaaaccaaacaagaagatcctgatgtggctggttggcctacagaacgttttctcccaccagctgccccgaatgccaaaagaatacatcacacggctcgtctttgacccgaaacacaaaacccttgctttaattaaagatggccgtgttattggtggtatctgtttccgtatgttcccatctcaaggattcacagagattgtcttctgtgctgtaacctcaaatgagcaagtcaagggctatggaacacacctgatgaatcatttgaaagaatatcacataaagcatgacagtcctgaacttcctcacatatgcagatgaatatgcaatcggatactttaagaaacagggtgtactgcaaagaaattaaaatacctataaccaaatatggtggctatatcaaggattatgaaggagccactttaatgggatgtgaggctaaatccacgggatcccgtacacaggaattttctgtcatcattaaaaaggcagaagggggataattaaaaaactgattgaaagaaaacaggcacaaattccgaaaaagtttaccctgggactttcatgttttaaagatggagttcgacagattcctatagaaagcattcctgggattaaaaaagccaggctggaacccgagtggaaaagagaaaagtaaagagcccagagaccctgacccagctttacagcaccgctcaagagcatcctccagcaggtgaagagccatcaaagcgcttgggccttcatggaacctgtgaagagaacagaagctccaggatattatgaagttataaggttccccatggatctgaaaaccatgagtgaacgcctcaagaataggtactacgtgtctaagaaattattcatggcagacttacagcgagtctttaccaattgcaaagagtacaacgccgctgagagtgaatactacaaatgtgccaatatcctggagaaattcttcttcagtaaaattaaggaagctggattaattgacaagtga

SEQ ID NO: 6159 - DNA, 1192 bp, Homo sapiens
  SIMILAR (1)..(162): 1001254mologous to Homo sapiens p300/CBP-associated factor,accession number U57317,Smith-Waterman Score=288.
ggaaaagagaaaagtaaagagcccagagaccctgaccagctttacagcacgctcaagagcatcctccagcaggtgaagagccatcaaagcgcttggcccttcatggaacctgtgaagagaacagaagctccaggatattatgaagttataaggttccccatgggtaataccattaacattttctaagtatagatttaaaactctggatggcggtgtgggggacaaatggttgctgaggttgatttgtactcctctgcttagggtatgaagtgtatgacgggtggtgggattccatgcaccgtggcgggtcagtgatggcagagaagtgggtggctgtgttcattagagacattcttgcagctgtcgtttaagagcccacatgagcttaacgacactagaccgcagaaaatcccaccggtaactgcagacagcacctagattttgaaagctggcactttagatataactttgcttatattctaactctttggtgcaaatagaaaaacatcagcttatcctcttgatatgctttgcgtctgtcgtaaataggtattcctttgaataattattcaggataataatgaaagaagttagattaaactacttgactgctgtactttcagagggagaaattctacttaccacaattcttgattttccatgcccttgatgggtactgttaatgtcactgtatatactctttattttacgctttgtctcatatccaaaatcaaacaaaaaaggatgtcttcagaaatgtagaattgtgcagtttggtgctgtgcccacaccactctaaaattaatgattaattgaatcatttggaggtcgctcaaattaaactaatttggcattgtgtgggtgaacaaccaagttgaaatgttttctttttatcaagctatgtggccatatttttggagagagccagagtcttctgtctcttttctacctgtaatctattccaggtgctaagaactgtgaaagtccagcttgggtaatgtagtgagaccctgtctctacaaaaagtaaaaaattagccaggtgcagtggcacacgcctgaggccccagctacttgggaggctgaggttggaggatcacttgagcctgggagtttgaggctgtagtgagctgtgattgcaccactgcacttcagcctgggcactggagggagaccgtatctaaaaaaaaaaa

SEQ ID NO: 6160 - DNA, 1006 bp, Homo sapiens
  SIMILAR (121)..(231): 941254mologous to Homo sapiens Human secreted protein encoded by DNA clone vo12 1,accession number AAB34714,Smith-Waterman Score =182.
atattttttaacattttaagtttaacagattgtattcctttcaagtttctatacttgcttaagcaatcttgatttgagtaagggtcttgatttgtgctattatgttctgttagttttggcatgaatatactaaagcttttttttttttttttagcatgtgttttctcctctttggttctctttgtatttactacttttctctttttcttgtgtttttttttttcctgtttttgttttgtttggtgttttgttcctgtcttcattgtttcaggtatttctttacccctctggattccccacgggctggatcgagatggtccagttatgcccagctccttcctcctcctcctcctcctctggtagagcactcttgcgattgctgacactgccaacctccagtatcctcaccctcgcagacgatatctctctcggcctcttaatcccttacctgagaatgaagggatttaaaacactgatttaacattgaaaggccttattcaagtgcttgtaaatgctttcatttcggggctgcctttttggtttttccattttcctttcaggaagattttttctaactttagggtctgtcttgccatgtaattaccaacccagaataacagtgtttgggaacctaaaatctgtttgtggcgtctgcgtctgaaatcaaaaggaacatttgccttcacctgggtgaataaccctttgatgaaaatgaagatatgtcccaagtaacggttaactgtgaagttacacacagtagcctgacttcaaagtgccctgttcctgtaaattttattttaaactgttaccatagtccttaagttgtttatgcctttatccagactggctaaatgtggaaaggcataatattatggaagtttattctgccttatgagaccttaaaaaatggatttcattttacaggctaatgttgtaactgacgtagtatgtaaaataaatcattcctgtgtataaagcagcaaaacccaaaaaaaaaaaaaaaaag

SEQ ID NO: 6161 - DNA, 1742 bp, Homo sapiens
  SIMILAR (639)..(1133): 771254mologous to Homo sapiens hematopoietic PBX-interacting protein,accession number AF221521,Smith-Waterman Score=623.
ctaacacaagtccctttcctggtccggaccctggctttcctggccctggtggtgaggatggggggaagcccgttgaatccacctgcttctactgcttttccccaggagccccactcaggctccccggctgctgctgttaatgggaaccagcccagtttccccccgaacagcagtgggcggggtgggggcactccagatgccaacagcttggcaccccctggcaaggcaggtgggggctccgggccgagcctcccccaggcttggtgtacccatgtggtgcctgtcggagtgaggtgaacgatgaccaggatgccattctgtgtgaggcctcctgccagaaatggttccaccgtgagtgcacaggcatgactgagagcgcctatgggctgctgaccactgaagcttctgccgtctgggcctgcgatctctgcctcaagaccaaggagatccagtctgtctacatccgtgagggcatggggcagctggtggctgctaacgatggcccatctgttgcacattatactccgtgtgttcttcaactttcggcgcccttattcccctgccttcctggcttgattgaaggaaagcttgaaaaggcgcagagccctatacctcatttcctccatgataaaaggatccaaagcctgccagtggagacactgggcccggcatccaggatggacccagaatctgagagagccctgcaggcccctcacagcccctccaagacagatgggaaagaattagctgggaccatggatggagaagggacgctcttccagactgaaagccctcagtctggcagcattctaacagaggagactgaggtcaagggcaccctggaaggtgatgtttgtggtgtggagcctcctggcccaggagacacagtagtccagggagacctgcaggagaccaccgtggtgacaggcctgggaccagacacacaggacctggaaggccagagccctccacagagtctgccttcaaaccccaaagctgtgaattatgcaaagggggccggcaaaggaagggtgcgagccggagccgccgccaccgctgccgcccctgactcacgccgcccccgggctggcgcagcgaagggtgtgggacagggtctctttcagctcctggtgaaccccatgaacatctacgaagaacagaagattatgttcttgtacagcttggttccctcgacccaggaccccctgttcccaggctatggcccccagtgccctgtagacctggcaggccccccgtgcttgcgacccctatttgggggtctgggtggctactggagggccttgcagaggggcagagaaggcaggaccatgacatctagggcctctgaactttctccggggcgcagcgtgacggctggcatcatcattgttggagatgagatccttaaggcaccgtgtatgaaatctaacaatgcgctcatcgtcatcctcggcaccgtcaccctggatgctgtaggcataggcttggttatgccggtactgccgggcctcttgcgggatatcgtccattccgacagcatcgccagtcactatggcgtgctgctagcgctatatgcgttgatgcaatttctatgcgcacccgttctcggagcactgtccgaccgctttggccgccgcccagtcctgctcgcttcgctacttggagccactatcgactacgcgatcatggcgaccacacccgtcctgtggatctacccactagtcaattcaccatcttgttga

SEQ ID NO: 6162 - DNA, 1944 bp, Homo sapiens
  SIMILAR (1683)..(1943): 961254mologous to Homo sapiens Human secreted protein sequence encoded by gene 45 SEQ ID NO:215,accession number AAB56121,Smith-Waterman Score=470.
cgtgagtgcacaggcatgactgagagcgcctatggcctgctgaccactgaagcttctgccgtctgggcctgcgatctctgcctcaagaccaaggagatccagtctgtctacatccgtgagggcatggggcagctggtggctgctaacgatgggtgacgctggtgaagtggcccagggaagtgcacatgtctctccctgctcttcccagggtgatttttttgatgtttggctcttggtccttgtttccactggctttccatacccatggggcagaaacagttggctcctgggagcagaaaaggaattgaggtgggcaggcagaagagcctggattgctcactgttttgggaaacttacatgttgagatctacagagatccaggaaaccaaagccctgctgagcagagccattttgtggctatttctggaggcccaggagtgtggctgcaagagaaaaggggctggaggaagatccggagggcaggggtgttccctctgctgatgatggatgcccctaacacctgtgcctaacacccctactgaaccccacagctccagccttagtttttggagtcaagtgttaaaggtttctggccagaggaattggggtcttgccatccctgcaatagcccttttatgggctctgggagacagctttagggaataaatggggattttcccctttttctacccactcctttgcttcctccaagacttacccaactccttccccctcagagaaccaaatagcctgaggaagcaggagagttcctggttatggcagtttcttggtgatttggggcttcaagacagtaggtgagagatgctgtcaggacgtatcttcttcataccaaagtcactggtcctttctcagcctctctccgtgcttttctcctaatgaccatatttttgccaaaaattgggatatgttatctgacagaccagaatatttgaagtttgggctgtcctgaaagtctggactttggtggtaccctcctcccccagcccatctgttgcacattatactccgtgtgttcttcaacttttcgcgccctttattcccctgccttcctggcttgattgaaggaaagcttgaaaaggcgcagagccctatacctcatttcctccatgataaaaggatccaagtgaggccctgtcacagcctgtgggtaggggatgcggcgggatcctcattgccatggtactcaaaggtagaagagcctggagtttgttgcttctctttgctattctttcatatcctcttgggcctggtgattaattagcaattctcattcctctcagccaaaggcctgcactgggctttatttggctttttttattttttaagcactgcctgccagagatgggcctggggcctgatgaggaccttagcgctgctcgttctccttttctgttcatgcacacattcctccatggggtggggaaggcaggcatggggtgtggccctcggagaagttaggagtcccccagctcaagatacagtggcaaaagacctagtggtcccctacccccacttcttctcagttcctgggcatgaggagagaagaccctgcttctggtgggagctgaacaaccttttgaggcttggaggagagccagcgtctggggcattctttcccagttttccctcacaataaaacggggtagcatggcaaccccccccccacccccccccgtgctcaactcttgtgtttgttgttctgtttgccccatttatctgttgctgtttttgtgttgtcttcccctgctccgcattttgtaaaatggcccctgggggagtgtttttgctggatctgctccctctcgctctctcactccactactttttggaacaaagtgatggcagaatgcggtggtggtgggggtcttttgtactgttggattaataaaatgattttaaaatcccaaaaaaaaaaaaaaaaaa

SEQ ID NO: 6163 - DNA, 1988 bp, Homo sapiens
  SIMILAR (1)..(198): 1001254mologous to Homo sapiens Human secreted protein encoded by gene No. 34,accession number AAY38419,Smith-Waterman Score=334.
  misc_feature (1)...(1988): n = a,t,c or g
attgacaactatggaaccaagcctgggaacatcttcctgtgtgtgttccttactcttggagcagccctcactgcattcattaaggcagatctccggagacagaaagcaaacaaagaaactcttgagaacaaactccaagaggaggaggaggagagcaacaccagcaaagtgcccactgctgtgtcagaggatcatctctgagaggaaggtggtgacaactcagggaacacgaacaccccaccttttccttcagcacagctctcaccgccagcacaaagggctttcgcttagagatgtttttggagggaatcagtgggactatttgtgggcatggatggcctatttcctcctaggaacccacgtaagagctttggatgatttagttggagaaaattgcacctatcaccaaatgcaaatttgattcccacctccacccccttttaggttatgggagttggtgttgggacagggtggcagagaatattggagtcaatcctagcttggtctcttgccttccctctttttcttccatccattcgtggacaatgcctgcaaaattttcacaggaagaaagcctattcaggatattaacttgaaatttccagtgtcctaagagcctctcatgaagcccagttctaataagtggcaagctgctctgccggggtcatctcctggggtcatcggactgattgctcaagttctgcaggagaggaagcaccattaggaacaactccattcagaacagctccaccgggacttgtgggcctaaattttcctggcctaacgggtctgtctccaaaccctctttcctaagagctgagcaaaccaaccataataaacttgacaaaagactttgttgtggccatgacagagataccgactcaggagggctacctacctaggtgtgatcatgctgggggctaccttctgagtatatttgtggaaagcacatatttgggaactctggtagcttgagttggggaatgggaaggttctttttttacagaagtaatttccccaggggacttctgtgtgtcacagtcacctctggatgcctttatcttgatgttgcattggggaatctcagccatcagcccaagtgcttgttttattccaagggcaggggtaatcccccgttcaacttactctaacctttgctggaaaactaatcttgattcattctactctggaaaatccaaaggtgcttctgaggagataagaagggaagggggtaagaaggaaaggtgcccctttgaaatggggaattgagcccgttaagaatttaaaagcttatctcacctctgctggggacagtatttgcaaccaccaacccctctcctcacctgctttgaagcgataatcctttatcagatattctaaacttaaagggattccctttaaaccaactcaagctgatctttcctatctagcctgctgtttggctgtacttcatgggctttggtaatatctcctaaaaatgaggttttggtaatttttcctatgcattgggccaactgtgaaccgtgaacccactgtgcctgtccttgcctccccagcccactgcccccggccctcagccatatccagggggcagccctgtgcctggcctgccaatacctgtggggngcttgggcccacctgccctgagaggagccccggtttgtgtgtgtcctgccatgtgtgtgtgtgtgtgtttgtacagattcaagcaatgggatgcaaggaacatgctgtatgtaattaggaagaaagaagtccacgtttttcgggcagaagttagtgagttcagtgtggaggagaggtgagggtgtgcttttactttttgataaagagaaagatgtttactcataaacccctcaaaagggtattaacaaaatgtttaccaaacctattgctttattttaaaaacataatttgtgttttctatttgtaagatctgacatttcgaggcaataaaaacttctcagaaaaaaaaaaaaaaataaaaa

SEQ ID NO: 6164 - DNA, 2248 bp, Homo sapiens
  SIMILAR (507)..(692): 981254mologous to Homo sapiens Human secreted protein, SEQ ID NO: 6930,accession number AAG02849,Smith-Waterman Score=301.
atggatcaaggacacaaatctaaaacctgcgactataaaaattctaaaagacgacatcggaaatacccttctagacaatggcttaggcaaagacttcatgaccaagaacccaaaagcaaatgcaacaaaaacaaaagtcgccaaggaaaacaatgcagtgaaacactgggtggaacacacattactcacatacagaagagacagagcaagatcagcttccctagtggacttcagtctcccatgaccagagggtccctcttggcagctgacacagggcagcccggcgttaagcggaacttctctctccagctgtgtctcttagcaactaagcccccggctcctccagaagcccctcttcgcacatgcgcaaactgcggacgggaaactgggctccctagccctggcgtttttggtgttgctgtcccagccagaatcgcgtctggccggtgggaagccgggaactccagccccctgtaggagaggagaaaggagcgagatcatgatacatggtgatggcttgcagagtcgtaaacaaaagaagacacatgggacttcaacaactttcatcattcgcggaaacaggaagaactttcctaggcccactaaaatcatccaaatttattatagatgaagaatgtcatgaaagtgtattaatcagttcaacagtaaggcttcttgaaagtttggatttaaccagtgcagtgggacaacttctcaatgaagcagttcaagcacaaaacaacacatatagaactggaatcagtactcttttgtttcttgttggtgcttggagcagtgcagttgaagaatgtcttcatcttggtgtccccatttccataatagtatcagtaatgtcagaaggcttacacttttgtagtgaagatgtagtttctcttcatgtacctgttcacaatatatttgactgtatggacagcacaaaaacattttctcaacttgaaacatttagtgtaagtttgtgtccttttctacaggtcccttcagatactgatttgatagaggaattgcatggtctcaaagatgttgcctctcaaacactgaccatttccaacctttctgggagacctcttaaatcatatgaattatttaaacctcagacaaaggttgaagcagataacaacacatcacgaactctgaaaaacagcctgcttgcagatacctgctgcagacagtcaatactaatccacagtaggcattttaataggacagataatactgaaggggtaagcaaaccagatggatttcaagaacatgttacagctactcacaaaacttacagatgtaatgatttggtagagttggcagtaggcttgagtcatggagatcacagcagcatgaagttagtagaagaagcagtacagctgcaatatcagaatgcttgtgtgcaacaaggcaactgtacaaaaccatttatgtttgacatttcaagaattttcacttgctgtctaccaggcttacctgaaacttcttcttgtgtttgtccaggatatatcactgttgtgtcagtatctaataatcctgtgatcaaggaattgcagaatcagcctgtgcgaatagttctcattgagggtgacctcacagagaattaccgccacctggggatttaataagtctggcaaatatttaaaacagtattaggataggcatgcgggctttcaaggaggacagcttcaggaaggaactgtgggggcaattcacgtgtttacaggtgttaatccagttcaaggtgaaccttgtcctggtacaaggaaatgtgtccgaacgcttaattgaaaaatgtataaacagtaagcggttggtaatcggctcaatgaatggcagtgtgatgcaggcttttgcagaggctgcaggagcagtacaggtggcctacattacacaagtgaatgaagattgtgtgggcgacggggtctgcgtgaccttctggagaagcagccctttggatgttgtagataggaacaacagaatcgcaatcttattaaaaacagaaggaattaatttggttacggccgtgctcactaacccagttactgcacagatgcaaatcaaagaagataggttctggacatgtgcctatcgtttgtattatgctctaaaagaggaaaaggtcttccttggaggtggtgcagttgaatttttgtgtcttagctgtcttcatattcttgcagagcaatctctgaaaaaagaaaaccatgcctgctcagggtggctgcataatacttcctcttggctg

SEQ ID NO: 6165 - DNA, 939 bp, Homo sapiens; identical to SEQ ID NO: 1576
  SIMILAR (145)..(249): 771254mologous to Homo sapiens Human secreted protein, SEQ ID NO: 5327,accession number AAG01246,Smith-Waterman Score=134.

SEQ ID NO: 6166 - DNA, 1026 bp, Homo sapiens; identical to SEQ ID NO: 1577
  SIMILAR (145)..(249): 771254mologous to Homo sapiens Human secreted protein, SEQ ID NO: 5327,accession number AAG01246,Smith-Waterman Score=134.

SEQ ID NO: 6167 - DNA, 3105 bp, Homo sapiens
  SIMILAR (57)..(2180): 1001254mologous to Homo sapiens Caco-2 oligopeptide transporter,accession number AF043233,Smith-Waterman Score=3661.
ccacctgccaggagcacgtcccgccggcagtcgcaggagccctgggagccgccgccatgggaatgtccaaatcacacagtttctttggttatcccctgagcatcttcttcatcgtggtcaatgagttttgcgaaagattttcctactatggaatgcgagcaatcctgattctgtacttcacaaatttcatcagctgggatgataacctgtccaccgccatctaccatacgtttgtggctctgtgctacctgacgccaattctcggagctcttatcgccgactcgtggctgggaaagttcaagaccattgtgtcgctctccattgtctacacaattggacaagcagtcacctcagtaagctccattaatgacctcacagaccacaaccatgatggcacccccgacagccttcctgtgcacgtggtgctgtccttgatcggcctggccctgatagctctcgggactggaggaatcaaaccctgtgtgtctgcgtttggtggagatcagtttgaagagggccaggagaaacaaagaaacagatttttttccatcttttacttggctattaatgctggaagtttgctttccacaatcatcacacccatgctcagagttcaacaatgtggaattcacagtaaacaagcttgttacccactggcctttggggttcctgctgctctcatggctgtagccctgattgtgtttgtccttggcagtgggatgtacaagaagttcaagccacagggcaacatcatgggtaaagtggccaagtgcatcggttttgccatcaaaaatagatttaggcatcggagtaaggcatttcccaagagggagcactggctggactgggctaaagagaaatacgatgagcggctcatctcccaaattaagatggttacgagggtgatgttcctgtatattccactcccaatgttctgggccttgtttgaccagcagggctccaggtggacactgcaggcaacaactatgtccgggaaaatcggagctcttgaaattcagcccgatcagatgcagaccgtgaacgccatcctgatcgtgatcatggtcccgatcttcgatgctgtgctgtaccctctcattgcaaaatgtggcttcaatttcacctccttgaagaagatggcagttggcatggtcctggcctccatggcctttgtggtggctgccatcgtgcaggtggaaatcgataaaactcttccagtcttccccaaaggaaacgaagtccaaattaaagttttgaatataggaaacaataccatgaatatatctcttcctggagagatggtgacacttggcccaatgtctcaaacaaatgcatttatgacttttgatgtaaacaaactgacaaggataaacatttcttctcctggatcaccagtcactgctgtaactgacgacttcaagcagggccaacgccacacgcttctagtgtgggcccccaatcactaccaggtggtaaaggatggtcttaaccagaagccagaaaaaggggaaaatggaatcagatttgtaaatacttttaacgagctcatcaccatcacaatgagtgggaaagtttatgcaaacatcagcagctacaatgccagcacataccagttttttccttctggcataaaaggcttcacaataagctcaacagagattccgccacaatgtcaacctaatttcaatactttctaccttgaatttggtagtgcttatacctatatagtccaaaggaagaatgacagctgccctgaagtgaaggtgtttgaagatatttcagccaacacagttaacatggctctgcaaatcccgcagtattttcttctcacctgtggcgaagtggtcttctctgtcacgggattggaattctcatattctcaggctccttccaacatgaagtcggtgcttcaggcaggatggctgctgaccgtggctgttggcaacatcattgtgctcatcgtggcaggggcaggccagttcagcaaacagtgggccgagtacattctatttgccgcgttgcttctggtcgtctgtgtagtttttgccatcatggctcggttctatacttacatcaacccagcggagatcgaagctcaatttgatgaggatgaaaagaaaaacagactggaaaagagtaacccatatttcatgtcaggggccaattcacagaaacagatgtgaaggtcaggaggcaagtggaggatggactgggcccgcagatgccctgacctctgcccccaggtagcaggacactccattggatggcccctgatgaggaagacttcagaattgggaactaaaccatgaatgctattttcttttttctttttcttttcttttttttttttttttttttgagacagagttttgctcttgttgtccaggctggagtgcaatggcacgatctcagctcactgcaacctccgcctcccaggttcaagtaattctcctgcctcagcctcccgagtggctgggattagcggcatgcaccaccacgcccagctatttttgtatttttagtagagatggggtttcaccatgttaaccaggatggtctcgatctcttgacctggtgatctgcccacctcggcctgccaaagtgctgggattacaggcttgagctaccgcgcccggccgtgaacgctattttctaagcagccagcagtgaatctaaaactctggaagaagtcttctgtttgaaaggcttatttaagccacacgtacacacactgtcttagagtactgtgagcccaccccacattggtcatcttccctatcacacaaatgatgttattttggactagcttaattttgaaatggtaacaaagtttcctattccatactgttcatttctaatactcttacgaaaactattctaaaggaggcaggagccaaggccaaaagtgaacgtacaggtttaaaatggctgtgataagggccagctggtattaactgataactttacctttgggtttttgttattttgtttttctagtccctacctgtgtttaaattatggataactcgaaagacaggctcaggtgaaggccgagtaatgattttttttgaagtttcaatggtgtgaaataaatttctgttctta

SEQ ID NO: 6168 - DNA, 389 bp, Homo sapiens
  SIMILAR (33)..(386): 771254mologous to Plasmodium falciparum Polyubiquitin,accession number AJ133813,Smith-Waterman Score=447.
cggacgcgtgggtcgacccacgcttccggcttatattcttgaagaccctgactggcaagaccatggctgtcgacttggagccgaatgacaccattgctaatgccaaggcatagatccaagacaaggaaggcattcctcctgaccagcagaggttgatctttgctgggaaacagctggaaaatggacgcaccctgcctgactacatcatccataaagagtccaccctgctcctggtgctccgccttaaaggggggatgcagatcttcgtgaagaccctgactgcgtaaaccatttctcttcaagcggagccgagcgacaccatccacaatgtgtaggaaaagattcaagacaaggaaagcattcctcctgaccaacacacggtgatcttg

SEQ ID NO: 6169 - DNA, 1275 bp, Homo sapiens; identical to SEQ ID NO: 3098
  SIMILAR (751)..(1269): 941254mologous to unidentified bacterium transposase,accession number Z78058,Smith-Waterman Score=825.

SEQ ID NO: 6170 - DNA, 4437 bp, Homo sapiens
  SIMILAR (4175)..(1656): 1001254mologous to Homo sapiens Dsc1b precursor,accession number X72925,Smith-Waterman Score=4415.
cacaaatttattttatttattttgttctttttcatatgacactgttaaaacattcctactacagcaatactgctctccaggagcttacaatctaaaacagtcaacattaattgtagacccagtaattaaggcattatatcaaatgcagactttgtatcttttttttttttttgagacggagtcttcgctcttgttgcccaagctggagtgcagtggcgcggtctcggctcactgcaacctctgcctcccgggttcaagcgattcttcctgcctcagcctcccgagtacctggtagctgggattacagtcattcgccaccatgtccggctaatttcttatatttttagtagagtgggggtttctcatatacattctagtccctaattctgactgcccattttcttaaagtaactgtaaatttaggctgagtcttaagttctaatacagatggtaattcaatttctggcatattcaaggtgctagtctctgtatatcagagttgcagcctaatgcatcagggctagttgtccaaatgcttggagatggcaggtggcaaccacagataaggcaggcctatgtcaaactcaagagtgaatgtttttgctaaagtatttatatttttaaaatgttagtagtaaaccatgttgagcaaacgaaacatatttgtgagcataagtcaacccatggacctcagggctgcaattctttcatggaaatcttctcatgtaatcttcataaaatctctgcccctcaatttgctatgagcttgttctggtccttatctttccaagaaccttagaagttggagtgacctaacaacaaatccacatgggcagaggtccagggactgagctctgaaggatcctgaaagaaaacaatgctgggagcactgctctgaggagtacaaaagtgtaaaagagaaatgaacttaatcacaaaactgaagattgcactgaagaatacttaaaagtcctttttaaaccactcaggtggagagaatgcaattatctggcaccaactatgttctaagaacataattctccccaagattttgaagaacatatttaattcgtacatctacaatgcaaattcatctttcattggcctctataatacccagctttcccaaatgctcttccacagcacaaaaagtaacatcagtttgcaaataaaaggtgcaagaaggtgtacagtacagtcgtgaaaagggcaatatatacatgcatataaaagagaattaacaaacaaaaccttgatttctagagaacatggaagttataccagacaaggagaatgtaggggaatctcatatttatagtacccttacctatacatgacaaagtttacctccataaacaaaaacattagcagatgctgctaacattctgcaagtaataaattcctacttatgcatctgtggatattacactattaaaaggcacatttatttcttgatgcatgtctttgctaatgtcctaaatttgggttccaggtgatctagaaactccagtccctcttcttcctgccgatcgctgcagcaacctactgagccggccagagaacctttgccttcatagttatacgaacaaacgtagtcttcacaatgtttatgctcctcatcttgtccacacaaatacaccttcttttactgtttaatttttaatcagagtgtgtcctctaatggattcttcgccaagccgaggttgggtgaaactctgccagtccgtgtacgcatatctgccagtatctccctgccccactcccttgacggactccaaggtctgatgtccacctcctttgttggaatccaaagtgtagcctcctttgaccatctcaaaactttgctgtgttttgattccctggccaccaacagtaccaacagacatgcttgtgtcacaaatgttggatgtctgcatggggagtctaatatttgcttccgttacttcttctccaggtccttcagtatttgatacaattaaattttgctgggctatgtcttctggaaaacatttcttgactgttctcttagcagtgacacagaaacatgtaaacagaatacataataacaatacagaacccaacaccatagcaagaatagcccatcttccaagtattacatttggtctaacgtctcttgtacttttatccttcattctacactcagatggagttgaacagtcacatactctcactgttaacatatgtgttgcaactaaaccatgcctgtcttttatttgaataggcacagaataatagttataatcaagattttgccgttgacgaagaatggcagttttaccatccttttcttctatgttccagtttttactggcagaattatccagaaagaattgaaaaggtggtccattttcaggtccatctggatctacaggtttcagaacagcaaaatcctcattattctgacaaatggtcacttctttgtcaatttgaggtgcgtgatcgttgtaatcatccaaatgaactactaatgttccagtgcaagatcggccaactgcatccactgcaacaactgaaatattgtattggttgttttttacaaatttggattctctatctagtacttttagagttctcaagtcgccagtgtgttgattaatttcaaaccagttatcttcatcccctaacttctgataccttaagccttcaccactggatatttccgggtccagtgctttgtatccaaggagttcttggccagctgggaagccatcttgactctgaataactttcactggagggtggcattcagggccctcatcactgtctataattttaacggtgacagttgtagtgcacattgtaggagtttgtgagctcgctgctttagagaattgtgcctcgttaatgacaccaacttgcaaaataacttggcgattgacttcatagttcaatggcttgacaacacacagcactccttcatttgtatttggatctgtgctaattatgaagtttccattttcatttccttgtaagattttgtatacagcctttgagtgaggagtgtttggcaaatcctgatcctgtaccttcattcgcaaaatctccacgtcaattctgttttcttctacttctgtaacataagaagtttctgtgaaagatggtggattgtcattttcatcctcaagtgaaatagtaattgttcctgtattaaataaaccgaaaggctgaccacccatgtctcgcacttccattattaactggtaagtatcacatttttctctatccagaaaaggtgtagttgtggtgatgacaccggtatctgggtgtatggagaaatgctttggatgatctgggatttgttgtaagattttatatttcagacgagtatggagagtgtcaggttcgtcaaggtctgtggcggtcacttttcccactgaagttccggatcggcaattttcaggcacagtaaagatagtcactctgtgttcaaaatatggggcgttatcattatcatcttcaattttgatgatcaaagggagtggatattctggtgcatagccatctgcagttgttgcatagccatataacgcaaactgttcgtatttctcacggtcaatgctccttgtacaaaagatatccccagtgtctttctctatgtaaaacaaattgaagggttctttgtccacgcctggcccacttatggaataaaagatggtgtaattctgtgcagcatcagattggatctgctgaacgtgttgtggaaatggacccaacgagttctccatcaatgaagctggaataggagcccatcgtctcttgctgcgcttgagggctgtgtctttggtatgtctcttcttaggagacttgttttctcttgctgacagtacaacttttatctcttgttgttcccgtctctgaccatctgaaaggaaaatggaaaaacttttcctttcagaagacaaaatgaggtcatgtgttgtgtaaattgagccatcttctagaattctgaaggcagggtcactggaccggattaggctggccgacttgagacactcctccagattcactttgcctacaagtgtttcagcctgaagatgagaaggaactcgaagataaactttctgacaagcatcgcaaagtaatgttaaaaccaggagagagaaaaggagctgcttacagaagatgctccctggggcagcagaggccagagccatcagaagcagtcccaatggccagggacggtggccagataacagggcagcctgggatgcacagagcggctaagaagacgctggcacttgcacagggtattctgctgccaccttgatgcagctgagcttggtttggaagacagtccggaggcaagtgataaacagtaggaggagcaacgggagaatttctttccccctattccctggccagtctccttccttccagttcaattacgtctaaatgcaaagaggctttcctacaagt

SEQ ID NO: 6171 - DNA, 428 bp, Homo sapiens
tcacatataagatccttgactttattgtaaattccattaggcatagaagaggaaccccaaggtttccaggacatactgaggtcacatctatgacccttgactttattggggctggttaaagaatttacagtaacctgcatcaacttagccaggggatcaatactaaatttagctccttcaaagcacctgaaactatgtgctacataaatttcagcttcccacctggaagggaaggagtgaaattagtgaacaggcagtttcagcaaaagaaaaaacataaaaatcgaatagctggctctggtgaaatgagcaaggactttagagtcaaactggcctggatttgaatcctgatcctcattagcttgagctgtatgatctggacaaatgacagtaacttgttctaacctggatttcttatcttgaagaag

SEQ ID NO: 6172 - DNA, 408 bp, Homo sapiens
  misc_feature (1)...(408): n = a,t,c or g
ngttccttcccaaaatccccaaggaggcaattttcccctccccaaggtgtttaaaggagggccaggcccaggagtttatgtggtctcccttaacgaaagaaattttcagttgcccaacccctcaaacttgcggggcctttaagggtactttaaaacgggcccccccnnnnnnnnnnnnnnnnncggtaaagataggatnnnnnnnnnnnnnnnnnnnnnnnnnnnnnnnnnnnnnnnnnnnggtttcccctcggcctctaagtgccagggtgttagccccatgcctgggctgtgatttttttgtttcttttaatcgaactactgtgtggaagtaaaacatgaaagttgagtaattttctccagcccgtagtttgcttgctaacaagtaatggattaattagctttacg

SEQ ID NO: 6173 - DNA, 1502 bp, Homo sapiens
  SIMILAR (76)..(138): 541254mologous to Homo sapiens Human myelin oligodendrocyte glycoprotein gene,accession number AAZ29204,Smith-Waterman Score= 58.
gggttcaggtggttctcctgcctcggcctcccgagttgctgggactacaggcatgcgccaccacacccagctaatttttgtatttttagtgacagggtttcaccatgttggccaggctggtctcaaactcctgacctggagtgagccactatatccggcctttataaacttttttgattcttgtcataacacttagcctaaaatgcaaatgtacagctgtagaaaaatactttatttctttatatccttattctagaagctttttttctattaatttttgtttgtttgttttgttttactatttacttctaaaacttttttgttaaaaaccatggcacaaacacacacattatgctaggcatacaaaaggtcaggatcatcagtctcactgtcttccacccccacttctcatcccaccattgtatctgctgtctgtggctgaccaaaacatcatcatgtagcacatgactagtgtggcaagtgctctgttagatgtaaggccatgatgctaaagcatcacaagagggcatctaacccagattggggatgtcatggaaggccgacatcctgagttgaatcctgcaaatgtaaaaaccaataggcaaagaagaggaacaaaaaggattccaggacaaactgaggtcacatctatgatccttgactttattgtgtctgtttaaagtatctacagtaacctgtatcaacttagtcagtgtattaatactaaatttagctccttcaaagcagttggaactatgtgctacataaatttcagcttcacacaaggaagggaaggagtgaaattagtgaacaggcagttacagcaaaagaaaaaacataaaaattgaatagctggctctggtgaaatgagcaaggactttagagtcaaactggcctggatttgaatcctgatcctcattgcttgtagctgtatgatctggacaaatgacagtaactgtttctaaccttgattttctcatctgtaagatgccaattgtaactcctaaggatactgaggatttttttaaaatgcgtgtacagttcctgaccagtggtttgtgcctaataacttattacaaattattacccagtaaaaaccttgagacaagagtgaaaacgtaaagctaattaatccattacttgttagcaagcaaactacgtgcttgagaaaattactcaactttcatgttttacttccagacagtagtttgattaaaagaaaaaaaaaaatcacagcccaggcatgtggctcacaccctggcacttggaggccgaggtgggagcatagcttgagcctagcagtttgaaactagcctgggcaacatagatcctatctctacaaaaaaaaaaaaaaaaaaaaaaaaaaaaattggcccggtgtggtggtgcatgcctgtggtcccagctactcaggaggctgaggcgagaggatcgcttgagccagggaggctgaggctgctgtgagccatgatcatgccactgcactccagcctggacaacag

SEQ ID NO: 6174 - DNA, 2873 bp, Homo sapiens
  SIMILAR (37)..(1665): 311254mologous to Drosophila melanogaster ring canal protein,accession number L08483,Smith-Waterman Score=666.
atggctctaaaaggacaagaagattatatttatcttttcaaggattcaacacatccagtggattttctggatgcattcagaacattttacttggatggattatttactgatattactcttcagtgtccttcaggcataattttccattgtcaccgagccgttttagctgcttgcagcaattattttaaggcaatgttcacagctgacatgaaagaaaaatttaaaaataaaataaaactctctggcatccaccatgatattctggaaggccttgtaaattatgcatacacttcccaaattgaaataactaaaagaaatgttcaaagcctgcttgaggcagcggatctgctacagttcctttcagtaaagaaggcttgtgagcggtttttggtaaggcacttggatattgataattgtattggaatgcactcctttgcagaatttcatgtgtgtccagaactagagaaggaatctcgaagaattctatgttcaaagtttaaggaagtgtggcaacaagaagaatttctggaaatcagccttgaaaagtttctctttatcttgtccagaaagaatctcagtgtttggaaagaagaagctatcatagagccagttattaagtggactgctcatgatgtagaaaatcgaattgaatgcctctataatctactgagctatatcaacattgatatagatccagtgtacttaaaaacagccttaggccttcaaagaagctgcctgctcaccgaaaataagatccgctccctaatatacaatgccttgaatcccatgcataaagagatttcccagaggtccacagccacaatgtatataattggaggctattactggcatcctttatcagaggttcacatatgggatcctttgacaaatgtttggattcagggagcagaaataccagattataccagggagagctatggtgttacatgtttaggacccaacatttatgtaactgggggctacaggacggataacatagaagctcttgacacagtgtggatctataacagtgaaagtgatgaatggacagaaggtttgccaatgctcaatgccaggtattaccactgtgcagtcaccttgggtggctgtgtctatgctttaggtggttacagaaaaggggctccagcagaagaggctgagttctatgatcctttaaaagagaaatggattcctattgcaaacatgattaaaggtgtgggaaatgctactgcctgtgtcttacatgatgttatctacgtcattggtggccactgtggctacagaggaagctgcacctatgacaaagttcagagctacaattccgatatcaacgaatggagcctcatcacctccagtccacatccagaatatggattgtgctcagttccgtttgaaaataagctctatctagtcggcggacaaactacaatcacagaatgctatgaccctgaacaaaatgaatggagagagatagctcccatgatggaaaggaggatggagtgcggtgccgtcatcatgaatggatgtatttatgtcactggaggatactcctactcaaagggaacgtatcttcagagcattgagaaatatgatccagatcttaataagtgggaaatagtgggtaatcttcccagtgccatgcggtctcatgggtgtgtttgtgtgtataatgtctaattgaatctgcagaaatgaccaagcaatcacttttttggagtatagttttataaaaaaagaatgcagggtttgaagttccttacctgataattgtgtctggcacatgataggggatcagtaaattgtaattcctaaccctactgtactcccaaacatggtgattcatggtcaagaaaaatcttatatatatatgtatacacgcgtgtgtatgtgttcatatatatgtatacatatatgtgtatatatacgcatgtatgtatgcatatatgtgtatatatacgcatgtatgtatacatatgtgtatatatacgtatgtgtgtatgcatatatgtgtatatatatacgtatgtatgtatacatatatgtgtatatatatgcgtatgtatgtatacatatatgtgtatatatgcgtatgtatgtatacatatatgtgtatatatacgtatgtgtgtatacatatgtgtgtatatatacgtgtgtatgtatacatatatgtgtatgtatacgtgtgtatgtatacatatatgtgtatatatgcgtgtgtatgtatacatatatgtgtatatatacgtgtgtatgtatacatatatgtgtatatatacgtgtgtatatatatacacatatatacgtatatatgtatatatatatacacagttgaatcagtgggattaaaacctaataatctctggttttcaaaggtaatatggaatatttgacacttggtaaaaggtgaactacctttgtagtgaatcttttcctcttggtagcatcaacactgggggtaaaatcacacccattctggggaatgaaatgtttctcaagagcctataatatagtagatagtgcatattaagatgtctggctgggcatggtggctcatgcctgtaatcccagcactttgggaggctgaggcgggtggatcacctgagagcccaagcttcctctgtgcccaacagccactttctagaaaccggcaacctctgtccccgtcatcgtctgtgtttgttcctccgcaaagcccgagcttcctctgtgcccagccacctacacagaacatcatgctggtcagccacattggtggtatcatgctgctcgagtctggtgagctggaagtagcaaatatctcagagaggagagatcaacccacactaactcaggacctcgcgaccttgttgaaatgtccagggatccagtga

SEQ ID NO: 6175 - DNA, 1040 bp, Homo sapiens
  SIMILAR (1)..(159): 1001254mologous to Homo sapiens voltage-gated sodium channel beta-3 subunit,accession number AJ243396,Smith-Waterman Score=267.
tacatccttctggtcttcctcaccttgtggctgctcatcgagatgatatattgctacagaaaggtctcaaaagccgaagaggcagcccaagaaaacgcgtctgactaccttgccatcccatctgagaacaaggagaactctgcggtaccagtggaggaatagaacaggagcagtgtgacatgaggtggcctgaacacctgagggactggacatcccatgttcagcaatgtcaatggcatcaggagggcgccccaagggccccatcgcttcccttcatgcatccattgttctgttcattcattcatccatacatccacctgcctctgagctttcacctctgactccctaactccatcagacctctacgcaccataagactctgccagaactgagaagccaacatttctacatagactcaacctcaccctctcctagttttccaacaagacactccaaagccaactggatttctcccctgtgctccaaatgactttgtacaagtgctggagttagcacctccctctgcccttaactggctggaactggttcattctccattactgcaagagaatggaagtcttaatagaaggaagcacgagtgattagttcgggttataagcaaagtgtgacatgaactaggattccctgaagccagttctgtcagggtcatggcccactttgctacagcatcagagcgaagcacgcctgtctaggttctccagtgacagaaagatcctgaagcatggactaacatgctctctggagcttagtactccagagctagatcctgatgggtctctaaggttccctccaagaagacaaggacaggagacttgggaaggaccaatggtaatttaagtggctcttaaaaagtcatgcaacatgtttctggacacgttcctgatcctattgcgataatgtatgtgtgccctccctgtgggcacaccacctgggcattaggactgaaatttctgagttcttcctctcacaatttctgtgcaccagtattattcctcattttacatacaggaggcaactaa

SEQ ID NO: 6176 - DNA, 994 bp, Homo sapiens
  SIMILAR (338)..(430): 871254mologous to Homo sapiens Human secreted protein sequence encoded by gene 2 SEQ ID NO:62,accession number AAB51930,Smith-Waterman Score=150.
  misc_feature (1)...(994): n = a,t,c or g
attggctggaccgacccaggccgagcggacttcaagaagatgtgcacaaggagcccataacgtctaaagaggaaaagcaagaaggccaccaagcagagcctacaagatagcttcctcttggacctcaaatcccctccttctttccctgtcgagatctctgacaggttgcccgctgcctcctgggaggggcaggagtcctgctggaacaagcagacttccaagagcgaagggactcagcctgagggaacatatggagagcaacttgttcctgagctgtgcaaccaatcagagtccagtggagaagatttcttcctgaagtccaagctccaagaacaagatgtctggagaagatccacttctttctatacccacatgtgcaacccctggggtctccttgtgggggctggtgggtcccttctcatcatgtttgtgatacagtgggtgtataccctggttaacatgggtgttgctgccatcgtgtatttctacattggccgggccagcccagggcttcaccttggatcagcctccaacttcagctttttccggtggatgaggtctctcttgctcccctcctgcaggagcttgcggtcccctcaggagcagatcatcttggcgccgtccctggctaaggttgacatggagatgactcagctcacccaggagaatgcagacttcgccactcgggatcgctaccaccactcctccctcgtgaaccgggagcagctgatgcctcactactagatgcagtgctgggaccttcctcttttggagctgtcccatgtacagtggacccaagctcaggaccttcgtggagctgcttctccaacctgagaaactcaagacccatcctcccgctgtcactttggacaatggaaatctacattttcttttcccnnnnnnnnnnnnnnggaaaaaaattttccccttgccccccgggggggagccagggggcaaattttggttttatggcacctttggtttccggggtaaa

SEQ ID NO: 6177 - DNA, 601 bp, Homo sapiens
gcgtgaccaggtgggagccagggggtgccggcgggcgggaggggaagcggtcgctggagctccgccctccccggtccgttgccgcgtcctgggtcggtgggcagccccaccctcctggctacgtggctccccgcgggtcctggccggggacctgcccgcggaaccgtgcgtaagaccccgattccaccgcctagatgctgggtgccggggcccccttggtttctgtcacagacaggttgaacacggaaaaagcagctgtatggcttgtggtagacctgagccgggcattatccagctatgactaaagccgaccgagcagtctggactagcacctcgatttccgcgttcgaatgctcctgctccctccttggggatactaggggaggatgtggagatggaagagtcctcgccaggaattgagaagtatgtttaggaaaacttgagaggcagagagagatcctgctcctccatctgcactcctgtatggagccagctgagccctcacctcttccctgttctggcctgtcaccagctgctggaatgtggaagattctgttcccttcctctagggtggatctggagaaagatttgggaatagata

SEQ ID NO: 6178 - DNA, 387 bp, Homo sapiens
  SIMILAR (1)..(213): 761254mologous to Homo sapiens transient receptor potential- related channel 7, a novel putative Ca2+ channel protein,accession number AP001754,Smith-Waterman Score=278.
aggaacacggacaatgcctggatcgagacagcgggcgggaccgttcacttgcaggaccagaatgacggggagttgaacaggctgaactctaacctgcacacctgcgaatggagggcctccatcccatggcaagggggggacaggcgcataccactctatgcgaaccacaagaccctccttcacatggcagccgctgagatcggggctaactactgactgtgccctcagggtgggcggatccattccataaacgttccccccataaaccagggcttctctctcctgagcctgggcaggactcaagctgttctctgggccctgcacatgatggggtttggtggacccaacgcccctcacggctgtccgagagttgctgcagatcatcta

SEQ ID NO: 6179 - DNA, 435 bp, Homo sapiens
  SIMILAR (343)..(2): 771254mologous to Homo sapiens adaptor protein DAPP1,accession number AF163254,Smith-Waterman Score=434.
ccaagggctatggtcccagatgcacgccaacatccttcagcgataagccttcggtaacgccggatttaaatgaatatccagtatattcaacatgaaagtgtttaccagaatgttcgcccctcacagagagagagtacaggccggtggtctcattgctgtccctcacaaggtaggtcccgtcgcatccctttcacagtagaagagattcagcagcatggcgtgtgagcttgccctgattccgccccaagtcgtggagcagctcagcctctccatcggatctgctccacagatctgagggatcctgggtgctcatcttcccttctagaagttctgctctgcccattcgcgcccttcacagaggtagagagagacccacaactgggctgctcctgacaccttctcgctctgtgagacagcagcctgcccacgcgtccg

SEQ ID NO: 6180 - DNA, 755 bp, Homo sapiens
  SIMILAR (1)..(261): 701254mologous to Homo sapiens PRO2550,accession number AF130089,Smith-Waterman Score=319.
agacggagttttgctcttgttgcccaggctggagcgcaatggcgcaatctcagctcaccacaacctccgcctctcgggttcgagcaattctcctgcctcagcctctcgagtagctgggattacaggcatgtgccaccacgcccggctaattttgtatttttagtagagatggggtttctctacgttgttcaggctggtaatccgcctgccttggcctcccaaagtgctgagattacaggcacgagccaccatgcctagcccaaagttctttattaaaccacaaatagcagatgattgagtgccaggccctcaagatgccatctgctccctggtaccacaactgaagaagccccaaacccagaacagactcagcttccaaggctcacaccctaaactctccactgcacaggaagtatcaaagcttattccacccccattatctacaaggtatcaagtaaaaactccttaaaatgcccttagaatttcatgaagctcaaaccctgcttttactgagatgtttccaaacctgagacagttcttaccactaattcctcctcttcctcttcctcctacaaaaggaaaacaaaattaatgtcagcagcaattttatgacatatttattcctgatcatactgatgtaattactgacgatagccactgacactattaacgatgttattttgttttctgtgttttatgatgtttttacattttcctcgtgccaagcttggcgtaagcatatcaaggtgttcaaa

SEQ ID NO: 6181 - DNA, 470 bp, Homo sapiens
  SIMILAR (9)..(50): 501254mologous to Homo sapiens Human NIP45 protein,accession number AAY08330,Smith-Waterman Score=37.
ggggctctggctgggatggaagagggcaatctgggagggtggctgactccagttgagccagagtcctgtctgcactgcagtgaggtgaacaagccgcctccaggatctccgttcctgtctgagccccaagccacctcagggtcaagagcaacagggccaagaggatgaagtggtcttggtggaagggcccaccctcccagagaccccccgactcttcccactcaaaatccgttgccgggctgacctggtcagattgcccctcaggatggtgagtgcctgaggcccatgggagaaggacccaggagctgcttctggagagatggtggtgtccagcaggggtgtcctggcagaagggactgtcatccttttcccatcctgctctctagagctgcccatcattcttttcagtctgtcctgccttcacactttttgtttcctctgtctgcattttcccaacgctcccctctctt

SEQ ID NO: 6182 - DNA, 1911 bp, Homo sapiens
  SIMILAR (133)..(816): 981254mologous to Homo sapiens Human NIP45 protein,accession number AAY08330,Smith-Waterman Score=1146.
aaatacccccaaacctgggattacaggtgtgagccattgcgtccgactatgcttgattgtccaaggatctgatttctaggatttgtggggccagtctctctccattgcctccgtcctgctgtctcttgcttctacagggatctggacaactctcctctgtccccaccttcaccaaggaccaaaagcagaacgcatactcgggcactcaagaagttaagtgaggtgaacaagcgcctccaggatctccgttcctgtctgagccccaagccacctcagggtcaagagcaacagggccaagaagatgaagtggtcttggaggaagggcccaccctcccagagaccccccgactcttcccactcaaaatccgttgccgggctgacctggtcagattgcccctcaggatgtcggagcccctgcagagtgtggtggaccacatggccacccaccttggggtgtccccaagcaggatccttttgctttttggagagacagagctatcacctactgccactcccaggaccctaaagctcggagtggctgacatcattgactgtgtggtactaacaagttctccagaggccacagagacgtcccaacagctccagctccgggtgcagggaaaggagaaacaccagacactggaagtctcactgtctcgagattcccctctaaagaccctcatgtcccactatgaggaggccatgggactgtcgggacggaagctctccttcttctttgatgggacaaagctttcaggcagggagctgccagctgacctgggcatggaatctggggacctcattgaggtctggggctgacaccccactccctgtttgacggcccagcctggacttggggagaatgactttcccttttttgccccataagggctagcataagctgaggtagaacttatctttaagctgcagcaaaatcaaggagtgacttttgtcccctctcctgttgaccctgggttagagccgttaaccacttggtgagttatgtgggtcttgttgccctgggtggcctgtggctccgtccacaagtcatgctgagttttgcagcctctgtgacttgaggatgtcccttcacccctcccctttcaccaccatcctcttttcctcatggaaaatgtctgctttatgaaactatgcacatattgaaagtgagttgaaacaaatgagggttggggtagggagcttccaggcctggggattttacaccacgcctagcccagcagaggcccttagtcccatttgggggcttggggagtgacatttgcttgaggcttatacactggtgtggtttccctggcttgcaggaaatgaccaagctcgacacatgctggctgaagcgtaagcagacaacgtgaggtactcttttgaaggatgaaggtggtggattctcaagccctgggggtcattcctcacctgaggacccttcagagccacccttttctagtttgcatttcctggtgcacacatttaaggcataacagcacgattcatccctttggtttgggatctcaggaatacagtcccatgcaaagattctctggttttatggcttttttccctttctttacaccatcctctcccataagcacccatgtctttgaatatgaatgtatttgtaaaataccacgtttcatgtgtgaatatgtgcttttactgtacatagtgctattgtgcaataggtcttatgctgttttcactcaatgtgtgctaagatctagccccattgactcttctagaaatgcagtattgctttgacctgccatgtggcactccataatgtcaattgcagtttacacacattgcctaaagtgggggacacctgggtgcccctgaccccttggcaccggatacaggccacgataaacatcctttcgtgtgttcaaaaaaaaaaaa

SEQ ID NO: 6183 - DNA, 2038 bp, Homo sapiens
  SIMILAR (31)..(423): 941254mologous to Homo sapiens Similar to RIKEN cDNA 2700083B06 gene,accession number BC005164,Smith-Waterman Score=655.
  misc_feature (1)...(2038): n = a,t,c or g
atggaaccaacccaaatgcccatcaatcaacaaatggataaagaaactatccttaagctcctgaagggcaaggtggtggtggggcacgcgctgcacaacgacttccaggcgctcaagtatgtccaccctcggagccagacccgggatacgacctatgtcccaaacttcctcagcgagcccggcctccacacccgggcccgggtctctctaaaggacctggccctgcagctgctgcacaagaagatccaggtgggccagcacgggcactcatcagtagaagatgccacgacagccatggagctctaccggctggtggaggtgcagtgggaacagcaggaggcccgcagcctctggacctgccccgaggacagagaacctgacagcagcacagacatggaacagtacatggaggaccagtactggcccgatgacctggcccacggcagcagaggaggagccagggaggcacaggacagaaggaattgagaagggggcggggctccctggctgggcttccggtgtggccggtaggaagtgggggccaggaagacagcgggcactccttcctgggcagggtggggcaggatgcagtgagccagccccaaggccaagaggaagtgggggcatctgttaccttgacaccctctgcacacagcatagccctctctctctccagggctgtgggttctttctcctgactcctgtggttttgctaatggcactttacagactccatggagatgtcaggtggaccatcttctagggcccagcaggagtagggaatgtgccaacagactgcccaggttgccgtggccttccccaccccccagatctcctgagtcatcatgctgtgctaatgaaagggatcatatcatcctctctggggatggtgggtggggatgtcaatatcctggagctcccttaccccaactcaatgacttgggggtaaagttctcttccttttgttgcctacctcttcctccactcatttgggttcagaataaacatgccctgaagttaaagaggagttaagtcctaaaggaggcatttcttccccacctccctgacctggaactctggctacagccattgtaggaactccgtgcctggcctgtcagctccctgctaggctacagtggaatagcagagcccacaggcttctcgtggggagttggctccttaacatttcttggcaacagaaagccccaggcacagctcatggaggagggaaggcaggtaagctttggatgagaactggcatatttattttgacccaaatcagggatttccccagtccacccagtaatgggctcttaagcaaaagtctgagaaacaagacagtggtttgaattctggggcctttgtgtaggattgtgcctgacctttatttatttattaacagcagggccactcgtctagggcagtggagtctgcgtgtctcctggggctggggcagggcatttggcagttatgcagtggccctgaacctggtctggtgcccccgaacctggtctgatgccccctcagctctgtgacaatcactgtggctgttgggttttctcctatttctaaaaatgttctcttctttcctaagtgacagttttgaagtattggataaccaagaagctcaggtcacacagaccttggaagccccatctttgcttgcagcttaagcttttgagatactaagcaagcgaagggacttcactcttgaggctgttttttcctcatctgtaaagtggggaaaagtggtacggcctacctcataaggggttgtaatgagcactaaatgtgaaagtgcttggcaaagtgcctgggcacatgggtgagccacagcttactgtgaagtttctgtttatcccccnnnnnnnnnnnnaagcccattgtttattctttgaaaatttgtggaaacttcttcaggataacacctgagtccacaggctgagcagctgtggcccaaacagaactgctccggttgggctgtcccaccagggggggcgctggcctcgtggagggcccccaacaagggttacggatt

SEQ ID NO: 6184 - DNA, 1761 bp, Homo sapiens
  SIMILAR (43)..(1461): 771254mologous to Homo sapiens angiomotin,accession number AF286598,Smith-Waterman Score=1723.
atggatttccagctgaaaaagaagcaagtgtacgttgacaaggtggagaagatgcagcaggcccttgtacagctccaggcagcatgtgaaaaacgtgagcagctagagcaccgtctccggacacgactggagagggaactggaatccctgagaatccagcagcgtcagggcaactgtcagcccaccaacgtttcagaatacaatgctgctgcactgatggagctccttcgggagaaagaggagaggattctggctctggaagctgatatgacaaagtgggagcagaaatatttggaggagaatgtgatgagacattttgctctggatgctgctgcaactgtggctgctcagaggtcaatatttgaaggccacattctctatgtgcataacctcatcgtgcgtgagcggtcacatttcatctgggacacaacagtcatcagtcactctcctaacaccagctatgacacagctctagaagctcgcatccagaaagaggaggaagaaatcttgatggccaataagcgttgccttgacatggagggcaggattaagaccctccatgcccagattattgagaaggatgccatgatcaaagtactccagcagcgttcccggaaggagccgagcaagacagagcagctgtcgtgcatgcggccagcgaagtctctgatgtccatttccaatgctggatcaggcttgctctcccactcatccaccctgactggctcccccatcatggaagaaaagcgagacgacaagagctggaaggggagcctaggcattctcctgggtggagactaccgtgctgaatatgtcccttccacaccctcgcctgtgccaccctcgactcccctgctctcggctcactccaagacaggcagccgagactgcagtacccaaactgaacgtgggacggaatcgaacaaaactgcagctgttgctcccatctctgttcctgctccagttgctgctgccgccactgctgccgccatcactgccactgctgccaccatcaccaccaccatggtagctgctgctccagttgctgttgctgctgctgctgctccagctgctgctgctgccccgtctccagccactgccgctgctactgctgctgctgtttctccagctgctgctggtcagattccagctgctgcctctgttgcctcagctgctgccgttgctccttctgctgctgctgctgctgctgttcaggttgctccagctgctccggctccagttccagctccggctctggttccggttccagctccagcagcggctcaggcttctgctcctgctcagactcaggcaccaacttcagctccggctgtggctccaactccagctccaactccaactccagctgtggctcaggctgaggttcctgcaagtccagctaccggtcctggaccacatcgtttgtctataccaagtttgacctgcaatccagacaaaacaggaaatgaaagggaatatgctgacttctacagccattttgatattgcaaatgaccttgtctatatctgctcattactgtacctccagagcccagaagagtgcctgatgcaaaccatgtttctcaggccagaaactcagatgagggatccagcgagaagccttcttttccaaactagggcacagaaactagtgacacaattaaggcaatgtgatggcaagagggcagtgattaaaaacacgcacactccagagccagaatgcctagaattgtacctgctctaccacttacaagctgtgtga

SEQ ID NO: 6185 - DNA, 5158 bp, Homo sapiens
  SIMILAR (1)..(1419): 1001254mologous to Homo sapiens angiomotin,accession number AF286598,Smith-Waterman Score=2354.
cagctccaggcagcatgtgaaaaacgtgagcagctagagcaccgtctccggacacgactggagagggaactggaatccctgagaatccagcagcgtcagggcaactgtcagcccaccaacgtttcagaatacaatgctgctgcactgatggagctccttcgggagaaagaggagaggattctggctctggaagctgatatgacaaagtgggagcagaaatatttggaggagaatgtgatgagacattttgctctggatgctgctgcaactgtggctgctcagagggacacaacagtcatcagtcactctcctaacaccagctatgacacagctctagaagctcgcatccagaaagaggaggaagaaatcttgatggccaataagcgttgccttgacatggagggcaggattaagaccctccatgcccagattattgagaaggatgccatgatcaaagtactccagcagcgttcccggaaggagccgagcaagacagagcagctgtcgtgcatgcggccagcgaagtctctgatgtccatttccaatgctggatcaggcttgctctcccactcatccaccctgactggctcccccatcatggaagaaaagcgagacgacaagagctggaaggggagcctaggcattctcctgggtggagactaccgtgctgaatatgtcccttccacaccctcgcctgtgccaccctcgactcccctgctctcggctcactccaagacaggcagccgagactgcagtacccaaactgaacgtgggacggaatcgaacaaaactgcagctgttgctcccatctctgttcctgctccagttgctgctgccgccactgctgccgccatcactgccactgctgccaccatcaccaccaccatggtagctgctgctccagttgctgttgctgctgctgctgctccagctgctgctgctgccccgtctccagccactgccgctgctactgctgctgctgtttctccagctgctgctggtcagattccagctgctgcctctgttgcctcagctgctgccgttgctccttctgctgctgctgctgctgctgttcaggttgctccagctgctccggctccagttccagctccggctctggttccggttccagctccagcagcggctcaggcttctgctcctgctcagactcaggcaccaacttcagctccggctgtggctccaactccagctccaactccaactccagctgtggctcaggctgaggttcctgcaagtccagctaccggtcctggaccacatcgtttgtctataccaagtttgacctgcaatccagacaaaacagatgggcctgtgttccactccaatactctggaaagaaaaactcccattcagatcctgggacaagagcctgatgcagagatggtggaatatctcatctaaacggccaaatcaagagctgcagattatcagcaaaaatgcttttaatcattttcccccttttattggttcttgttttgagggtgaggacaagggttgtggggaggggatgttttttaacaggactttttattggaacaatgtactagttgagtaataccatgtgaacaccagtctattttggtatgcttagggagtacctctaaagacagattaatcagaatgtgctctaaagcttattgtttgaatttatacgaatactgggactgttaacaggtggctatacatcgacgttttcaatgtgcttaaatttgtttaaattttccatattctagatcattttttattgaagagcacagtatgtgtggaagacagtgtataacacgtagtttggaagtgggaagctagagagaattgagtgtgtgctgttttgtatagttactatcctgtgcagcagctggagaaagcactcacctcaggcttacaaaagggaatagtttcaggagctatgtaagctggaaaaaaggtagggagttttggggtgcagaagggtactggagctaattttttcttccagtttcccagctaccctgccccagggaattgtgtttgtcttcatttcagtggtgctttggaaatggattcttttggttccctcctggaggttcatacattcatatatatgctctggagtaatttatgcatttggataattaatatattgctttcagatgctgggagagtacattaactgagtgatgcgcaacttcctctctcttagggaattagaccatcagaggccttgatggagagttgcatggggtgctatatgcagacttccatggtttgtgtgtagccatgaacacagcttgcttgcatttagtaagaccaatcagcttagtgtttatttcttctacagcacagattcactggctgggtctccagtctcaaattgccaatcatttgcaaagtgaggaaggatctttgttgacaggttgaatgctttgaatttctggtgactactttgaaataacttgttttgtttgtcaaattctaagcatatgtcttaaaaggcatttttgactatcacctccaagggaatagcttgagaaacccaaagtactatgctgcagtcgggggagaggtggattgcagcagtatcctcaactacctcttctcactgtcagtgacaccatcttggaatacctttgggaagcagcaggaaatgtgcatgtgggtagagatcaaaggaggcaatggctccaagccttgccatagggctgcctccaaggacacagaaggatgccagttgccacaggtccctgccctgtgtcacctgtctgcccttcattaaggtgagaaatctgcagatagcatcattaagatcagttttaaggggtatagggagggtgagggaagtggggggtgttaggtaagggttgggggtagaggttttgggatgtcttagttagaaaccagattaatagaagagtaggcctgatatattacatcatgagccatagtggtgggaaagaactttagcaatatagccctacctcctcattttagtgatgaggaatctgagaactggagaggttcagtgactttttgaaagtcatacaacacagctaaccattatgccaatcaccatgcttattttgggaaactctttatcttttttaaattccattttatgaaaaggcatcttcatggtccagggaatatgtatcttgtaaaatgtacctgggttggagtagcttgtccagtcttgacaaactactgaatttctgtcttgcctctccttcagtgccttttaaaaggttttcccttttctggatctgcatttcaacataggagtcacataaatggtccccctgagaaaccaatcccacttctttctaggagattgggtatcttagataatcttttggggttcctctgtgagtataggaatggtatccttcctaattatcttccaaaggaattattttgtgtgtgtgcctgtgtgtgtgtagagacataaaggagggtgatgtgattttcagctagtcctttcacattttcaataatgaggtaatcatgttacatacacattagtcctcagttataaagtgaatctcagatagaaattaaaagtgcagttgtgttaagactctttcatactaccctttagtcataaggagaaaaaaacactcaaatagtagaagcagcaagtagcaaacttcaggagagctactttctatccaaataatttaaaaaacacttttcacctactcctttcatggttataacacattggcagactttttgctggctctgggagccatgattttaatcacattctgcaaggtgacaaatgtcatacattccacattgtgtggtagccatctctttagactcatgtgttttggggaaaggaagaagttcttggctgagtactattttgaactttccagaaccctctcacaccagagacagttcttctctgttcagtttccaatccccgataatttgctaaaataacattgtacatccaagagagggaagaagagtatgtcagtatattatgcagaagatagatacagccttttcagaagatctccactagtttttgttccaaaaattcaagtttatgggagaaatctcaattagccaccttttcacagttgtgtggatataacatttgggggatctttctggactcctacctatctgtgcattttaccggcacctcaggaaaggagggtgaccaggttgtcttagcttgtactgcttggtgatctctgaggaccttctaattcagttgtaccccagtgttccatgtatagaaaaacttcattagaacaaactttacttgatatgaaactcctattaacagtctttttttgaaataaaaagtagcttgagctttcttttaaaatcatgtatcttgattgttgatttaatgaaggatttccttttaatgctgcttttgagcttcaaggtaataggacagcaggaacctaaaatatctgccatcatctgccataggaaagatacccagagacccatcatgttctctttttgttgttacactgttgggtgggtataacaattggaaaatgaacaaactgatttgattggtgcaaactacctttttatggacaagccctaaacccctcaataatgcggcacgttaaaagtggtatacatatgcactaactttggatcaattatattcctcatatctgttagctacacagtctccctattatctcaattgcttatgtgccatatggaatatggttacttaaaaccgtgtgccattcttactgaaaatgttttccaaaggaaggtatcagctggtggggctaattgcccaccaaatttcagcctgccacgattccttgggaatatgtcttccaacgtgccatccatcatcagtaggacaagtgtcgggagtttgtttaatttttttccccagtagcaacgatgggttaccatggagccatgaaacctccttctggcctcccttgtgattaatggcgatgtgtttgtaaaatggatagctggggttggcagatggctagagaagaatcgcctttggtttaaaatgtatgtggtcccctaatgattgtgaccccattctgtaatcaaatgagctagttccaataaagaataagcaggtttaaatccactttgtgcctatcttttcactgacaataaagttagctattttaaaatgcaaaaaaaaaaaaaa

SEQ ID NO: 6186 - DNA, 500 bp, Homo sapiens
gcatggttggggggcatcagcaggacaaaccaacaggtactccgcaagtgtactggcacagcaagcccaccaattattagcagctcttcatcagcctgctgtctactcagacgcttgcctactgaagggacctgtccagagatcttctggaatcccaggttgggaatctctgcagaatgtcgtgacagttgtggcccaactagcttctgagtagaaacaaggaagctaccctgagatatagtcagctgcccacctgccatagtatttgctactgaatgccagccttttaacataccatttcagatttgtccttcaacaaaaatataaattgcaagtcataccatttaagggtcttttacaaatatgtctaaattgtgtgtcatttttaagttccaaaggtctactggactaagtactatcagaccagctgtagaacctgatggcgctgatccggggtggaataaccctcagtactggtgtgtagaagatgaattgtaggc

SEQ ID NO: 6187 - DNA, 3646 bp, Homo sapiens
  SIMILAR (155)..(2947): 1001254mologous to Homo sapiens transmembrane receptor UNC5C,accession number AF055634,Smith-Waterman Score=4945.
ctgcctttggagaaagtggagtgtggcgcttggttgtcgttatttcttcggactgcttcgcggtgcacggattcagcttctgcccagtggggctttcagctgtttgcgcgtctctctgtccccctcccctccccccggcacacctctgtctacgatgaggaaaggtctgcgggcgacagcggcccgctgcggactgggactgggatacttgctgcaaatgctcgtgctacctgccctggccctgctcagcgccagcggcactggctccgccgcccaagatgatgacttttttcatgaactcccagaaacttttccttctgatccacctgagcctctgccacatttccttattgagcctgaagaagcttatattgtgaagaataagcctgtgaacctgtactgtaaagcaagccctgccacccagatctatttcaagtgtaatagtgaatgggttcatcagaaggaccacatagtagatgaaagagtagatgaaacttccggtctcattgtccgggaagtgagcattgagatttcgcgccagcaagtggaagaactctttggacctgaagattactggtgccagtgtgtggcctggagctccgcgggtaccacaaagagccggaaggcgtatgtgcgcattgcatatctacggaagacatttgagcaggaacccctaggaaaggaagtgtctttggaacaggaagtcttactccagtgtcgaccacctgaagggatcccagtggctgaggtggaatggttgaaaaatgaagacataattgatcccgttgaagatcggaatttttatattactattgatcacaacctcatcataaagcaggcccgactctctgatactgcaaattacacctgtgttgccaaaaacattgttgccaagaggaaaagtacaactgccactgtcatagtctatgtcaacggtggctggtccacctggacggagtggtctgtgtgtaacagccgctgtggacgagggtatcagaaacgtacaaggacttgtaccaacccggcaccactcaatgggggtgccttctgtgaagggcagagtgtgcagaaaatagcctgtactacgttatgcccagtggatggcaggtggacgccatggagcaagtggtctacttgtggaactgagtgcacccactggcgcaggagggagtgcacggcgccagcccccaagaatggaggcaaggactgcgacggcctcgtcttgcaatccaagaactgcactgatgggctttgcatgcagactgctcctgattcagatgatgttgctctctatgttgggattgtgatagcagtgatcgtttgcctggcgatctctgtagttgtggccttgtttgtgtatcggaagaatcatcgtgactttgagtcagatattattgactcttcggcactcaatgggggctttcarcctgtgaacatcaaggcagcaagacaagatctgctggctgtacccccagacctcacgtcagctgcagccatgtacagaggacctgtctatgccctgcatgacgtctcagacaaaatcccaatgaccaactctccaattctggatccactgcccaacctgaaaatcaaagtgtacaacacctcaggtgctgtctccccccaagatgacctctctgagtttacgtccaagctgtcccctcagatgacccagtcgttgttggagaatgaagccctcagcctgaagaaccagagtctagcaaggcagactgatccatcctgtaccgcatttggcagcttcaactcgctgggaggtcaccttattgttcccaattcaggagtcagcttgctgattcccgctggggccattccccaagggagagtctacgaaatgtatgtgactgtacacaggaaagaaactatgaggccacccatggatgactctcagacacttttgacccctgtggtgagctgtgggcccccaggagctctgctcacccgccccgtcgtcctcactatgcatcactgcgcagaccccaataccgaggactggaaaatactgctcaagaaccaggcagcacagggacagtgggaggatgtggtggtggtcggggaggaaaacttcaccaccccctgctacattaagctggatgcagaggcctgccacatcctcacagagaacctcagcacctacgccctggtaggacattccaccaccaaagcggctgcaaagcgcctcaagctggccatctttgggcccctgtgctgctcctcgctggagtacagcatccgagtctactgtctggatgacacccaggatgccctgaaggaaattttacatcttgagagacagacgggaggacagctcctagaagaacctaaggctcttcattttaaaggcagcacccacaacctgcgcctgtcaattcacgatatcgcccattccctctggaagagcaaattgctggctaaatatcaggaaattccattttaccatgtttggagtggatctcaaagaaacctgcactgcaccttcactctggaaagatttagcctgaacacagtggagctggtttgcaaactctgtgtgcggcaggtggaaggagaagggcagatcttccagctcaactgcaccgtgtcagaggaacctactggcatcgatttgccgctgctggatcctgcgaacaccatcaccacggtcacggggcccagtgctttcagcatccctctccctatccggcagaagctctgtagcagcctggatgccccccagacgagaggccatgactggaggatgctggcccataagctgaacctggacaggtacttgaattactttgccaccaaatccagcccaactggcgtaatcctggatctttgggaagcacagaacttcccagatggaaacctgagcatgctggcagctgtcttggaagaaatgggaagacatgaaacggtggtgtccttagcagcagaagggcagtattaaccaccatgctggaaggggaaatgaaggacaaaaatgcacagggagtctgtggccgtccaggtgaatcacagctgaggaggaaatccagatgagaccaatgcacttcacaggcaagaatgcagcaggagccagaaggaaaacagatacaactgcccatgtacatgcccactttactcggagatcatcacgggagttaagaaaaattgtgtaaatttgtaccttgaatttagctatcaacctaattttcctcttagttgggctgtatgctgtgtggtacaggatcttacagtttcctaggaaacgctttttattgctatccagatatatggataaactttcttaacaaacccaatttctacaaatgttgtttacatcaaattggacagggatgcagacactgtccatggctcgttctatttttgttcaaatcatttgaagttgaagctgtggacggtttgttgtgtctatttcagattagtaatttacagagaaatcacagacttttgctacaaatcgtgtgcatcaagtgtctcagataatcctcccatcagtgttctgtttctagaacttgtagaaccagtgttactgtttgtatcagggaagtggagaatctaagtgtaaaaaagaaataactaagactcctattccttggagggacccttctggtgccctttgggaataaagctgtagcactgc

SEQ ID NO: 6188 - DNA, 1108 bp, Homo sapiens
  SIMILAR (1)..(417): 641254mologous to Homo sapiens transmembrane receptor UNC5C,accession number AF055634,Smith-Waterman Score=419.
atgagggaagtagaagaggacagtcctcatgaaagcccccttgtacttgtgagtgactgggacgtgggcatcgttactctttggccatgtcttctaggaagctttctgcaccatgtcaccactaggggataccggaggctttcctttgtcctggagaaagcagctgctttccaggatgtggtggtggtcggggaggaaaacttcaccaccccctgctacattcagctggatgcagaggcctgccacatcctcacagagaacctcagcacctacgccctggtaggacattccaccaccaaagcggctgcgaagcgcctcaagctggccatctttgggcccctgtgctgctcctcgctggagtacagcatccgagtctactgtctggatgacacccaggatgccctgaagaagctagttgggccacaactgtcacgacattctgcagagattcccaacctgggattccagaagatctctggacaggtcccttcagtaggcaagcgtctgagtagacagcaggctgatgaagagctgctaataattggtgggcttgctgtgcccagtacacttgcggagtacctgttggtttgtcctgctgatgccccccaaccatgctaaataggtcctgaaggccacacattaacatttggttgaaatgaagcccgttaatatccctacccacagatgaaatacaatgaggtgacaggaaaacctaggaaccatgacttatgaagactggctgttaaagtagcatttatgaaaatggggtaagcacaaggctgataaaactaaaggatctggaagctcatggctagacttagtctgcagagaaaacccacccagttctacacaaagccatctccccacttttcaaaaataggtttttcacactagaattctggaaatgacttcatttggctttcctggcctgtatggatatgggtttacataacattggttacaatatatttattcccccttatgccttattccattaaaaagaaataattagagatgcaaaggaaatcttccaaagtggatcattacagccagagattattacaaataggatatcttaggggtaggaggaaacattacttcattgccc

SEQ ID NO: 6189 - DNA, 4211 bp, Homo sapiens
  SIMILAR (1)..(1911): 991254mologous to Homo sapiens Novel protein kinase, SEQ ID NO: 158,accession number AAB65631,Smith-Waterman Score=3310.
gagccatccatcggggagtttaatgagcaggttctgcgactgatgcacagccttggaatagatcagcagaaaaccattgagtctttgcagaacaagagctataaccactttgctgccatttatttcttgttggtggagcgcctgaaatcacatcggagcagtttcccagtggagcagagacttgatggccgccagcgtcggcctagcaccattgctgagcaaacagttgccaaggcacagactgtggggctcccagtgaccatgcattcaccgaacatgaggctgctgcgatctgccctcctcccccaggcatccaacgtggaggccttttcatttccagcatctggctgtcaggcggaagctgcattcatggaagaagagtgtgtggacactccaaaggtcaatggctgtctgcttgaccctgtgcctcctgtcctggtgcggaagggatgccagtcactgcccagcaacatgatggagacctccattgacgaagggctggagacagaaggagaggccgaggaagaccccgctcatgcctttgaggcatttcagtccacacgcagcgggcagagacggcacactctgtcagaagtgaccaatcaactggtcgtgatgcctggggcagggaaaattttctccatgaatgacagcccctcccttgacagtgtggactctgagtatgatatggggtctgttcagagggacctgaactttctggaagacaacccttcccttaaggacatcatgttagccaatcagccttcaccccgcatgacatctcccttcataagcctgagacctaccaacccagccatgcaggctctgagctcccagaaacgagaggtccacaacaggtctccagtgagcttcagagagggccgcagagcatcagatacctccctcacccagggaattgtagcatttagacaacatcttcagaatctggctagaaccaaaggaattctagagttgaacaaagtgcagttgttgtatgaacaaataggaccggaggcagaccctaacctggcgccggcggctcctcagctccaggaccttgctagcagctgccctcaggaagaagtttctcagcagcaggaaagcgtctccactctccctgccagcgtgcatccccagctgtccccacggcagagcctggagacccagtacctgcagcacagactccagaagcccagccttctgtcaaaggcccagaacacctgtcagctttattgcaaagaaccaccgcggagccttgagcagcagctgcaggaacataggctccagcagaagcgactctttcttcagaagcagtctcaactgcaggcctattttaatcagatgcagatagcagagagctcctacccacagccaagtcagcagctgccccttccccgccaggagactccaccgccttctcagcaggccccaccgttcagcctgacccagcccctgagccccgtcctggagccttcctccgagcagatgcaatacagccctttcctcagccagtaccaagagatgcagcttcagcccctgccctccacttccggtccccgggctgctcctcctctgcccacgcagctacagcagcagcagccgccaccgccaccaccccctccaccaccacgacagccaggagctgccccagcccccttacagttctcctatcagacttgtgagctgccaagcgctgcttcccctgcgccagactatcccactccctgtcagtatcctgtggatggagcccagcagagcgacctaacggggccagactgtcccagaagcccaggactgcaagaggccccctccagctacgacccactagccctctctgagctacctggactctttgattgtgaaatgctagacgctgtggatccacaacacaacgggtatgtcctggtgaattagtctcagcacaggaattgaggtgggtcaggtgaaggaagagtgtatgttcctatttttattccagccttttaaatttaaagcttattttcttgccctctccctaacggggagaaatcgagccacccaactggaatcagagggtctggctggggtggatgttgcttcctcctggttctgccccaccacaaagttttctgtggcaagtgctggaacatagttgtaggctgaggcaggagaatggcgtgaacccgggaggcggagcttgcagtgagccaagatcgtgccactgcactccagcctgggcgactgagcaagactccacctcaaaaaaaaaaaaaaaggacaagagcagtatcatctgcctctgtttctaaactggacaaagagattttcttaaagtttctatcatctcccttctgacaggttctacagtgtggtctgaagcacctgtaatgtcagagcccttgtctggcccttggtggcaggtgaacgaaagcagtggagcctctcaccttccagtagcctctcacattcttattttaccatttttgtcctaattaaggtagcctagctgattctagaagacagccatcctacgtgcacccccacctttgtgtccacatcttctccaggcaggtttcaacctatcagcagactcaggcacacactggggcacagatagagaaccagggcggcacgagtgcttcgcagacccacccagggagagctgtgatgggttctgcccagatactctgctcgcccacccacaagggagcaatagcttatatttgttacattagttttaaccaaggcactttctcttctaaccctcacatcaaatctatgaaattagctggggagatactgtccttatttttcacagctgaagaaaccagagctttgggaagattgtgacttatctgagatcacagctggtgatagaaggagctgggacacgcgcttggggtgactggctatctggttttggttctctggcttctagtgctggaagaagccctctctttcccttctctttcctcagtagcatctgactcttttcataagcaaacagctgtataaacaaagcccccattttggtcaagcacagggtgaatgtgatatttgttcccacaaccttattctccactcaacagccggctggctttggggaagaggccgccttcaggtgacagtgcagctgtccaggtggccgtgcactgaaccaggctgagggagacaaaaaccccgcagacccgcctgcctttcagcgtccagttaactgcagaagtttaggctcacctcaaagatgtctagtttttccaagttacaatacagcagtttcctacagaacacccccttcctcaattgccaaggggccgcatcgcacggcatcaggccaccactgcaggccagcagattccaccccaggaacggtcatgaactcagcctttgtctcaacgaggggcgtaacatttccttacagtcaagccccatcaacttagaagttgcttattacttttaggattaaaaaagtaataacagactttgacttaatactctgtcttttcagaggcaaagtgggtgggtagaggggagctttaaaaatagaagtacaaaacaacatcctggaaacatatgaccccagatggaataatgtcacattccccagtgcagataatgggctgctgctggctctgtggtgtctgtctgcagaagatttgctcagtccaagggaaattccaagtgggtgagacctttcccaccatgggtgggttaaaggaggaaacctgccttcacccaaaatctctgaaggggaaagaagtggagagaaagggtttgcttccacttcggggacctgccagtttgagaaataaaagggataccagagatatctgccactttgtagaaagggccaagattatttgcttatatctgaaagggaggtgggtggtttttgctggatgtttggtctgaaagagtttacctttggattaaagttaaccctaatggtagttatattttctgtgtgctttttttttaattacttaagaaaaaaattggtgagttcagtagctttggtattatgagtgcaaatcataatagctccaatgtgaaaaaaaaaaatcaaaagtataacttgtcacttaatgttagaaaattgcctaaaatgcagtgtaataaataatctctgtaccaaatagtaatttaaatggggtaattttctgcaaggaaaatgtactgtttttatgtttccaaccctcttgaattaaaataaaaacaacttcttttctaagaaa

SEQ ID NO: 6190 - DNA, 396 bp, Homo sapiens
  misc_feature (1)...(396): n = a,t,c or g
nnnnnnnnnnnnnnnnnnnnnnnnnnnnnnnnnnnnnnnnnnnnnnnnnnnnnnnnnnnnnnnnnnnnnnnnnnnnnnnnnnnnnnnnnnnnnnnnnnnnnnnnnnnnnnnnnnnnnnnnnnnnnnnnnnnnnnnnnnnnnnnnnnnnnnnnnnnnnnnnnnnnnnnnnnnnnnnnnnnnnnnnnnnnnnnnnnnnnnnnnnnnnnnnnnnnnnnnnnnnnnnnnnnnnnnnnnnnnnnnnnnnnntttagttttttggcnnnnnnnnnnnnnnaggaagccccttgacacccagactttatcaaaaacatgattactgggacatcttaggctgactgtgctggcctgattgttgctgctggcggtggtgtatttaaaagctgggatctacagaag

SEQ ID NO: 6191 - DNA, 954 bp, Homo sapiens
  SIMILAR (10)..(303): 1001254mologous to Homo sapiens unnamed protein product,accession number AK025855,Smith-Waterman Score=539.
gggaattcccaggagaccccagtcccgccagcagccgccgctacccaggagggctgggcgacattggccgcctcccaccagctccccctcctcgcccacagcctcttgtcactgccaagcccccgttccttttgcccaaatcacgcaggcggaagctgcagtgccagctggagggatgttcatagggcttcctgtgcccatccctgctccaaacagctggacagcttcccctctacccccaccctggtgagcccctgggggccagagaaagatggggttcctgcaccttcccagctccacctctgaacttgagttagcgttagctaagcatacaatcagtgtcgaacgtctctcttccttaagcttgtagatacgactgcctataatcaggggactcccactggaggccgggaggccaatgctggccaggtgcgagggcatggtttggttcctttagggaatttttgttttgcaaacaggagaaacctgtgctgcaggttggagtggcaggaacgactggccttggtcagcaggcagcccccagcctagggccacagtcctcttcagggcctgggcagccccaatttctggcccagcaggtttctctttgtagtgtctttcagcacatccaaaatgctaggcctcctgccaccaacgtgtcagagcaatgtccaactgtcaggctctcagagatgcctcagtttccctagcatgagcaccagccgacacacacagtccactgagatgataattctgttctcttcaaagcaaaaagctgggcgagggggagtcttaattttttgcagtgctcaaaggaataacaccaaaagaatcaacacagaatctcccagacacacgtgacccagctcgtggcgccgtgggtccgtaggagggacagtacctcacaacaggcccagcgggggaccacctctctgtacaattggaacgcgtttt

SEQ ID NO: 6192 - DNA, 965 bp, Homo sapiens
  SIMILAR (250)..(543): 761254mologous to Homo sapiens PRO2550,accession number AF130089,Smith-Waterman Score=412.
tttttttttttttttttaaagagttggagtagggaaggtttaatagtaaaataaacgtggctatattttaacataagatgtaaaatgtgtataggtgttttaagattttaaaaagttaccttaggttctactgcctgtggtagatggaattctaagatggcgccccaaggtctcccactaccacctgccgtgaacatgccttgcattaatataatttctggaactgggactcagagggattttatttatttattttatttttatttcttgagatggagtttcactcttgttgcccaggctggagtgcaatggcgtgatctcgcctcactgcaacctccgcctcccgggttcaagcaattctcctgtctcagcctctcaaattgttgggattacaggaatgcaccaccacgcccagctaattttgtagagatggggtttctccatgttggtcaggctggtctcaaactcctgacctcaggtgatccgcccacctcggccttgcaaaatgctgggattacaggcatgagccaccatgcccagccatgtttggggctttattttataagttagaactttgaagaggaaatggtgctatatgtttattgttattactttgtgtaactttgatgtaatgtttataagctatgagaatcagttataaaagtattaggccctttggttggtaaatggcccaataaaatattccccccaggggcaagaatgtacattttcctttttagaaaacccaaatgtactttagacatgaatgcaactatttaaagaatagcttcatttatgttattccttacatgtcataagattcttacttaaacttggtcttctttcaagttgtttgtatgaagatgctgtacccacttgaacagtcctcaggtgtttacataaatactatgttttacagttttcatattttaaaatattaataaagttaatcgcaacgattcaaa

SEQ ID NO: 6193 - DNA, 2182 bp, Homo sapiens
  SIMILAR (169)..(579): 971254mologous to Homo sapiens Human protein clone HP10568,accession number AAY94857,Smith-Waterman Score=678.
aaccacatcacaaagggcacctcccatggctgggatgaagacacctccccgtgcaaggtgtaccacgctggaagcaccacttcccctccctccaccgcctgcaaccggttggcgggcaagtgcagttgcagctgggcccgcgaggggggcgctggagacaagagcgaggctcagagtggacaaacctctgtgggaggctctactgcactgagatgcagctcttccgagggggctcctaagccagtgtacaactgggtgcgtcttggaacttttcctacaccttctcctggcagcatggttcaagatgaggtgtctggccagctcattctcaccaacctctccctgacctcctcgggcacctaccgctgtgtggccaccaaccagatgggcagtgcatcctgtgagctgaccctctctgtgaccgaaccctcccaaggccgagtggccggagctctgattggggtgctcctgggcgtgctgttgctgtcagttgctgcgttctgcctggtcaggttccagaaagagagggggaagaagcccaaggagacatatgggggtagtgaccttcgctgcgaggccaaggaggaaaggaagagagacatcatgcagaatattgtacagattttggaatcggtacagttgaaatgggaactttttcagagctggacagacttttcaaggctccatctttctaataaactggccatttttggaattggttataacacccgttggaaagaggatatccgttaccattatgctgagatcagctcccaggtgccccttggcaagcgacttcgggagtacttcaactctgagaagcctgaaggacggatcattatgacccgagtgcagaaaatgaactggaaaaatgtttactacaaatttttagagatcactattagcgaagctaggtgcttggagctgcacatggaaattgactggatacccattgcccactccaaaccaactggtgggaatgttgttcaatatttattgcctgggggtattcctaaaagcccaggcctttatgccattggctatgaagaatgtattgagaggcccctctcaccacacatggattcaaagttccctgggacccagggaaaagagggccgggttgacctgggaaaccctttcagcacaagcctcatttacaggtgggaaataggaacccacccgaattatctattgctacctcgggattgctgaggtcaggactctacagcagtgcttatttttacatttccaagcgaataccaaaaccttcagcaaagattgggttggtattaacgggttttttgtctcagaactgtattgtggatcccggagttttcccccaaattccatctacatcaaatttgtagaagtagagagggattttctttccgcaggctctttagttgagtgcctggaaaaagccattggataccccttaaaatttaacaactgaatgtcatccttcataaggatttgggcttctaagctccttcttctctactcactttcccattaccccggaccacccctcatccagatgccgcccgtcagactctttcatgggaaaccctttcttcaattggggccagtacgacttcttaagggaattcattagttaggacttgggggccagaaaaaacatgacctcacctggaaaatggttcatttttgagcaaggcaagatatataggcgaacttgcatggtgggtcagctatttccttttttaaaaacagaaaaccaatttttaaatgggattttaagagccctaatataaacaaatgtaggtaccattccataattggaccaaaacttatacctttgaggtttcatatgaaattgaaaaattgtatttttttccacaatgtttcatttttacacatctctatgtctctatataagtaatatttacaaccctgaataaataagcaatagataatggcaagttaaatcttgattcacagttaaaaagactttttcaatatcacccttagctactattgtatataatttagattttcatttttttcaccagccaagtgttttgctatttccaatcagtattgcttgcaaagacctttgtttctgtgatgtaaccaactttacagttgtgttgccatttaaacctttttttaaaaaaaaaaaaaaattaaagtaattcctggccaaaaaaaaaaaaaaaaa

SEQ ID NO: 6194 - DNA, 490 bp, Homo sapiens
ctccacaccgcccccacttccaaaagcaaacctgggcctcccctcaaagctcgtacttagtacattcaccatgacactgtgcacctgtgagctctctcccgctctcactctcttgcgtgcacacacgcacacgcacacacacgcacaggtatgcacacatatatatgcaggtgcgcgcacacacacacatctggtttccttgcagtctgctcaggcagcagaagggtgtcccatcctcaccgtcatcttttacttcccagggtgcccttggcccacaggtccccaagacccagccccaggcttggcacgcgctggcattcccaggcttttgagaagagggtgatagagcagggagctcctcacagacaggttatacagagtgtagaatatgttcatataaggctttggtacagcaccgatttcatgttcttatagtttcggacgcgtggggcgacccggagagtcgtcaaggtctgcagggtatcagccc

SEQ ID NO: 6195 - DNA, 512 bp, Homo sapiens
tttcgtcgcagtccgcaggatgactcagggcagccctgaccacagttccgctgccatcggccctagcctgcggaattgggctcgccccgggacgataacagagctctgccgggggctggaggcactgaccgggtgaccagagacccagagaccagaccccctccacggcgcccgggatttcggggacggcttctcccatcgcaagtagggcttggacgggaggcgacaaaagagaacttggtccgcacacagccaccgaaattggaatgaggagctgtaggaaggccccgtagccagcagaaaagcattggggtccctggctgggttagcccaggtttctaggagtgtggtaagcgtcgaatgacttttgtccttttaaagcacattatgttactttttcccgcgaggtttcaacagataatgagaaatatcccccgacgattggctgaacacatgcaacaaccactattttcttcctgcccctcgttgatgagagcattcgaagtgacctc

SEQ ID NO: 6196 - DNA, 1287 bp, Homo sapiens
gttctgcagtgagccaagatcatgccactgcactccagcctgggccacaagagcgaaactctgtctcaaaaacaaaaacaaacaaacaaaaaatgctttgaaagaggagaaaggtgacaacaacatagctaccacgtctaaagtgctcccaggccccagcccaaaccccacagccctctcctgagtgctttataggatttgctcatttaaccctcaaatgtaccaatctgggccagtgcagtggctcatgcctgtcaccccagcatatttgaaggctgaggcaggaaaactgaggccaagagcttgagaccagcctataggcaacatagtgagactctgtcccttattaaaacaaaaaaagcaccaatctggtgggaggcatggtcatcttcagtgtccccatcttactgaagaagtaatggaggtacaaacagggagggacctgcccgaggtccagcaggctggtggggagctgggatcagaaaccccacgtggacaacgtggtggcctccgcctctaagtgctaaggaggcacttgctgggtcgtttgaacccacctgctgctgcgctcccaaaacttcccatgggaccaggcctcccctctgcagccaaagttcctttagatgatgagaggctacacactcagacacatggccggcgggcacaggaaccacagagtatgtggtcaccttggcgtgtatctatttatagccatacacaacagggtcttaagcagtcaccattcaaaaaatatgtggtcaagaactaaaccaaacaaacctggatgatcctaggccaaaacaattcctttccaggcacacaggcccagcagagacaaaaccagatattcattcatcacacacacaagtcttccagaaactgacctggatgccctgctgaggtcacttcgaatgctctcatcaacgaggggcaggaagaaaatagtggttgctgcatgttttcagccaatcgtcgggcgatatttctcattttctgttgaaacttgcgatgggagaagccgtccccgaaatcccgggcgccgtggagggggtctggtctctgggtctctggtcacccggtcagtgcctccagcccccggcagagctttgttatcgtcccggggcgagcccaattccgcaggctagggccgatggcggcggaactgtggtcaggcctgccttgagtcatcctgcggactgcgagtcggcgaccaccaggaggcgagagcgggtttcccctccaacaggccaaagcacgtgtctccacttacttcccactcccacgaaa

SEQ ID NO: 6197 - DNA, 517 bp, Homo sapiens
  SIMILAR (58)..(162): 971254mologous to Homo sapiens Unknown gene product,accession number AC004685,Smith-Waterman Score=165.
  misc_feature (1)...(517): n = a,t,c or g
cattgaaaccgnttgcaggtttcgagcacgtattcccgggccgacccacgcgtccgccaggtggcccttggagacccacttcttcctggagcgtccctgcctatagctcagcccacaggactgcttcaggccgtggccacaggtagcagccgcaaggggaaatgaagaaaactgagccctcgtggccacctgtgtcacccttgtgccttagcctcatgggctgcctaggagctgcctgcacggcacagctcgctttcacagtcagaagagggtctgtgggatctgtggtccctgtcctccctgctgtcccttctggggaggctttggtggctctgaggtggacaaaaagctctcgcaagaagaaacagcatgatgccttccacaatccaccccaaaccctggggcaacccctcttgcccttgcaactggcttggttttttggccccaggtgggttggccgaaatccaacttttttggttataagactctcaattttctttgcccgcctctcctgtgc

SEQ ID NO: 6198 - DNA, 847 bp, Homo sapiens
  misc_feature (1)...(847): n = a,t,c or g
ttttttttttttttttttaagcattttcggttatttttagttaaaagaaaaaccagctttgctcccaagggccgacaaagtgaaacctaaaggtcagaaggaagctgggttccgggctttcctgcaagactcttgcctcccaaaaccctggaaattgaggagagggccgcttccggagcttctgggaaaggttggtgcaacacaggggtcccgttggtgggggccgaangaagccgcccagccccacacaccggtcactgggattgggtgtgaagtgggtttcccaaagcggactgcccatgtgcctaagtcccactgaacatgaattgaacattaaacattccttggggggcaattaaaattaaggaatgaacacaggggagccaaagagagttggcttatttcggtttggatttctgaattcacaatccagggaaatagtcctttatcctgggtgcaaccttaattttcattttttccttggagccaatttccgaagggaaggtgagatccgttctggggggtcgattgttcacgcacggttgcttcctccctttcaggattgaagctttgcatgaaggctggcatactagggtggtaggtgggggtgtccattgtgctcttgatgggaatgcccttctgtgttcacgacgatgattccctgcacttcccttctggcttctgcagtcgctttcagtgtctcctccaacctctgcccagggtggagtgcagtggtgcagtcacggctcactgtagccttgacctcctgggctcaggcgatctctccacttcagccatttccgaccgatccggtagccccgcgtagcgaacacttagcgagtcctgt

SEQ ID NO: 6199 - DNA, 385 bp, Homo sapiens
  SIMILAR (3)..(140): 1001254mologous to Homo sapiens protein disulfide isomerase- related protein,accession number J05016,Smith-Waterman Score=243.
  misc_feature (1)...(385): n = a,t,c or g
gcttccccaccatctacttcgcccccagtggggacaaaaagaacccagttaaatttgagggtggagacagagatctggagcatttgagcaagtttatagaagaacatgccacaaaactgagcaggaccaaggaagagctttgaaggcctgaggtctgcggaaggtgggaggaggcagacgccctgcgtggcccatggtcggggcatccacgccgaggccggcaacaaacgacagtatctcggattccnnnnnnnnnnnnnnaaatttttaaaactggggggttcaatttctggcttggaaaccggaaaacccgggagggagggaattgttaaccccaaatttttacgggggaaccnnnnnnnnnnataatttttgggggttggaa

SEQ ID NO: 6200 - DNA, 2915 bp, Homo sapiens
  SIMILAR (1316)..(1384): 731254mologous to Rattus norvegicus calcium-binding protein,accession number M86870,Smith-Waterman Score=95.
ccagcggccgccgacgctaggaggccgcgctccgcccccgctaccatgaggccccggaaagccttcctgctcctgctgctcttggggctggtgcagctgctggccgtggcgggtgccgagggcccggacgaggattcttctaacagagaaaatgccattgaggatgaagaggaggaggaggaggaagatgatgatgaggaagaagacgacttggaagttaaggaagaaaatggagtcttggtcctaaatgatgcaaactttgataattttgtggctgacaaagacacagtgctgctggagttttatgctccatggtgtggacattgcaagcagtttgctccggaatatgaaaaaattgccaacatattaaaggataaagatcctcccattcctgttgccaagatcgatgcaacctcagcgtctgtgctggccagcaggtttgatgtgagtggctaccccaccatcaagatccttaagaaggggcaggctgtagactacgagggctccagaacccaggaagaaattgttgccaaggtcagagaagtctcccagcccgactggacgcctccaccagaagtcacgcttgtgttgaccaaagagaactttgatgaagttgtgaatgatgcagatatcattctggtggagttttatgccccatggtgtggacactgcaagaaacttgcccccgagtatgagaaggccgccaaggagctcagcaagcgttctcctccaattcccctggcaaaggtcgacgccaccgcagaaacagacctggccaagaggtttgatgtctctggctatcccaccctgaaaattttccgcaaaggaaggccttatgactacaacggcccacgagaaaaatatggaatcgttgattacatgatcgagcagtccgggcctccctccaaggagattctgaccctgaagcaggtccaggagttcctgaaggatggagacgatgtcatcatcatcggggtctttaagggggagagtgacccagcctaccagcaataccaggatgccgctaacaacctgagagaagattacaaatttcaccacactttcagcacagaaatagcaaagttcttgaaagtctcccaggggcagttggttgtaatgcagcctgagaaattccagtccaagtatgagccccggagccacatgatggacgtccagggctccacccaggactcggccatcaaggacttcgtgctgaagtacgccctgcccctggttggccaccgcaaggtgtcaaacgatgctaagcgctacaccaggcgccccctggtggtcgtctactacagtgtggacttcagcttttgattacagagctgcaactcagttttggcggagcaaagtcctagaggtggcgcaaggacttccctgagtacacctttgccattgcggacgaagaggactatgctggggaggtgaaggacctggggctcagcgagagtggggaggatgtcaatgccgccatcctggacgagagtgggaagaagttcgccatggagccagaggagtttgactctgacaccctccgcggagttggtcactgctttcaaaaaaggaaaactgaagccagtcatcaaatcccaacccagtgcccaagaacaacaagggacccggtcaaggtcgtggtgggaaggacctttgactccattgtgatggaccccaagaaaggacgtcctcatcgagtatctacgcgccaatggtgcgggcactgcaagcagctagagccccgtgtacaacagcctggcccaagaagtacaagggccaaaagggcctggtcatcgccaagatggaggccccttgcaaacgacgtcccccagcgacccgctataagggtggagggcttccccacccatctactttcgccccccagttggggacaaaaaggaccccagtttaaatttgagggtggagaccagagatctggagccatttgagccaagttttatagaagaacatgcccacaaaactgagcaggacccaaggaagagctttgaaggcctgaggtctgcggaaaggtgggaaggaggcaagacgcccctgcgtggccccatgggtcggggcgtccaagccgaaggccggcaaccaaacgacagtaatctcggattccttttttttttttttttttaattttttatactttggtgtttcacttcatgctcttgaatactggattaaccatgaattgactgaattagtttaggtcccgattttttacagaggatacatctatttttaataattattttggggttttgaaaaatttttttttacacccttctaaattctttaatttttaaaagcaaaaattttttttgtgtgaaaatgttttctttttttaatttaaggtttaaaattccttttccaaatcatgttgattttgctctttaaaaaaaaaaaaaaaaaaaaaaaaaaaaaaaaaaaaagaagggctgggaccaaccgggtgagatccacaagtctctggatgtggctgaaggcaaatacacaattgaagtactttctgttttgaagtgctttcccttttgaatctggtttgaaacatgcagcttctgtctctagcccaaggaaagaccaaaacatagggaaataaaagcatttatctttgtcttggaagtaattgttgaagttgtgcagttgatcagtgcacagttagctgcaatgtttatagaaattgattgttaaaccaaatttacactggcatgtgtggtgtagtttctaaaaggcacttcacatttgaaatttttcttaccttagaaagtttctagtgatctaaatgtctagttttgtattcttttgtgtgtgttcactgtttctcagtattaccacttgaataattctctgtacaggggggtttgtgctatacactgggatgtctaattgcagcaataaagcctttcttt

SEQ ID NO: 6201 - DNA, 707 bp, Homo sapiens
  SIMILAR (705)..(547): 691254mologous to Homo sapiens Human myelin oligodendrocyte glycoprotein gene,accession number AAZ29204,Smith-Waterman Score= 171.
ttctatttgatccccaacatcctctaaaggttgtcctgacagatgtgtcccatagacagccatggttctcggcttattatgaccccacagtgcactaaggaaacctccactaactaaaacccaggagtttaagtgccatcttatttgtctatagttttagactgtattattttgggtcaaaaaaagctcaaaatcacaggaagaaccataaaactgtagcaaattataatttaccgagatctatgaggatcttatttgtaaacatgaattggtcaccatcagttttccaatagcaagagacacaaatcctagaaaaacttatttcaatttccagccttcaggatttccaaattttcccgatacatttcagactagaagaaaaattaactatttcaaacccactttgacatacagaaaagccctggcatactgaaatttcagattgctggacccccatctcgagattttgattcatcacattctggatgtaacaataatttggatcaagattaaggagccatggccgggcgcagtggctcacactataatcccagaacttttggaggccgatgtgggcagatcacttgaggttaggagttagagaccagcatggccaacatggtgaaaccccatctctactgaaaatacaaaaattagctgggcatggtggtgggcgcctgtaatcccagttagtcaggaagctgagg

SEQ ID NO: 6202 - DNA, 772 bp, Homo sapiens
  SIMILAR (716)..(585): 811254mologous to Homo sapiens RNA polymerase II subunit,accession number U37689,Smith-Waterman Score=178.
  misc_feature (1)...(772): n = a,t,c or g
tggaaaaaacgattttacagtaaatggactttttacaaaaaggggaggggcagtctgaaaaagtaaagtttaatttaaaaatcatatacataaagcttctgattcattttcagctctcccactgtgtctttcacaggcgagtcagtttcccattgagtggaggccagttaaagatgccgccacggtggacagtgagccagcccttcctcaacaggtgagcaagagcggctgccactcaggcttgaacaatgcccatgacctgagtgacttggcagagaggctggcttcaggcgaggttcagaaggctagcttcttcatcaggagataaactctggagtccacctcgaatccatgcaggttgttggcatccccctgcagcctcatgagcaggcccccataggacacgtacgcagagctgaaacagaaggccccatcccgtgattctggagcactgccactcagcagctctcaatctcagcaggcgtgttgctgcttcagtagaagtttcatctccctcaatcctgtacacttttccatacattacatactcaaactggtcagcccttgaaggcctatcatcagtgggggttgtattcaccatcatccagggtaccatcttcatacaaggtactagctatgaccaaccgaaacttgtcacccaagtctacagggtaaatnntgatgttacatctaaagatagatccatcttngaaagatcactctcacaatgcagtcgagacactcggtcaaacttcttggccctcggntcaat

SEQ ID NO: 6203 - DNA, 943 bp, Homo sapiens
  SIMILAR (166)..(624): 571254mologous to Homo sapiens RNA polymerase II subunit,accession number U37689,Smith-Waterman Score=352.
ccctcactaaagggacaaaagctggagctccaccgcggtgcggccgctctagaactagtggatcccccgggctgcaggtccggtcttgtccacgctagggggtgcacgtactcccaactgtggtcgcgctctcaccccttctgctgctctcgtggccccctcgcgatggcgggcatcctgtttgaggatattttcgatgtgaaggatattgaccggaaggccaagaagtttggaccgagtgttctcgactgcattgtgagagtgaatctttcaagatggatctaatcttagatgtaaccattcaaatttaccctgtagacttgggtgacaagtttcggtttggtcatagctagcaccttgtatgaagatggtaccctggatgatggtgaatacaaccccactgatgataggccttccagggctgaccagtttgagtatgtaatgtatggaaaaggtgtacaggattgagggagattgaaacttctactgaagcagcaacacgccctctctgcgtacgtgtccctatgggggcctgctcaatgaggctgcagggggatgccaacaacctggcatggattcgaggtggactccagagtttatctcctgatgaagaagctggccttctgaacctcgcctgaagccagcctctctgccaagtcactcaggtcgtgggcattgttcaagcctgagtgggcagccgctcttgctcacctgttgaggaagggctggctcactgtccaccggtggcggcatctttaactggcctccactcaatgggaaaatgactcgcctgtgaaagacacagtgggagagctgaaaatgaatcagaagctttatgtatatgatttttaaattaaactttactttttcagactgcccctacacctttctgtaaaaagtccatttactgtaaaatcgttttttccagttaaaaaaaaaaaaa

SEQ ID NO: 6204 - DNA, 639 bp, Homo sapiens
  SIMILAR (445)..(636): 791254mologous to Homo sapiens Unknown (protein for MGC:10818),accession number BC004267,Smith-Waterman Score=266.
gcggccgcggcgcgagccgggacccctggaagggtcgggtgcgcggcccaggaggtaccgctgtctcctcacaatcggccaggcctgcagccgctgccgccgccgccgccgccgccgccctactcagggagtggcccaggcctgcggcgcgccaccctcacctccttcattcctaccgtcaaagcccagccttggctacctgacccccctgtggtctcgaactcggttagtccggtgaagggacagagaagcctgggttcccggcggcatcactgagatgctcagtcctgaattctgccctccattaggattatctgctttgtgggataatttcctcattggttgagtcagtgagttgcgtgtctgcaagagagcatcctatctggtcggagcagagcatggacatgggaacgagtgctctcagcaagaagccgcgggggacccttgcctaaaaaactttatgcaccaatggtgtttcacatggaagaggaccaggaggagctcatcttcgggcatggtgacacataccttcgctgcattgaggtgcacagccacacccttattcagctggagagttggttcacagctacaggccagactcgtgtgactgtagtcggaccacacagggcaaggcagggg

SEQ ID NO: 6205 - DNA, 429 bp, Homo sapiens
  misc_feature (1)...(429): n = a,t,c or g
aactgagttaggggaaaaccgccttaaggctggaggtgggacatgggggcagacatgctgctctggaaggcgttgagaagggcatggggatgcatatctaaagcccagcacttagctctttaccttgtctatgacccagagacctttgctcacgcgtttatctgctgaccttttctccgctattatcttatgaccctgacacagacccctctccgagaaacaccccggaatgatgactaaatactaggggaactcataggccggcgggaacctcgtctgctgaatgccgggcccctgggctcccttttttctttctctaaaaaattctctagnaaaaaaaaaacctaccctaaatgaaaaaaaagataactaaaaaaanaannnnnnnnngggaaaaatggtgttcgcttttgggggcccccccccccc

SEQ ID NO: 6206 - DNA, 449 bp, Homo sapiens
  misc_feature (1)...(449): n = a,t,c or g
ggccttggaagtaccacctggcacccaacaaggtccccagagtccacacatagtccacctgccctccctgcgtaagatcagctcttcctcctcccgacgatagatcagggtcaatgatccctgccaagatggcgactgctccagcctgctggtccaacctgtccagccacagctgttgctcgaaggcttgaagttcaatgggaccctctcccgctttctacaaactggnnnnnnnnnnnnnnnnnnnnnnnnnnnnnnnnnnnnnnnnnnnnnnnnnnnnnnnnnnnnnnnnnnnnnnnnnnnnnnnnnnnnnnnnnnnnnnnnnnnnnnnnnnnnnnnnnnnnnnnnnnnnnnnnnnnnnnnnnnnnnnnnnnnnnnnnnnnnnnnncagcccgaacaggttttcactaggttgcctgggctctttctttcgaattccaccagactgg

SEQ ID NO: 6207 - DNA, 1281 bp, Homo sapiens
  SIMILAR (1010)..(1189): 931254mologous to Homo sapiens putative p150,accession number U93563,Smith-Waterman Score=293.
atgggagactttaacactccactgtcaacattagacagatcaacgagacagaaagtcaacaaggatacccaggaattgaactcagctcagcaccaagtggacctaatagacatctacagaactgtccaccccaaatcaacagaatatacatttttttcagcaccacaccacacctattccaaaattgaccacatacttggaagtaaagctctcctcagcaaatgtaaaagaacagaaattataacaaactatctctcagaccacagtgcaatcaaactagaactcaggattaagaatcccactcaaagctgctcaactacatggaaactgaacaatctgctcctgaatgactactgggtacataacgaaatgaaggcagaaataaagatgttctttgaaaccaacgagaacaaagacacaacataccagaatctctgggacgcattcaaagcagtttgtagagggaaatttatagcactaaatgcccacaagagaaagcaggaaagatccaaaactgacaccctaacatcacaattaaaagaattagaaaagcaagagcaaacacactcaaaagctagcagaaggcaagaaataactaaaatcagagcagaactgaaggaaatagtgacacaaaaaacccttcaaaaaattaatgaatccaggagctggttttttgaaaggatcaacaaaattgatagaccactagcaagactaacaaagaaaaaaagagagaagaatcaaacagatgcaataaaaaatgataaaggggatatcaccaccgatcccacagaaatacaaactaccatcagggaatactacaaacacctctacgcaaataaactagaaaatctagaagaaatggataaattcctcgacacatacactctcccaagactaaaccaggaagaagttgaatctctgaatagaccaataacaggagctgaaattgtggcaataatcaatagcttaccaaccaaaagagtccaggaccagatggattcacagccgaattctaccagagagaataaaatacctaggaatccaacttacaagggatgtgaaggacctcttcaaggagaactacaaaccactgctcaaggaaataaaagaggatacaaacaaatggaagaacattccatgctgatgggtaggaagaatcaatatcgtgaaaatggccatactgcccaagggaaaccaccagcatcggcagaggtgatagctgaggaggagcggggatttggacgagagacacaggatgagtaccggggggcagccccgtga

SEQ ID NO: 6208 - DNA, 1036 bp, Homo sapiens
  SIMILAR (10)..(321): 691254mologous to Homo sapiens Human myelin oligodendrocyte glycoprotein gene,accession number AAZ29204,Smith-Waterman Score= 361.
aaaacttttttttttttttttttttttcagacaaactctcgctctgtcgcccaggctggagtgcagtggcgcgatctcggctcactgcagcctctacctcccgggttccagcgattctcctgcctcagcctcctgggtagctgggattacaggcgcaggctaccacgcccggctaatttttgtatttttagggggtttcgccatgtcggccaggctggtctcgagctcctgaccccaggcgatccgcccgcctcggcctcccaaagcgctgggattacaggcgtaagccaccgcgccgggctctttcattctgtctttattttctgagatagagtctcgctcggacgctcaggttggactgcaacggcgtgatctcgggctcgctgaaacttccgcctcccggggttcaagcgattctcctgtctcagccttcccgagtagctgggattattgacgggcagcaccacgcccggctactttttgtggtttttgtatcttctgtcttctgctctttagtaccgcatagagccgcagaagactagcgagtcgaacaaacggcccctcttgcagcagttgttgatcacggggctgccccccggtactcatcctgtgtctctcgtccaaatccccgctcctcctcagctatcacctctgccgatgctggtggtttccctgggtaccgggaaccaaactctcattccccaggggcctaagacccccgtggccaggcccttctcaagtcagggttcctgcacattcacagttacgggtggccctgggagtaacacctggcacccaaacaggtcaccagagtccacacatagtccacctgccctccctgcgtaagatcggctcttcctcctcccgacgatagatcagggtcaatgatccctgccaagatggcgactgctccagcctgctggtccaacctgtccagccacagctgttgctcgaaggcttgaagttcaataggaacctctcccgctttctacaaactggttcctttatttttatgttcaccaaccaaaacggaggt

SEQ ID NO: 6209 - DNA, 1229 bp, Homo sapiens
  SIMILAR (997)..(629): 741254mologous to Macaca fascicularis unnamed protein product,accession number AB046040,Smith-Waterman Score=434.
aaccgtctggttcctttattaaaaagaaaaggaaaaccaaaaattttcaaagttaaaaaagaaacctttaaaaatattgtagcaatagccttcttcgtaacaaatataaaacagcttaagacacttggtgactttcttagttcatctgtggggaaatggatacacaatgaggttttactactaaagttagctatttggtaaaaactctaggaagagtcccatcaagaaaatggttattttggaaagacaagttatgattatttcccaaaatgtcaaaagaaataagaatgtaaaccccatatacttaaaatgttaatacaataatattaactcagtcaaataaataaaagaaagtggccccaaatttatggcaatttttcaaaacaaaaatgtagcttaaatatattttaaaataaataattggttcaaatacggacgaccattctcagcacaaactaacaacattcaaaataaagtgctatgagaaaaagtagccccacaatcttcaacttattcacatatgaacagagatactatctggatctttaggttctgaaatattcaccacgagtgaaagctagaggccaggcttagggccatcttttgtcatttttcttttttcttccagcgtgtgcttaaatattttcttcagggtgttgtaaactgttggtccattttcagaatcaaaattaaccttagtgaatgccttaatggcatgggcaaggaaagcttcctccacatccacgggaattgtctgcaggttcactatgcagtgcaacacgcagagaatagtctggtgctgtcccttctctaataaaaaaagtgcttctgcggcatctgctcgcctgtcaaccaacatgtccacatcctctttgggtgattacaggctccttcagttgctccacccaagaccacatcaagctgcatagggatgaaagggtccctctcgccacatattctttcccaaggctccatctcggggaattaaggctctttctaaaaagggaaggaggaaaggggacaggacaggacaggggacagagacaggggagagggagaggggaggtgcaccatttgacactgcatgattcttgcgctgcccacaagagtgaaagactcaggctccagagtgcagaactgggacccctcccagcctctccacttccaggctggacactggactaagacactgaattctgtaagccccagtttctctctatgaaactcat

SEQ ID NO: 6210 - DNA, 1987 bp, Homo sapiens
  SIMILAR (229)..(687): 351254mologous to Caenorhabditis elegans contains similarity to dual specificity phosphatase, catalyitic domain (Pfam:PF00782, Score=16.8, E=7.4e-05, N=1),accession number AF125960,Smith- Waterman Score=258.
atggcgggcacccctcccccagccttgctgccgccttgcagtttgatctcagactgctgtgctaacaatcagcgagactccgtgggcgtaggaccctccgagccaggtgcgggatataatcttgtggtgcgcagttttttaagcccgtccgaaaagcgcagtgttcgggtgggagtgacccgacttttccagggccgtccatcacccctttctttgactcagaaagggaacccccctgaccccttgcgcttcccaatttacttctacaatttcggatggaaggattatggtgtagcgtctcttactactatcctagatatggtgaaggtgatgacatttgccttacaggaaggaaaagtagctatccattgtcatgcagggcttggtcgaacaggtgttttaatagcctgttacttagtttttgcaacgagaatgactgctgaccaagcaattatatttgtgcgggcaaagcgacccaattccatacaaaccagaggacagctcctctgtgtaagggaatttactcagtttctaactcctctccgcaatatattctcttgctgtgatcccaaagcacatgctgtcaccttacctcaatatctaattcgccagcgtcatctgcttcatggttatgaggcacgacttctgaaacacgtgccaaaaattatccactctattttgcaaattgctgctggacttagcggagaacaggccagtgatgatgaaggatgtgtccgaaggacctggtctctctgctgaaatagaaaagacaatgtctgagatggtcaccatgcagctggataaagagttactgaggcatgacagtgatgtgtccaacccgcctaaccccactgcagtggcagcagattttgacaatcgaggcatgattttctccaatgagcaacagtttgaccctctttggaaaaggcggaatgttgagtgccttcaacccctgactcatctgaaaaggcggctcagctacagtgactcagatttaaagagggccgagaacctcctggagcaaggggagactccacagacagtgcctgcccagatcttggttggccacaagcccaggcagcagaagctcataagccattgttacatcccacagtctccagaaccagacttacacaaggaagccttggttcgcagcacactttctttctggagtcagtcaaagtttggaggcctggaaggactcaaagataatgggtcaccaattttccatggaaggatcattccaaaggaagcacagcagagtggagctttctctgcagatgtttcaggctcacacagccctggggagccagtttcacccagctttgcaaatgtccataaggatccaaaccctgctcaccagcaagtgtctcactgtcagtgtaaaactcatggtgttgggagccctggctctgtcaggcagaacagcaggacaccccgaagccctctggactgtggctccagtcccaaagcacagttcttggttgaacatgaaacccaggacagtaaagatctgtctgaagcagcttcacactctgcattacagtctgaattgagtgctgaggcaagaagaatactggcggccaaagccctagcaaatttaaatgaatctgtagaaaaggaggaactaaaaaggaagaaagagcttaattcccgagatggagcttgggaaagaatatgtggcgagagggaccctttcatcctatgcagcttgatgtggtcttgggtggagcaactgaaggagcctgtaatcaccaaagaggatgtggacatgttggttgacaggcgagcagatgccgcagaagcactttttttattagagaagggacagcaccagactattctctgcgtgttgcactgcatagtgaacctgcagacaattcccgtggatgtggaggaagctttccttgcccatgccattaaggcattcactaagatcagcatcatctttgtaaatcagaatccagaggtcaccgtcctcctctaa

SEQ ID NO: 6211 - DNA, 1372 bp, Homo sapiens
  SIMILAR (343)..(591): 431254mologous to Caenorhabditis elegans contains similarity to dual specificity phosphatase, catalyitic domain (Pfam:PF00782, Score=16.8, E=7.4e-05, N=1),accession number AF125960,Smith- Waterman Score=205.
atgaagagcccctttcctctggtgtcaacaaaggctgagtggggaacctggattttcaatcctgaagcagaagaatcacttgaacctaggagtttgatctcagactgctgtgctaacaatcagcgagactccgtgggcgtaggaccctccgagccaggtgcgggatataatcttgtggtgcgcagttttttaagcccgtccgaaaagcgcagtgttcgggtgggagtgacccgactttccaggtgccgtccatcacccctttctttgactcagaaagggaaccccctgaccccttgcgcttcccaagtgaggcagtgcctcgccctgcttcggctgaggcacgtttacttctacaatttcggatggaaggattatggtgtagcgtctcttactactatcctagatatggtgaaggtgatgacatttgccttacaggaaggaaaagtagctatccattgtcatgcagggcttggtcgaacaggtgttttaatagcctgttacttagtttttgcaacgagaatgactgctgaccaagcaattatatttgtgcgggcaaagcgacccaattccatacaaaccagaggacagctcctctgtgaagcacagcagagtggagctttctctgcagatgtttcaggctcacacagccctggggagccagtttcacccagctttgcaaatgtccataaggatccaaaccctgctcaccagcaagtgtctcactgtcagtgtaaaactcatggtgttgggagccctggctctgtcaggcagaacagcaggacaccccgaagccctctggactgtggctccagtcccaaagcacagttcttggttgaacatgaaacccaggacagtaaagatctgtctgaagcagcttcacactctgcattacagtctgaattgagtgctgaggcaagaagaatactggcggccaaagccctagcaaatttaaatgaatctgtagaaaaggaggaactaaaaaggaaggtagaaatgtggcagaaagagcttaattcccgagatggagcttgggaaagaatatgtggcgagagggaccctttcatcctatgcagcttgatgtggtcttgggtggagcaactgaaggagcctgtaatcaccaaagaggatgtggacatgttggttgacaggcgagcagatgccgcagaagcactttttttattagagaagggacagcaccagactattctctgcgtgttgcactgcatagtgaacctgcagacaattcccgtggatgtggaggaagctttccttgcccatgccattaaggcattcactaaggttaattttgattctgaaaatggaccaacagtttacaacaccctgaagaaaatatttaagcacccgctggaag

SEQ ID NO: 6212 - DNA, 417 bp, Homo sapiens
  SIMILAR (124)..(417): 681254mologous to Homo sapiens meningioma-expressed antigen 11,accession number U73682,Smith-Waterman Score=332.
acgcccacgcgtccggccacgcgtccgggatatgaggtgcctttaacaactttatttacatgttaggaaattttaacatgagcttttcaagaaatggaactgaaacgtccacaggaagaggatgtggcagcactgcctgaaggtatgagaccacattctaatctttatggtttttcatgggaataggtgatatgtgcagctgttgttggactttttgctgctctcttttttttgtggagaagttttagaacggttaggatacggattcatgtgggacgagagagaaagcttgctctaatgctttctggattaaatcaataaaaaagtgaactacttggacactgtatccttgctcagaacgagtatgacggctatgaattagatgaatagtttgtggacctgcgcgttgacaaagag

SEQ ID NO: 6213 - DNA, 336 bp, Homo sapiens
caagaatgaaatgacacttgatgcttacattttcttagcagacatggccgcttaccaacaagaagagcagatgcagcttccccgagctgatgccattcgttcacgtctcatcgatactttctctctcattgagcatttgcaaggcttgagccaagctgtgccgcggcacactatcagggagttacttggtcagcagcctatttcttcactaatttaaatttaagactcctatccacatcctctacatttaagagtggaaaattctggggaggtttagttgctggtttaccaaacttgataaatcaagggcttgtaaataaaactgaagagatagaa

SEQ ID NO: 6214 - DNA, 563 bp, Homo sapiens
tttttctatctgaatgtttatattttcaattctctatttccaacaattcccttcattatcttttgctgggcccaaggatattgaagccatccattgctttacttgtcttccaagttcatcagtgcctgcactgcaaactcttgtaacttcttacgttcctctaggttatactgaagcttttctagcaactcaaaatatcggaagagtgagtctctgggccaaacacggtcatcctgatccatttccattagcccgggcagattttcgtgcacaagagtctcccagtccaaacgacctgcagggaggaatgcttcagaaaagcacgtctagatttgtaaaagttgggtaagagctggtaaatcctatggtgtgggtggaaaggtggggtggaaagaggtaacaggaagcaaggagggaaagggtgcatcagtaagaaaccactttttacaacgagcaaagagggccacagccacacttacccgaagtgaagaagaagtacaggggaaattaagaagcaaaaacaaagtaattaagaccagaaaattggaaaggagatatactag

SEQ ID NO: 6215 - DNA, 1398 bp, Homo sapiens
tcatagcaggtggccaaggaagctgatagtcaataccagggaccaggaaggtcgtgaccagtcctggaggccccaggctgtacttcgaccttgctgttctgggctctcctttccctcatgttgggcccatgcaactgctcgtcgctgctcaggactcagaaaggccatttgctcaggagtgacagccacagcctgagcactggtgagactagatagttggatgggactaaacaccacagcaaatttaggaggagggatgacagaaatggcaagaggagtaacgccctggatctgtccccgcagcagtgctgaaagagccaggtctgggatcccagctgctatggtgccaatttcagtgaagatctcaggcccccagttactgattgggccaaacccaccaggcagtacaaagaggtgggccagaaactccagttgttcctcagagcactgcagatgcagggtgcccaggaagagagctgcttggctcagcaccaccaccctcagccccttcacaaatgacctaaactcccaactgctgatgtgctggagctcctctggccgcagtccacagagagtataacccagcgctgtcagatgaacgaagtccaggtggctcacatgccgaccactctgccgtaggaaactggagaccacaatgcggagctgagtggtgctccagccatctatctgccccagggtgctcagcactccccagtccactaggatcagctcctgtagttcccgatctcctagacctattaagagcctaccaagctgcaggatctgctcaggacgaaatccccgggggggaccccacaactgttttgctttgcccatggctgcccgcagttcctcaggcccaagtcctgggtctcctgcaaataatgtcaggcagtcctcaaagtctgagagctccatctctgcaatctgggttgcagaccaggctgctgggaatgtccctcgtacatctgcacaatttggcacaggttctggaagatcctcagcagctggtcgcaccacccctgctaccagggctgctttcttggcagcaagctgtggctccctacacagctgtccaactctgctctgctcccagctctgctgcttttctagaagccgctccagggtctctggacccaaggcctccaggttttgtagtgccctctctgccagggctgcctggcggaggggggtcagtgccagcagctgctctggagctctttgcaccagctccaccaccaacataatggattcattggatagtctgtccatcaactggatcgagaatacatgatactccaggtcctgacgaggtaaatgggtgtactctgagaagacgtagacaccagtcacaacaaaaatgtagaagatgagcagcaacatcaagaggaaagtcat

SEQ ID NO: 6216 - DNA, 743 bp, Homo sapiens
tttttttaaaattcatggttatttaattgggttgttgtggagcataaatgagataatgtaaggaaaacacttaaaataatgcttggcacttagtaagtgctcagtaaccggcagatgctcttgttggcattgatgttgtagttagtctactttgctcctaataccaacaactcctgcaatgattgatgtttagttttagggaaaaaaaatcaaaagaaagaagttaagtaaatttttgtttcttcctattatcatgttaacttgttctttcgattcacctaggcacattcttcatcccactaaacgaaccctcaggatctctatccttaccaacatggtaacaacaaagtcaaagacattccaggcactcttccagaaaacagaaaagttggatagccacttaagaaggatctccaggatgaaaataagcaagataaaccaagctgccacctccaaggtcagcttcaatggccatagtttggtatttgtggattccagcaattactcaaggacccatccggcccacaaagaaagaggtggcctctgactgcagcgcacatgaagcctgctcaacagcctctgggcatgtgaaatctgttctatacgttgaggctttatagagacgcccactagctggtgttgatctcccaacataagtttcttctggcgggaaggatcaagtaactcctgatagtgtgtcgcagcacagcttggctcaagccttgcaaatgctcgatgagaga

SEQ ID NO: 6217 - DNA, 698 bp, Homo sapiens
tgaagagaggacctgttgtctcttaaggaaacatacagagtggagttctttctgatttatgcagctgaaataataagagcaataacataagcagtgagaatgagacaatggagtttgggaagcaaaaaataagtcattaggcagatgatcaacagccaggataaaaatgagtgacatgaaaggatacactcaaggacccatccggcccacaaagaaagaggtggcctctgactgcagcgcacatgaagcctgctcaacagcctctgggcatgtgaaatctgttctatacgttgaggctttatagagacgcccactagctggtgttgatctcccaacataagtttcttctggcgggaaggatcaagtaactcctgatagtgtgtcgcagcacagcttggctcaagccttgcaaatgctcgatgagagagaaagtatcgatgagacgtgaacgaatggcatcagctcggggaagctgcatctgcccttcttgttggtaagcggccatgtctcagcccaggttctcttcgcccactcagtcctgacttcacgcttccacctccagctcaggcgccccctgagcccggctacccctacgcaggacgagctcagggccggctcccagcctcactgcgccccatttcccgccccgcccgacccccaggtttcggctcaccccgggacccggccctagcccctgc

SEQ ID NO: 6218 - DNA, 1820 bp, Homo sapiens
  SIMILAR (747)..(1748): 731254mologous to Homo sapiens microtubule associated protein 1A,accession number U80458,Smith-Waterman Score=1206.
tttttttttttttttatactttttaattttaatgaacagacattgttctatctgaatgtttatattttcaattctctatttccaacaattcccttcattatcttttgctgggcccaaggatattgaagccatccattgctttacttgtcttccaagttcatcagtgcctgcactgcaaactcttgtaacttcttacgttcctctaggttatactgaagcttttctagcaactcaaaatatcggaagagtgagtctctgggccaaacacggtcatcctgatccatttccaattaccccggccagattttcgggcacaagagtctcccagtccaaacgaccaatagattcagaaaatctggattcagaaggggaagaataggaagaggatgtggaggagacacaggaggaagactggtactctctcttttttgacaaggtctcttctgtttttgatgcagatgttattaaatcctcttcagtggcaccataattagactctacttcagacacttctgataagtccaaactttccctttgttgactagctcctcttgaactgtcctctattttgctatggcttgacgtcagtgcttcatgtgacatgttttttctcccatcatggctactatgatacttcgaaagataatggagccaagcaacaaccaaaggatgaaatagatgctgctgaagatgcgactgacttcaggcaccttccagacgttctgaagcagtgcataccaatgatccaagccagccaacctgccgatagtgctgttcctgctacctctggcaaagtctatggaacgccagagactgaactcacctaccccactaacatagaggctgcccctttggctgaagaggaacatgcgtcctcggccacttcaatcactgagtgtgacaaactttcttcctttgccacatcagtggctgaggaccaatctgtggcctcacttacagctccccagacagaggagacaggcaagagctccctgctgcttgacacagtcacaagcatcccttcctcccgtactgaagctacgcagggcttggactatgtgccatcagctgaagacaagggcttcaaatcaccaccctgtgaggacttctctgtgactggggagtcagagaagagaggagagatcatagggaaaggcttgtctggagagagagctgtggaagaggaagaggaggagacagctcacgtagagatgtctgagaaactttgcagtcaatatggaactccagtgtttagtgcccctgggcatgccctacatccaggagaaccagcccttggagaagcagaggagcggcgccttagcccagatgacagcacagtgaagatggcttctcctgcaccatctggcccacccagtggcacccacacaccgtttcatgagtccccagtggaagaaaagtctgagccccaagactttcaggaggcagactcctggggagacactcagcgcacaaccagtgtgggcaaaagaaaagctgctgaggaattacgatgcctagtcagaactggccgaagcatccgaggactcagtctgcctccagcttgcactcgagcagagcgacgagaggtggaacgtgttgtggtggatgcactgagtggcctgaagggtgacctggctggacgttactataggctcagtgagatgacagaggctgaacagcagcagcttattgatgaccactttctgtttgataagcctgtgtccccgttgctgactgcagcaggaatggctcgagactggccagatgctcgtggaatttggcacaacaatgagaagagcttcctgatctgggtgaattga

SEQ ID NO: 6219 - DNA, 1085 bp, Homo sapiens
  SIMILAR (7)..(129): 821254mologous to Homo sapiens Human myelin oligodendrocyte glycoprotein gene,accession number AAZ29204,Smith-Waterman Score= 196.
gtattttttagcagagacagggtttcaccatgctggccaggctggtcttgaactcccgaactcaggtgatctatccgcctcggtgtcccaaagtgctgggattacaggcgtgagccaccgcgcccggcctagacacttatacttttttaattttaatgaacagatattgttctatctgaatgtttatattttcaattctctatttccaacaattcccttcattatcttttgctgggcccaaggatattggaagcccatccattgctttacttgtcttccaagttcatcagtgcctgcactgcaaactcttgtaacttcttacgttcctctaggttatactgaagcttttctagcaactcaaaatatcggaagagtgagtctctgggccaaacacggtcatcctgatccatttccattagcccgggcagattttcgtgcacaagagtctcccagtccaaacgacccatcatggctactatgatacttcgaaagataatggagccaagcaacaaccaaaggatgaaatagatgctgctgaagatgcgactgacttcaggcaccttccagacgtcctgaagcagtgcataccaatgatccaaggtgaagagaatgaacactgttaccagggaattcgggaggtccgagaagaacacatggtactccaggtcctgacgaggtgaacgggtgtactctgagaagacgtagacaccagtcacagcaaaaatgtagaagaagatgagcagcaacatcaagaggaaggtcatgctcaacatggtaacaacaaagtcaaagacattccaggcactcttccagaaaacagaaaagttggatagccacttaagaaggatctccaggatgaaaataagcaagataaaccaagctgccacctccaaggtcagcttcaatggccatagtttggtatttgtggattccagcaattcaagtaactccctgatagtgtgccgcggcacagcttggctcaagccttgcaaatgctcaatgagagagaaagtatcgatgagacgtgaacgaatggcatcagctcggggaagctgcatctgctcttcttgttggtaagcggccat

SEQ ID NO: 6220 - DNA, 2046 bp, Homo sapiens; identical to SEQ ID NO: 4708
  SIMILAR (733)..(1380): 1001254mologous to Homo sapiens Human NIP2b protein,accession number AAY70847,Smith-Waterman Score=1147.

SEQ ID NO: 6221 - DNA, 1691 bp, Homo sapiens
  SIMILAR (1282)..(1422): 801254mologous to Homo sapiens Human myelin oligodendrocyte glycoprotein gene,accession number AAZ29204,Smith-Waterman Score= 207.
agcggccgcccttttttttttttttttttaagtttaaatattttattttaggaaaggtactcttaggatttgtgttaatgttgttttctgtattaacaaattagtcacaatcaacttcgatatagccattgattcttctttctaaatctgtataaaaaggatattttcttgaaaaaccacaagaaaaatacaactgctttttcattgcccaggtcagttactcgctacagtcaggactgcatttaaattaggactgggcatctaatacttttgagtatttacaaatattatttaaaactatactcctagaccaccagctttcaaaaaagttgggatctgcttggacttggcaataaatatgtaccaaacatggaataatttctaagccgcttatgaggaggttttaaaaattactaacatttattaagcagtttgtgtgtcaggcatattgtgagtgctttgctttatacaaattcacttacttttttcagaattcctttgaggtagggtaggtacttttagaaatgccattttacatgtgaaaagtgaggttggaagagcctcagtaacctgcccagggccacacagctagaaggtgagccagcacttgagccacgtttctctttccagccagattctcagcactcagctgtgctgctggtggtcacagctggctgactggaccaggaagaaccttttagtgtcaggcgtgtgaatcacagcacttgggacaggttaccaagaaccatgatcacttaatttttatatttatacatgtacatttgtatatacatagagaaagtgcaggcaaaaccattatacagttactctaatagccatttgctactgccagcagtctcaggactgatccctgtctaagctggcaagtttacattctccttgtatcactacaggatttgctctggacaggagctgtaactcctcaacaaatcctgctttcagtctactactgcacagcttgaattgttcagtaggcccagctttttgtgaaagaaaaggccttgccatggtataaagagtttttttccctctataaaagatgtaaaatttttggctgggtgccagtggctcacgcctgtaatcccagcactttgggaggccgagacgggcagatcatgaggtcaggagatcaagaccatcctggctaacacggtgaaatcccgtctctactaaaaatacaaaaaattagctgtgcgtgatggcatgcgcctgtagtcacagctacttgggaggctgagattataggcacctgccaccactcctggctaattttgtatttttagtagagatggggtttcaccatattggccaggctggtctcaaactcccgacctcaggtgatccgcctgcctcagcctcccaaattgctaggattacaggcgtgagccaccgtgcccggcaagttctgtttattttcgtatctccagactctagcaccaggatggaagcatgggacgtgctctgtgaaggttgctgagagatgtggtttgggaagactggagcagtccagaggatcagtgcctgacctatggtggtgctcagtaaacgtaaacatcaggcagttgcaagcttcattctaaagcacagaaatactgtgcatgctgcagagactgtcgcttgatgagtctctgtcaaattatctctcatgtacctctgctcctggattgccc

SEQ ID NO: 6222 - DNA, 445 bp, Homo sapiens
  SIMILAR (2)..(445): 891254mologous to Homo sapiens Membrane-bound protein PRO1115,accession number AAY66673,Smith-Waterman Score=695.
aagtaaaaatgatcctcctgatcatcccatcctttcgtctctctccattctcttcttctaccatcaaggaaccattgtgaaagggtcatttttaatctctgtggtgaggattccgagaatcattgtcatgtacatgcaaaacgcactgaaagaacagcatggtgcattgtccaggtacctgttccgatgctgctactgctgtttctggggtcttgacaaatacctgctccatctcaaccagaatgcatatactacaactgctattaatgggacagatttctgtacatcagcaaaagatgcattcaaaatcttgtccaagaactcaagtcactttacatctattaactgctttggagacttcataatttttctaagaaaggggttaagggtgtgtttcactggttttggaagaactcaatgcttttaactacaatcggcatttcag

SEQ ID NO: 6223 - DNA, 1063 bp, Homo sapiens
  SIMILAR (822)..(1043): 621254mologous to Homo sapiens Human secreted protein, SEQ ID NO: 8153,accession number AAG04072,Smith-Waterman Score=212.
aacggcctctctttggggtgaccggaggcaaagagctgttgggagtgttttgtggggtctcttcttccttccttgtggctacatgaagcctgagtctcagcctctggtttcttggtttctttccactgccctgggcaaaccagcttcgactgaacgtcagccagtccagagagtaattaaaagagttaagtctcaaaagtaaatctccgggaagagccctcagtggtttcagacccccaggcacttgtcctcgtgccctccctgaggcgtcctgtcctactggacatgctggagcctgcccgtgtccttgtggaccatggaatttgcccggggttggggggcaggggtggagagaaataaaacttcctgtgatctatgtatcggcccagtacatagatcctggatagaggcgattgagctaagcatgggaccaagcatttctgtgcagtgcctgcagaattgagtttccttctggctatgggagattcttctgagctgtctcagttgtctgacatctggcatctgccatgggccaggacgtctggggcaggggcagaagaggacaggaggagactgccctagaggattctgggaaaacgggaaaacagcaaaacagagctaccccacccaatctcaggctgatgcattattaataaaaagtgactgttgactgaagtttgtagacataaatattgtttgaggtacttggccctaggtaagcaccatacaagtgctattatttctaaatgattttatcaagataaaagacaccagccaggcatagtggctgccgcctgtaatccctttgggaggtcgaggcaggaggatctcttgagatcgtaagttggagaccaacctgggcaacatagcgagtccccatctatgcaaaaaatttagaaattagctgggcatggtggtgcacacgtgtagtcctagctcctcaggaggccaaggcaggacaatcccttgagtccgggaggtcaaggctgcagtgtgctgtgatcacaccactgcactccagcctgggcgacccaaggagaccctggatctaagagtaaaaatg

SEQ ID NO: 6224 - DNA, 494 bp, Homo sapiens
  SIMILAR (253)..(360): 971254mologous to Homo sapiens Membrane-bound protein PRO1115,accession number AAY66673,Smith-Waterman Score=172.
aattcaccacccccataaaatcatccacacttccccatctccctttcccaaaaacagaattatctgtaccccatttagacactcactgtgattctcccctgtgctactttatatgccatttctcctgttaatctgccttttgtaagttaattcttcagcaaaccgtcagagggcaaaggagaagttttcccttggcccctacgttatcaacagtacagacacataatactattctaacttgttcttttggtttttcagagtttcgtaaaaaggagcaacaaattaaacaatgcaagggcacagcaggacaagcactcattaaggaatgaggagggaacagaactccaggccattgtgagatagatacccatttaggtatctgtacctggaaaacatttccttctaagagccatttacagaatagaagatgagaccactagagaaaagttagtgaattttttttttaaaagacctaataaaccctattcttcctc

SEQ ID NO: 6225 - DNA, 1254 bp, Homo sapiens
  SIMILAR (631)..(1005): 1001254mologous to Homo sapiens Membrane-bound protein PRO1115,accession number AAY66673,Smith-Waterman Score=652.
atgtttgtgtttgaaactttaggagctgcccaggttatggaaggcggccaagtggaatataagcccctttcgggcattcggtacatgtggtcgtaccatttaattggcctcatctggactagtgaattcatccttgcgtgccagcaaatgactatagctggggcagtggttacttgttatttcaacagaagtaaaaatgatcctcctgatcatcccatcctttcgtctctctccattctcttcttctaccatcaaggaaccgttgtgaaagggtcatttttaatctctgtggtgaggattccgagaatcattgtcatgtacatgcaaaacgcactgaaagaacagagacagtcatgggaaattcctggtgtgtgtgaggaagaacgagggagaaaaggagagggtttgaatgagagtgtgtatcagcatggtgcattgtccaggtacctgttccgatgctgctactgctgtttctggtgtcttgacaaatacctgctccatctcaaccaggtacgtctctacctcttgcctcaggaacacacagaagggtccaaaggaggcggcggcggctcccagtcaccggcccccgccggcgagcgcacgatgcactgcctgggcgccgagtacctgaatgcatatactacaactgctattaatgggacagatttctgtacatcagcaaaagatgcattcaaaatcttgtccaagaactcaagtcactttacatctattaactgctttggagacttcataatttttctaggaaaggtgttagtggtgtgtttcactgtttttggaggactcatggcttttaactacaatcgggcattccaggtgtgggcagtccctctgttattggtagctttttttgcctacttagtagcccatagttttttatctgtgtttgaaactgtgctggatgcacttttcctgtgttttgctgttgatctggaaacaaatgatggatcgtcagaaaagccctactttatggatcaagaatttctggtaagcaaacatttcatttccaattgcaatctccatgctcgcaatcttgaaagttttgtaaagctgcacacacgaaagaggctcatacccagcctctctcttctagagggctctgaggcttctactacccccgggcctgaaagtgggatttgcgctgaactctccaaggctgaacccacctccctttctgagaaccttctccctgaagaagtgaagctgaacaagaatgctgatcagatggattcctaa

SEQ ID NO: 6226 - DNA, 793 bp, Homo sapiens
  SIMILAR (360)..(461): 581254mologous to Homo sapiens Membrane-bound protein PRO1115,accession number AAY66673,Smith-Waterman Score=97.
gctattaatgggacagatttctgtacatcagcaaaagatgcattcaaaatcttgtccaagaactcaagtcactttacatctattaactgctttggagacttcataatttttctaggaaaggtgttagtggtgtgtttcactgtttttggaggactcatggcttttaactacaatcgggcattccaggtgtgggcagtccctctgttattggtagctttttttgcctacttagtagcccatagttttttatctgtgtttgaaactgtgctggatgcacttttcctgtgttttgctgttgatctggaaacaaatgatggatcgtcagaaaagccctactttatggatcaagaatttctgagtttcgtaaaaaggagcaacaaattaaacaatgcaagggccacagcagggacaagcactcattaaggaatgaggagggaacagaactccaggccattgtgagatagatacccatttaggtatctgtacctggaaaacatttccttctaagagccatttacagaatagaagatgagaccactagagaaaagttagtgaattttttttttaaaagacctaataaaccctattcttcctcattgtctttgtcattattgtttgaccaggtaacaatactggaactatattagtttacctttttttgtacaaattaggacagaaaaactcttctaaaaccatgtttatatgcatcaacttacaaagtacactatgtaagaactgaggtaagtttgtaagtgcacaactaataaataaacctttttaagataaggaaaaa

SEQ ID NO: 6227 - DNA, 413 bp, Homo sapiens
  misc_feature (1)...(413): n = a,t,c or g
attccccggagccggctgctgtgaactcgcccccgtgtggatagtcactccctgccgattctgtctgtggcttcttccctgccagcaggactgagtgtgcgtacccagttcacctggacatgagtgcacactctcacccctgcacatgcataaacgggcacaccccagtgtcaataacatacnnnnnnnnnnnnngggggggcccttttaaaagaacccttggggggcccaaatttaacgggggcgggcaaggaaaaatttttttctttatggggggcctttttaaaccctccttgggatttttggaaaagaacctttttttnnnnnnnnnnacatatggggccaccccccctccaaaatttaagccttaagggnnnnnnnnnntttttaaggggaaaagggggaaaaccacc

SEQ ID NO: 6228 - DNA, 395 bp, Homo sapiens
  misc_feature (1)...(395): n = a,t,c or g
ccgacttttctaacccccaacctattccgcttttttttccccctttcccccttaaaaannnnnnnnnncccctaagcccttaaattttgtaggggggtttttcccattttttcccccccccaaaaaaagtttcttttccaaaattccccaggtggtttttttttccccccccttaaagaaaaaaatttttcttttcccccccccgttaaatttgggcccccccagggttctttttaaacgcccccccccnnnnnnnnnnnnnnnnnnnnnnnnnnnnnnnnnnnnnnnnnnnnnnnnnnnnnnnnnnnnnnnnnnnnnnnnnnnnnnnnnnnnnnnnnnnnnnnnnnnnnnnnnnnnnnnnnnnnnnnnnnnnnnnnnnnnnnnnnnnnnnnnnn

SEQ ID NO: 6229 - DNA, 387 bp, Homo sapiens
  misc_feature (1)...(387): n = a,t,c or g
nnnnnnnnnnnnnnnnnnnnnnnnnnnnnnnnnnnnnnnnnnnnnnnnnnnnnnnnnnnnnnnnnnnnnnnnnnnnnnnnnnnnnnnnnnnnnnnnnnnnnnnnnnnnnnnnnnnnnngggggggcccttttaaaaaaacccttggggggcccaaatttaccgggggcgggaaaggaaaaatttttttctttatgggggggcaattaaaaccctccttgggatttttggaaaaaaaccttttttttgggggggaaaaaaatgggcacannnnnnnnnnaaaatttaaacctttaggggnnnnnnnnnntttttaaggggaaaagggggaaaaccaccccaaaaaccctggctttaaaaaattttgnnaantttcgaaaaaaaccttc

SEQ ID NO: 6230 - DNA, 413 bp, Homo sapiens
  misc_feature (1)...(413): n = a,t,c or g
ggggggggccctttaaaaaaaacccttgggggggccaaaattaaacggggggtggaaaaataaattttttttctttttggggggggtttttaaaactggggccggggcgggtttttaaaaccccgggaagggaaaaacccccacctggggatttttggaaaaaaaccttttttttggggggggaaaatttgggcccacccccccccaaaaatttaaggctttaagggnnnnnnnnnnttttaaaggggaaaagggggaaaaaaaacctcaaatgcctgggggtgaaaaattttctttactgggttttttttaaaaaaattttttcccccggggctctggttncnccntggctgacanttataatgaaagttatttgtggggtaatattgccaaaacagggagggaattccgcg

SEQ ID NO: 6231 - DNA, 1547 bp, Homo sapiens
  SIMILAR (1)..(1086): 981254mologous to Homo sapiens glycoprotein,accession number M80927,Smith-Waterman Score=1905.
tacaaactggtctgctactacaccagctggtcccagtaccgggaaggcgatgggagctgcttcccagatgcccttgaccgcttcctgtgtacccacatcatctacagctttgccaatataagcaacgatcacatcgacacctgggagtggaatgatgtgacgctctacggcatgctcaacacactcaacaacacgaaccccaacctgaagactctcttgtctgtcggaggatggaactttgggtctcaaagattttccaagatagcctccaacacccagagtcgccggactttcatcaagtcagtaccgccatttctgcgcacccatggctttgatgggcgtgaccttgcctggctctaccctggacggagagacaaacaccattttaccaccctaatcaaggaaatgaaggccgaatttataaaggaagcccagccagggaaaaagcagctcctgctcagcgcagcactgtctgcggggaaggtcaccattgacagcagctatgacattgccaagatatcccaacacctggatttcattagcatcatgacctacgattttcatggcgcctggcgtgggaccacaggccatcacagtcccctgttccgaggtcaggaggatgcaagtcctgacagattcagcaacactgactatgctgtggggtacatgttgaggctgggggctcctgccagtaagctggtgatgggcatccccaccttcgggaggagcttcactctggcttcttctgagactggtgttccagcgccaatctcaggaccgggaattccaggccggttcaccaaggaggcagggacccttgcctactatgagatctgtgacttcctccgcggagccacagtccatagaaccctcggccagcaggtcccctatgccaccaagggcaaccagtgggtaggatacgacgaccaggaaagcgtcaaaagcaaggtgcagtacctgaaggataggcagctggcaggcgccatggtatgggccctggacctggatgacttccagggctccttctgcggccaggatctgcgcttccctctcaccaatgccatcaaggatgcactcgctgcaacgtagccctctgttctgcacacagcacgggggccaaggatgccccgtccccgtctggctggccgggagcctgatcacctgccctgctgagtcccaggctgagcctcagtctccctcccttggggcctatgcagaggtccacaacacacagatttgagctcagccctggtgggcagagaggtacacacttgttgatgattaatggaaatgtttacagatccccaagcctggcaagggaatttcttcaactccctgccccctagccctccttatcaaaggacaccattttggcaagctctatcaccaaggagccaaacatcctacaagacacagtgaccatactaattataccccctgcaaagccagcttgaaaccttcacttaggaacgtaatcgtgtcccctatcctacttccccttcctaattccacagctgctcaataaagtacaagagtttaacagtgtg

SEQ ID NO: 6232 - DNA, 1797 bp, Homo sapiens
  SIMILAR (127)..(1167): 971254mologous to Homo sapiens glycoprotein,accession number M80927,Smith-Waterman Score=1812.
agtggagtgggacaggtatataaaggaagtacagggcctggggaagaggccctgtctaggtagctggcaccaggagccgtgggcaagggaagaggccacaccctgccctgctctgctgcagccagaatgggtgtgaaggcgtctcaaacaggctttgtggtcctggtgctgctccagtgctgctctgcatacaaactggtctgctactacaccagctggtcccagtaccgggaaggcgatgggagctgcttcccagatgcccttgaccgcttcctctgtacccacatcatctacagctttgccaatataagcaacgatcacatcgacacctgggagtggaatgatgtgacgctctacggcatgctcaacacactcaagaacaggaaccccaacctgaagactctcttgtctgtcggaggatggaactttgggtctcaaagattttccaagatagcctccaacacccagagtcgccggactttcatcaagtcagtaccgccattcctgcgcacccatggctttgatgggctggaccttgcctggctctaccctggacggagagacaaacagcattttaccaccctaatcaaggaaatgaaggccgaatttataaaggaagcccagccagggaaaaagcagctcctgctcagcgcagcactgtctgcggggaaggtcaccattgacagcagctatgacattgccaagatatcccaacacctggatttcattagcatcatgacctacgattttcatggagcctggcgtgggaccacaggccatcacagtcccctgttccgaggtcaggaggatgcaagtcctgacagattcagcaacactgactatgctgtggggtacatgttgaggctgggggctcctgccagtaagctggtgatgggcatccccaccttcgggaggagcttcactctggcttcttctgagactggtgttggagccccaatctcaggaccgggaattccaggccggttcaccaaggaggcagggacccttgcctactatgagatctgtgacttcctccgcggagccacagtccatagaaccctcggccagcaggtcccctatgccaccaagggcaaccagtgggtaggatacgacgaccaggaaagcgtcaaaagcaaggtgcatgtacctgaaggacaggcagctggcgggcgccatggtatgggccctggacctggatgacttccagggctccttctgcggccaggatctgcgcttccctctcaccaatgccatcaaggatgcactcgctgcaacgtagccctctgttctgcacacagcacgggggccaaggatgccccgtccccctctggctccagctggccgggagcctgatcacctgccctgctgagtcccaggctgagcctcagtctccctcccttggggcctatgcagaggtccacaacacacagatttgagctcagccctggtgggcagagaggtagggatggggctgtggggatagtgaggcatcgcaatgtaagactcgggattagtacacacttgttgatgattaatggaaatgtttacagatccccaagcctggcaagggaatttcttcaactccctgccccctagccctccttatcaaaggacaccattttggcaagctctatcaccaaggagccaaacatcctacaagacacagtgaccatactaattataccccctgcaaagccagcttgaaaccttcacttaggaacgtaatcgtgtcccctatcctacttccccttcctaattccacagctgctcaataaagtacaagagtttaacagtgtg

SEQ ID NO: 6233 - DNA, 799 bp, Homo sapiens
  SIMILAR (24)..(158): 801254mologous to Bos taurus chitinase-like protein 1,accession number AF011373,Smith-Waterman Score=194.
aattcccgggtcgacgatttcgtggcatccccaccttcgggaggagcttcactctggcttcttctgagactggtgttggagccccaatttcaggaccgggaattccaggccggttcaccaaggaggcagggacccttgcctactatgaggtaatggagttggggagaaggtaggattcccccacaccaccagcagccctggggaaggtgattccccaccacgttcttgctttttctcctttgggaataaagaaaatgtccggttgccccagcatgcctgaggaagtggaagggagaggttaggacatttgttgctgaaaatctccagcaggtacaggcacatgggcctgcaccactaggcacctgggatatccctctggctatggggctgaggtcttccttccagcccaggaaagagcagaggtcaagaggcagattttttgtttcactctagcctctgctactctgtgtggccttgggcctgtcctcagtgtcaaccagcaggcctcacatctctgtttaaaatggaaggaagctaagcagggccaaggcagccaccatctctgggtcatttgcctctggtttgtataaacttgtgtgatgcatgcagcctgcagaccctgcaaagagtgaggctgcaggatggagcaggagctaaaagagatttggagagtggcgtctcctggtgacctgcaaggtctcggcacgactccccacactgccttttccctgttatctgctcagatctgtgacttcctccgcggagccacaggcaatagaatcctcggccagcaggtccc

SEQ ID NO: 6234 - DNA, 423 bp, Homo sapiens
  misc_feature (1)...(423): n = a,t,c or g
acattttgcaaaggtaaacacaagtgattctctttattcatggcagttatgtgctataaaatcacagcaaacactgaatttctgaatactaaacattcctcctaggagaaatatggggttaggttcctgtgagcctctggtcccaacattttcgttaacccattaatccataaccttgtttcatgtgtgtttctttttaagggcaacttacttaatatgtattgttgattcattaacatttaacttatggccaacagcactataactcatgcccaacagcactataactcatgcctgactgaagattatctaacatacatannnnnnnnnnnnnnnnnnnnnnnnnnnnnnnnnnnnnnnnnnnnnnnnnnnnnnnnnnnnnnnnnnnnnnnnnnnnnnnnnnnnnnnnnnnnnnnnnnnnnn

SEQ ID NO: 6235 - DNA, 513 bp, Homo sapiens
cgccactgattcagtgagctggagattggatcacaggtataattcaagcttttcatgtagtcatgtagatcactagactccttggtgtactgacgtagcaatttaaaagcagatcatgtgtagtacatctagaagtagatttacaaatattctgaagagttgtaaccttttaaaatactaacagtgacatggttttgtttttaaggtttagcaatatttagcccattatttttgttttattcttaacttgaatgtttgtaaattttatttcttgatgctttcattgtgttatgataacatcaaaataacttgatattctaggttactaataattgttgtgcatgagtgttactacttttggaattgaagactttaaagaattttaaaggcagttgttgactaaacttctttctcttgattcacagccgaaggagtaaaggtgctgcaatgatgttagctgtggccactgtggatttttcgcaagaacattaataaactaaaaacttcatgtga

SEQ ID NO: 6236 - DNA, 1490 bp, Homo sapiens
  SIMILAR (2)..(97): 711254mologous to Homo sapiens Human secreted protein, SEQ ID NO: 7795,accession number AAG03714,Smith-Waterman Score=133.
ttgctcaggctgctcttgaactcccggacttgagcagtctgcttgtctaagccttccaaagtgctgggattacaggtgtgagccactgtgcccagcctgttacctcatttaaaacaaattttgcacatctgaacagcctaaaattgtaatgtgataagtggggtaggagtggggtgggcgtagtgggattttgaatcaatgaaggcccttgttcttgtggcatccttttgcagtgattccctgccaggcaaggcagtaaacctgggattgcctgcccaggactgtaatcacattgatgtcccagcgccatggagtatgtaatgaatgaactgccagcagaactactcactaagaactactccctgtttgtgaggattgtacctgttgagagaagttgcaaaaagaattagtcaaaagaattagtcaaaatttgtcctatgacctaggtctgaaggtcatttaccacattgattgttctcttcatccagcctttgagccctatgagttagtgcccttagcctttgagtcccacaggtatggaggagctacctgtggggacctgagccatcactattcctgcttcaagttacactggtgcctctcactagcactgctctgaaaagccagctggaaaaatcaatgcatttgagtacataaattctttggctccaaagaaatgccatagcaatattgcttttaattcagttttgtttagatgttagaattgggatttgttcttgctttttggttgcgatgggagtatatactaagttacttatactaaggcattagtagtctcatatctgaggagcaattggatttttagttcagctaaattaatgcctctttttaaatactaacttgtactacttttgtggctgggaatggcatcttttattgaactgaggcaggttttaaaagacttgcctgaacatttagagcactcccaatgagggtaaaatagacttgaatctgtaatgattctcgtaactgttcctggtgtgtgtccagcacaatgttgctgggcagagcagaggggcagaggctcaggtatgtacttcattgacaagtgggcaaggcccatcctgggtaccacaattggcttaatgatctcttcattgtgaagtccggctacctcgtttgcataagaactcccagtaatcaggcaaggcattgtcagaattgggaggaataaaatcagtgagtctggaaggagtgctctgtatacaattgcaaagaacaaaatggtcatctttaaggtacctgattgcatgcacttaaatgcagattattttggagtttgaaaagggactattaatgaaatctttcttttcccgccgatttttttttttcccttccccgccactgattcagtgagctggagattggatcacagccgaaggagtaaaggtgctgcaatgatgttagctgtggccactgtggatttttcgcaagaacattaataaactaaaaacttcatgtgaaaaaaa

SEQ ID NO: 6237 - DNA, 832 bp, Homo sapiens
  SIMILAR (634)..(242): 451254mologous to Mus musculus putative,accession number AK002495,Smith-Waterman Score=177.
  misc_feature (1)...(832): n = a,t,c or g
cacaaaaaagggggccaaataaaaaacccccccagggtttttcccggggtttaaaggggccctttaaattaaagggcccccccnnnnnnnnnnnnnnnnnnnnnnnnnnnnnnnnnnnngaagtttttagtttattaaatgttctttgcaaaaaatccacagtgggccacaagctaacatcattgcagcaccttttaactccttcggctgtgatccaatctcccagctcactgctagacacttcatttcttctttttgccaggcaccaacattggccttttgcagtccccctcgactttcttcattctgttcttgcggttcctttcggttgctttcttgaggtctttttcttctcatacaggccatgtcttgcaagtctatgtttggggttcatttttctttgcataatccagggggaatcataaatcatggccaaagcccagttgtcttgccaccacccaaaatgaggttctggaatcccaaatacaaaggatggaccatccgggtgtgggggcttggtaccattttggggcctagggtttttcccccggaatttctggtcttggggggactggtcggccttcccggggggtgaaaggacatcaaatgacccatttgttttcctctgaagtaggtcgggttggggcatggaactttctaggtgcgggataggttacgggtgtcgttcatgatggcgatctatcttcagacagccaaggaggaaaagcaaggcttacagaaggatgttccttcaggaggaagcagcactaaaagcactctgagtcaagatgagtgggaaaccatctcaataaacacattttccgataaaccc

SEQ ID NO: 6238 - DNA, 696 bp, Homo sapiens
  SIMILAR (2)..(103): 761254mologous to Homo sapiens Human secreted protein, SEQ ID NO: 4718,accession number AAG00637,Smith-Waterman Score=140.
  misc_feature (1)...(696): n = a,t,c or g
gagacggagcctcgctctttcgcccaagctggagtgcagtggcgtgatcttggctcactgcaagctttgcctcccaggttcacgccattctcctgccccagcccgggacgngngcntgcagagagccaggagctcaccactgcactcagactgggcggcaganaagactctgtctctaagtaaacaaacagacagagtagtgtggaggcctggatgatgaagggaagtggttgggaaagcagataactccctggacacacacagggacagagagccagcctgcggccagggaacaagtatgtttctctgcctaggggctgcttaaaccaggggtctcaagggtcactgagggggccgagggtggtctcgcctggaaaaggggaatagtctctggagggaagcatccccaagttggacctcagaattgtctccgataacagctgacaattaaacaaccaaacgttcagagaaacaccatgctactgatgagaatcggcagaaacaccagtcacagatttagacccccaaagactaggacactggaattatttagtacagaatataaaataactatatatgaaatatgtttaagaagtggaaactgtaatctaaaaagcaagcatgtatcaagagaccataaaaaaaatcagacaaatctaaaacacaatcagatgtaacttttagcggacgcgtgga

SEQ ID NO: 6239 - DNA, 3882 bp, Homo sapiens
  SIMILAR (3788)..(213): 981254mologous to Homo sapiens zinc finger protein,accession number L11672,Smith-Waterman Score=6534.
tgcacaccaccatgcctggctaatttttgtttttgttttttgagacggagtcttgctctgtcgcccaggctggagtgcagtggcgcgatctcggctcactgcaagctctgcctcccgggttcacgccattctcctgcctcagcctcctctcaagtagctgggagtacaggcgcctgccaccaagcccggctaattttgtttttgtgtttttagtagagacggggttttaccgtgttagcccaggatgatctggatctccctggagctggtgatccgcccgcctcggcctcccaaagtgctgggattacaggtgtgatagtatgaattttcttatggttagtaaggattgaagactggttaaaggctttgccacatttttcacatttgtagggtttctctccagtgtgaattatcttatgtttagtaagagctgaggactctttaaaggctttgccacattctccacatttgtagggtttctctccggtgtgcaacctcttatgtctaggtaggggtgaagattggctaaatgctttgccacattcttcacatttgtagggtttctctctagtatgaattctcttatgtccatttagggttgaggatgatataaatgctttgccacattcttcacacttgtaaggtttctctccagtatgaattatcttatgtgtagtaagctttgaggatcgattaaaagctttcccacattcttcacatttgtatggtttctctccagtgtgcatcctcgtatgtctagttagggttgaggattggctaaatgctttgccacattcttcacatttgtagggtttctctccagtatgaattatcttatgttcagtaagagttgaagatttcctaaaagctttgccacattcttcacatttgtagggtttctctccagtatgaattatcttatgtgtagtaagggttgaggattggctaaaagctttgccacattcttcacatttgtagggtttctctccagtgtgcatcctcttatgtgtagtaaggtgtgaaggctggctaaatgctttgccacattcttcacatttgtagggtttctctctggtatgaattctcttatgttcagtaagggttgaggaccagataaatgctttgtcacattcttcactcttggaaggtttctctttagtatgaattatcttatgtgtcgtaagatttgaagattgattaaaagctttgccacattcctcacatttgtagagtttctctccagcatgtattattttatgtttagcaagggctgaggagtgcttaaaagctttgccacattctttacatttgtagggtttctctccagtatgaattgtcttatgcttagtaagggttgaggaacggctaaaagctttgccacattcttcacatttgtagggcttctctccagtgtgtatcctcttatgtctagttagggttgaagaccatataaatgctttgccacattctttacatttgaagggtttctctctagtatgaattcttttatgtttagtaaggcttgaggaccagttaaatgctttgccacattcttcacacttgtaaggtttctctccagtatgaataaacttatgtatagtaagatttgaagatcgattaaaagctttgccacattcttcacatttgtagagtttctctccagcatgtattattttatgtttagtaagggttgagagtcgcttaaaagttttgtcacattctttacatttgtagggtttctcttcagtatgagttatcttatgattagcaagggttgaggaattgctaaaagctttgccacattctttacatttgtagggtttctctccagtatgaattctcttatgtttagcaagggctgaagaatggctaaaagctttgccacattcttcacatttgtagggtttctctccagtgtgtatcctcttatgtcttcttagggttgaggaccatagaaatgctttgccacattcttcacacttgtaagacttctctccagtatgaattatcttatgtgtagaaagacttgaggaatgattaaaagctttgccacattcttcacatttgtagagtttctttccagcatgaattattttatgtgtagtaagggttgagaattgcttaaaagctttgccacattctttacatttgtagggtttctctctactatgaattatcttatgtttattaagggttaaggattgtctaaaagctttgccacattcttcaaatttgtagggtttctctccagtatgaattatcttatgtttagtaagggttgaggattgcctaaaagctttgccacattcttcacatttgtagggcttctctccagtgtgtatcctcttatgtctagttagggttgaagaccatataaatcctttgccacattctttacatttgaagggtttctctctagtatgaaatcttttatgtttagtaaggcttgaggaccagttaaatgctttgccacattcttcacacttgtaaggtttctctccagtatgaataaacttatgtatagtaagatttgaagatcgattaaaagctttgccacattcttcacatttgtagagtttctctccagcatgtattattttatgtttagtaagggttgagagtcgcttaaaagttttgtcacattctttacatttgtagggtttctcttcagtatgagttatcttatgattagcaagggttgaggaattgctaaaagctttgccacattctttacatttgtagggtttctctccagtatgaattctcttatgtttagcaagggctgaagaatggctaaaagctttgccacattcttcacatttgtagggtttctctccagtatgaattctcttatgtttagcaagggttgaagaatggctaaaagctttgccacattcttcacatttgtagggtttctctccagtgtgtatcctcttatgtctagttagggttgaggaccatagaaatgctttgccacattcttcacacttgtagattttctctttagcacagattattttatgtgtagtaagggttgagagctgcttaaaagctttgccacattcttcacatttgtagggtttatcttcagtatgaatttccttatgattagtaagggttgaggaccaatgaaaggttttttcacattctttacatttacaggacttctctgtaatataaacgcatttatgttgggttttgtgtaaacggatgcaaaatgacttgacacattttttacatttgaagcatttctttccggtatgtcttatcgtatgtctgtttgaatttaaaaatttatagaagactttcaaatatttcccacattgaaatactttgctctgggcagttgtgagacactggttaagtttattataaccttctttgtgcaccttacactcatccacacttttacaaccttttcttaactgtaaattctcatgtccacatttttcatattttctcagtaatactttttgaaaagaatcttccatgctctgctctggccaaaagtcttgaggaaaatgaggacatatacctgtgggttcatccaccatctcatgttgcttcatattccagggctcttttccttgctccagataagtaatcaggtctggcttagagagagcaatacccaggaaggccaggtttctgtagttctctaacatcacattcctatataaattctgctgtgcagtgtccagacattgccactcctccggagagaattctatggccacatccctaaatgtcaacagtcccatttctaggcttccaggggttcctggcatcttagctgtggctcttccaatacctgcaggtcacagggccacacaggctgggcctcctggagcagaggacacagagcagtgaagtcgagacctg

SEQ ID NO: 6240 - DNA, 385 bp, Homo sapiens
  misc_feature (1)...(385): n = a,t,c or g
ggcactcgtgtttcacaacagggacccttaaaggcgatgtttccagcaaaggatgtgannnnnnnnnnnnnnnnnnngaaaaaagttctcactgggttcccaaggcgggagggcaggggtctttcccagacccccccttggcaaactacaaactacggccttaaactccggggctaaagggacccccccatttttgtttcctgagccccggaaacggggggggcccccccccgcccccggttgggagggaattttttgcccacatttttttccaatgggtcaaaagggggaggggggcctttggcataccggggaggggccccattaggctcaactcctaatttttttccattcaccatcagttgggggcggaattcataacagg

SEQ ID NO: 6241 - DNA, 395 bp, Homo sapiens
  SIMILAR (31)..(144): 761254mologous to Homo sapiens Human myelin oligodendrocyte glycoprotein gene,accession number AAZ29204,Smith-Waterman Score= 173.
cagaatttctctcttgtccaggctgtagcacagtggcgcagtcttggctcactgcaacctttgcctcccaggttcaagcaattcttgtgcctcagcctcccaggtagctgggattacaggcgcatgccaccatgcccagctaatcatttacgtttaatgtctatgtgggccagggtctgtactcaacaaaaggtagcaggaaaggctccatccctactccttaagagtccttagtgtgatgcagtagacatgtggatcgtgtctgtgaatagccactgcactccagcctgagcaacctaacaagactgtttcttagaaaaagaaaatcaggccgggtgtggtggcctcatgcctctaatcccaaggaggccaaggcgggcagactcctaaggttg

SEQ ID NO: 6242 - DNA, 3272 bp, Homo sapiens
  SIMILAR (2382)..(3269): 771254mologous to Homo sapiens Human PRO1009 protein sequence SEQ ID NO:36,accession number AAB24068,Smith-Waterman Score=1150.
atgctgggcgcgcgggcctggttgggccgcgtccttctgctgccccgcgccggtgcaggcctcgccgcgagccgcaggggtagctcctcccgggacaaggaccgaagtgcgacggtcagtagttcagtgcccatgcctgctggagggaaaggaagccatccttcatctacaccccagagggtccccaaccgcctgatccacgagaagtcaccatacctcctacaacatgcctacaatcctgtggactggtacccctggggacaggaagccttcgacaaggccaggaaggaaaacaagccgattttcctctcagtcgggtactccacctgccactggtgccacatgatggaagaggagtccttccagaatgaggagattggccgcctgctcagtgaggactttgtgagtgtgaaggtagaccgtgaggagcggcctgacgtggacaaggtgtacatgacgttcgtgcaggccaccagcagcggcgggggctggcccatgaatgtgtggctgactcccaacctccagccctttgtcgggggcacctatttccctcctgaggatggcttgacccgagtcggcttccgcacagtgttgctgagaatacgagaacagtggaaacagaacaagaacaccctgctagaaaatagccagcgtgtcaccactgccctgctggcccgatcagagatcagcgtgggtgaccgccagctgccgccctctgccgccaccgtgaacaatcgctgcttccagcagctggatgagggctatgatgaggaatacggtggcttcgctgaggcccccaagtttcccacgccggtgatcctgagcttcctgttctcctactggctcagccatcgactgactcaggatggctctcgggcccagcagatggccttgcataccctgaaaatgatggctaacgggggcatccgggaccatgtggggcagggctttcaccgctactccacagaccgccagtggcacgtccctcactttgagaagatgctctatgaccaggcacagctcgctgtggcctattcgcaggccttccagctctctggtgatgaattctactctgacgtggccaaaggcatcctgcagtacgtggctcggagcctgagccaccggtccggaggcttctatagcgcagaagatgcagactcgcccccagagcggggccagcggcccaaagagggcgcctactatgtgtggacggtcaaagaggttcagcagctcctcccggagcctgtgttgggtgccaccgagccgctgacctcaggccagctcctcatgaagcactacggcctcacagaggctggtaacatcagccccagtcaggcgtgtgagctcgcagacaaaggccattctcctcaggaccccaagggggagctgcagggccagaatgtgctgaccgtccggtactcgctggagctgactgctgcccgctttggcttggatgtggaggccgtgcggaccttgctcaattcagggctggagaagctcttccaggcccggaagcatcggcccaagccgcacctggacagcaagatgctggctgcctggaatggcttgatggtgtcaggctatgctgtgactggggctgtcctgggccaagacaggctgatcaactatgccaccaatggtgccaagttcctgaagcggcacatgtttgatgtggccagtggccgcctgatgcggacctgctacaccggccctggggggactgtggagcacagcaacccaccctgctggggcttcctggaggactacgccttcgtggtgcggggcctgctggacctgtatgaggcctcacaggagagtgcgtggctcgagtgggctctgcggctgcaggacacacaggacaagctcttttgggactcccagggtggcggctacttctgcagtgaggctgagctggggggctggcctgcccctgcgtctgaaggacgcccaggatgaagcagagcccagcgccaattccgtgtcagcccacaacctgctccggctgcatggcttcacgggccacaaggactggatggacaagtgtgtgtgcctattgaccgccttttccgagcgcatgcgtcgtgtcccggtggcgttgcccgagatggtccgcgccctctcagcccagcagcagaccctcaagcagatcgtgatctgtggagaccgtcaggccaaggacaccaaggccctgggtgcagtgcgtccactctgtctacattcctaacaaggtgctgattctggctgatgggggacccctcgagcttcctgttcccgccagctgcctttccttgagttaccctccgacggttgggaaggaccaggccactgcatatgtgtcccctcctggggatccgggctctgcggtccagcgcgacctgcctggggccacgtgttcaagcacgaagcccctgcgtggagtccacgcccttcaaaaggtccctaggggcaaagggatgaagcccaggagcgtcaatgcccgcccagagctgagctccgtcctccggctgctgcccaaatcaggggtcgtggacaaaggatgcctggggcctgcggccctacgccaggaccccgcgccgaatactctgattcttcgggctccctccaagggagtcccaaagaccccaatggccaataggaaagttgcttatggaaccacagagaacagtcccgtgacattcgcgcacttccctgaggacactgtggagcagaaggcagaaagcgtgggcagaattatgcctcacacggaggcccggatcatgaacatggaggcagggacgctggcaaagctgaacacgcccggggagctgtgcatccgagggtactgcgtcatgctgggctactggggtgagcctcagaagacagaggaagcagtggatcaggacaagtggtattggacaggagatgtcgccacaatgaatgagcagggcttctgcaagatcgtgggccgctctaaggatatgatcatccggggtggtgagaacatctaccccgcagagctcgaggacttctttcacacacacccgaaggtgcaggaagtgcaggtggtgggagtgaaggacgatcggatgggggaagagatttgtgcctgcattcggctgaaggacggggaggagaccacggtggaggagataaaagctttctgcaaagggaagatctctcacttcaagattccgaagtacatcgtgtttgtcacaaactaccccctcaccatttcaggaaagatccagaaattcaaacttcgagagcagatggaacgacatctaaatctgtga

SEQ ID NO: 6243 - DNA, 709 bp, Homo sapiens
  SIMILAR (3)..(143): 971254mologous to Homo sapiens unnamed protein product,accession number AK025622,Smith-Waterman Score=232.
acaagtgtgtgtgcctattgaccgccttttccgagcgcatgcgtcgtgtcccggtggcgttgcccgagatggtccgcgccctctcagcccagcagcagaccctcaagcagatcgtgatctgtggagaccgtcaggccaaagaacaccaaaggccctggtgcagtgcgtccactctgtctacattcctaacaaggtgctgattctggctgatggggacccctcgagcttcctgtcccgccagctgcctttcctgagtaccctccgacggttggaagacccaggccactgcatatgtgtgtgagaatcaagccttgttcagtgcccatcactgatccctgcgaattacgaaaaactactacatccattgacatgcccataccccttggggtggggctagaaggtgaagcatcccaacttgacgtagagactccacgcccatgcagggccgtagtagaaccttgtggccatccctggagcaccctgccactcaggttgaccctcggccaatacgtcacttgcccccccttgggcacccactcaccctagaataaacttaacaggtgtcccgtggtaacctgagggcctcagctttgcttatgagggagggactgggaaccagcagctcagggccgcttcctctggcagcccccacctgacccctctgccttctcccatttctccttcatcttccaagggtcagcagactgcc

SEQ ID NO: 6244 - DNA, 551 bp, Homo sapiens
  SIMILAR (6)..(137): 681254mologous to Mus musculus putative,accession number AK020617,Smith-Waterman Score=155.
tcaccttcatcatcgccctggccctgctgatgtccaccctcttctgctgtctccccagcacccggggcagctgctggccctcctccaggactctcttctgcagagagcagaaacacagccacatctcttccattgcctgagtgccctctaattaagccaatccctgcagccctttctgcccttgggcccccggacttccacaatgaacagggtaaggggttacggacttagactggcctcctttgggaaatcacatgccagcgggacttgcaagccacaaccgagatggccagcctgggttcaagaattacacgcttggatgacaggcttgcacttgcccttgggatagcatagctaaaactgttggtggctaggggagcagacacaaactacttgaacatgacaagatgggggaagctcctgttcctcttattccaatgttcttggtttttctttatataacttgatgaaagtagtggcagtaggggatggcggtggagaatagaactggaattccattctttttgcaattttaaaaaaaaaaaaaaaaa

SEQ ID NO: 6245 - DNA, 1654 bp, Homo sapiens
  SIMILAR (374)..(775): 971254mologous to Mus musculus putative,accession number AK014477,Smith-Waterman Score=711.
gtggtggaattctgatatttatagggggacttactcatgcattgagaaagcaagcatggaaatttcttctgggttattttcctctgttactgtaccaaggaggaaagaacccagttacaaaagcaaaaaactgatgaatacttcagaatgaaactgcagtggaaatccatcagccaggaacaagagaaaagaaattcgaggttaagagattatagaagtcttatcgaaaaagatgttaacagaacagatcgaacaaacaagttttatgaaggccaagataatccagggttgattttacttcatgacattttgatgacctactgtatgtatgattttgatttaggatatgttcagggaatgagtgatttacttttccccttttttatatgtgatggaaaatgaagtggatgccttttggtgctttgcctcttacatggaccaaatgcatcagaattttgaagaacaaatgcaaggcatgaagacccagctaattcagctgagtaccttacttcgattgttagacagtggattttgcagttacttagaatctcaggactctggatacctttatttttgcttcagatggcttttaatcagattcaaaagggaatttagttttctagatattcttcgattatgggaggtaatgtggaccgaactaccatgtacaaatttccatcttcttctctgttgtgctattctggaatcagaaaagcagcaaataatggaaaagcattatggcttcaatgaaatacttaagcatatcaatgaattagtccatgaaaattgatgtggaagatatactctgcaaggcagaagcaatttctctacagatggtaaaatgcaaggaattgccacaagcagtctgtgagatccttgggcttcaaggcagtgacggttacaacaccagattcagacgttgggtgaaggacgaaaatgttggtcaatgacttccttggtcctacagtctgcatttcaaaggtaactgccttgcctacactctctgccagtggagccagaaatgacagcccaacacagataccagtgtcctcaagatgtctgcaagattaacacctgcaatgatcaactgttcttgcttttttggggaagaagacactttgttgcaaccctttttcaagtacttgaaagtttgaaaatttgaaaatcttgggtattggatcatgctttaaaggtttatgtaaagaaagtgtactgatggtccttacattaaaagctttacaaagatttaaactaattatttttgtagttacttctaccaaatagcctttccttttcgataacattcctcagtatttttatagcccaagtacattttattttcttgcctgatgaactggaattggataaatattgcaagtggatgagttggaaattatgcactttgaaaaacattcactttgtttaagcttattgggtttcagatttgattaaattaaatgtggaggctttctatagcattctaagctgagaagtagattgttacccagtaatgaaataaaaaataaaaataaaaggatttttttctctattgtttacgacagtactcagcttaaatatttatgctggtcaaatgtgatttaaattggacattttcatcaatgcagtctaatgtgtagataaatatttcaaccat

SEQ ID NO: 6246 - DNA, 340 bp, Homo sapiens
ggcacgagcagctacactgggctccttgatcacccagctgtggcagttcttcttgaggacttcctgcccctaggtgggggctgccttcagctccctgctgcgtgtgataacttgggtgtggccctcacagctgtgcagaagcttcccagagggttttggccccaggtaaacagattctgctctgggctcgccttgcctccatcccacagccctgtgtgctgtctgtggcacagcctagagcagcactgcctcgtggccctggcccttatgcggctggagctgatcctgaagtccagtgtcccagcggtcatggctggcatcatcaccatctacaacctgg

SEQ ID NO: 6247 - DNA, 450 bp, Homo sapiens
  SIMILAR (3)..(410): 491254mologous to Paramecium tetraurelia cyclophilin-RNA interacting protein,accession number AJ409115,Smith-Waterman Score= 312.
atgaccttgaaggaactaagatgtttcaagtcagaaatgcctgggcaatggagtgggacaagaaagaaagaaggaaagaaagaaagaaagaaagaaagaaagaaagaaagaaagaaagaaagaaagaaagaaagaaagaaagaaagaaagaaaggactgaaggaaggaaagaaagagagaaagagagagagagacagagaaaaagaaagaaagagagagagagagaaagggaaagggaaaggcaaagggaaggaaagggaagggaagggaaggaaaggaaaggaggaaggaaggaaaagaaggaaagaaagaaagaaagaaaaaagaaaagaaaagaaacgaaggaaggaaagaaagaaggaaagaaggaaggaaggaaaagaaagagagaaagaaagaactctaaagaatgtcaaagtagctatagacttttcagagtgtgactattaa

SEQ ID NO: 6248 - DNA, 954 bp, Homo sapiens
  SIMILAR (1)..(834): 381254mologous to Mus musculus transposase-like protein,accession number AF205599,Smith-Waterman Score=486.
gagattggagtgaaccacacccacttattgtttcatacagaagttcgttggctttctcaaggaaaagtattgagcagagtatatgaactcaggaacgagatttacatttttctcgttgaaaagcaatctcatttggcaaatatttttgaagacgacatttgggtaacaaaattggcatatttaagtgatatttttggcattcttaatgaattaagcctgaaaatgcaggggaaaaacaatgatatatttcagtatcttgaacatattctaggattccaaaagacgttattattgtggcaagcaagacttaaaagtaaccgccctagctactatatgtttccaacattattgcaacacatcgaagagaacattattaatgaagactgcttaaaagaaataaaattagagatattgttgcatctcacttctttgtctcaaacttttaattattactttccggaagagaaatttgaatcattaaaggaaaatatttggatgaaagatccatttgcttttcaaaacccagaatcaataattgagttaaacttggagcctgaagaagagaatgaattattgcagctcagttcatcattcacactaaagaattattataagatattaagtttatcagcattttggattaagattaaagatgactttccactgctaagtaggaagagtatattgctgttactaccattcacaactacatatttgtgtgaactaggattttcaatcttgacacggttaaaaacaaagaagagaaataggctcaatagtgcaccagatatgcgggtagcattatcttcatgtgttcctgactggaaggaacttatgaacagacaagcacacccatcacattaaatacaaactttacaaaattctgtgtatagccagggtgtggtggcttacgcctgttaatcccagcagtggggagaccgaggtgggccagtc

SEQ ID NO: 6249 - DNA, 406 bp, Homo sapiens
  SIMILAR (5)..(406): 671254mologous to Homo sapiens Short-chain tumour necrosis factor receptor (SCTR),accession number AAY32752,Smith-Waterman Score=483.
  misc_feature (1)...(406): n = a,t,c or g
naaggattaccgtttttggaaagnncgccacgaggggaaggagggatcccggngccggaaatgcttttttgcgctacgagccagtgccagctgacaggaggtggggcctggctgagttccactgcccgaagtgtcggcacaacttccgatggggtccccgtccccctgctacgggtgcggcttccccgtgtatccaacacggatcctccccccgcgctgggaccggtacccggatcgccgcagaacccacactcactcctgctcagctgccgactgctacaaccggcgagagccccacgtgcctgggacatcctgtgctcaccccaagagccggaagcagaaccacctgcccaaagtgctccaccccagcaaccctcacattatcaggggctccactgtggccacg

SEQ ID NO: 6250 - DNA, 2335 bp, Homo sapiens
  SIMILAR (1573)..(1388): 751254mologous to Homo sapiens Short-chain tumour necrosis factor receptor (SCTR),accession number AAY32752,Smith-Waterman Score=237.
tgttctggcttcctgactttcctgccctgccaggcgggctttgggcggccagacggagaatactggctgggccttgaacccgtgtatcagctgaccagccgtggggaccatgagctgctggttctcctggaggactgggggggccgtggagcacgtgcccactatgatggcttctccctggaacccgagagcgaccactaccgcctgcggcttggccagtaccatggtgatgctggagactctctttcctggcacaatgacaagcccttcagcaccgtggatagggaccgagactcctattctggtaaggagaactcctattctggtgagaggataggggaggcgggactcctgttctggtgagggaatgaaaggaggtagggtaggtaagacgcccctctggtaagtataaggataagcaagcttttattccggtcaagagaacaaaggtcaggacttttatcctggtggggggatggggagtccagattccttctctgatgaggcaaaaaaagaatcaagactcctgttcaagtaaagggcagagggtgagagctagtactcttattctagaaaggaagtagatccttttctttgataaaggaatgcccgcgcagactcctagtttgcagaaaaggtggggaaagatgtgactttgtcctttggtacggagataggggaaggcaattaaggctattactctgaagcaaagttggggggccagggctcctatttttttgctgaggagatggaagatcagggcttgtattcaataagaatggaaggggccaggggatgccttgcaaaaagccttgcactgtgaggtgcaggtagaggcttttattctggtgagaggacatggactctctctctcccctcaggtaactgtgctcctgtaccagcggggaggctggtggtaccatgcctgtgccccactccaacctcaacggtgtgtggcaccacggcggccactaccgaagccgctaccaggatggtgtctactgggctgaatttcgggggggggcatattctcttaagaaggccgccatgctcattccggcccctgaaagctgtgaactctgtgttccctctgtcccctaaggccctagaagacattggtcagcagggagccccaagttgttctggccacaccttctttgtgggtcaatgccaatgtgtcccacagaacttcccactgtggatctgtgaccctggggcgctgaaaatgggacccaggaatccccccccgccatatcttgggcctcaaaaggctccccaggtcctttcatatttccggtttgagctcatatcttactaataacacaaagtagccacagaccgtgtctggtttgtatctgcacctggcaggggtcactccctgggcccgccctccttcgtcctccacctcctcctcttcctcctcctcctccttcaggtcctccaggatgaggttgtccaggtcttccaggaggccaccctggctcaagcaggaagccacagtggagccactgctaatgtgaggtgttgctggggtggagcactttgggcaggtggttctgcttccggctcttggggtgagcacaggatgtcccaggcacgtggggctctcgccggttgtagcagtcggcagctgagcaggagtgagtgtgggtgctgcggcgatccgggtcccggtcccagcgcggggggaggatccgtgttggatacacggggaagccgcacccgtagcagggggacggggaccccatctgtgcccagccccggaagttgtgccgacacttcgggcagtggaactcagccaggccccacatcttgtcagctggcactggctcgtagcgcttccggcatttccggcaccgggatacctccttccgctggggcacgcggcgccaccagacgtggtcgcaggaggagcaggcaaactgccggtccacagcagggataaggtcgtcctgggcacgttgaaacatgcgtaggttggcttctgtcagtggcaggagggaggtcgccactgcctgaatgtcccggtcctgcttcatatcttctggtggatcctgggcatccagatcgttacttagttcttggccatctttttgctttaccccgtacacgatggagcgccccactcccgtgtggtcgctgccgaatttcctcatcagagcccccgccttcttggaggataccttcccatgaaacttctcccgaaggcgccggacgctcttctccagctccacaccttcctgagacatggtggcggcggcgcagttccccgcgagggtccgcactgcgcggctcagccgcccccctacctgggtgcgcccgtcggtccagcagc

SEQ ID NO: 6251 - DNA, 1728 bp, Homo sapiens
  SIMILAR (112)..(1638): 521254mologous to Mus musculus polypeptide GalNAc transferase -T2,accession number AF348968,Smith-Waterman Score=1394.
gcgcgagcgaaaacaaacagctggggctgcgagcgcccccgccccggccccgagagcacgccggcccagtcccccacctggggcgcccgtctgcccaccatgaggaagatccgcgccaatgccatcgccatcctgaccgtagcctggatcctgggcactttctactacttatggcaggacaaccgagcccacgcagcatcctccggcggccggggcgcgcagagggcaggcaggaggtcggagcagctccgcgaggaccgcaccatcccgctcattgtgacaggaactccctcgaaaggctttgatgagaaggcctacctgtcggccaagcagctgaaggctggagaggacccctacagacagcacgccttcaaccagctggagagtgacaagctgagcccagaccggcccatccgggacacccgccattacagctgcccatctgtgtcctactcctcggacctgccagccaccagcgtcatcatcaccttccacaatgaggcccgttccaccctgctgcgcacagtgaagagtgtcctgaaccgaactcctgccaacttgatccaggagatcattttagtggatgacttcagctcagatccggaagactgtctactcctgaccaggatccccaaggtcaagtgcctgcgcaatgatcggcgggaagggctgatccggtcccgagtgcgtggggcggacgtggctgcagctaccgttctcacctttctggatagccactgcgaagtgaacaccgagtggctgccgcccatgctgcagcgggtgaaggaggaccacacccgcgtggtgagtcccatcattgatgtcatcagtctggataattttgcctaccttgcagcatctgctgaccttcgtggagggttcgactggagcctgcatttcaagtgggagcagatccctcttgagcagaagatgacccggacagaccccaccaggcccataaggacgcctgtcatagctggaggaatcttcgtgatcgacaagtcctggtttaaccacttgggaaagtatgatgcccagatggacatctgggggggagagaattttgagctctccttcagggtgtggatgtgtggtggcagtctggagatcgtcccctgcagccgggtgggccatgtcttcaggaaacggcacccctacaacttccctgagggtaatgccctcacctacatcaggaatactaagcgcactgcagaagtgtggatggatgaatacaagcaatactactatgaggcccggccctcggccatcgggaaggccttcggcagtgtggctacgcggatagagcagaggaagaagatgaactgcaagtccttccgctggtacctggagaacgtctacccagagctcacggtccccgtgaaggaagcactccccggcatcattaagcagggggtgaactgcttagaatctcagggccagaacacagctggtgacttcctgcttggaatggggatctgcagagggtctgccaagaacccgcagcccgcccaggcatggctgttcagtgaccacctcatccagcagcaggggaagtgcctggctgccacctccaccttaatgtcctcccctggatccccagtcatactgcagatgtgcaaccctagagaaggcaagcaggtgagtctccttgcctctggcccagaggcccagcagcccgaggggccatgcctcagggtggcagaccttggcaggagagcccctgattga

SEQ ID NO: 6252 - DNA, 1598 bp, Homo sapiens
  SIMILAR (145)..(642): 651254mologous to Mus musculus polypeptide GalNAc transferase -T2,accession number AF348968,Smith-Waterman Score=625.
atgagaaggctcatgaagggtgatgaagttttacatgtggtatatgacataatctaccaccccaaaaaagaggccagcaaaatcaacattattcatcaaggttttggatttggatttgtgttctgggaggtgatgcggggagtggaccacacccgcgtggtgagtcccatcattgatgtcatcagtctggataattttgcctaccttgcagcatctgctgaccttcgtggagggttcgactggagcctgcatttcaagtgggagcagatccctcttgagcagaagatgacccggacagaccccaccaggcccataaggacgcctgtcatagctggaggaatcttcgtgatcgacaagtcctggtttaaccacttgggaaagtatgatgcccagatggacatctgggggggagagaattttgagctctccttcagggtgtggatgtgtggtggcagtctggagatcgtcccctgcagccgggtgggccatgtcttcaggaaacggcacccctacaacttccctgagggtaatgccctcacctacatcaggaatactaagcgcactgcagaagtgtggatggatgaatacaagcaatactactatgaggcccggccctcggccatcgggaaggccttcggcagcacaaccccagcaaaatacgaagtgttgaatgtagaggaaactgaggctcagatagctggtgacgagggccgtcaaccagtggccattgtggtgggtgtacctgaggaaggccaaagcccaagccctgcctcctcctacagtgtggctacgcggatagagcagaggaagaagatgaactgcaagtccttccgctggtacctggagaacgtctacccagagctcacggtccccgtgaaggaagcactccccggcatcattaagcagggggtgaactgcttagaatctcagggccagaacacagctggtgacttcctgcttggaatggggatctgcagagggtctgccaagaacccgcagcccgcccaggcatggctgttcagtgaccacctcatccagcagcaggggaagtgcctggctgccacctccaccttaatgtcctcccctggatccccagtcatactgcagatgtgcaaccctagagaaggcaagcagaaatggaggagaaaaggatctttcatccagcattcagtcagtggcctctgcctggagacaaagcctgcccagctggtgaccagcaagtgtcaggctgacgcccaggcccagcagtggcagctgttgccacacacatgacggtagccctggggcctcctgtaccttttgcatgagacttcgggaccggaagggggttagggtgggggagtgcaaagtgggctgttcccatctcctcacatttctgccaggaccatcagcaaatacccaccatgacacacgttctccaaagcttgttctaggagggcgcaggcgggcacgccccgatgccctcagtgctgtcctggccttgccccgggagaggagatggtcagggtgctggactgttgctgggtagagactgagtaggtgcccctggccctttgtcctctcccttggcgcttcttggggctgggacaatagtgtgg

SEQ ID NO: 6253 - DNA, 373 bp, Homo sapiens
  SIMILAR (161)..(328): 1001254mologous to Homo sapiens putative capacitative calcium channel,accession number AJ272034,Smith-Waterman Score=277.
gcctcataaaactctgcaaatctaaggccaaaagctgtgaaaatgaccttgaaatgggcatgctgaattccaaattcaagaagactcgctaccaggctggcatgaggaattctgaaaatctgacagcaaataacactttgagcaagcccaccagataccaggcgagctgaaggaaatcaagcaagatatctccagcctgcgctatgagcttcttgaggaaaaatctcaagctactggtgagctggcagacctgattcaacaactcagcgagaagtttggaaagaacttaaacaaagaccacctgagggtgaacaagggcaaagacatttagcagcccacatcggcgtctgtgacttctaccagcattccaagg

SEQ ID NO: 6254 - DNA, 804 bp, Homo sapiens
  SIMILAR (61)..(801): 1001254mologous to Homo sapiens putative capacitative calcium channel,accession number AJ272034,Smith-Waterman Score=1264.
atgcctattagacatccaagtggagatataaagttggtaattggatacggagaagaaagggttgaagaaagttttaaaactttgttttggtccatattcggcttatctgaagtaatctcagtggtgctgaaatacgaccacaaattcatcgagaacattggctacgttctctacggcgtttataacgtcaccatggtggtagtgttgctcaacatgctaatagccatgataaacaactcctatcaggaaattgaggaggatgcagatgtggaatggaagttcgcccgagcaaaactctggctgtcttactttgatgaaggaagaactctacctgctccttttaatctagtgccaagtcctaaatcattttattatctcataatgagaatcaagatgtgcctcataaaactctgcaaatctaaggccaaaagctgtgaaaatgaccttgaaatgggcatgctgaattccaaattcaagaagactcgctaccaggctggcatgaggaattctgaaaatctgacagcaaataacactttgagcaagcccaccagataccagaaaatcatgaaacggctcataaaaagatacgtcctgaaagcccaggtggacagagaaaatgacgaagtcaatgaaggcgagctgaaggaaatcaagcaagatatctccagcctgcgctatgagcttcttgaggaaaaatctcaagctactggtgagctggcagacctgattcaacaactcagcgagaagtttggaaagaacttaaacaaagaccacctgagggtgaacaagggcaaagacatttag

SEQ ID NO: 6255 - DNA, 542 bp, Homo sapiens
agccagtcctttggatttaagcagagcggcttgaggctggggcaccgaccatctgcatgccaggacgctggaccttcatcttgaggtcggagccccacttctgcccgctgaggcccgcggcccaggagccacgtatcggggcggatagaggccctggccggaacgaagctcccgccccagatctccctgggctcccacggctcctcaggtctggttccggcgttttgcccggcaagggtcttggcgccaagtggaaaggtatgctttcagggcgccccagcccttgctcgggagccctcggtccccttggcccagagaatcccttcccctggcaggttcttacggagagctggccttcccggcagctggcttagctgagaaggcggtgagagtcgcgtcagcagtttggaggagaaagtgcgggttgattattgacccacgccttctttcttcaaatgccacatccgaccgggcgggtttgaagagaaaatgccgccgaacggatttctgcggctggctctcacctcctacgaaacgaataa

SEQ ID NO: 6256 - DNA, 358 bp, Homo sapiens
  SIMILAR (310)..(357): 1001254mologous to Homo sapiens ribosomal protein S13,accession number L05090,Smith-Waterman Score=79.
atttaattaagaaagcagttgctgttcgaaagcatcttgagaggaacagaaaggtaagctaataaataaaacctggtgctaagtaggactgcttgtactaaattttttcggtaaaatgtaatgcatctggtttgaattatccaaggcttagtacacaaaccagtgtagtgctgctttgaagttcaaattctatccaaagagattttcattatagaaagtgcatggtagctctacattctcttattaatgtttgataatgttaggtcattttgggtggttttcttgaattgcaccaaattttatttttaggataaggatgctaaattccgtctgattctaatagagagccggattcacg

SEQ ID NO: 6257 - DNA, 1377 bp, Homo sapiens
  SIMILAR (158)..(397): 291254mologous to Homo sapiens putative p150,accession number U93569,Smith-Waterman Score=66.
atgaaccaggaggaaggccctcagcaggaaattgatcatactggcaccctgatctcagacttccagcttccagagctactctgggcagcagctgtgaaacagaaggaagctcatgaagagagcagcaatttgacctcatcccctgatggtatgttaaaaaagaaagaaagaaagaaagaaagcaagaaagaaagaaagaaagaaagaaagaaagaaagaaagaaagaaagaaaagaaagagagaaagaaagaaagagaggtaaagagaaagagagagggaaggaaggaaggaaggaaggaaggaaggaaggaaggaaggaaggaaggaaggaaggaaggagggaaggaagaaaggaaggagggaaggaagagaaaaagaaagagagagaaagaaagaaagagaggaaatttctagagaatatgactcagaaaaatgagagactaaatcaagacagaggaaaatatcagatccagtacataacagaagaactgacaactgacactgaggaaagggaacccaccactcttctctgtcccctcatcgttctcagagcacctattacaacaggacatctcctcttctattatgtgggacttgacatgaaatggtggtttctttacctctgggtccctgtggtcagtgaagtgcttgggtttattgagaatatgtttttcgtctcagccaatccctgggtgagtttcaccagttttgatttaaacgtggccaatatggacaacttcttcgcccccgttttcaccatgggcaaatattatacgcaaggcgacaaggtgctgatgccgctggcgattcaggttcatcatgccgtttgtgatggcttccatgtcggcagaatgcttaatgaattacaacagtactgcgatgagtggcagggcggggccaaagtaagcatagatggaacataccttaaggtaataaaagccatgtatgacatgtatgccatctatgacaaacccacagccaattttacactgaacagggaaaagttgaaagtattccccttgagaattggaacaagacaaggatgcccactttcaccacttctattcaatgtattactggaagtcctagccagagcaatcagacaacagaaagaaatcaagggcatccaaattggtaaaaaggaagtcaaactctcactgtttgctaataatatgatcacttacttagaaaaccctaaagattcatccaaaaagctcctagaactagtaaatgaattcagaaaagtctcaggatacaaacctaatgtagacaaatcagtagcactgccatacaccaacaatgaccaagctgagaatcaagtaaagaactcaatccattccagaatagctgcaagaaaaactacaaagcactgctga

SEQ ID NO: 6258 - DNA, 841 bp, Homo sapiens
  SIMILAR (1)..(507): 761254mologous to Homo sapiens myosin regulatory light chain,accession number X54304,Smith-Waterman Score=631.
atgtcgagcaaaagaacaaagaccaagaccaagaagcgccctcagcgtgcaacatccaatgtgtttgctatgtttgaccagtcacagattcaggagttcaaagaggccttcaacatgattgatcagaacagagatggtttcatcgacaaggaagatttgcatgatatgcttgcttcattggggaagaatccaactgatgagtatctagatgccatgatgaatgagggctccaggccccatcaatttcccccaatggttctcacccatgttggtgagaagtttaaatgccccagatccctgaaaatgtcatcagaaatgcctttgcttgctttgatgaaggaggcacctggccccatacaggaagattacttgagagagctgctgccaaccatgggggatcggtttacaaatgaggaagtggatgagctgcacagagaagcccctattgataaaaaggggaatttcaattacatcgggttcacacgcatccttgaacatggaagccaaagacaaagatgactgaaataacttcaaattcccagccaaacgttcccttgttgccactttgggtattctgagattttctcttgcatgcccttagctttacagcttttgcatttcctgttggatttatttccacgccatttggggcatatgtatctttataatcagcctggaaccgggcctttctattaatatcattttcagaataaaaaataggataatttaaccaaccagcccttctcccccaataactgtggtctatacagagtcaatatattttttcagagaaagttattcgctcgattttttttgaatcataattgggctttatgataaa

SEQ ID NO: 6259 - DNA, 1063 bp, Homo sapiens
  SIMILAR (122)..(610): 491254mologous to Rattus norvegicus myosin regulatory light chain,accession number D14688,Smith-Waterman Score=278.
aggaagtgtcggcgccgccactgtccggccacagcctaacgctcttcgctgtcgtttgcggtctcggcagggcgcccccgttctggtgtttggcgtcggaattaaacaaccaccatgtcgagcaaaaaggcaaagaccaagaccaccaagaagcggccctcagcgtgcaacatccaatgtgtttgccatgtttgaccagtcacagattcaggagttcaaagaggccttcaacatgattgatcagaacagagatggcttcatcgacaaggaagatttgcatgatatgcttgcttctcctagggaagaatccccactgatgcataccttgatgccatgatgaatgaggccccagggccccatcaattccaccatgttccctgaccatgtttgggtgagaagtttaaatcgcacagatcccctgaagatgtcatccagcaaacggcctttgcttttgctctgatgaagaagcaaccgggcacccatttcaggaagatttaccttaagagagctgctgaccaacccatggggggatccggtttccggatggagggaagtggatgaacctgtaccagagaaagcaccttattggaccaaaaaaaggggaattttcaaattacatcggagttcaccacggcatcctaactggaaggcccccaaagcacaaagatgacttgaaagaacttttagcttaaaatcttcccagttacaattgtcttactctcttttacttctcagacactttcccccaccctcaatagaaccgtgttgcatggcactttagtttcacaggcttttgccctcttccttttttgatgtatttattcccagaccttttctgccactttagcacttggtataatcagactgggaaatgggggatgagggtggtaaattgtattgaaaaagatcgcgaataaaaaatccacaaatgtgaaagcccagaaaaatatattcgtatttcctgggttttgctgggatttttacatttttatataataaaaatgttattttgaaataaagattatgctgactcaaatgcaatgtaaaaaaaaaaaaaaagggc

SEQ ID NO: 6260 - DNA, 1323 bp, Homo sapiens
  SIMILAR (278)..(24): 441254mologous to Homo sapiens neuronal thread protein AD7c- NTP,accession number AF010144,Smith-Waterman Score=141.
  misc_feature (1)...(1323): n = a,t,c or g
tgatatgtagtcccagctgctactggggaggctgagcaggaggattgattgagcccaggagtttgaggctgcagtgagccttaatggcaccatcacactccagcctgggcaacagagtgagaccccctttcaaacttacaaaacctggccgggcgcagtggctcacccctgtaatcccagcactttgagagaccgaggcgggcggatcacgaggtcaggagatcgagaccatcctggctaacacggtgaaaccccatctctactaaaaatacaaaaaattaactgggcgtggtggcaggcgcctgtggtcccagctactcgggaggctgaggcaggagaatagcgtgaacccaggaggcggagcttgcagtgagccaagatagcaccactgcactccagcctgggtgacagaagcgagactccgtctcaaaaaaaaaaaaaaaattcatgatgntgntgctcccagaaggttggntggntgtgtttacataggactctaacttgtgtgnactacagtngttcaccagggccagtgattcaccccagtgtgtggccaaccctgaattttttgccagaattttttcatttgtgcctcccttattaatttaaatttccacctaaaaattttttgcttccttttttccaaaagccctttcttaaatttatttttgagccccataagatctttaaaaagcctccaatcatttaaaggaagaaatcagagttgctataaaattcagtaaaaagctcatagccaaacggctgtgctcagatggaaagtctgagctgaggttggtctcttgccaaaccgtggctgttgtgtgttgttctncatgtcttcgagttcattttttttcatnctgcctattctggcatcagctcacttgaggagtccctcagccttcttgtatttaaggcatccgccttagactttgtggctctaaagtacctgtctgttgagatttcaagtctcttgtcaccatcctcacacatgacaacaaaacccataatgcataagtggcctttttgnaccaagactttgnaaactgatctctcccccgtgaaggagttgagcacattagcaacaatgtacattaatttnggnttttcattttcatgttttattttgnnaatattatctgatgtttggagcttgagtatacagactgtaaatatagttctngtatttgtactaattctgattcttttggtgtatagccttagatgtgcaatgcagacactatctaactgtgtgtggtaacctngcgtcacggagctgttagtgaacgaggtaaaaataataaaggtacagncagtgcatca

SEQ ID NO: 6261 - DNA, 1787 bp, Homo sapiens
  SIMILAR (1476)..(589): 1001254mologous to Homo sapiens mdm2-A,accession number U33199,Smith-Waterman Score=1582.
cggtggctcatgcctgtaatcccagcactttgggaggccgaggtgggcggatcacgaggtcaggagatcgagaccatcctggctaacacggtgaaaccctgtctctactaaaagtacaaaaaattagccaggtgtggtggcagatgactgtaggccaagctaattgggaggctgaggcaggagaatggtgcgaacccggggagggcagagcttgcagtgagccaagatcacccactgcactccagcctgggtaacagagcaagactcggtctcaaaaaaaataataagttacatttaaatgtcatatacatatttaagaaaaaaaaaaccaagtacttctcatttaagacagagtagaaattatttaaaattaggagttggtgtaaaggatgagctacatattcaagtcaaattatagtaagtattcactattccactaccaaagtaggtcaattatactaaagagaagaaatctatgtgaattgaggcattttctcactttgatatatgtgaataaatttcaggttgtctaaattcctagggttatatagttagaaatatataattctcttatagacaggtcaactaggggaaataagttagcacaatcatttgaattggttgtctacatactgggcagggcttattccttttctttagcttctttgcacatgtaaagcaggccataagatgtcctgttttgccatggacaatgcaaccatttttaggtcgaccttgacaaatcacacaaggttcaatggcattaaggggcaaactagattccacactctcttctttgtcttgggtttcttccctttcaaactctttcacatcttcttggctgctataaataatgctactagaagttgatggctgagaatagtcttcactttcttgtgattgtgaagcttgtgtaattttatcatcattttcctcaacacatgactctctggaatcattcactatagtttttttacaatcaggaacatcaaagccctcttcagcttgtgttgagttttccagtttggctttctcagagatttcccctttatctttccctttatcttcaggaagccaattctcacgaagggcccaacatctgttgcaatgtgatggaagggggggattcatttcattgcatgaagtgcatttccaatagtcagctaaggaaatttcaggatcttcttcaaatgaatctgtatcactctcccctgcctgatacacagtaacttgatatacctcatcatcttcatctgagagttcttgtccttcttcactaaggctataatcttctgagtcgagagattcaacttcaaattctacactaaactgatctgaaactgaatcctgatccaaccaatcacctgaatgttcacttacaccagcatcaagatccagggtctcttgttccgaagctggaatctgtgaggtggttacagcaccatcagtaggtacagacatgttggtattgcacatttgcctgctcctcaccatccggggttttcgcgcttggagtcgggggtccctcaagactccccagtttccttcacggggactgactactgcggaagcacgacgccctgggcctcggggatcattccactctccgggccagggcactgggcgctcgtacgcactaatccggggagggacggtgctcctggctgcgaaagcagcaggatctcggtcagaggggtcgcggccgcccctcgggctcggcttcttgctccatctttccgacacacagggccacacaggccccagaagcagccaagctcgcgcggtgc

SEQ ID NO: 6262 - DNA, 1553 bp, Homo sapiens
  SIMILAR (1242)..(589): 1001254mologous to Homo sapiens mdm2-B,accession number U33200,Smith-Waterman Score=1184.
cggtggctcatgcctgtaatcccagcactttgggaggccgaggtgggcggatcacgaggtcaggagatcgagaccatcctggctaacacggtgaaaccctgtctctactaaaagtacaaaaaattagccaggtgtggtggcagatgactgtaggccaagctaattgggaggctgaggcaggagaatggtgcgaacccggggagggcagagcttgcagtgagccaagatcacccactgcactccagcctgggtaacagagcaagactcggtctcaaaaaaaataataagttacatttaaatgtcatatacatatttaagaaaaaaaaaaccaagtacttctcatttaagacagagtagaaattatttaaaattaggagttggtgtaaaggatgagctacatattcaagtcaaattatagtaagtattcactattccactaccaaagtaggtcaattatactaaagagaagaaatctatgtgaattgaggcattttctcactttgatatatgtgaataaatttcaggttgtctaaattcctagggttatatagttagaaatatataattctcttatagacaggtcaactaggggaaataagttagcacaatcatttgaattggttgtctacatactgggcagggcttattccttttctttagcttctttgcacatgtaaagcaggccataagatgtcctgttttgccatggacaatgcaaccatttttaggtcgaccttgacaaatcacacaaggttcaatggcattaaggggcaaactagattccacactctcttctttgtcttgggtttcttccctttcaaactctttcacatcttcttggctgctataaataatgctactagaagttgatggctgagaatagtcttcactttcttgtgattgtgaagcttgtgtaattttatcatcattttcctcaacacatgactctctggaatcattcactatagtttttttacaatcaggaacatcaaagccctcttcagcttgtgttgagttttccagtttggctttctcagagatttcccctttatctttccctttatcttcaggaagccaattctcacgaagggcccaacatctgttgcaatgtgatggaagggggggattcatttcattgcatgaagtgcatttccaatagtccagggtctcttgttccgaagctggaatctgtgaggtggttacagcaccatcagtaggtacagacatgttggtattgcacatttgcctgctcctcaccatccggggttttcgcgcttggagtcgggggtccctcaagactccccagtttccttcacggggactgactactgcggaagcacgacgccctgggcctcggggatcattccactctccgggccagggcactgggcgctcgtacgcactaatccggggagggacggtgctcctggctgcgaaagcagcaggatctcggtcagaggggtcgcggccgcccctcgggctcggcttcttgctccatctttccgacacacagggccacacaggccccagaagcagccaagctcgcgcggtgc

SEQ ID NO: 6263 - DNA, 1862 bp, Homo sapiens
  SIMILAR (1551)..(589): 991254mologous to Homo sapiens mdm2-C,accession number U33201,Smith-Waterman Score=1697.
cggtggctcatgcctgtaatcccagcactttgggaggccgaggtgggcggatcacgaggtcaggagatcgagaccatcctggctaacacggtgaaaccctgtctctactaaaagtacaaaaaattagccaggtgtggtggcagatgactgtaggccaagctaattgggaggctgaggcaggagaatggtgcgaacccggggagggcagagcttgcagtgagccaagatcacccactgcactccagcctgggtaacagagcaagactcggtctcaaaaaaaataataagttacatttaaatgtcatatacatatttaagaaaaaaaaaaccaagtacttctcatttaagacagagtagaaattatttaaaattaggagttggtgtaaaggatgagctacatattcaagtcaaattatagtaagtattcactattccactaccaaagtaggtcaattatactaaagagaagaaatctatgtgaattgaggcattttctcactttgatatatgtgaataaatttcaggttgtctaaattcctagggttatatagttagaaatatataattctcttatagacaggtcaactaggggaaataagttagcacaatcatttgaattggttgtctacatactgggcagggcttattccttttctttagcttctttgcacatgtaaagcaggccataagatgtcctgttttgccatggacaatgcaaccatttttaggtcgaccttgacaaatcacacaaggttcaatggcattaaggggcaaactagattccacactctcttctttgtcttgggtttcttccctttcaaactctttcacatcttcttggctgctataaataatgctactagaagttgatggctgagaatagtcttcactttcttgtgattgtgaagcttgtgtaattttatcatcattttcctcaacacatgactctctggaatcattcactatagtttttttacaatcaggaacatcaaagccctcttcagcttgtgttgagttttccagtttggctttctcagagatttcccctttatctttccctttatcttcaggaagccaattctcacgaagggcccaacatctgttgcaatgtgatggaagggggggattcatttcattgcatgaagtgcatttccaatagtcagctaaggaaatttcaggatcttcttcaaatgaatctgtatcactctcccctgcctgatacacagtaacttgatatacctcatcatcttcatctgagagttcttgtccttcttcactaaggctataatcttctgagtcgagagattcaacttcaaattctacactaaactgatctgaaactgaatcctgatccaaccaatcacctgaatgttcacttacaccagcatcaagaacctctttcatagtataagtgtctttttgtgcaccaacagactttaataacttcaaaagcaatggctttggtctaaccagggtctcttgttccgaagctggaatctgtgaggtggttacagcaccatcagtaggtacagacatgttggtattgcacatttgcctgctcctcaccatccggggttttcgcgcttggagtcgggggtccctcaagactccccagtttccttcacggggactgactactgcggaagcacgacgccctgggcctcggggatcattccactctccgggccagggcactgggcgctcgtacgcactaatccggggagggacggtgctcctggctgcgaaagcagcaggatctcggtcagaggggtcgcggccgcccctcgggctcggcttcttgctccatctttccgacacacagggccacacaggccccagaagcagccaagctcgcgcggtgc

SEQ ID NO: 6264 - DNA, 1295 bp, Homo sapiens
  SIMILAR (984)..(589): 1001254mologous to Homo sapiens mdm2-D,accession number U33202,Smith-Waterman Score=699.
cggtggctcatgcctgtaatcccagcactttgggaggccgaggtgggcggatcacgaggtcaggagatcgagaccatcctggctaacacggtgaaaccctgtctctactaaaagtacaaaaaattagccaggtgtggtggcagatgactgtaggccaagctaattgggaggctgaggcaggagaatggtgcgaacccggggagggcagagcttgcagtgagccaagatcacccactgcactccagcctgggtaacagagcaagactcggtctcaaaaaaaataataagttacatttaaatgtcatatacatatttaagaaaaaaaaaaccaagtacttctcatttaagacagagtagaaattatttaaaattaggagttggtgtaaaggatgagctacatattcaagtcaaattatagtaagtattcactattccactaccaaagtaggtcaattatactaaagagaagaaatctatgtgaattgaggcattttctcactttgatatatgtgaataaatttcaggttgtctaaattcctagggttatatagttagaaatatataattctcttatagacaggtcaactaggggaaataagttagcacaatcatttgaattggttgtctacatactgggcagggcttattccttttctttagcttctttgcacatgtaaagcaggccataagatgtcctgttttgccatggacaatgcaaccatttttaggtcgaccttgacaaatcacacaaggttcaatggcattaaggggcaaactagattccacactctcttctttgtcttgggtttcttccctttcaaactctttcacatcttcttggctgctataaataatgctactagaagttgatggctgagaatagtcttcactttcttgtctaaccagggtctcttgttccgaagctggaatctgtgaggtggttacagcaccatcagtaggtacagacatgttggtattgcacatttgcctgctcctcaccatccggggttttcgcgcttggagtcgggggtccctcaagactccccagtttccttcacggggactgactactgcggaagcacgacgccctgggcctcggggatcattccactctccgggccagggcactgggcgctcgtacgcactaatccggggagggacggtgctcctggctgcgaaagcagcaggatctcggtcagaggggtcgcggccgcccctcgggctcggcttcttgctccatctttccgacacacagggccacacaggccccagaagcagccaagctcgcgcggtgc

SEQ ID NO: 6265 - DNA, 1149 bp, Homo sapiens
  SIMILAR (838)..(533): 1001254mologous to Homo sapiens mdm2-E,accession number U33203,Smith-Waterman Score=521.
cggtggctcatgcctgtaatcccagcactttgggaggccgaggtgggcggatcacgaggtcaggagatcgagaccatcctggctaacacggtgaaaccctgtctctactaaaagtacaaaaaattagccaggtgtggtggcagatgactgtaggccaagctaattgggaggctgaggcaggagaatggtgcgaacccggggagggcagagcttgcagtgagccaagatcacccactgcactccagcctgggtaacagagcaagactcggtctcaaaaaaaataataagttacatttaaatgtcatatacatatttaagaaaaaaaaaaccaagtacttctcatttaagacagagtagaaattatttaaaattaggagttggtgtaaaggatgagctacatattcaagtcaaattatagtaagtattcactattccactaccaaagtaggtcaattatactaaagagaagaaatctatgtgaattgaggcattttctcactttgatatatgtgaataaatttcaggttgtctaaattcctagggttatatagttagaaatatataattctcttatagacaggtcaactaggggaaataagttagcacaatcatttacaatatgttgttgcttctcatcatataatcgtttagtcataatatactggccaagataaaaaagaacctctttcatagtataagtgtctttttgtgcaccaacagactttaataacttcaaaagcaatggctttggtctaaccagggtctcttgttccgaagctggaatctgtgaggtggttacagcaccatcagtaggtacagacatgttggtattgcacatttgcctgctcctcaccatccggggttttcgcgcttggagtcgggggtccctcaagactccccagtttccttcacggggactgactactgcggaagcacgacgccctgggcctcggggatcattccactctccgggccagggcactgggcgctcgtacgcactaatccggggagggacggtgctcctggctgcgaaagcagcaggatctcggtcagaggggtcgcggccgcccctcgggctcggcttcttgctccatctttccgacacacagggccacacaggccccagaagcagccaagctcgcgcggtgc

SEQ ID NO: 6266 - DNA, 637 bp, Homo sapiens
taaggcagtagcttgctgatgctcccagctgaataagtcccttctttctacaactcggtgtcttgagttttgtctgcagctcctcctgttacatttcttggctccctgactgggaagcaacgtgactgacagacagctgaggcagccccttaagcaacttaagcctgccttgtggagtgcccctgtgggggactccagccagcctgagtgacatgatccaaagagccctcctgggtaggaaattgccccggtggaatccctcaccagagaagcaggtagcaggccctcgcagaggattaacacagtggcttaacacccaggaaggaactggcacttgggagtccaagacatcttaaaatttggcctcttcatcagaaacatccaatcaatcacagaatccatcgttaacagaaccacctccactccactgatggctctaaacaagtatcaacccgtaccaaacagagaagaactgacttgtaatgaggaattaaatgatagtgatgccttctattgaattccatttacaggaggcatcaaaggggaagatgagatgggaaagaaagaaagaaagacagaaagaaagaaagaaagaaagaaagaaagaaagaaagaaagaaagaaagaaagaaagaaa

SEQ ID NO: 6267 - DNA, 442 bp, Homo sapiens
  SIMILAR (1)..(417): 841254mologous to Mus musculus putative,accession number AK002573,Smith-Waterman Score=598.
cgtagacttcgtactgctatgaagctccggagtcaccgaccagaccagacttggcatgatcaacaatataacaaagctcatttgggcgcagccctacaggccaatcctttaggaggtgctgctcatgctaaaggaatcgtgcttgaaaaagtaagagttgaagccacacagccaaagatctgccattatgaaggtgtaagggtccagctgatcaagaatggcaagaaaatcacagcctttgtacccaatgacggttgcttgaactttattgaggaaaatgatgaagttctggttgctggatttggtcgcaaaggtcatgctgttggtgatattcctggagtccgctttaaggttgtcaaagtagccaatgtttttattttggccctatacaaaggcaagaaggaaagaccaagatcataaatattaatggtgaaaacactgt

SEQ ID NO: 6268 - DNA, 5789 bp, Homo sapiens
  SIMILAR (5620)..(3773): 1001254mologous to Homo sapiens apyrase,accession number AJ131358,Smith-Waterman Score=3254.
gggatgatgaactttcgttttattgatttttcagtacccaagtgtggcactgtaaggctgccacatacagcaagtgacatgacaccaaaaggaccttccgagagtattattcttactttggatggaagacatcgcttaaacaaaaaacatttaaagatgctcccttgctttttataattcctaactgtaaaatataattttagtacagaacaaacaaattctccttggttggtcacatcattcattattgaaagggaaacttagtatcaaaagaaacaaaacactgaaataaataactaagtaatttactgaaaggtagttttgttgcattgcacacaactgaccgcagagaattctaaagctgatttttttcttaaaggatgaaaaactcatttgccatttttagtttcttgctaagtgatacatgctccttataaggaaaactactctgtgtaggcctgagtttaaaatgtaaatatctgtttatccagagtttgttaatctagagtacacaggtgtggaaaactggtggtgaaaagagggacctacccagccttcagggtggctgggcaggggccccatgttactggcctcagccaccagcagcgtcttcactccgcccaggtcagaaagcactgcctaaagccggagcttaggatgaacatgggcaaaaagcactggtacagttccatgtgtttctcttctactgtaatgtccccagagggattgtgaaatgtctgagaacatcccctggaggaggtttaaaagtgagaagcccatgatatggctatggaacataagcacttattgctggcatgtttctaccaagattgaacacaatgcttttctttgataaagctttgggcaagttcctagtccaatttcttctgctacaagtacacagaatttactgccttcttggtcagctcttggtatgaattcttctcttgaattaagatcctccctggcttgtctctcacccaccctgtatctcttagagaaagcacctggctgtcttcacctacgcgagaccttctctggaatgtgatttgctgcgactgcagacatctccatacggcataatgaactcccttgagtggtctctttttaaacaattttgggtgaggggcaggtttcttggtttgtttcaaaactcatcttgaaaataatctagacggaaaaatccgaagtgaaattctggtgcaacaaatattttaagattgaagtttggttacttctcttgtccatcttttcgtgcccacaaatggaaactacattcctgatttaagaggatgcttctgtctgtatccttttttgaactgcattgttctcacaaggaccagcaaactttttctgtaaatattttagtaaatattctaggctttacaggccacatatagtgtctgctgcatattcttcaacgtttttttcttaggcaactgtttaaaaatggcaaatccactactacctctcagctggagcaatgaggttttctcagcccttgtttcaggatcctcaggtatgtgactaactcttctatgcccagagctggaaggcggggtcccctaactccctgggtgcccacctgcccacttcaaccatttgtggccccttcctttcctttcttccctctctgctgctgacaccagtggctccatcgccagctccctgcagcctccaccaataatccatggctcctccaggaagtgtcgcaggcaggtggccaagaccaacttattaggtagccagaagctcacccctttcttaacaactttgaccacgaagcgcaaatacgatgcaggtaaatccagaggcagagcctgggtccccaggctgctggtaacacgctttgaaatccaggtgagggagccatgcccccacagctcttgcctcaaggatcagatgcattttaccttccagagacgcaggttaagctgcacctgaggcagtttgagccacaactgggacagaattcccttggtcttctcttctgatccctcagcagaactgcccctaatgctcagttcatggcaatacaggccttttctctcctgtttctccaaactctcccagcctctgcccagtacctagttccaaagccacttttataatatcctcagttatctgttatagcaacaaccccacttctgggtactaatctgctaccaactacaggaatttaactgttctggagttagggaacagcacacacagacactcacacaaaacaaactccacctaaaaaaactgtacgagaattccccaaacttctcaactaaataaataggtgaaaaaacaccaatctcacatatgccaatccaattgtcctttttagattttggcttaaattgtcgaattttttccttcaaaatgtgaatttatttcctgtattggatgcagactcttcccttctggatttacagtggtgctgccagcaacagcctcagtcaatgcggttaggaagaggactcggcaggctgtgcatggggtctcccagtacgattaaaagctgagatgacttttaattaaggggggtgggggaaacaccaattggaagctggaagaaactgaggcacgattaagcagaaacactgaggaatactgagcaagaagtgggcatgtgctctagttccaataaaaccgaaactggtgaaactaggaatttccaattctttcaaaaccacagtgttctaatgccactgaaatatggaataaggagcgtaattacctgcggtcaggaaaagataacagtaacgaggatttttctaaataaaatgtaccagtaaattctgaagtgtgtgtttttaaagaaccagcattgcctcccctcacgctggtttcttgggatttttcacacactcacacaaagctgtagtcgatagttcactatcacttttataaatggttatctcctggtgcccatgtttctctgttttggatataaatggtttaaaaaatttaaatttgcaaagaaaacatatacagtaacagacctgaacaataaataaaaaaaaaaaatcaccctcttcaggttagagctttcaagatagagaaaaaagaggattatcatttcaggcagtaagttttttggttctatgaaagcatcactattcagtcccctctccactgacagaatgcatctttccacctccctccagtatcaaagtgcatgtgtttaaatttaacattccttagagaaaccccagaaatctcatttatttttggcagatatcctgtgcagcaaaaatcaagtgaatttccctcttccccactcctcaatttaatgctgtactcaaaatggctaaacgcaatacttctagacagcagggcttataaacaatgcattttttttttttttttgagacggagtctcactctgtcgcccaggctggagtgcagtggtgtgatctcggctcactgcaagctctgcctcccaggttcatgccattctcctgcctcagcctcctgagtagttggactaacgggcgcccgccaccacacccagctaattttttgtatttttagtagagacggggtttcaccgtgttagccaggatggtctcgatctcctgacctcatgatccgcccgcctcggcctcccaaagtgctgggattacaggcgtgagccaccgcgctcggcctgcattttgtttttgtttggaggaacaaaaaagggaaagaaaaaacaaaaccacaggaaaataaagaggagaaaccctgaggcaaaaatggcttttccttttgagtcttcgtggagctgtgagctggatcacaaggtccccggggcattctgggcgggaaggccctcctccatccagagggcggcggccgagctgctccggggagtgcgcctgtggatgcgccgcagccgcagcaggtacagcaggatggccagcagcaccaccaggaagcagccagagaacaggtagtggttgtagacaaaggaaacgccccgccagtgggtgtgactggctcggaaggcctcctgctggatgtctcttaacggtagaaagcgggtcctgtagaggatggctccaagggtccactgaacctccttgtcgtaaacttgcaaggcagtctttaagcttttatagttgacaggaaacgaaaagcccctatgaaacacctcaaacatccaggccgatttgaagcactgatacttaagcctgtggaggtcagcatgagaggcgtacagtcctcggtcaaagcgttcccgcaaaatggaccactttgttgcacaataatcctttgcagctttagtaaatttagcagcattgtagtctccccccattcgtaacacatcctcggtgcagtagtagaattcggagaagccatagaattcactgttctggaagtgaattgggggctggtagaccccattgagggaagtctgggtctcgtttgttttattcatgaaaggctggatagtctctcgacacaggtcaaagtctccagtccctcgtaggtatatggtttgtccattttgctggatttcatctttaatgtctaggggtaggcaggggtccaagtacggcatatcaggagtcagaccagtctgtttacccaggagcctgttcttttgaatggtgttggcaaatattctgtcttcgtatctctgtcgagcagcattgccaccaaacccaagaaacgtggccacatagactcgatacacatgctcagtttggtgaacatcacatcccaagttaaattcagctaacaagtttttagctacttcttcctgctgtgaggacgcaaagcttacagttttggggacttcgtacgctatctgagtcgacacgccgcccatgtcgagaatgcccgctgtccttttacggacaatggcttcgctgctttcacttccaggaatgttaacttccacaacggcctcatcatcatcttcaatatgctcaaatcgtccaaggacaaaattaatgccaatccaagcatacacaccttcctgtttcccagaaattacttctgcatgagagtcagaaaacagaaagtcaaagtgcacggggatatcggtcagaaggtcttccagaatagctttctgctggctttcggggaggattctcattccagccgtgcagagaatgtagagaggtgtctctttgtgttttgcccgtggcacatgctctgcagcaaagttcaaaagtggagaaatgtaatcactgactttctctggagaggtagcaaattctgaaatgcccggttttattttcatgaccactggctttcggtttttatccctcatttgcctgatatccaacagatcatgtggattgccattatgccttggccagcagtaaacaaatactcgagacccactgctaccacagtccaccacgatcccatagttcacattggggttattggtgtctgtagcttcaatgtcggtaactcgtgccaggtacctttgaaatttcttgtctctggttagtcgcccatacttatttcggattatgacaacagaaaaatataaaagtgaaacagcagcagccaggacactaatgaccataatttggcgtaaattggtattcagaattcgaggacaccctactggagatatgctaaaatgccaagaagcaggaaaaagacaggagatgccaatcctccccatactgaaaggtcagcaacaaggcaatgctctgggattcagtccttctcacaaacaattatagaaataatgctggggtcctcacggagttagagccctcctgcttggccggccggggaccccgggagcgggggaccaccagtgggcagcatcacggccagccggctcgtgc

SEQ ID NO: 6269 - DNA, 1997 bp, Homo sapiens
  SIMILAR (99)..(1568): 1001254mologous to Homo sapiens CIG49,accession number AF026939,Smith-Waterman Score=2573.
gtggaaacctcttcagcatttgcttggaatcagtaagctaaaaacaaaatcaaccgggaccccagcttttcggaacagcagagacacagagggcagtcatgagtgaggtcaccaagaattccctggagaaaatccttccacagctgaaatgccatttcacctggaacttattcaaggaagacagtgtctcaagggatctagaagatagagtgtgtaaccagattgaatttttaaacactgagttcaaagctacaatgtacaacttgttggcctacataaaacacctagatggtaacaacgaggcagccctggaatgcttacggcaagctgaagagttaatccagcaagaacatgctgaccaagcagaaatcagaagtctagtcacttggggaaactacgcctgggtctactatcacttgggcagactctcagatgctcagatttatgtagataaggtgaaacaaacctgcaagaaattttcaaatccatacagtattgagtattctgaacttgactgtgaggaagggtggacacaactgaagtgtggaagaaatgaaagggcgaaggtgtgttttgagaaggctctggaagaaaagcccaacaacccagaattctcctctggactggcaattgcgatgtaccatctggataatcacccagagaaacagttctctactgatgttttgaagcaggccattgagctgagtcctgataaccaatacgtcaaggttctcttgggcctgaaactgcagaagatgaataaagaagctgaaggagagcagtttgttgaagaagccttggaaaagtctccttgccaaacagatgtcctccgcagtgcagccaaattttacagaagaaaaggtgacctagacaaagctattgaactgtttcaacgggtgttggaatccacaccaaacaatggctacctctatcaccagattgggtgctgctacaaggcaaaagtaagacaaatgcagaatacaggagaatctgaagctagtggaaataaagagatgattgaagcactaaagcaatatgctatggactattcgaataaagctcttgagaagggactgaatcctctgaatgcatactccgatctcgctgagttcctggagacggaatgttatcagacaccattcaataaggaagtccctgatgctgaaaagcaacaatcccatcagcgctactgcaaccttcagaaatataatgggaagtctgaagacactgctgtgcaacatggtttagagggtttgtccataagcaaaaaatcaactgacaaggaagagatcaaagaccaaccacagaatgtatccgaaaatctgcttccacaaaatgcaccaaattattggtatcttcaaggattaattcataagcagaatggagatctgctgcaagcagccaaatgttatgagaaggaactgggccgcctgctaagggatgccccttcaggcataggcagtattttcctgtcagcatctgagcttgaggatggtagtgaggaaatgggccagggcgcagtcagctccagtcccagagagctcctctctaactcagagcaactgaactgagacagaggaggaaaacagagcatcagaagcctgcagtggtggttgtgacgggtaggaggataggaagacagggggccccaacctgggattgctgagcagggaagctttgcatgttgctctaaggtacatttttaaagagttgttttttggccgggcgcagtggctcatgcctgtaatcccagcactttgggaggccgaggtgggcggatcacgaggtctggagtttgagaccatcctggctaacacagtgaaatcccgtctctactaaaaatacaaaaaattagccaggcgtggtggctggcacctgtagtcccagctacttgggaggctgaggcaggagaatggcgtgaacctggaaggaagaggttgcagtgagccaagattgcgccccctgcactccagcctgggcttcagagcaagactcgg

SEQ ID NO: 6270 - DNA, 3943 bp, Homo sapiens; identical to SEQ ID NO: 3792
  SIMILAR (188)..(1504): 1001254mologous to Homo sapiens Human VIP2 receptor gene,accession number AAC85220,Smith-Waterman Score=2343.

SEQ ID NO: 6271 - DNA, 4341 bp, Homo sapiens
  SIMILAR (312)..(1784): 1001254mologous to Homo sapiens Human MDM2,accession number AX057138,Smith-Waterman Score=2574.
gcaccgcgcgagcttggctgcttctggggcctgtgtggccctgtgtgtcggaaagatggagcaagaagccgagcccgaggggcggccgcgacccctctgaccgagatcctgctgctttcgcagccaggagcaccgtccctccccggattagtgcgtacgagcgcccagtgccctggcccggagagtggaatgatccccgaggcccagggcgtcgtgcttccgcagtagtcagtccccgtgaaggaaactggggagtcttgagggacccccgactccaagcgcgaaaaccccggatggtgaggagcaggcaaatgtgcaataccaacatgtctgtacctactgatggtgctgtaaccacctcacagattccagcttcggaacaagagaccctggttagaccaaagccattgcttttgaagttattaaagtctgttggtgcacaaaaagacacttatactatgaaagaggttcttttttatcttggccagtatattatgactaaacgattatatgatgagaagcaacaacatattgtatattgttcaaatgatcttctaggagatttgtttggcgtgccaagcttctctgtgaaagagcacaggaaaatatataccatgatctacaggaacttggtagtagtcaatcagcaggaatcatcggactcaggtacatctgtgagtgagaacaggtgtcaccttgaaggtgggagtgatcaaaaggaccttgtacaagagcttcaggaagagaaaccttcatcttcacatttggtttctagaccatctacctcatctagaaggagagcaattagtgagacagaagaaaattcagatgaattatctggtgaacgacaaagaaaacgccacaaatctgatagtatttccctttcctttgatgaaagcctggctctgtgtgtaataagggagatatgttgtgaaagaagcagtagcagtgaatctacagggacgccatcgaatccggatcttgatgctggtgtaagtgaacattcaggtgattggttggatcaggattcagtttcagatcagtttagtgtagaatttgaagttgaatctctcgactcagaagattatagccttagtgaagaaggacaagaactctcagatgaagatgatgaggtatatcaagttactgtgtatcaggcaggggagagtgatacagattcatttgaagaagatcctgaaatttccttagctgactattggaaatgcacttcatgcaatgaaatgaatcccccccttccatcacattgcaacagatgttgggcccttcgtgagaattggcttcctgaagataaagggaaagataaaggggaaatctctgagaaagccaaactggaaaactcaacacaagctgaagagggctttgatgttcctgattgtaaaaaaactatagtgaatgattccagagagtcatgtgttgaggaaaatgatgataaaattacacaagcttcacaatcacaagaaagtgaagactattctcagccatcaacttctagtagcattatttatagcagccaagaagatgtgaaagagtttgaaagggaagaaacccaagacaaagaagagagtgtggaatctagtttgccccttaatgccattgaaccttgtgtgatttgtcaaggtcgacctaaaaatggttgcattgtccatggcaaaacaggacatcttatggcctgctttacatgtgcaaagaagctaaagaaaaggaataagccctgcccagtatgtagacaaccaattcaaatgattgtgctaacttatttcccctagttgacctgtctataagagaattatatatttctaactatataaccctaggaatttagacaacctgaaatttattcacatatatcaaagtgagaaaatgcctcaattcacatagatttcttctctttagtataattgacctactttggtagtggaatagtgaatacttactataatttgacttgaatatgtagctcatcctttacaccaactcctaattttaaataatttctactctgtcttaaatgagaagtacttggttttttttttcttaaatatgtatatgacatttaaatgtaacttattattttttttgagaccgagtcttgctctgttacccaggctggagtgcagtgggtgatcttggctcactgcaagctctgccctccccgggttcgcaccattctcctgcctcagcctcccaattagcttggcctacagtcatctgccaccacacctggctaattttttgtacttttagtagagacagggtttcaccgtgttagccaggatggtctcgatctcctgacctcgtgatccgcccacctcggcctcccaaagtgctgggattacaggcgtgagccatcgtctgcgcttctatttcgatcaccaagatgtggctccggaatgcggggcttacttcttccatgaattggccaaggagaagcgcaagggtgttgagcgtctcctgaagatgcaaaaccagcgtggtggccctgctgtcttccaggacatcctgaagccaggtcaagatgagtggggtaaaaccctggaagccatggaagccgccatggccccggggaaaaatctcaaccagagtcttttggatcttcatgcactgggttccgcccctacagacccccatctctgtgacttcctggagagtcacttccgagatgaggaagttacctttatgcctcggaagagtgcagacctccatgcagcgggtgaggctgccagcctaggtggggtgtcattgaatgtcatgaagggagccagccttcatgcactctgcctgcgtctcctgaacagctttggaccaggagttgctaccttgtgcggagaacgtgtggtgcataagaacaaccgagcctctgctcttcgaaaatgtatattctggccagtctccttgaattcctccagggcgaggccacgccagcgcacaactgcagggggcgccgttcccacagcagccctgcaaagggtcatccctgcttcaagccagtgcctcttcccagctcccatggggaccaccgaagccacgctccggatggaaaacgtggacgtgaaggaggaatggcaggacgaagatcttcccaggccactcccagaagagacgggggtggaactgcttggcagcccggtggaagacacatcctctcctcccaacacgctaaatttcaacggagcgcatcgtaagaggaagacgctggtggccccagagatcaacatttctctggatcagagtgaggggtccctgctgtccgatgacttcttggatacccctgatgacctggatattaacgtggatgacatcgagacccccgatgagaccgactcgctggagttcctggggaatggcaacgaactggagtgggaagacgacacccccgtggccaccgccaagaacatgcccggggacagcgcggatctatttggggacggcacgacggaggacggcagcgccgccaacgggcgcctgtggcggacagtgatcatcggggagcaagagcaccgtatagacctgcacatgatccggccttacatgaaagtggtcacccacggagggtactacggcgaaggcctcaacgccatcatcgtcttcgcagcctgcttccttccagacagcagcctccccgactaccactacatcatggagaacctcttccttccgccaggacagcagacaacacctggaccagtggggctgacccagccagcggcaggagtggaggcaggcagggtcggcaccgcaggtgtcctgaccctggacccctccatgttgggtccctgccttctgtgccccgtgagcaggtacgtcatcagcagcttagagctcctggtggctgaggactacatgatcgtgtacctgaacggtgccacgccccggcggaggatgcctggaatcggctggctgaagaagtgctaccagatgatcgaccggaggttgcggaaaaacctgaagtccttgatcatcgtccacccctcgtggttcattcggactgtgctggccatctctcgccctttcatcagcgtcaagttcatcaacaagatccagtacgtgcacagcttggaagacctggagcaactcatccctatggaacacgtccagatcccagactgcgtcctgcatgaccggcagatcatccttaccacactctgtgcttatggggaaggagaagccttggcaagccacctcttccacgtcatcctcccattccatatccactcctgcttcccctccagcacggagacctcagaccctccctgtggccctggactcgacctggcatacaccacaccgttcagcacacattttgcacagaggggcaaatag

SEQ ID NO: 6272 - DNA, 659 bp, Homo sapiens
  SIMILAR (653)..(474): 611254mologous to Mus musculus putative,accession number AK017355,Smith-Waterman Score=193.
gacggttgcttgaactttattgaggtgagtatttcaactctatcgtaccttctgttgttggggtggcctccctcacatttttatctgatgcaagggagtttcctcacatgaaagtatttttgtgatcgccaccaacaccagaaataaacttcttattttattccaggaaaatgatgaagttctggttgctggatttggtcgcaaaggtcatgctgttggtgatattcctggagtccgctttaaggttgtcaaagtagccaatgtttctcttttggccttattgattttctgagaattctttaatacaggagtcatgaattcattcgtcttgcagggatgaagtacaaaaaagggttgcccaagtattggatgttcctgttgcgtaatagtgtcccatggtccctgtagcagtcgcatcttatagcactcatgaactccttcccatatgtccttcagagttaaaggtctcccatctccatgggaagacatgtctgtccatgggtagatgctcctagatgtgacatcacagacccattcttaatttgaaagtgtattttgcacatgtagccatcagaacagtcctttgatggtctccattcccaactatcacctatctgttgtgaatgtttaatgaattctgcacaataacgttgacgaaa

SEQ ID NO: 6273 - DNA, 4227 bp, Homo sapiens
  SIMILAR (167)..(967): 1001254mologous to Homo sapiens inducible membrane protein,accession number X53795,Smith-Waterman Score=1412.
gccgactgaggcacgagcgggtgacgctgggcctgcagcgcggagcagaaagcagaacccgcagagtcctccctgctgctgtgtggacgacacgtgggcacaggcagaagtgggccctgtgaccagctgcactggtttcgtggaaggaagctccaggactggcgggatgggctcagcctgtatcaaagtcaccaaatactttctcttcctcttcaacttgatcttctttatcctgggcgcagtgatcctgggcttcggggtgtggatcctggccgacaagagcagtttcatctctgtcctgcaaacctcctccagctcgcttaggatgggggcctatgtcttcatcggcgtgggggcagtcactatgctcatgggcttcctgggctgcatcggcgccgtcaacgaggtccgctgcctgctggggctgtactttgctttcctgctcctgatcctcattgcccaggtgacggccggggccctcttctacttcaacatgggcaagctgaagcaggagatgggcggcatcgtgactgagctcattcgagactacaacagcagtcgcgaggacagcctgcaggatgcctgggactacgtgcaggctcaggtgaagtgctgcggctgggtcagcttctacaactggacagacaacgctgagctcatgaatcgccctgaggtcacctacccctgttcctgcgaagtcaagggggaagaggacaacagcctttctgtgaggaagggcttctgcgaggcccccggcaacaggacccagagtggcaaccaccctgaggactggcctgtgtaccaggagggctgcatggagaaggtgcaggcgtggctgcaggagaacctgggcatcatcctcggcgtgggcgtgggtgtggccatcatcgagctcctggggatggtcctgtccatctgcttgtgccggcacgtccattccgaagactacagcaaggtccccaagtactgaggcagctgctatccccatctccctgcctggcccccaacctcagggctcccaggggtctccctggctccctcctccagggcctgcctcccacttcactgcgaagaccctcttgcccaccctgactgaaagtagggggctttctggggcctagcgatctctcctggcctatccgctgccagccttgagccctggctgttctgtggttcctctgctcaccgcccatcagggttctcttagcaactcagagaaaaatgctccccacagcgtccctggcgcaggtgggctggacttctacctgccctcaagggtgtgtatattgtataggggcaactgtatgaaaaattggggaggagggggccgggcgcggtggctcacgcctataattcccagcactttgggaggctgaggtgggcggatcacgaggtcaggagatggagaccatcctggctaacacagtgaaaccccgtctctactaaaaataaaaaataaaaaaaaattagccaggcatggtggcaggctcctgtagtcccagctactcaggaggctgaggcaggaggcaggagaatggcgtgtggggtgaacccgggaggcagagcttgcagtgagccgagattgtgccactgcacactccaatctgggtgacagagtgagacgccgtctgaaaaaaaaaaaaaattttcataggccaccagttgcggtggctcacacctgtaatcccagcactttgggagactgaggcgggcagatcacttgagcccaagagttcaagaccagtctgggccacatagtgagacaccatctctacaaaaaaaatacaaaaacaagattagccgggcgtggtggcgggcgcctgtgatcccagctacgcgggaggctgaggcaggagaatcacttgaacctgggaggcggaggttgtggtgagccaaaatcgtgccattgtgctccagcctgggcaacaagagtgaaactctgtctcaaaaaaaaaaaacagtttcctgaaatattgagaagttatttttattttacttggttccaaaactagtgtgaataaggttgcttctgcaactttagtttatatgtgattcttaattttttacggtttgtagactctgagaatttgatgaaagccacagattctcttcctctagtacccatacacatctaattgcatgtaattttgggcttttgttagcctccctggagcccgggtcccagccatgtgtctaaggccaacataatggtaatagttaaaggacttcatgtagcaagccagaactgaactaaatacatggacatctcaaacatgagtgtcatttaggactgaaggcaaattaatgtcatggggtggagatcaataagaaggtaaggagccactggcagtatgagtccaaacagggtataccatggaaatcacctgtggaagaggaaggtggattccagaagaaagaaaacttgtgggagtgagcatttcaaggatggagagatcttgaagatactcacagggaagatagtggtggggcatgccatccacaacgacttcaaagcccttcagtactttcaccccaagtccctcacccgtgacacctcccatatcccccccctcaaccggaaggctgactgcccggagaatgccaccatgtctctgaagcatctcaccaagaagctgctaaaccgggatatccaggttgggaagagcggacattcctctgtggaagatgcccaggccaccatggagctatataagttggttgaagtcgagtgggaagagcacctagcccggaatccccctacagactagtggcagtggggacgctggtgatatgaggaggcagaggcagcacccaggagaaacagggcagtggaccaatggacagctccaccagctccacatctttggaagctagatttggggagagagaagctctaccccagacttaatacccattgaaatttcacctcaggtgttgtgtcctgtgtctggttaagtgtcccatggaaggggaaagccttcacgtcagaacccaaccctataccttttacttcttaaatggtgctaaccacaggtgtcccagggtgctctgtgccagttaagatttttaactttcaaggggcagggcatactgggaaatgtagtttcccaaactgccttatcacttgggtggacatatgtctccttttatgccttttggtcttgagtaattaacagcatcctcttccacgctcagaagtgttctggttggggccaggcatggtggctcacgcctgtagtcccaacacttagggaggccgaggcgggcggatcacctgagatcaggagttcaagaccagcctggccaacatggcgaattcccgttctctactaaaaatacaaaaaatgtgtggggtgtggtggcaggagcctgtaatcctagctactcaggaggctgaggcaggagaatcgcttgagcccaggaggcggagattgcagtgagccgagatcgtgtcactgcactccagcctgggtgacaagagtgagactccgtctccaaaaaaaaaaaaaagaatttattaacctggttggttaataaattgtgtggtccctgccgggcgtggtggctcacgcctgtaatcccagcactttgggaggccgaggcgggcagatcacgaggtcaggagatcgagaccatcctggctaacacggtgaaaccccgtctctactaaaaatacaaaaaattagccaggcgtggtggcgggcacctgtagttccagctacttgggaggctgaggcaggagaatggcgtgaacccaggaggcggagcttgcagtgagccgagattgtgccactgcactccagcctgggccacggccacagagcgagactctgtctcaaaaaaaaaaaaaaattaaaattgtgtggtccctttccatgtcacagagtctgcttttggctcagagtctgtatctagcctgtgtcaggatattgcctgttcttcccaccttgacttccagagcagccatcgctggtgagctttagttctccttagggttccaaggcattagaagtaagagtgtagcttggaaaccaacttctgtgatttaggaaagctgtctctttcctaaggtaatagggggtttatttcatttaggccccagttggtaggttttaaaataatttataaagtgttttaataatttggttgtcttttttaccttgctaaaccaagcctctaaaaactcaaattattcccttgataaatttttataatggaaaaaaaaaa

SEQ ID NO: 6274 - DNA, 782 bp, Homo sapiens
  SIMILAR (137)..(484): 451254mologous to Mus musculus putative,accession number AK002573,Smith-Waterman Score=149.
  misc_feature (1)...(782): n = a,t,c or g
ccggaactcccgggtcgacgatttcgtgtggcgccgactaggatgggcaagtgtcagtggacttcagtactgctaggaagctccgtagtcaccgggacgagagcgcagaagtggcatggataatacacgtatcaagaaacgctcatttagggcaccagccctaaaggcccaacccctttttggaaggtgctttctcatgccaaaaggaatccgtgctggaaaaaaagtaggagttgaaagccaaaccagcccaaattctgcccattaggaaagtgtgtaagggtcccagctgatcaagaaatggcaagaaaatcacagccctttgtacccaatgaccggttgcttgaactttattgaggaaaatgatgaagttctggttgcctggatttggtcgcaaaaggtcatgctgttggtgatattcctggagtccngctttaaggttgtgcaaagtagcccaatggtttctcttttggccctatacaaatggctgtatggagagaccaagatcataaatatgaacggtgaaaacactgtagtaataaattttcatatgccaaaaaatgtttgtatcttactgtcccctgttctcaccacgaagatcatgttcattaccaccaccacccccccttattttttttatcctaaaccagtaaacgcaggacctgtaccaattttaggaaacaataagacagggttgtttcaggattctctagagttaataacatttgtaacctggcacagtttccctcatcctgtggaataagaaaatgagatagatctgg

SEQ ID NO: 6275 - DNA, 204 bp, Homo sapiens
gcattttaaaaagtaatgactcttggggtagaggccatagaatacagcacccagatataaatccacatatttgccttacaagaaataaatccacattcttaccttacaagagctcctgaaggaagcactaaacatggaaagggacaaacagtatgagccactgggaaaacataccaaattgtaacgaccatcgacactataaag

SEQ ID NO: 6276 - DNA, 274 bp, Homo sapiens
  SIMILAR (129)..(224): 531254mologous to Homo sapiens KIAA0187,accession number D80009,Smith-Waterman Score=81.
ccttgatctggataaatccataaaaattgtgaagaaattaaagctaactggttttccatataaaattttcaagaacacttcatttattaagatattgtcttcatgcgaacttggtatcctgtttccatcccagccttctataacccagtaacatctttgttgaaaccagtggtgagaaagacacctggtcaggaatgtggaccacgggccacctcgggctcgccatggtgtcagactaaagacaaacaaggactctctgtataagggactggtc

SEQ ID NO: 6277 - DNA, 476 bp, Homo sapiens
ttgacatactagaatctaatactagaggcagcatgacattattatgggggaggaggttgagaagcactaacctcgaagttagaatttctggtttgtcatcccagtctgctaattagctttctgatttaagacaaaatactttttctgtgccttctgggggtcaaattcgatttttaagattctgtcagttggaagaaatctaactaaaaatatacttaacataattctttggtagtatattattttgaaatttggtccagaatcctatttgtttattcctgtagtatacatacatctgtagttacccactagtctttgttgtctttgggccatctaaagtatatttgggctgggcatggtgtctcacacctgtaatttcaacactttggaaggccaaggtgggaaaatcacttgaggccaggactttgagaccagcctgggcaacacagcgagaccccatctctcctaaaaaaaaa

SEQ ID NO: 6278 - DNA, 619 bp, Homo sapiens
  SIMILAR (193)..(402): 501254mologous to Arabidopsis thaliana Putative membrane protein,accession number AC011001,Smith-Waterman Score=182.
  misc_feature (1)...(619): n = a,t,c or g
cctgccccatccagagtagagtaagacaaagagnantgccctacaagagaagtgcaaganagctttgatagagagaatgaagagatgttattgtgattatatgaggagaagcacatatttgatgtcttaagagaaatgcagaacaagcccagataccagcatacaggtttccncccnccaccccgtcatgtacagctgaatcatgcagaatttgaagatcaagatgatgaagccagagttcagtatgagggtttccgacctgggatgtacgtctgcgttgagattgaaaatgttccctgtgaatttgtgtagaactttgacccccgttaccccattatcctgggtggcttgggcaacagcgagggaaatgttggatacgtgcagaccctatcactccacagggaactggtttcttggcaatacagtctgtcagtggcataatgcctgattttcggatagctgccacaggagttgtccttgatctggataaatccataaaaattgtgaagaaattaaagctaactggttttccatataaaatttttaagaacacttcatttattaagggaatgtttaattcagccttggaagtggccaaatttgaaggtgctgtattcgc

SEQ ID NO: 6279 - DNA, 484 bp, Homo sapiens
  SIMILAR (162)..(482): 641254mologous to Schizosaccharomyces pombe possibly involved in cell polarity by similarity to yeast bms1,accession number AL391034,Smith-Waterman Score=336.
tgcccccgctctgcaggaattcggcacgaggggagcagggaggtggtttggagtatatacgtaaatctatatccaaatctaaatgtccatatccagtatgttaaactagaatctaaaatttgtggtttgctatatttctttttttccttttcctttaagaccctatcactccacagggaactggtttcttggcaatacagtctgtcagtggcataatgcctgattttcggatagctgccacaggagttgtccttgatctggataaatccataaaaattgtgaagaaattaaagctaactggttttccatataaaatttttaagaacacttcatttattaagggaatgtttaattcagccttggaagtggccaaatttgaaggtgctgtgattcgaactatcagtgggataagggggcagatcaagaaagcactctgagctccagaaggagctttccgggccagctttgaggataagctgctgag

SEQ ID NO: 6280 - DNA, 3883 bp, Homo sapiens
  SIMILAR (46)..(1854): 391254mologous to Arabidopsis thaliana Putative membrane protein,accession number AC011001,Smith-Waterman Score=1105.
gttacttgttattggtaaatagccactatggaggctaaggaccagaagaaacacagaaagaaaaacagtggacccaaagctgcaaagaaaaagaagcggcttctgcaggatctccagctaggagacgaagaagatgcccggaagagaaatcccaaagcttttgcagttcagtctgctgtgcggatggctcgatcctttcacaggactcaggatttgaagacaaaaaagcatcatattccagtggttgatcgaactccactagagcccccaccaatagtggtagtggtgatgggacctccaaaagttggaaagagcactttgatacaatgcctcattcggaactttacccggcagaagttgaccgagatcagaggccctgtgacgattgtgtcaggtaaaaagcgcagactcaccattattgaatgtgggtgtgacattaacatgatgattgatctggctaaagtagcagatctggtactgatgcttatagatgccagctttgggtttgaaatggaaacgtttgagtttctaaacatctgtcaagtacatggctttcctaaaattatgggagttctcacccacctcgactccttcaagcataataagcaactgaagaagacaaagaagcgattaaaacacaggttctggacggaagtttacccgggtgccaagctgttctacctttctggaatggtgcatggagaatatcaaaaccaagaaatccacaatctgggccgttttattacagttatgaagtttaggcctctcacatggcaaacttctcacccttatatcctggcagacaggatggaagatttgacaaacccagaggatatccgaacaaacatcaaatgtgaccggaaggtgtcactttatggttatttaagaggagcacacttgaaaaataaaagccaaattcacatgccaggggtaggagattttgccgtgagtgacatcagtttcctcccagacccttgcgctcttcctgaacaacaaaagaagcgctgtttaaatgagaaggagaagctggtttatgcgcctctttctggagttgggggtgtgctgtatgacaaagacgctgtctatgttgaccttggtggcagccacgtttttcaggatgaagtggggcccacccatgagctggtccagagtctcatctctacccactccaccattgatgccaagatggcttcaagtcgagtgacgctgttttctgattccaaaccacttgggtcagaggatatagataatcaagggctaatgatgccaaaggaggaaaaacaaatggacttgaacactggtcgaatgcgtcggaaagccattttcggagatgaagatgaatctggagatagtgatgatgaagaagatgatgaaatgtctgaagatgacgggttggaaaacggctctagtgatgaggaagcagaagaggaggaaaatgctgagatgactgatcagtatatggctgttaagggcatcaaacgacggaaacttgagttggaagaagacagtgaaatggatttgccagcatttgctgacagtgacgatgaccttgagaggagctcagcggaagaaggggaagcggaggaagctgatgaaagcagtgaagaagaggactgcactgcaggagagaagggcatttcaggatcaaaggctgctggagaaggtagtaaagcagggctgtcaccagctaattgccagagtgaccgtgtgaatctggagaagtctttgctgatgaagaaagcagctctccccactttcgattctgggcattgcacagctgaagaggtgtttgcatctgaagatgaatctgaagaaagctcctcactcagtgcagaggaagaagactcagaaaatgaagaggctattagaaaaaagctttcaaagccttctcaagtgagcagtggtcagaaactggggccacagaacttcattgatgagaccagtgatatagaaaatttactcaaagaggaagaagattacaaggaagaaaataatgattccaaagaaacgtcaggtgccctcaagtggaaggaagacctttccagaaaggcagctgaggcctttctgaggcagcagcaagcagctccaaacctccgaaagcttatttatgggacagtgacagaagataatgaagaagaagatgatgatactctagaagagcttggagggttgtttcgtgtcaaccagcctgacagagagtgtaagcacaaggctgactctttggactgctccagatttcttgtggaggccccccatgactgggatttagaggaggttatgaacagtatcagagattgcttcgtgactggaaagtgggaagatgataaagatgcagccaaggtcttagcagaagatgaggagctctacggtgactttgaagacttggaaacaggggacgtgcacaagggaaaatcaggccccaatactcagaatgaagatatagagaaagaagttaaggaagaaattgaccccgacgaagaagaaagtgccaagaaaaagcatttggataagaagagaaaattgaaggagatgtttgatgcagaatatgatgaaggagaaagcacatattttgatgatcttaaaggagaaatgcagaaacaagcacagctgaatcgcgcagaatttgaagatcaagatgatgaagccagagttcagtatgagggttttcgacctgggatgtacgtccgcattgagattgaaaatgttccctgtgaatttgtgcagaactttgacccccattaccccattatcctgggtggcttgggcaacagtgagggaaatgttggctacgtgcagatgcgtctgaagaaacatcgctggtataagaaaatcctcaagtcccgagatccaatcatattttctgtagggtggaggaggtttcagaccatcccactgtattatatcgaagaccacaatggaagacaaaggcttctaaagtataccccacagcacatgcattgcggagcagccttttggggccctatcactccacagggaactggtttcttggcaatacagtctgtcaagtggcataatgcctgattttcggatagctgctacaggagttgtccttgatctggataaatccataaaaattgtgaagaaattaaagctaactggttttccatataaaattttcaagaacacttcatttattaagggaatgtttaattctgccttgtaagtggccaaatttgaaggtgctgtgattcgaacagtcagtgggataaggggggcagatcaagaaagcactccgagctccagaaggagttttcaggggccagctttgagggataagctgcttgatgagcgatattgtcttcatgcgaacttggtatcctgtttccatcccagcgttcttttaacccagtaacatctttgttggaaaccagtgggtgagaaagacacctggtcaggaatgcggaccacgggccaactcaggctcgcccatggcgtcagactaaaggcgaacaaggactctctgtataagccaatcctgaggcaaaagaaacattttaattcactgcacattccaaaagccttgcagaaggccctgccatttaagaacaagcccaagacccaagcaaaggcaggcaaggtgccaaaggacaggcggagaccggccgtcatacgcgagcctcatgaaagaaagatccttgcactgctggatgctctgagtacggtgcatagtcagaagatgaagaaggccaaggagcagcggcacctgcacaataaagagcacttcagagccaagcagaaggaggaggaggagaagctgaagcggcagaaggacctcaggaagaagctcttcagaattcaggggcagaaggaaagaagaaaccagaagtccagtttgaagggggctgagggccaattgcagtga

SEQ ID NO: 6281 - DNA, 1231 bp, Homo sapiens
  SIMILAR (188)..(316): 741254mologous to Schizosaccharomyces pombe possibly involved in cell polarity by similarity to yeast bms1,accession number AL391034,Smith-Waterman Score=155.
caactttaaagttttggattgcttttgtcaagccactgggttgcaagttcagatggcctctcttgtttttcttagctaattgtaagtaaaattcactttggtaatttagggtgtcacatagaattgaagtttttctcttgctaatattattcctattttcaaattttggggttcctgttagcctgattttcggatagctgccacaggagttgtccttgatctggataaatccataaaaattgtgaagaaattaaagctaactggttttccatataaaatttttaagaacacttcatttattaaggtctgtatatctatatattctcatatttataaatctccatattggttgagaaaaggaatgaaatacctctaaaatatgggcctcatatttttagaaaagtgtttgaaatcttttataaacttcatattttgttagctcctttatattcttgggtacttaaatatgcctcagaaaagcagtggtaaacagctatttaggaattgaggctgttacttttgacttccatgtgagactgccacagaactcatattgaaaatatgtcattttatccactaggttttgtttcctactttttaaatttgtgttaaagaaagggaaaaaaatcacaagtttgtctaactcagtagaaaaatcgacaaagcatttgcagacaacttggccaggggtaccagagaaccggatgtacctgtttttccagtatttggggagggtggtttgagccagcatttattgacaatttccattaagtgggggatgtttcctaattggaaaaccagggttagggaagtcataaaaatgtttcctgcaatataaggtaaataaatacccacccagccgtttatccttaactgttttccatgttcctaagtgccatgccatcctgagtaaaagggatctgggcctgcagtcccagtcctgagagatgcccagcaaaggctccctaggccagttcagtccagtaaatcccctcttcgattttttttttccacacagacagcgagtgatgagcatgcccgtgaactcacatgattattttggggaaaatgaaagagttgtattctttttgaggtagtaattccactttcaggggcaaatacattttgattattttatcacccttcagtgagttgtttttgttctttaatcaaggatgtatgtttgaagtaagaagtaaagcataaagtatacgaaaaaaaaaaaaaaaaa

SEQ ID NO: 6282 - DNA, 641 bp, Homo sapiens
  SIMILAR (214)..(249): 1001254mologous to Homo sapiens Human secreted protein, SEQ ID NO: 6639,accession number AAG02558,Smith-Waterman Score=62.
ccaagcgagactctgccttaaaaaaaaaaaaaagaaaatgtggcacatatacaccatggaatactatgcagccataaaaaagaatgggatcatgtcctgtgcagcaacgtggatggagctggaagccattatcctaaatgaactcactcagaaacagaaaaccaaataccacatgttctcacttataagtagaagctaaaacattgagtacacatggatacaaagaagggaaccgcagacactggggccctacctgaggtcggagcatggaaggagggtgaggatcaaaaaactacctatctggtactatgcttttaatctggatgatgaaataatctgtacaacaaaaccctggtgacatgcaatttccctatactagccaagcctacacatgtgcccctgaacctaaaaaaaaaagttaaaagaaaaacgtttggattattttccctctttcgaacaaagacattggtttgcccaaggactacaaataaaccaacgggaaaaaagaaaggttccagttttgtctgaaaattctgattaagcctctgggccctacagcctggagaacctggagaatcctacacccacagaacccggctttgtccccaaagaataaaaacacctctctaaaaaaaaaaaaa

SEQ ID NO: 6283 - DNA, 541 bp, Homo sapiens
  SIMILAR (33)..(278): 701254mologous to Homo sapiens Human myelin oligodendrocyte glycoprotein gene,accession number AAZ29204,Smith-Waterman Score= 315.
atttttttaagacagtttctgtcacccaggctggagtacagtggtgtaatcaaagctcactgcagcctcaacctcctgggctcaagtgatcctcctgcctcagccttcaaagttgctgggaccacaggcattcgccaccatgcctggctaatttttgtatttttttttgcagagacagggtttcattatgttgcccagggtggtcttgaactcctgaacttgcgcaatctgccagccacggccttccaaagtgctgggattataggcataagccaccatgacttgctgggtattcaaatcacaacttggctcttacagaaactttcttatttgcaaaagaaaatctgcaaagatcaggaaacagggctgctccatgctttccacctctacccctacccctaccccatgcccagctctccccagcttctccagggaccagacattctgacaaatggctagtctagggttctatggaccaaggcaaccagaggttgattcttctccctgctgctacctctaacacaatcccaagtgggaaaac

SEQ ID NO: 6284 - DNA, 882 bp, Homo sapiens
  SIMILAR (2)..(118): 821254mologous to Homo sapiens PRO2852,accession number AF130079,Smith-Waterman Score=168.
ggtagagacggggtttcaccatgttggtggggctggtctcgaactcctgacctcagatgatccacctgcctcggactaccaaagtgctggaattacaggcataagccactgcgcccggcccatggctcctttcttaacattgtgactttgtagattctggctttccagtttaatgatttaggtggatcttttggggaaaccgatttttgactaggtgacacacctggtacagaatttaaaagatgcaaaagggaatagaatacaaaggtcttcttcccagtggtgacttcccaggcccttgtcctgcttcccacaggcaaccactgttagtagcttggtgagttacttatacaaaaagaatgtagctatgcaagcagttagcacatccatatgacgatacagacatacacgtgctacatatttgctatggaaatggttgtatactaatcaaccattctgcaacctgcttttctgatttaatctagaacaacctcattcttgtgtatagtacacctcacaccactatattggcttggtataataactttccaactggcttttgtctcagccatgggcagtttcttttctgaccatccatctggcctcaggttcccctggagtcttcctttctccagcagtccttctctgtctttgtatatcttcaggctttagcaatagcgctcactctattcttctttttctgaattacctcttaaaattaaaggttctgtataactaggctttttgaggcccaggttcttaccttccacgccccttcccactctttctgttgcctccctcgcctatctcttcattgtgtggactctctcatcttcgctcctcgctccctccgcttttctgcgttcttcgtgtcccccagcc

SEQ ID NO: 6285 - DNA, 532 bp, Homo sapiens
  misc_feature (1)...(532): n = a,t,c or g
gcaccatcatagctcactgtagccttgagcacatgccaccacacccagcactgaatgttgtctttttcttttctttccttttttttttttagaggcatggtcttaactatgttgttgcctagggtggtcttgaactgctggcctcaggcaatcctcccgcctcggcctcctaaagtgctgggattactggcgtgacactcatatccagctcctatcattctttgaccacttctttattttctgtcatgagaatatgttccagacccctcttatacttcccatgcccagccctggaatctccatttctccaaagagcattggcttattttagaggagactggtatttagcaaccaaggcctgagtcctaggtatactcactggctactgaggtgtccttttctcctagggccctnacagcaaagttcataaatagatgtacatacatacatgtatgtatgtatatgtgtgaaccatatgcatatacatgtttatacacatccacacacatacatgtatgtatgtacatctatt

SEQ ID NO: 6286 - DNA, 882 bp, Homo sapiens; identical to SEQ ID NO: 4404
  SIMILAR (294)..(4): 881254mologous to Homo sapiens ribosomal protein S7,accession number Z25749,Smith-Waterman Score=434.

SEQ ID NO: 6287 - DNA, 513 bp, Homo sapiens
  SIMILAR (444)..(241): 361254mologous to Arabidopsis thaliana gene_id:F1D9.26~unknown protein,accession number AP002460,Smith- Waterman Score=145.
tcaaatgaagcccgtccccaggtccccagggctcagctgctctccttcctctagcaacacaacaacggtgtagagtgcgtgggggccccactgccactggaccacttgggagaggtgaatggtactcacctcgcctcttctttgaattggagctggcgttttcacaggcagagtgctggcagctgctgagacatcccccttactggtggcataccttgctgtcacacccggtgctgcaggccacctttttttgtgaaagttcttttccttcctcagcagtgcctgctgtttggaacaggttttgttttgttttgtattgttttttgttttcttcctcctcctcatcatcttctccttcttcttctccttctccttctcctccttcttcttttcctcttcctcttcttcctcttcttctttttcttcttcttcttttttttttttgagatggagtctcgctctgtcgcccaggctggagtgcagtgtcatgattcggctcactgcaacctccat

SEQ ID NO: 6288 - DNA, 554 bp, Homo sapiens
gatttgattttaaatcatttatttttctgttttgtaatacgtcagcagttttcattcttattcttttttccttctttttttcattttttcattgcaatgttaacacaccagagttatgtgatttttctgtctgtatacacagtgataattcatttagatttctacatctctttatttttaacatatgacattatgtatttctgaactaagataaacacttaagcaaagttgttactcatatacgaaaatatgttaatagttttatagtgttcagctttcctttctaactatactgtactaatagtgcaaatcatagcaagccttatccatagctctacaaaatgaatttctcagtgtgccaatatcataaaaatatgaattatattacactaactatagagttcagtagaaataaattcttatctgtaacttttctgttatttagtatattcagccataattttggaattagtgcttcaatctcaattttcatattacatgtatatattaagaataatccaattggattttttaaatgaggaaatgcacatatc

SEQ ID NO: 6289 - DNA, 2050 bp, Homo sapiens
  SIMILAR (971)..(1297): 591254mologous to Homo sapiens Human myelin oligodendrocyte glycoprotein gene,accession number AAZ29204,Smith-Waterman Score= 297.
gatcacacgccactgcactccagcctgggtgacacagtgagactctgtctcaaaaaaaaaaaaaaaggtggttattagttttggggtggtagtcacaaaacacataaccaaaacaatgtgtacttagaaaatctaggccgggcgcggtggctcacgcctgtaatcccagcacttttgggaggccgaggcgggcctgatcacgaggtcaggagatggagaccatcctggctaacacagtgaaaccccttctctactaaaaaatacaaaaacaaaattagccaggcgtagtggcgggcgcctgtagtcccagctacttgggaggctgaggcaggagaatggcgtgaacccgggtggcggagcttgcagtgagccgagatcccgccactgcactccagcctggggtgacagagttgagactccgtctcaaaaaaaaaaaaaaaaaaagaaaccacagcagctgtggctggggagcccagatgaagtgtggctctatcttgtatgtgagcacacccacattttcactgccattatctgggacagcagaaccaggtttggctcaacagatttctctttccacccatctattgcaggagtagtggtcttgctgcttctccagggaggtaagtagtcaataagtcactaccgcctggatctcctggcttgggtgctttcatttttgatgtacagtttctttttctgctacatgctttttctcttgattactctctccggttctgccactgacatatttatgacactgagtttttattctatctttttgtgtatcccttgttctagttctttttgagccactctctctctcacccctcccccatagctggcctcaatatgtgtgtgtgaatacaaacatacacaatgtttgtattatctgtttctctactgatctgtgtcatccatccatacatacatactgaatcttagtgctccatgggtgtttcatatgttggtggtatctctgtctctcaatgtattttttttttaatttttttgagatggagtctcgctctgttgcccaggctggagtgcaatggtgcgccatctctgctcactgcaagctccgcctgctgggttcacaccattctcctgcctcagcctcccgagtagctgggactacaggcacccgccaccacgcctggctaaattttttgtatttttagtagagacgggggtttcaccgtgttagccaggatggtctcgatctcctgacctcaggtgatccgcccacctcggcctcccaaagtgctgggattacaggcgtcagccaccgtgcccggcctctgaaacatctttcttaatttaactttcaactaagttctagtctgtaaatgagaaatgcaagtaagaacaaggggtcaatttattttaagtaaatttgtcattaaatatcaatgtgtacaatttcaaacatttataaatcttccaatttatagaaaaattaatgtaatcttaaaattatttgaacagtgggctttcacaattatttacaatggaactcaacctacttttgtagaaacatttatgtttaaaagtacccctgccacaaagtgatcatttcacagtacctttctataatatttatgtcacttaagtggtggctgcatcaataaaacctagcagattcaataaattagaaacagcacaatcagaacagtcaataaagctaccattgattccaaacaaaacagaaccttttaatagtcaagatataaatgttttcccccatccagcactcattggaaaaaaataattaggaggcaatcttttcttcactgtttacttcagtacaaggtaattttaagatatttttaaaaattgatgttaagaagcaggattaggtaacttcttataatatgtgacattaaatattttgagaaattcttggtttcattggaaggtatttgtaatgataaaccttctttcagttataatgagatactaagcagaggtaattctgtcatcccagatagcaatttcttattaacaattgataacatttgaactgaaagagattcttggctttatttctata

SEQ ID NO: 6290 - DNA, 1221 bp, Homo sapiens
  SIMILAR (1)..(1221): 991254mologous to Homo sapiens YC1 gene,accession number AAT90335,Smith-Waterman Score=2136.
atgggcaaagtgtggaaacagcagatgtaccctcagtacgccacctactattacccccagtatctgcaagccaagcagtctctggtcccagcccaccccatggcccctcccagtcccagcaccaccagcagtaataacaacagtagcagcagtagcaactcaggatgggatcagctcagcaaaacgaacctctatatccgaggactgcctccccacaccaccgaccaggacctggtgaagctctgtcaaccatatgggaaaatagtctccacaaaggcaattttggataagacaacgaacaaatgcaaaggttatggttttgtcgactttgacagccctgcagcagctcaaaaagctgtgtctgccctgaaggccagtggggttcaagctcaaatggcaaagcaacaggaacaagatcctaccaacctctacatttctaatttgccactctccatggatgagcaagaactagaaaatatgctcaaaccatttggacaagttatttctacaaggatactacgtgattccagtggtacaagtcgtggtgttggctttgctaggatggaatcaacagaaaaatgtgaagctgttattggtcattttaatggaaaatttattaagacaccaccaggagtttctgcccccacagaacctttattgtgtaagtttgctgatggaggacagaaaaagagacagaacccaaacaaatacatccctaatggaagaccatggcatagagaaggagaggtgagacttgctggaatgacacttacttacgacccaactacagctgctatacagaacggattttatccttcaccatacagtattgctacaaaccgaatgatcactcaaacttctattacaccctatattgcatctcctgtatctgcctaccaggtgcaaagtccttcgtggatgcaacctcaaccatatattctacacgaccctggtgccgtgttaactccctcaatggagcacaccatgtcactacagcccgcatcaatgatcagccctctggcccagcagatgagtcatctgtcactaggcagcaccggaacatacatgcctgcaacgtcagctatgcaaggagcctacttgccacagtatgcacatatgcagacgacagcggttcctgttgaggaggcaagtggtcaacagcaggtggctgtcgagacgtctaatgaccattctccatatacctttcaacctaataagtaa

SEQ ID NO: 6291 - DNA, 1483 bp, Homo sapiens
  SIMILAR (1088)..(1168): 921254mologous to Homo sapiens MSSP-2,accession number X77494,Smith-Waterman Score=135.
atggcccctcccagtcccagcaccaccagcagtaataacaacagtagcagcagtagcaactcaggatgggatcagctcagcaaaacgaacctctatatccgaggactgcctccccacaccaccgaccaggacctggtgaagctctgtcaaccatatgggaaaatagtctccacaaaggcaattttggataagacaacgaacaaatgcaaaggttatggttttgtcgactttgacagccctgcagcagctcaaaaagctgtgtctgccctgaaggccagtggggttcaagctcaaatggcaaagcaacaggaacaagatcctaccaacctctacatttctaatttgccactctccatggatgagcaagaactagaaaatatgctcaaaccatttggacaagttatttctacaaggatactacgtgattccagtggtacaagtcgtggtgttggctttgctaggatggaatcaacagaaaaatgtgaagctgttattggtcattttaatggaaaatttattaagacaccaccaggagtttctgcccccacagaacctttattgtgtaagtttgctgatggaggacagaaaaagaggcagaacccaaacaaatacatccctaatggaagaccatggcatagagaaggagaggtgagacttgctggaatgacacttacttacgacccaactacagctgctatacagaacggattttatccttcaccatacagtattgctacaaaccgaatgatcactcaaacttctattacaccctatattgcatctcctgtatctgcctaccaggtggcaaaggaaaccagagaaaacaagtatcggggctctgctatcaaggtgcaaagtccttcgtggatgcaacctcaaccatatattctacacgaccctggtgccgtgttaactccctcaatggagcacaccatgtcactacagcccgcatcaatgatcagccctctggcccagcagatgagtcatctgtcactaggcagcaccggaacatacatgcctgcaacgtcagctatgcaaggagcctacttgccacagtatgcacatatgcagacgacagcggttcctgttgcaggaggcaagtggtcaacagcaggtggctgtcgagacgtctaatgaccattctccatatacctttcaacctaataagtaactgtgaggtatgagggaaaggtcttccataactggggggctcaaatcaagcacaatctatagggctttttttaaaatcagaatggtgattgggataactcggattttatcatactgctttaatcgtggccaaggcatctagtcttgttgaaatattaaaatcagtgattttatgaatttaagattaatcattttgtctaaagagaatgctttatactgaagccaaatgtatactctccccactaaagaagaaaaaagataaaaatctgtaacatcagagaacaattttggttcttggtgttctctggtcgac

SEQ ID NO: 6292 - DNA, 836 bp, Homo sapiens
  SIMILAR (1)..(180): 601254mologous to Homo sapiens Human secreted protein, SEQ ID NO: 4478,accession number AAG00397,Smith-Waterman Score=175.
gtatttttagtagagatggggtttcaccatgttggccagcctagtctcgaactcccgtcctcaagcgatgcacctgcctcggcctcccaaactgctgggattacaggcgtgagccactgctctcggcctgtgcgttttttctttgcgggaatgctcctcacttgttgcatttcttggcggtgttttgcatcccgagccctttgccgcttgcagcatccaattatctcctccagtcagcagccacttgccttccagtgtttctggagcacagacgttccaaaaacccgagtttatcaaattggaaccattctcccattaccgagtaagcttttagattcgtgggcagaaggatatcctgccacgttcgagtctcatgttcctggcatttactcacgcgtaggcgtctcatccatctggcacttaggttgtgtgtggagcgagccaggggtctcacgtttcttgcccatgagatgggacggccccagcgccagggagtggatggtcctctgccacgcacgcaaggcggcgccagctccttgctcccgcttcccagcacagcctgttctgagccaggccccaccgcctgcgactgtggctctttgtcatgtactcacctcacttattcctctctttaatctcccgcaggtgctcagctactggcttccctcccgggacgaggtcggagtctccgcctgggattctgaggcgtggcttttgcttcacagtgcccctaaacctcagtagtgtaggaaactttctgaaaggaaaacaaattctcagggatgcccagaacttatcagttcacttttattacagaacacgaattccaccgcacg

SEQ ID NO: 6293 - DNA, 356 bp, Homo sapiens
  SIMILAR (8)..(169): 811254mologous to Homo sapiens Human secreted protein angiopoietin-3,accession number AAY44841,Smith-Waterman Score=254.
ttatataggaggttggtgggacaaagccggagcacattctatcctaaatggagtatggtacagaggaggccattacaaaatcaagcaccaagatggtattttctgggctgaatacccaggcgggtcatactccttaagagcggctcatatgatgatcaggcctattgactgaagagagacactcgcccctttaaatgacacagagctttgtacttttcagctgttaaaaatgtaaatgttacatgtatattacttggcacaatttatttctacacagaaagcccctaaaatgaattttaccgcaactataaaagggaacctatggatgtagtttcatctgtcgtcatttactgcat

SEQ ID NO: 6294 - DNA, 1301 bp, Homo sapiens
  SIMILAR (1)..(348): 691254mologous to Mus musculus putative,accession number AK005099,Smith-Waterman Score=438.
gagggtggcacaggcgtgcggtcgctgagcttctaccagcacatcatcactgtgggcaccggccatggttccctgctcttctatgacatccgcgcccagaagttcctggaggagagggcctcttccagcctggactccatgccggggcccgcagggaggaagctcaagcttgcctgcggcagaggctggctcaaccaagatgacgtctgggtgaactactttggtggcatgggagagttccccaatgcgctctacacccactgctacaactggccggagatgaagctctttgtggctggggggcctctcccttcaggcctccatgggaactacgcaggcctctggagttaaggatggacgccttgttctcaaagtgcacaggtggaaccagtccaacttacgtgtgcttaatgtattaggcagagaaagaaagagagagagcgggagcgagagagcacaagtggtcctttcggcagtcaaaactttggctttaaaactctcattcacgtttcccaacagcagtatatttttgccttctcattcacagagttttggctaaaccttaattgtgttctgtctttcagtgattcacataccctccttctttaggttgatgtagtcatagtcttcactactattcagtacgttagttttatcaatattgcaatagtgttcagatcttttacacatgttagatgtgtggtgttttggggaaatgtgagctacaaagcatctttggggttgttttgaggaactacccatcatttatagccttactctaattacaaaatgcagttcaggttctagattgccaccattctagagtgtggcacacaccattctagggcgtgattcatttggatgttggaaactcaatgtctgttgtttgtatagtgttgatgtgtaaaatgctttaaaaatatgttctgttagttagaaatcttacaatgttgttcatactattaatcaacatttttggttattcagtaaaacatttactatcctcaggccctccgtgttcttatttaaagccgctgtattatggcctgcttttctatgctacagattttcagaactactcaattctggtctatatatgtggtagtgcaatcagggaggtatttttgggggtatatggggtacacatctctttaaattcaggtagctatttacagtgaaaagccagttgtggcagttgtgctcagagtaggtgttgattttttattactgtatacatggataattctggatccagtatgtgatgcgttgcagaaaaataaataaaatgtgttaaaaatctt

SEQ ID NO: 6295 - DNA, 1687 bp, Homo sapiens
  SIMILAR (2)..(592): 981254mologous to Homo sapiens Amino acid sequence of cancer associated polypeptide CH14-2a16-1,accession number AAY84041,Smith- Waterman Score=1005.
acagacttacgatgatggagctgcaacccgactaatgtcaacagtgaaacctttgagggagccagcaccctctgaagatgtgattgatattaagccagacccagatgatctcattgacgaagacctcaactttgtgcaggagaatcccttatctcagaaaaaacctacagtgacacttacatatggttcttctcgcccttctattgaaatttatcgaccacctgcaagtagaaatgcagatagtggtgttcatttaaacaggttgcaatttcaacagcagcagaatagtattcatgctgccaagcagcttgatatgcagagtagttgggtatatgaaacaggacgtttgtgtgaaccagaggtgcttaacagcttagaagaaacgtatagtccgttctttagaaacaactcggagaaaatgagtatggaggatgaaaactttcggaagagaaagttgcctgtggtaagttcagttgttaaagtaaaaaaattcaatcatgatggagaagaggaggaagaagatgatgattacgggtctcgaacaggaagcatctccagcagtgtgtctgtgcctgcaaagcctgaaaggagggcattttattctggagcatctacgcacagatgttttctccgtggaagttgttgctgtttttctcccgagggaaaagctttaccggaagtctcaaccgaatggaagttttttaagggcaaatgccgatactctagaggatctgtgttcttttcatcacagaaaagatatgatttcagatattcgattttcacctggtcaaaagaaggaggagcggttaaactgtgggatcaggaactgaggcggtgccgtgccttcaggcttgagacaggacaagccacagattgtgttcgttctgtgtgcagaggcaaaggcaagatccttgttgggacaaggaatgctgaaataatcgaagttggagagaaaaatgcagcttgtaatattttagttaacggtcatgtggatgggccaatctggggactagcaacacatccttccagggattttttcctttctgctgcagaagatgggacagtgagactttgggatattgctgataaaaagatgttaaacaaagtgaatttgggacatgctgctcgtactgtgtgttacagccctgaaggggacatggtggctgttggaatgaaaaatggagaatttatcattttactatattgttttggctatttggagccccttgcaggcccatgtgaatttgaggattggctttttatctctatgaaaaagcatattgggattgtgatagctacagctccttctattcacatctgggatgcaatgaacaagcagactttatctatcctaagatgctaccattcaaagggagtatgttcagtcagcttcagtgctactggcaaactattgctgtctgtgggactagacccagaacatactattaccatttggagatggcaggaaggtgccaaaattgccagcagagctggtcacaatcaacgtatttttgtggcagaattccgaccagattcagatacccagtttgtctcagtgggagtaaaacatgtgaagttctggaccctggcaggaagagctcttcttagcaaaaaagggctactgagcacactggaagatgcccggatgcagaccatgctcgctattgcatttggtgcagtggcatga

SEQ ID NO: 6296 - DNA, 406 bp, Homo sapiens; identical to SEQ ID NO: 5517

SEQ ID NO: 6297 - DNA, 1719 bp, Homo sapiens
  SIMILAR (711)..(1322): 321254mologous to Homo sapiens cytoplasmic protein,accession number AF177377,Smith-Waterman Score=254.
gtgggaggtgttgctgtttttctcctgatggtaaagctttagccgtaggtctcaacgatggaagcttcttaatggcaaatgcggatactctagaggatcttgtgtcttttcatcacagaaaagatatgatttcagatattcgattttcacctggaatttggccagtaattggagaagttacagatgtaactgcttcttgcctcaccagtgacaaaatggttctagctaccggggacgatttgggatttgtgaagttatttagatatcctactaaagcctccagtgagcagggccccaccacagccagagaaactccagacaaacaatgtaggcaagaaaaagagacctatagagctacagctccttctattcacatctgggatgcaatgaacaagcagactttatctatcctaagatgctaccattcaaagggagtatgttcagtcagcttcagtgctactggcaaactattgctgtctgtgggactagacccagaacatactattaccatttggagatggcaggaaggtgccaaaattgccagcagagctggtcacaatcaacgtatttttgtggcagaattccgaccagattcagatacccagtttgtctcagtgggagtaaaacatgtgaagttctggaccctggcaggaagagctcttcttagcaaaaaagggctactgagcacactggaagatgcccggatgcagaccatgctcgctattgcatttggtgcaggcaagatccttgttgggacaaggaatgctgaaataatcgaagttggagagaaaaatgcagcttgtaatattttagttaacggtcatgtggatgggccaatctggggactagcaacacatccttccagggattttttcctttctgctgcagaagatgggacagtgagactttgggatattgctgataaaaagatgttaaacaaagtgaatttgggacatgctgctcgtactgtgtgttacagccctgaaggggacatggtggctattggaatgaaaaatggagaatttatcattttactagtgagttctctaaaaatatggggaaagaagagagacaggagatgtgcaatccatgatatcagatttagtccggattcccggtatctggcagtaggttctagtgagaactcagtggatttttatgacctaacgctgggccccactcttaacagaatcagctactgcaaagacattccaagctttgtcattcaaatggacttctctgcagatagcagttatctccaggtctctagtggctgctataaacggcatgtctatgaagtgccttcaggaaaacatcttatgggttcatgccgctattgacagaattacttgggctacatggactagtattctaggagatgaggttttgggaatctggtccagacatgctgagaaagctgatgtcaactgtgcctgtgtatctcattcaggaatcagtcttgttacaggagatgactttggcatggttaagttatttgacttcccatgtccagaaaaatttgcaaaacacaaaaggttcttgggtcattcgccccatgtgacaaatattcgatttaccagtggtgatcgacatgttgttagtgctggaggtgatgactgcaggttagtaactttctcagcccatgaagagcagactatgttactagttaagagacttaatacaacaactcctacagctttggtttatgaaatcagctag

SEQ ID NO: 6298 - DNA, 6084 bp, Homo sapiens
  SIMILAR (22)..(1608): 311254mologous to Homo sapiens cytoplasmic protein,accession number AF177377,Smith-Waterman Score=619.
atgcccctcaagctgcaaaactgccttgcattgcatcctgaacgagtgttggtagcaacaggacaagttgggaaagagccttatatttgtatttgggattcatacactgtgcagaccatatcagttttaaaggatgttcatacacatggtatagcttgcttggcgtttgacttagatggacagtgcagtgtgaaagcagtcatagacaatgcacgaaggaatgagtgtggctatattccagtaaaactttatttacaaaaacatagtttctctttgatttgtttgcctttttattccttcctggacttcttggacataaatcagcgcttggtttcagttggacttgattcaaagaatgcagtttgtgtttgggactggaaaaggggaaaaatgttgtctatggctcctggtcatacagatagattctggagtttatgtggaaatgctctgaccccaaaacgaggtgtctttggtaagacgggtgaccttcagacaatactgtgcctagcctgtgcaagggatgaattaacatattctggtgcactcaatggggatatatatgtttggaaaggaatcaatcttatacgaacaatacaaggagcccatgctgcaggaatttttagcatgaatgcttgtgaagaaggctttgctactggtggcagagatggttgtattcgtctttgggatttaacttttaaaccaattactgtgattgatctcagggaaacagaccagggatacaaaggtttgtctgtaaggagtgtgtgttggcgaggtgaccacattctagttggaacacaggacagtgaaatttttgaaattgtggtgcaagaaagaaataaaccttttctaattatgcaagggcattgtgaaggtgaactttgggcacttgctgtccatcctactaaacctttggctgtgactggaagtgatgatcgttcggtcaggatatggagcctagtagatcatgcattaatagcaaggtgtaatatggaagaaccaattcgttgtgcagctgtcaatgcagatggaatccatcttgcccttggaatgaaggatggctcattcactgtacttagagtaagagatatgacggaagttgtacatattaaagataggaaggaggcaattcatgagttaaaatattcaccagatggaacttaccttgctgttggatgcaatgacagctcggttgatatttatggagttgctcagcgttataaaaaagttggcgagtgtttgggatcccttagtttcatcactcatctggactggtcttcagacagtagatatttgcagacaaatgatggaaatgggaaaagacttttttatagaatgccaggaggaaaggaagtgacaagtacagaagaaataaaaggtgttcattgggcttcatggacatgtgtttcaggccttgaagtaaatggaatttggcccaagtattcagatatcaacgatataaattcagtagatggaaattatattggccaagttttagttacagctgatgactatggaattataaaattattccgatatccatgtttaagaaaagaaagtctggctgactctcatagtgatgaatcagattcagatctgtctgatgttccagaactggattctgaaattgaacaagagacacagctcacctaccgtcgacagtgttctgcaggctgtacaagcagggcaccagcatctgctcagcttctggtgaagcctcaagaagcttttactcatggcagaaggcaaagggggagcagttacagaggttatgactgtcgaagtaatctgttttatactcaaattggtgaaattgtgtaccatgtggcagcagtgggtgtcatttataatcgacagcaaaacacacagcgtttttatctgggtcatgatgatgatattctctgcctaactattcatcctttgaaagactacgtggcaacaggccaggttggtagagatccctcaattcatatatgggatacagagaccattaaaccattgtccatattaaagggccaccaccagtatggtgttagtgccgttgatttctcagcggatgggaaacgtttggcatcagttggcatagatgatagccatactgttgtgctctgggactggaagaaaggagagaaactttcaatagcaagaggaagtaaagataagatttttgttgtaaagatgaacccctatgtgcctgataaactaattacagctggaattaaacacatgaaattttggcgtaaagcagggggaggattgattggaagaaaaggctacataggcacactggggaaaaatgacacaatgatgtgtgcagtgtatggatggactgaagagatggctttttctggaacatccacaggagatgtgtgtatctggagagacatctttcttgtaaaaacagtgaaagcgcatgatgggccagtgttcagtatgcatgcattggaaaaagggtttgtaactggaggaaaagatggtatagtagctctttgggatgactcttttgaaagatgtctcaagacctatgctataaaaagagctgcattggccccaggatctaaaggtcttctcttggaagataatccatctatacgtgccatatcattaggacatggtcatattttagttggcacaaagaatggtgaaatactagaagtggataaaagtggcccaataacacttctggttcagggacacatggaaggagaggtgtggggtttagctacacacccttatctgcccatctgtgctactgtaagcgatgataaaaccttaagaatatgggatctctcacctagtcattgtatgttggctgtccggaagctgaaaaaggtgcaaaagggaaatgtggggttggagcccccatacagagtccctactggggcaccgcctagtggagttatgagaagagggcaaccatccttcagaccccagaatggtagaacaactgacagcttgcaccatgtgcctggaaaagccacaggcactgaatgccagcctgtgaaagcagccaggaagggggctatactctgcaaaaccacaggggcagagctgcccaagaccatgggaacccacctcttgcatcagtgtggcctggatctgaggtttgctggaggtccactccagaccttctttgcctgggtccctcccacacctcgaggtatcaccagtggaggctgcaaaacagtaaagagggtcactgaactgataccagtggaaacgcccctgtataaggtgtctagcaacccctgttggggtggtctcacccagtcaggaggtacaggatccaggacccacttaatgaagcactctgactaccccttggcagagggggtgcattacactgggggaaatcccacttgtcctgactgcccagattcctcagagctgggagctcagtcatctgaggcagcagacagccaaagtgatgacagccgtcccttcccccaggaacttggtagtcttcggcagtctgtagctaagtggccactgagaatctgtgcagctctatgcttgggactcaaggaactggtggcatgggctcacggaggggatctcctgatccaccagttgcacagatccatggaaaaagtgtggtttcccgggcaggatagcacaatcactcactgcctctcttggctgggagtaggagctccccttgtcctgtgcagctcccagaaagcagcaaccctagtactaagggagagtgaacaagttaaaggtgattcagacctgtttggaaatggtgtggctgccaccagaacattcagtgagcttgtggcgaaaaagcttgccagagggtgcagccctcagtggaacagtgagagtagtcacttggtgaaggagaagcttgccagaggcagcaggccagagctgaatggtgggaggtgttgctgtttttctcctgatggtaaagctttagccgtaggtctcaacgatggaagcttcttaatggcaaatgcggatactctagaggatcttgtgtcttttcatcacagaaaagatatgatttcagatattcgattttcacctggaatttggccagtaattggagaagttacagatgtaactgcttcttgcctcaccagtgacaaaatggttctagctaccggggacgatttgggatttgtgaagttatttagatatcctactaaagggaaatttggaaagtttaagaggtatgtggcccatagtacacatgtcacaaatgttcgctggacttatgatgacagcatgttggttaccctaggcggtacagatatgtctttaatggtgtggacaaatgagatggaaggctatcgagaaaaaaggccttgtgatagtgaagaatccgacattgattctgaagaagatgggggctatgacagtgatgttacaagggagaatgaaatcagttacaccatcagagccttatcaacaaatattcgcccaatgttaggaatcaagcctcatttacaacaaaaagaaccctcaattgatgaaaggcctccagtgagcagggccccaccacagccagagaaactccagacaaacaatgtaggcaagaaaaagagacctatagaggaccttgtgttggagctcatttttggttatcgaggcagagactgtaggaataatgttcactatttaaatgatggtgatgatataatttatcacactgcatctgttggaattctgcacaatgttgctacaggttctcagagtttttatcaggaacataatgatgatattctgtgcctcacagtaaaccagcaccccaaatttatcaacatagtggcaactggccaagtagctacagctccttctattcacatctgggatgcaatgaacaagcagactttatctatcctaagatgctaccattcaaagggagtatgttcagtcagcttcagtgctactggcaaactattgctgtctgtgggactagacccagaacatactattaccatttggagatggcaggaaggtgccaaaattgccagcagagctggtcacaatcaacgtatttttgtggcagaattccgaccagattcagatacccagtttgtctcagtgggagtaaaacatgtgaagttctggaccctggcaggaagagctcttcttagcaaaaaagggctactgagcacactggaagatgcccggatgcagaccatgctcgctattgcatttggtgcaaataacttgacgtttacaggtaccatcagtggtgatgtctgtgtgtggaaagatcacatattgtgtagaatcgtggcgagagctcacaacgggcctgtgtttgccatgtacaccaccctgcgagatggacttatcgtgactgggggaaaggaaaggccgtcaaaagaaggaggagcggttaaactgtgggatcaggaactgaggcggtgccgtgccttcaggcttgagacaggacaagccacagattgtgttcgttctgtgtgcagaggcaaaggcaagatccttgttgggacaaggaatgctgaaataatcgaagttggagagaaaaatgcagcttgtaatattttagttaacggtcatgtggatgggccaatctggggactagcaacacatccttccagggattttttcctttctgctgcagaagatgggacagtgagactttgggatattgctgataaaaagatgttaaacaaagtgaatttgggacatgctgctcgtactgtgtgttacagccctgaaggggacatggtggctattggaatgaaaaatggagaatttatcattttactagtgagttctctaaaaatatggggaaagaagagagacaggagatgtgcaatccatgatatcaggttagtgaacaaatggaatagagtttctagtatatacttgatttaacttccatttgtaaaattttccatagccttgccttcaaaaagaggtccccagggcctgtagcatttcccgtattataaattgtatgctaaaatatggctgtttgtatactacttaattcttcttgctaaattataaacccactggggcaccaactataatagcaagtactagtagggtaatgttttgatggaattcatggtttaacacttaggccctgtcccttaagtt

SEQ ID NO: 6299 - DNA, 1560 bp, Homo sapiens
ctgtgacaggctctgcctcttctagtctttttccattcaacgcttgtttgtgatgccactcgaccacctcaaagaagctgcctctctcctcctaagaactcatctaacttcttctccacttggcccgggcgggagtaagcagggccagtgggtactcctgaatacaggcaggcctgcatcttttaggatcccatccctccctgagcctcacgcgcagacccccagaggactcaggctatacacacacccacgtccactggagactgcagcctctgggtatcaggccctgccggggactcctttgaaattatcacataggaaagcaacgcagcgccttgattcactaagggatcttggggccgctaagctagaccaagggcagcgtgaggtccacagagctccctgcttcccttccactggagggaaataacattctgttcatggacttcgacaggcaacacagagaggtcgggggccacagtcagagctgcaatcctactctgcagggattgctcgcccaatttagctctggaaaagtatgccagtgacaaaggcacaggctgctggggacgggggtagcaccagagagctgtgggactgactacagggcacctctccagagagctgctctggtcgtcatcctccaccccggcacccagaggtgctgctgggctggggactgagctttagggcccaccttggataagggcaggaaaaacctcaggaagacaatgttatagagagctcattttcacgagcctggagctgtgcccatctctgtctttggtgccagcaccatggaggtaccccctctttgctgggtgaccgtcaggaccctctggagcatgtccgagggctcaaaatacaagaggctcctccagtgatgaaccagcgccagcatatccaggtgctgcccaagatgaggtagaaacaacacatctgcccatcaggaaatagcacagtctttagttctggatcccgcttacctgaggatcccacttacctacttacatatctgcccattaggaaacagcataatctttagtcctggatctcacaggcctcccacgtcccacaagtcccagtcacgagagaggcctagactccagttcatctggtccagggctctccactggtccctgagaatgcagtcctgaccccaaccccatgtgtcctaaggtacttccaggccctgaccagagatgttggaatagccacagcacggcccctattgcattcccagaacctgtgagatccaggtaatcagggtcatggacacctgttcctgccacaggagccaccttgaaccccagatgccagcgtggccttgccattcctaactccttagtgagctctccatgaggtcctgctggatggagagaactgccctcatctcagcaggctcatcctcatcccaaacgttgaggggctttgcgatcagagaacaggcaagaaggccccgatcagggttgtggcaactgctttgtgaaatatggcggacgcgtcggtcgcgtcgggtattccggaccagtccggacagggtgttcaagggcgtcaaat

SEQ ID NO: 6300 - DNA, 441 bp, Homo sapiens
  SIMILAR (1)..(384): 531254mologous to Homo sapiens flotillin,accession number AF085357,Smith-Waterman Score=259.
  misc_feature (1)...(441): n = a,t,c or g
ctaaagcagcagattgaggagcagcgggtgcaggtgcaggtggtggagcgggcccagcaggtggcagtgcaggagcaggagatcgcccgagccgaggctgagcagatggccaagaaggcagaagcttccagctgtaccaagaggctgctcagctggacatgctgctagagaagctgccccaggtggcagacggagatcagtggtcccttgacttcagccaataagatcacactggtgtccagcggcagtgggaccatgggggcagccaaagtgactggggaagtactggacattctaactcgcctgccaagagagtgtggaaaagactcacaggccgtgacaatcctcccaaggttgaatcacaaagccttttgaagaacagccttgagccttcagccctcacagatgcccagcctcatagctgaanttgctgaatgattc

SEQ ID NO: 6301 - DNA, 1807 bp, Homo sapiens
  SIMILAR (165)..(1445): 1001254mologous to Homo sapiens flotillin-1,accession number AF089750,Smith-Waterman Score=2090.
tcgagcaacggggtgcgcagaggtggggaacgcgggacgggccagctcccaggaaagctggtctgcgagcggcccctgcccggctcccaggtccctgcgcgaccccgcccttcccgagaccccagccgggctgccgccgcgtcccggaagctccagcctgaaccatgtttttcacttgtggcccaaatgaggccatggtggtctccgggttctgccgaagccccccagtcatggtggctggagggcgtgtctttgtcctgccctgcatccaacagatccagaggatctctctcaacacactgaccctcaatgtcaagagtgaaaaggtttacactcgccatggggtccccatctcagtcactggcattgcccaggtaaaaatccaggggcagaacaaggagatgttggcggccgcctgtcagatgttcctggggaagacggaggctgagattgcccacattgccctggagacgttagagggccaccagagggccatcatggcccacatgactgtggaggagatctataaggacaggcagaaattctcagaacaggttttcaaagtggcctcctcagacctggtcaacatgggcatcagtgtggttagctacactctgaaggacattcacgatgaccaggactatttgcactctttggggaaggctcgaacagctcaagtccaaaaagatgcacggattggagaagcagaggccaagagagatgctgggatccgggaagctaaagccaagcaggaaaaggtgtctgctcagtacctgagtgagatcgagatggccaaggcacagagagattacgaactgaagaaggccgcctatgacatcgaggtcaacacccgccgagcacaggctgacctggcctatcagcttcaggtggccaagactaagcagcagattgaggagcagcgggtgcaggtgcaggtggtggagcgggcccagcaggtggcagtgcaggagcaggagatcgcccggcgggagaaggagctggaggcccgggtgcggaagccagcggaagcggagcgctacaagctggagcgcctagccgaggcagagaagtcccaactaattatgcaggcggaggcagaagccgcgtctgtgcggatgcgtggggaagctgaggcctttgccataggggcccgagcccgagccgaggctgagcagatggccaagaaggcagaagccttccagctgtaccaagaggctgctcagctggacatgctgctagagaagctgccccaggtggcagaggagatcagtggtcccttgacttcagccaataagatcacactggtgtccagcggcagtgggaccatgggggcagccaaagtgactggggaagtactggacattctaactcgcctgccagagagtgtggaaagactcacaggcgtgagcatctcccaggtgaatcacaagcctttgagaacagcctgagccttcagccctcacagatgcccagcctcatagctgaagttgcctgaatgatcctcctgttgcatgtaacccactggcctccctgagcatgtccattgacagtgaggtcccaccctcatctctccttgccaaatagtttgtgccttgtcttgaagggtgattgccaactccagcggtcccatgtcagccttctgatgatcccactccaccccacctcaacttatttaacttcctaattaaatcagactgtttgagcctgttgtctagaatattttcctgaccaagactgagggatgggctggaggttttcaactttgctacccaaataaattgctgtaagtaagtactaaaaaaaaaaa

SEQ ID NO: 6302 - DNA, 867 bp, Homo sapiens
  SIMILAR (114)..(356): 761254mologous to Homo sapiens flotillin,accession number AF085357,Smith-Waterman Score=272.
  misc_feature (1)...(867): n = a,t,c or g
gggtggggtgtagtgaggggcttagggagaaacagcctagggggactctaaattaggggtgggaattattagtgaccaaagtgaggaaggatgatcagtggaacgaggaccttaaaacccagagtaagttgttttatgaggaatgtggtcagatcatgggcactgagtgggtgtctctctcctgccaggtggcagaggagatcagtggtcccttgacttcagccaataagatcacactggtgtccagcggcagtgggaccatgggggcagccaaagtgactggggaagtactggacattctaactcgcctgccagagagtgtggaaagactcacaggcgtgagcatctcccaggtgaggtctcaggttggagctgaggagaattgctaggttccttgtgtgtgtgacacagtatgcctagcatttaaccagcatccaggcctgggagtcattgatgtttattaatcactttctgtgtgccagacacagtgctaagcttctacataaatgagttgttttaaatcaaactaccattagggtatataggattttacaaagtccagaaactcaacatccagcatgttcctactcattctgctagtgcagctggagtgaaatccaggtcgactgtctctgcaacctgtgcttgtggtcaccccactagtatagggaactagttgcagcctattgacagttaattaattctagggcatatcactgcttttctcagcgcccccagttaaantccacctgtagatcatggtagaagtcagcaaacaggctctgggaaccactgttttgttgcgaatccctagctacaatgcctgctagctgttaatcttgggacaagtaatcaacctctctatac

SEQ ID NO: 6303 - DNA, 1887 bp, Homo sapiens
  SIMILAR (165)..(1460): 761254mologous to Homo sapiens flotillin-1,accession number AF089750,Smith-Waterman Score=1494.
agcaacggggtgcggcagggtggggaacgcgggagcggggccagctcccaggaaagctggtctgcgagcggcccctgcccggctcccaggtccctgcgcgaccccgcccttcccgagaccccagccgggctgccgcccgcgtcccggaagctccagcctgaaccatgtttttcacttgtggcccaaatgaggccatggtggtctccgggttctgccgaagccccccagtcatggtggctggagggcgtgtctttgtcctgccctgcatccaacagatccagaggatctctctcaacacactgaccctcaatgtcaagagtgaaaaggtttacactcgccatggggtccccatctcagtcactggcattgcccaggtaaaaatccaggggcagaacaaggagatgttggcggccgcctgtcagatgttcctggggaagacggaggctgagattgcccacattgccctggagacgttagagggccaccagagggccatcatggcccacatgactgtggaggagatctataaggacaggcagaaattctcagaacaggttttcaaagtggcctcctcagacctggtcaacatgggcatcagtgtggttagctacactctgaaggacattcacgatgaccaggactatttgcactctttggggaaggctcgaacagctcaagtccaaaaagatgcacggattggagaagcagaggccaagagagatgctgggatccgggaagctaaagccaagcaggaaaaggtgtctgctcagtacctgagtgagatcgagatggccaaggcacagagagattacgaactgaagaaggccgcctatgacatcgaggtcaacacccgccgagcacaggctgacctggcctatcagcttcaggtggccaagactaagcagcagattgaggagcagcgggtgcaggtgcaggtggtggagcgggcccagcaggtggcagtgcaggagcaggagatcgcccggcgggagaaggagctggaggcccgggtgcggaacccagcggaaagcggagcgctacaagctggagcgcccagccgaggcagagaagtcccaactaattatgcaggcggaagcaaaaagccgcgtctgtgcggaatgcgtggggaagctgaaggcctttgcccatagggccccgaaccccgagccgaaggctgagcagatggcccaagaaggcagaagccttcccagctggtaccaagaggggtggctcagctggacatgctgcgtagagaaagctgccccaggtggcaggaggagatccagtggtcccttgaacttcagcccaataagatcaccactggtgtccagcggcaagtgggaccatgggggcagcccaaagtgacttggggaagtactggacattctaaactcgccctgcccagcagagtgtggaaagaactcacagggcgtgagcatcttcccagggtgaatcaccaagcctttgaagaacagcctggagccttcagcccttcacagatgcccagcctcattagctgaagttgccttgaatgatcctcctgttgcatgtaacccattgggcctccctgagcatgtccattgacagtgaggtcccacccctcatctctccttgccaaataagtttgtgccttgtcttgaagggggttgctcccctttgccaaccctcacactgctatgatttgccaacttccagcggtcccatgtcagcgcttctgatgatcccacgtccagccccaccctcgacttatttaacttcctaattaaatccagactgtttgagcctgttgtctagaatattttcctgaccaagactgagggatgggctggaggttttcaactttgctacccaaataaattgctgtaagtaagtactaataaaaaaaaa

SEQ ID NO: 6304 - DNA, 477 bp, Homo sapiens
  SIMILAR (154)..(312): 601254mologous to Homo sapiens Human secreted protein, SEQ ID NO: 7870,accession number AAG03789,Smith-Waterman Score=146.
ttttttttttttttttttgagagagagtcttactctcttgcccaggctggcgtgcagtggcacaatctcagctcactgcaacctctgccttccgggttcaagcgattctcctgcctcagcctcccgagcagccgggaccacgagcgtgcaccatcacacctggctgttgtatttttagtagagatggggtttcaccatgttggccaggctagtctcgaactcctgacctcaagtgatccacctgccttggcctcccaaagttctgggattacagtcgtgagccaccacgcccggcctggaattttaaattctatcaacagattcacataggctttttccagtacattaaagaaaaagactctcatataacagaactaagttgcatgttacctttgaggagtgaggttaaatgaattaaagcatccacacactcatatttgtaaacctttaaatgggaaattatggagagattaagat

SEQ ID NO: 6305 - DNA, 646 bp, Homo sapiens
atggagttgaggttgtctgccaacgctaactggccagctctgacaggaggtgcgtggcccaggaggagccatcaggccagttctctgggatactgctgtgtctccagctctgcagtttgctctgcgtcactcagcggcagacggagaggcagacacgagccccttgtgagccctcctccttaccgtcatctcacaatgctctgaaataaggaggcaaatggctgaggtcccctcagttgtagatgtgattgagttctatctaccagaagcatatgcctcctggaagcctggttctaacacctcccacaaaatccttcaagcacttttttctgttccaaggtttgcttatgggggacccagtgaagtgcttcagagccctagagatttgctgagtcatatgaggggtcagcaaacttttcctgtaaagggtcagataataaacattttaagctttgtagactgtataaagtctctgtttcttctccccctcctcctcctctttctccttcagcttctttcctttaaatatgtacaaaacctttcttcttttccaaaatctgtctatatttgacctgtgagctgtagtgtgctgagtcctgcattagtaggaaagatcttgagtttcagaatgacgatgtatagcagg

SEQ ID NO: 6306 - DNA, 499 bp, Homo sapiens
  SIMILAR (106)..(492): 721254mologous to Homo sapiens beta-1,4 mannosyltransferase,accession number AB019038,Smith-Waterman Score= 468.
  misc_feature (1)...(499): n = a,t,c or g
ttcccggcttcccgtctcgtcaccctctgctcagaacctgaggacgcagccatggagcggtcggccttcatggagctggatgctgggagcaggctggtgatgcatctccgcgagtggccagccctgctggtcagcagcacgggctggacagagtttgaacaacttactcttgatggacacaaccttccttctcttgtctgtgtgataacagggtcggtggacctgggtgtctgtctgcacatgtcctccagtggcctggacctgcccatgaaggtggtggacatgttcgggtgctgtttgcctgtgtgtgccgtgaacttcaagtgtttacatgagctggtgaaacatgaagaaaatggcctggtctttgaggactcaaaggaactggcagctctgcagatgctnttctcanactttcctgatcctgcaggcaagctaaaccagttttggaaggacctgcgggagtcgcagcagcttcgatgggatgagagctgnggcg

SEQ ID NO: 6307 - DNA, 521 bp, Homo sapiens
  SIMILAR (427)..(519): 1001254mologous to Homo sapiens beta-1,4 mannosyltransferase,accession number AB019038,Smith-Waterman Score= 166.
ttttgctttgttccaataaaactttatttacaaacacaggctgtgggctggatttggcctgcaggctgtagtttgtgatccttgattcagacagtttagcaaggctgaaaagaacaccaacacccccttgttacccacagatgggtgggacttggccagaggccaagaggagggtgctcgcaggggaacatacagcgtgtagaggccgggaggtgctccagggcacgaagtgtgggaaagtgggacagaaagcgtgatgtcaagttggaggcggagcgctgctggggcgtgaagagtctcgagtccaagtgagggagttaggaacttgggagggtttgttgttgggtcggggacctggggtcagccaggtggtgacctgggatggggtggggacaggaaatgagttaagctctgctctttatttttttgcagatgcttttctcaaactttcctgatcctgcgggcaagctaaaccagttccggaagaacctgcgggaatcgcagcagctccgatgggatga

SEQ ID NO: 6308 - DNA, 871 bp, Homo sapiens
  SIMILAR (686)..(868): 881254mologous to Homo sapiens beta-1,4 mannosyltransferase,accession number AB019038,Smith-Waterman Score= 281.
atggctctgggcttgggccaaagccgctctgcagggatgcgccggggcgcgcggggcccggccgccatggtgcagctggaggggcctcgggtccgcggagcccggaacccacccgggcagcccggttcctcccgagccgacagcctgaaatttcaaaaaggattcaagcctctaagaattaaaatgtttgaggcacagagctgtatatacaataacagtgaaattgatcccactactaattatgacaaaaatgatcttccacgtaaacaggtggtgaagctccttatggtcctgaccctacagttcctgtcccatgaccagggccagctcaccaaaggagctgcagcagttcgtcgtgagtggcagccccatgcgagcacccgaggaagaacctgaggacccagacacggagcggtcggccttcatggagcgggatgctgggagcgggctggtgatgcgcctccgcgagcggccagccctgctggtcagcagcacaggctggacagggtcggtggatctgggtgtctgtctgcacacgtcctgcagtggcctggacctgcccatgaaggtggtggacatgttcgggtgctgtttgcctgtgtgtgccgtgaacttcaagtggcaggagcagaacccgaatctttctggggatagcttcacagatccaccgctgaggaggaaacagtgcagagcgagctgcccacatttacatgagctggtgaaacatgaagaaaatggcctggtctttgaggactcagaggaactggcagctcagctgcaggtgcttttctcaaactttcctgatcctgcgggcaagctaaaccagttccggaagaacctgcgggagtcgcagcagctccgatgggattag

SEQ ID NO: 6309 - DNA, 1353 bp, Homo sapiens
  SIMILAR (139)..(405): 781254mologous to Homo sapiens beta-1,4 mannosyltransferase,accession number AB019038,Smith-Waterman Score= 331.
atgccaggactgagagtgaagatgccctgtggaccaggcatctcccaggatgaagctgtttggtctatggatgacaattttgaggtgaacaaacaacatcctgtttggagggctgctactctggctaaagactgtaaaaatcagtcagctcaggctgtgaccgtctacaacaagccggcatctttctttaaagaggcacctctggacctgcagcaccggctcttcatgaagctgggcagcacgcactctccgttcagggcccgggtttttttctgctccttcatctcagaacctgaggacccagccacagagcggttggccttcacagagcgggatgctgggagtaggctggtgacacttctccacgagcggccagctctgctggtcagcagcacaagctggacaggcaaagggcctctgagggagtattacagccgcctcatctaccagaagcatttccagcacatccaggtctgcaccccctggctggagggccgaggactaccccctgcttatagggtcggcggacctgggttgtctgtctgcacacgtcctccaagtggcctggacctgccccatgaaaggtggtggacatgttcgggtgctgtttgcctgtgtgtgccgtgaacttcaaggtgtttacatgagctggtgaaacatgaagaaaatggccctggtctttgaggactcagaggaactggcagctcagctgcagatgcttttctcaaactttcctgatcctgcgggcaagctaaaccagtttccggaagaacctgccggagtcgcagcagctctgatgggatgagagctgggtgcagactgtgcttcctttggttatggacacataactcctggggccagaggctattaaaaccccagggcccctgctgtccttcccgcagcttcttcttgggagtctcagggcaaacccctttcgagcagcacctcccagtggccagaagctgaaatgacagcagtggtactgcctggtaaaagaattggttctgtgacccgggaagctttggttggccttgatttcttctcttggaaggcttgggaaacgctttcctctcttcttctgttcttcacgccccatgcccctgctagcgtattactgttctgtgacttccctgtgacctctgcagaactcctcatcctgcgtttggtctccaggtgtcccctttctgccgtgttcctaacattttgattcctgtcttgaaaaaagcacctgctgcaccgtaagcccagggatgtggcagctgcagtgggcttggctttgtgaggaactgagtgtgtccacgttgggggaacatcatacttgatacacacgtttttatttgcacaaaaaaaaaa

SEQ ID NO: 6310 - DNA, 930 bp, Homo sapiens
  SIMILAR (914)..(714): 611254mologous to Homo sapiens Human secreted protein, SEQ ID NO: 6953,accession number AAG02872,Smith-Waterman Score=189.
cagtgagctgggatcgcgccattgcactccagcctggctgacagagcgagactgtctctaaaaaaaaaaagactcaagtggaccctacaatgaagcctacacatcccaatagaagccccttcttatgctgagggaagcagccctcagaacatgatagcttgtatcacagcagagtggcacgtgctggtacacataacaaaagcaccctggccctggatgcctgcaacctaagaagagtgcagctcccagagggaggcacccatccatgtgggatgggcctaagcatggaatcctaactcctgattccgtctcctatttcttgcttggctacgccagttcccaaatctggtagatgtccatgcccatgtgctcctgctgggactcaattcaggctatgtatgactatgaagtcaggcctcatctgcttactggctgtgtgaactttatgtatcttggttttcttcatccatgaaatccaagtaatactacctaattgttactgtggagattaagttcaaatgcaatgtatagtaatattaagcaatttcttagttattattctagccagtaatgggacttcagaatcttttattacacaatataagaatatgtatgtaaagacattttggaatttcctggatgagaaggaagtcatgggctgggcgtggtggctcacgcctgtaaccctagcactttgggaaatcgatgcggagtggatcacttaagctcaggagttcaaggccagcctgggcaacatggcaaaaccccatttctacaaaaaatacaaaaattagctgggcatggtggcacccgcctgtagtccagctacttgaggctgagatgggaggatgagggaggtcggggctgcagtgagccaagatcacgccactgcactccagcaccctgggcgacagagtgagaccctgtctc

SEQ ID NO: 6311 - DNA, 2597 bp, Homo sapiens
  SIMILAR (1511)..(1891): 631254mologous to Homo sapiens MBNL protein,accession number Y13829,Smith-Waterman Score=363.
ctgaaggtaaaattttccagatacggcagacggctttcagagtacaataaacagggaatgagaactatttacatggaagtttctttctcatgatgcggtggagaagcctcggccacttggttctgccagatgttcctggggttactgtaaatgggaaggacaggcagagctaaacaaggtttatcatttaaaagtgcctgytgtgaagtcacttttgctggaaaactgcagcttggagctttctttgtattcacatcccactcttctgtcaagtacactttaccctgaccttatgagtggatgaagatacctcagttgtctgactttgccaattgcttaatttcagaatttaaaaaggggaaagaaaaacatcctgctaaaatatgaacatctgagtgtcttattttccaacatcgtcaatagctgtgagcgtcagcattaaatattctcccaaggagtgccatgatattgaagtcactttattaataacagctgtatctgcaaaacagtcaagagactcggacgttgaaagccagagatgacactgagcatgcttttattgcggcctaccatctttaagtgggacatattgattgatgagtgattgcctgtccatacactctctcatcatcctgttccttggattggacttcactaagcaatttatcactcaccttcagacttacatgtgggagttttcacaacagtagttttggaatcattagaacttggattgatttcatcatttaacagaaacaaacagcccaaattactttatcaccatggctttgaacgttgccccagtcagagatacaaaatggctgacattagaagtctgcagacagtttcaaagaggaacatgctcacgctctgatgaagaatgcaaatttgctcatccccccaaaagttgtcaggttgaaaatggaagagtaattgcctgctttgattccctaaagggccgttgttcgagagagaactgcaagtatcttcaccctccgacacacttaaaaactcaactagaaattaatggaaggaacaatttgattcagcaaaaaactgcagcagcaatgcttgcccagcagatgcaatttatgtttccaggaacaccacttcatccagtgcccactttccctgtaggtcccgcgatagggacaaatacggctattagctttgctccttacctagcacctgtaacccctggagttgggttggtcccaacggaaattctgcccaccacgcctgttattgttcccggaagtccaccggtcactgtcccgggctcaactgcaactcagaaacttctcaggactgacaaactggaggtatgcagggagttccagcgaggaaactgtgcccggggagagaccgactgccgctttgcacaccccgcagacagcaccatgatcgacacaagtgacaacaccgtaaccgtttgtatggattacataaaggggcgttgcatgagggagaaatgcaaatattttcaccctcctgcacacttgcaggccaaaatcaaagctgcgcagccgcggccgcggccacagtcatgactcagtcgactgccaaagcaatgaagcgacctctcgaagcaactgtagacctggcctttccccctggtgctcttcatcctttaccaaagagacaagcacttgaaaaaagcaatggtaccagcgcggtctttaaccccagcgtcttgcactaccagcaggctctcaccagcgcacagttgcagcaacacgccgcgttcattccaacagggtcagttttgtgcatgacacccgctaccagtattgtacccatgatgcacagcgctacgtccgccactgtctctgcagcaacaactcctgcaacaagtgtccccttcgcagcaacagccacagccaatcagataattctgaaataatcagcagaaacggaatggaatgccaagaatctgcattgagaataactaaacattgttactgtacatactatcctgtttcctcctcaatagaattgccacaaactgcatgctaaataaaagatgtaggttcttctggacagaccacaactctaagaagctagtgctgctatctcatatatgagtattaaatatggtatgcttagtatattccaacctaagatagttaactacctgagaccagctgtgatgtttaaagacataaaggataaagtttacttttaaagggtttctaaacatagtttctgtcctaggaatattgtcttatctccataactatatagctgatgcagaaagtccagccagtttactcatttcgattcagaatatttcaaatttagcaataaacaattagcattagttaaaaaagaaacatattccaagggcaggttcgattctagctctaattactgtcatgtcatttacccactggatcaaagggtatgtttcacttcttgacaatataaatgctgcagcaaagatgagaggtgaagtaaaaccgatacctgtcctgcaggtctaaaatttgaatggaaattcaagcacaagtactggggacacatcaaagtgtggtgtttggtttgcctggagatgccacgttgaatcatgtgattctagagtcgacctgcaggcatgc

SEQ ID NO: 6312 - DNA, 585 bp, Homo sapiens
  SIMILAR (1)..(138): 1001254mologous to Homo sapiens PRO2032,accession number AF116683,Smith-Waterman Score=234.
gctcttcatcctttaccaaagagacaagcacttgaaaaaagcaatggtaccagcgcggtctttaaccccagcgtcttgcactaccagcaggctctcaccagcgcacagttgcagcaacacgccgcgttcattccaacaggtatgtgcccttactgccctacgtcctgtgcccttctggtcatgtgctttcttctcatttctctaagctgtttggtggcatctagtttgcttttgaaggtataatacagtttgaaattcatcgttgtcctagctatctaaatgtatttaccttactttgaatgatagctaaagactgttaggattctaaagccaaatatttgatagattgaagagacagatttaacccatgagaaacagcagttagggcttttggtttcttgtatttgcacaagccctgtaaaattgtttatgtaaataaggcctcttatgtgtgacaattgaaatttgtccttaactctgaatgacctaaaaatagcaattccagtaaatactaaccatttttttctatttctattcagagcactaaaacaatgaggctattcaaattaaagcaattctacgaaa

SEQ ID NO: 6313 - DNA, 562 bp, Homo sapiens
  SIMILAR (69)..(350): 941254mologous to Homo sapiens PRO2032,accession number AF116683,Smith-Waterman Score=481.
ccgcggcacgagtcatgactcagtcgactgccaaagcaatgaagcgacctctcgaagcaactgtagacctggcctttccccctggtgctcttcatcctttaccaaagagacaagcacttgaaaaaagcaatggtaccagcgcggtctttaaccccagcgtcttgcactaccagcaggctctcaccagcgcacagttgcagcaacacgccgcgttcattccaacagataattctgaaataatcagcagagacggaatggagtgccaagaatctgcattgagaataactagacattgttactgtacgtactatcctgtttcctcctcagtagaattgccacgaactgcatgctaaataaaggatgtaggttcttctggacagaccacaactctaaagaagctagtgctgctatctcatatatgagtattaaatatggtatgcttagtatattccaacctaagatagttaactacctgagaccagctggtgatgttttaaagacataaaggataaagtttacttttaaagggtttctaaacatagtttctgtcctaggaatattg

SEQ ID NO: 6314 - DNA, 687 bp, Homo sapiens
  SIMILAR (142)..(375): 1001254mologous to Homo sapiens Angiopoietin-2,accession number AB009865,Smith-Waterman Score=374.
  misc_feature (1)...(687): n = a,t,c or g
atgactgccttctttgtgaaacctgctaatgtttgccagctgccacattggaatgatataatttctaacagtttgtactgggaacgatacaagaagagagaaaatgcttcttctagttctacctgctcgtcgggccaggtcagtttcctagaaaagaaggtgctagctatggaagacaagcacatcatccaactacagtcaataaaagaagagaaagatcagctacaggtgttagtatccaagcagaattccatcattgaagaactcgaaaaaaaaatagtgactgccacggtgaataattcagttcttcagaagcagcaacatgatctcatggagacagttaataacttactgactatgatgtccacatcaaactacctacagatagtgatggaaatgtcacaagctttcttccaaaagcactgcagaactcctaataaagaatggaaattctcaggcggtgggggagtcaatagagggcagcggggatgccgagtcaagcccacagctgtcacaccagaagcacacccctcaccccgagtgggaacaaatgtggaaaatctgggaaatggtgagcaggccagttttggcacatacccttgtttccgcttcaccccggaganngggaatcatatcgaagagtacagtttctgttttggagaggaatggaagaagaaaggaaaatga

SEQ ID NO: 6315 - DNA, 1706 bp, Homo sapiens
  SIMILAR (1576)..(623): 951254mologous to Homo sapiens unnamed protein product,accession number AK022909,Smith-Waterman Score=1555.
tcaggggacaatgtttacatctcctggttttctcctggggctgtcatttgccatgggcatgatgaccgctgtgtgtagactcagcgtttcttgttccaggtcccccaggtggaagctggcatatgtgagcagactcatcctcatcggaagagagtatctagaagtggccctggtgacattagccactggtaagccctctccaacctccttcctgcagctcaggaagtccttgctgtactggcctccccgttgttcctgcaagcattttcctccatcaggacatttgttcctgctgttacctccagctgaaacatggattttgacagagtcacaggctccctctccctccccaggcctgtgatcggatgtcaccttctcagggaagccttcgttggtcaccttatttccactgtatcctccgggtaagttttccttctcttctgtagacgtctccatgttacagtcaactataaaacatggctcatgttcactctgggcttcgccttcagaggagtttgatattttggaagtggtacctttgttctgtgtgcttttcagaccaaccgcttctttcatttcttcaaggcttccttccaaaggagttaaatcatcatcatgtccttttgggaaggaggcaggggtcctcaatgggtgtaaggaaaaggccattttccctctgggggcatgcgtcttctttcccagcctgtctacaacaccttagggcttcttcaggggcagaagtcacgcaactcgaagttgcacggccttcaccatttccagttttccgaggactggagatggtttttgctgtgaaattggtaatgtcaactgttctggtttttttgccaacgcaggaaaaatcagacatttcaaatatgcttgttctctccttcttagaaagacttctgcagctcaactgagcagggcttgatggcagctgagattcaggaggaagattctctgaatacctttccttaagattatcaggtgaaaaatagtcatcatatgaagactccccacagctaagagcctccagggcaggtcccgccacgtgctgcagcctgtcttccgacctgcacagctgcagcctcggcatgatagatctcctggtgctcctctttctcttgcatttttccttcggaggtgaatgggagccatgtgatactctttttctctttactgaggaactcctgggtcttgaatgtatcaaaaggtggccttttgttgaagataaggtaggagacaaacgatacttctcttcaaacgtctcctgagacatacctgcagcctgcttttggtcaggggtgactactttacctgcaatatttctttgcaagtttatttcttcctttgaaagattactcagaaatttctgaggacttgatttatcgaggtgagtgaaagatggtgatgaatgaatattatttgctttcaatacaagtgaagaaatacacacatcacttttaatgtcattaatggatccttccaacttcctttcctgatttccacatcctgagtttccacaaagatcatcaaaagatgagtgtaagccaccagcaaagtattcatacagacaatgagaaattggaatttctttgtcaccagaactgaaatctgctgagggcgatgagagagctgctgtagagaagttctcataggcatactcttctctgggtagcattggaaactttcgaattcttactttt

SEQ ID NO: 6316 - DNA, 2613 bp, Homo sapiens
  SIMILAR (1)..(576): 1001254mologous to Plasmid F Protein E,accession number M12987,Smith-Waterman Score=1002.
atggcggaaacagcggttatcaatcacaagaaacgtaaaaatagcccgcgaatcgtccagtcaaacgacctcactgaggcggcatatagtctctcccgggatcaaaaacgtatgctgtatctgttcgttgaccagatcagaaaatctgatggcaccctacaggaacatgacggtatctgcgagatccatgttgctaaatatgctgaaatattcggattgacctctgcggaagccagtaaggatatacggcaggcattgaagagtttcgcggggaaggaagtggttttttatcgccctgaagaggatgccggcgatgaaaaaggctatgaatcttttccttggtttatcaaacgtgcgcacagtccatccagagggctttacagtgtacatatcaacccatatctcattcccttctttatcgggttacagaaccggtttacgcagtttcggcttagtgaaacaaaagaaatcaccaatccgtatgccatgcgtttatacgaatccctgtgtcagtatcgtaagccggatggctcaggcatcgtctctctgaaaatcgactggatcatagagcgctatacggccaccatcgccaccactcaaaggtgcgcacagatacagacaaagaggggcgtgagggagctgcctgcaggggaagaagccttccgtatcgagctgggcggtcattacacaggctctaatctggagcatgtgggtcccgtcagcaccgagcacacgccctctgtggtggaagaggacacagtgcgcagccgtgactttcagtgcactgggcttaagtctttgaaaatagttcgagacagttcctcagcctataacaactttcggaagagcatggacagcataggaaagaagcaatatcaggtccagcatgggtcctgcagctacactttcctcctgccagagatggacaactgccgctcttcctccagcccctacgtgtccaatgctgtgcagagggacgcgccgctcgaatacgatgactcggtgcagaggctgcaagtcggcgacaactcaatcgacagctggaaaaacgcgggccgtgtctttaaagacagcgataagtgggacgccaacgatccgatcctgaaagatcagacgcaagaatggtccggttctgcaacctttacatctgacggaaaaatccgtttattctacactgactattccggtaaacattacggcaaacaaagcctgacaacagcgcaggtaaatgtgtcaaaatctgatgacacactcaaaatcaacggagtggaagatcacaaaacgatttttgacggagacggaaaaacatatcagaacgttcagcagtttatcgatgaaggcaattatacatccggcgacaaccatacgctgagagaccctcactacgttgaagacaaaggccataaataccttgtattcgaagccaacacgggaacagaaaacggataccaaggcgaagaatctttatttaacaaagcgtactacgggggcgggacgaacttcttccgtaaagaaagccagaagcttcagcagagcgctaaaaaacgcgatgctgagttagcgaacggcgccctcgaattggaaaaaactactttaaagttcatatggaaccaaaaaagagcccgcattgccaaatcaatcctaagccaaaagaacaaagctggaggcatcaagctacctgacttcaaactatactacaaggctacagtaaacaaaacagcatggtgcgcacagatacagacaaagaggggcgtgagggagctgcctgcaggggaagaagccttccgtatcgagctgggcggtcattacacaggtggatgttctgagacactgtcccagggctccttgggagatcctgtggggcttcttaccagccagcgcggcggtggccgcctgagtccacgtgtgcgaaccaccctgcggcgcccctgcctcccgcgcctgttcggcatggctgcgctctgggaccactgcctaaataaacttcctgcatgcctgcctttgtctcaggctctgcttttggggaaacccaagctaaggcagtgtgagaatctgctggtggtgcctctgagaagaggactgagaaccgcctgtgaaccccgcaatttcgtgggtgtggtggaagcaaaggcagagcgtgtgaacagcatttataaccacggtgtacctcggaagaagcgttctcagagcaacatgcacgtgttcccagctaacgaccccactgttgctaaagaagaacaaatcagcttcagagactgtgctgaagtattcaaatcaggacacaccacgaatggcatctacacgttaacattccctaattctacagaagagatcaagcccacagctgtcacaccagaagcacacccctcaccccgagtgggaacaaatgtggaaaatctgggaaatggtgagcaggccagttttggcacatacccttgtttccgcttcaccccggaggggagggcttgtggtgccctctccctgcctccactcaccttccaacaagtgctggagtttgattcacaccaaacagaaatagccaaaatttgtaagaactctattgggcagctcttctgtatcaatgactgtacaggctccaagggccagaaataa

SEQ ID NO: 6317 - DNA, 2271 bp, Homo sapiens
  SIMILAR (350)..(1837): 1001254mologous to Homo sapiens angiopoietin-2,accession number AF004327,Smith-Waterman Score=2608.
tgggttggtgtttatctcctcccagccttgagggagggaacaacactgtaggatctggggagagaggaacaaaggaccgtgaaagctgctctgtaaaagctgacacagccctcccaagtgagcaggactgttcttcccactgcaatctgacagtttactgcatgcctggagagaacacagcagtaaaaaccaggtttgctactggaaaaagaggaaagagaagactttcattgacggacccagccatggcagcgtagcagccctgcgtttcagacggcagcagctcgggactctggacgtgtgtttgccctcaagtttgctaagctgctggtttattactgaagaaagaatgtggcagattgttttctttactctgagctgtgatcttgtcttggccgcagcctataacaactttcggaagagcatggacagcataggaaagaagcaatatcaggtccagcatgggtcctgcagctacactttcctcctgccagagatggacaactgccgctcttcctccagcccctacgtgtccaatgctgtgcagagggacgcgccgctcgaatacgatgactcggtgcagaggctgcaagtgctggagaacatcatggaaaacaacactcagtggctaatgaagcttgagaattatatccaggacaacatgaagaaagaaatggtagagatacagcagaatgcagtacagaaccagacggctgtgatgatagaaatagggacaaacctgttgaaccaaacagctgagcaaacgcggaagttaactgatgtggaagcccaagtattaaatcagaccacgagacttgaacttcagctcttggaacactccctctcgacaaacaaattggaaaaacagattttggaccagaccagtgaaataaacaaattgcaagataagaacagtttcctagaaaagaaggtgctagctatggaagacaagcacatcatccaactacagtcaataaaagaagagaaagatcagctacaggtgttagtatccaagcaaaattccatcattgaagaactagaaaaaaaaatagtgactgccacggtgaataattcagttcttcaaaagcagcaacatgatctcatggagacagttaataacttactgactatgatgtccacatcaaactcagctaaggaccccactgttgctaaagaagaacaaatcagcttcagagactgtgctgaagtattcaaatcaggacacaccacaaatggcatctacacgttaacattccctaattctacagaagagatcaaggcctactgtgacatggaagctggaggaggcgggtggacaattattcagcgacgtgaggatggcagcgttgattttcagaggacttggaaagaatataaagtgggatttggtaacccttcaggagaatattggctgggaaatgagtttgtttcgcaactgactaatcagcaacgctatgtgcttaaaatacaccttaaagactgggaagggaatgaggcttactcattgtatgaacatttctatctctcaagtgaagaactcaattataggattcaccttaaaggacttacagggacagccggcaaaataagcagcatcagccaaccaggaaatgattttagcacaaaggatggagacaacgacaaatgtatttgcaaatgttcacaaatgctaacaggaggctggtggtttgatgcatgtggtccttccaacttgaacggaatgtactatccacagaggcagaacacaaataagttcaacggcattaaatggtactactggaaaggctcaggctattcgctcaaggccacaaccatgatgatccgaccagcagatttctaaacatcccagtccacctgaggaactgtctcgaactattttcaaagacttaagcccagtgcactgaaagtcacggctgcgcactgtgtcctcttccaccacaagagggcgtgtgctcggtgctgacgggacccacattgctccagattagagcctgtaaactttatcacttaaacttgcatcacttaacggaccaaagcaagaccctaaacatccataattgtgattagacagaacacctatgcaaagatgaacccgaggctgagaatcagactgacagtttacagacgctgctgtcacaaccaagaatgttatgtgcaagtttatcagtaaataactggaaaacagaacacttatgttatacaatacagatcatcttggaactgcattcttctgagcactgtttatacactgtgtaaatacccatatgtcct

SEQ ID NO: 6318 - DNA, 2828 bp, Homo sapiens
  SIMILAR (199)..(1125): 681254mologous to Homo sapiens angiopoietin-2,accession number AF004327,Smith-Waterman Score=973.
atgccgaacaggcgcgggaggcaggggcgccgcagggtggttcgcacacgtggactcatgcggccaccgccgcgctggctgcccacagctgtcacaccagaagcacacccctcaccccgagtgggaacaaatgtggaaaatctgggaaatggtgagcaggccagttttggcacatacccttgtttccgcttcaccccggaggggagtttcctagaaaagaaggtgctagctatggaagacaagcacatcatccaactacagtcaataaaagaagagaaagatcagctacaggtgttagtatccaagcaaaattccatcattgaagaactagaaaaaaaaatagtgactgccacggtgaataattcagttcttcagaagcagcaacatgatctcatggagacagttaataacttactgactatgatgtccacatcaaactcagctaaggaccccactgttgctaaagaagaacaaatcagcttcagagactgtgctgaagtattcaaatcaggacacaccacgaatggcatctacacgttaacattccctaattctacagaagagatcaaggcctactgtgacatggaagctggaggaggcgggtggacaattattcagcgacgtgaggatggcagcgttgattttcagaggacttggaaagaatataaagtgatgaccgatgtaagccgtatttttgcaattcagcttacaatggttcaacttaagatttttcgactttacgatgtgatatgtggcacgatgctccctcatgatgccaggcagcggcagcgagccacaggtcccagtcagtcctgtgatccccagggtgaacaacagacactgcgtgcaccgtgttgccaaatggctctgtctgactgtgggctaatgattcaccttaaaggacttacagggacagccggcaaaataagcagcatcagccaaccaggaaatgattttagcacaaaggatggagacaacgacaaatgtatttgcaaatgttcacaaatgctaacaggagatgaatactttgctggtggcttacactcatcttttgatgatctttgtggaaactcaggatgtggaaatcaggaaaggaagttggaaggatccattaatgacattaaaagtgatgtgtgtatttcttcacttgtattgaaagcaaataatattcattcatcaccatctttcactcacctcgataaatcaagtcctcaggaaatttctgaggtaatctttcaaagggaggaaataaacttggcaaaggaaatattgcagggtaaagtagttcacccctcacccaaaaggcagggctgcagggtatgtcttcagggaggacgtttggaggagaggtatccgtttgtcttcctacccttattcttccaacaaaagggccaccttttggatacctttcaggacccgggagttcctcagtaaagagaaaaagagtatcacatggctcccattcacctccgaaggaaaaatgcaagagaaagaggagcaccaggagatctatcatgccgaggctgcagctgtgcaggtcggaaggcaaggctgcagcacgtggccgggacctgccctggaggctcttatctgtggggagtcttcatatgatgactatttttcacctgataatcttaaggaaaggtattcagagaatcttcctcctgaatctcagctgccatcaagccctgctcagttgagctgcagaagtctttctaagacggagagaacaagcatatttgaaatgtctgatttttcctgcgttggcaaaaaaaaccagaacagttgacattaccaattttacagcaaaaaccatctccagtcctcggaaaactggaaatggtgaaggccgtgcaacttcgagttgcgtgacttctgcccctgaagaagccctaaggtgttgtagacaggctgggaaagaaaacgcatgcccagagggaaatggcttttcttacaccattgaggaccctgctcttccaaaaggacatgatgatgatttaactcctttggaaggaagccttgaagaaatgaaagaagcggttggtctgaaaagcacacagaacaaaggtaccacttccaaaatatcaaactcctctgaaggcgaagcccagagtgaacatgagccatgttttatagttgactgtaacatggagacgtctacagaagagaaggaaaacttacccggaggatacagtggaaataaggtgaccaacgaaggcttccctgagaaggtgacatccgatcacaggcctggggagggagagggagcctgtgactctgtcaaaatccatgtttcagctggaggtaacagcaggaacaaatgtcctgatggaggaaaatgcttgcaggaacaacggggaggccagtacagcaaggacttcctgagctgcaggaaggaggttggagagggcagccggaatgatgctctgaagaccttgttggacagtgcactcttcactcaaacctgcagcagatggaatgatgctctgaagaccttgttggacagtgcactcttcactcaaacctgcagcagctggaacgatgctctgaagaccgtgttggaccatgcactcttcactcaaacctgcagggctcccgcatctcttctggagcagaagcccacctgccagttcatcccgactgtgctgctgcctcctcttccccactggctcagccgtccatcaggccttgtgcatgcagctggccagctccctctccagggaacacttttcccctgcatctacttggccaacttcctgatctcttttaactcattcaccttctcaatgggacagtttagcgctgtggactcgagtccacactcctga

SEQ ID NO: 6319 - DNA, 324 bp, Homo sapiens
  SIMILAR (48)..(323): 1001254mologous to Homo sapiens fetal liver non-specific cross-reactive antigen-2 precursor protein,accession number M25385,Smith-Waterman Score=500.
atcattccttgcactctgctctatctttagaggtcactggttcaacgaagctgcccaagccctacatcaccatcaacaacttaaaccccagggagaataaggatgtcttaaacttcacctgtgaacctaagagtgagaactacacctacatttggtggctaaatggtcagagcctcccggtcagtcccagggtaaagcgacccattgaaaacaggatcctcattctacccagtgtcacgagaaatgaaacaggaccctatcaatgtgaaatacgggaccgatatggtggcatccgcagtgacccagtcaccctgaatgtcctct

SEQ ID NO: 6320 - DNA, 421 bp, Homo sapiens
  SIMILAR (3)..(236): 1001254mologous to Homo sapiens pregnancy-specific beta-1- glycoprotein (PSG) precursor,accession number M31125,Smith-Waterman Score=417.
cggagactcccaagccctccatctccagcagcaacttaaaccccagggaggtcatggaggctgtgcgcttaatctgtgatcctgagactccggatgcaagctacctgtggttgctgaatggtcagaacctccctatgactcacaggttgcagctgtccaaaaccaacaggaccctctatctatttggtgtcacaaagtatattgcaggaccctatgaatgtgaaatacggaacccagctcttcttaatgactgccacaacacaaacactgagaaaaagaagcaaccagaaaaggtggaaagttctgatgacatagaaaatagcaatcagcctttctcacatcccaaagccttcaaaaatatacgagtgcagcatggccactatggaattcaccgaaaactaatcaccaagctagaaacatg

SEQ ID NO: 6321 - DNA, 398 bp, Homo sapiens
  SIMILAR (1)..(201): 911254mologous to Mus musculus putative,accession number AK008284,Smith-Waterman Score=307.
  misc_feature (1)...(398): n = a,t,c or g
gcgggatttttccgcggatcaagtgcagaacaggataatcggttcagcgacaaacagaagaaactactgaagcagctgaaatttgcagaatgcctagaaaaaaaggtggacatgagcaaagtaaatttggaggttataaaggcttggataacaaaaagagtaacggaaatccttgggtttgaagatgatggtgcgactgagttatattcaaccagctggaagtgaagaatccagactccaaaatgatgcanatcaacctgactggatttttgaatggaaaaaatgctcgagaatttatgggagaactgtggcccctgctgctaagttgccaagaaaacatcgcgggaatcccttctgctttcctagaactgangagagaagaaataaaaccaagaccg

SEQ ID NO: 6322 - DNA, 552 bp, Homo sapiens
  SIMILAR (3)..(365): 1001254mologous to Homo sapiens pregnancy-specific beta-1 glycoprotein,accession number L36606,Smith-Waterman Score=639.
catcacttttaaacttctggaacctgcctatcactgctcaagtcacgattgaagccctgccacccaaagtttccgaggggaaggatgttcttctacttgtccacaatttgcctcagaatcttgctggctacatctggtacaaaggacaactgatggacctctaccattacattacatcatatgtagtagacggtcaaataaatatatatgggcctgcatacactggacgagaaacagtatattccaatgcatccctgctgatccagaatgtcacccgggaagacgcaggatcctacaccttacacatcataaagcgaggtgataggactagaggagtaactggatatttcaccttcaacttataccacacaagctacctgtggtggatgaatggtcagagcctccctatgactcacaggttgcagctgtccaaaaccaacaggaccctctttatatttggtgtcacaaagtatattgcaggaccctatgaatgtgaaatacggaacccagtgagtgccagccacagtgacccagtcaccctgaatctcctcc

SEQ ID NO: 6323 - DNA, 600 bp, Homo sapiens
  SIMILAR (3)..(599): 921254mologous to Homo sapiens pregnancy-specific beta- glycoprotein e,accession number M20882,Smith-Waterman Score=1022.
catcacttttaaacttctggaacctgcccaccactgcccaagtcacgattgaagcccagccaccaaaagtttccgaggggaaggatgttcttctacttgtccacaatttgccccagaatcttactggctacatctggtacaaagggcaaatcagggacctctaccattacattacatcatatgtagtagacggtcaaataattatatatgggcctgcatatagtggacgagaaacagcatattccaatgcatccctgctgatccagaatgtcacccgggaggacgcaggatcctacaccttacacatcataaagcgaggtgatgggactagaggagtaactggatatttcaccttcaccttataccgggaggccatggaaactgtgatcttaacctgtgatcctgagactccggacacaagctaccagtggtggatgaatggtcagagcctccctatgactcataggtttcagctgtccgaaaccaacaggaccctctttctatttggtgtcacaaagtatactgcaggaccctatgaatgtgaaatacggaactcagggagtgccagccgcagtgacccagtcaccctgaatctcctcc

SEQ ID NO: 6324 - DNA, 551 bp, Homo sapiens
  SIMILAR (3)..(548): 1001254mologous to Homo sapiens pregnancy-specific protein,accession number M30629,Smith-Waterman Score=973.
tggagactcccaagccctccatctccagcagcaaattaaaccccagggaggccatggaggctgtgagcttaacctgtgatcctgagactccggacgcaagctacctgtggtggatgaatggtcagagcctccctatgtctcacaggttgcagttgtctgaaaccaacaggaccctctttctattgggtgtcacaaagtacactgcaggaccctatgaatgtgaaatacggaacccagtgagtgccagccgcagtgacccattcaccctgaatctcctccatggtccagacctccccagaatttacccttcattcacctattaccgttcaggagaagtcctctacttgtcctgttctgcggactctaacccaccggcacagtattcttggacaattaatgggaagtttcagctaccaggacaaaagctctttatcccccaaattactacaaagcatagcgggctctatgcttgctctgttcgtaactcagccactggcaaggaaagctccaaatccatgacagtaaaagtctctgactggacattaccctga

SEQ ID NO: 6325 - DNA, 423 bp, Homo sapiens
  SIMILAR (1)..(81): 1001254mologous to Homo sapiens pregnancy-specific beta-1 glycoprotein 1,accession number AF106542,Smith-Waterman Score=145.
gcaggatcctacaccttacacatcataaagggagatgatgggactagaggagtaactggacgtttcaccttcaccttacaccgcatccaaacctcagaggagtgagagcaaatggtcagctgattagtctgcactccagaactaaatcacctgcttcaaccatcagagtcagtgcaaaaaaatgaccaggcctcctcctcagatcttaaccaccatcactgaacctgaaatcctgtgtttcccaaagtgtccttgtcactgtcatgagaggatcaaggagaggaccttgatttctttccccactcacactctacaccaccacaggcccagcgagagagacacacactcaggagctctcacatgacaaatgaaggaatggaatgaataaatgagtgatccaaaacctctttagagattggatct

SEQ ID NO: 6326 - DNA, 1960 bp, Homo sapiens; identical to SEQ ID NO: 3026
  SIMILAR (1316)..(1450): 1001254mologous to Homo sapiens trophoblast membrane expressed protein,accession number A23031,Smith-Waterman Score=231.

SEQ ID NO: 6327 - DNA, 435 bp, Homo sapiens
  SIMILAR (3)..(278): 1001254mologous to Homo sapiens trophoblast membrane expressed protein,accession number A23031,Smith-Waterman Score=490.
tggagactcccaagccctccatctccagcagcaacttataccccagggaggacatggaggctgtgagcttaacctgtgatcctgagactccggacgcaagctacctgtggtggatgaatggtcagagcctccctatgactcacagcttgcagttgtccaaaaacaaaaggaccctctttctatttggtgtcacaaagtacactgcaggaccctatgaatgtgaaatacggaacccagtgagtgccagccgcagtgacccagtcaccctgaatctcctccagcattcttggctgattgatgggaagttccagcaatcagcacaagtgttctttatcccccaaatcactaaaacatatagaggggtctatgtctgtttcatccataactcagccactgctggaacaaatctcataatcaagaggatcatagtccctg

SEQ ID NO: 6328 - DNA, 2008 bp, Homo sapiens
  SIMILAR (166)..(1515): 991254mologous to Homo sapiens pregnancy specific beta-1- glycoprotein 3,accession number BC005924,Smith-Waterman Score=2385.
gggcgggacaactggtctgagtactatggctgattttcgctgtctggcattgagaagccacacgccccttttgcttaggaggcctctctgctggaggatgacgatggcatggtttatctaaggccactgacaagtcatcaatataggacagcacagctgagagccatgctcaggaagtttctggatcctaggctcagctccacagaggagaacacgcaggcagcagagaccatggggcccctctcagcccctccctgcacacagcgcatcacctggaaggggctcctgctcacagcatcacttttaaacttctggaacccgcctaccactgcccaagtcacgattgaagccgagccaaccaaagtttccaaggggaaggacgttcttctacttgtccacaatttgccccagaatcttgctggctacatctggtacaaagggcaaatgaaggacctctaccattacattacatcatacgtagtagatggtcaaataattatatatgggcctgcatacagtggacgagaaacagtatattccaatgcatccctgctgatccagaatgtcacccgggaggacgcaggatcctacaccttacacatcgtaaagcgaggtgatgggactagaggagaaactggacatttcaccttcaccttatacctggagactcccaagccctccatctccagcagcaacttataccccagggaggacatggaggctgtgagcttaacctgtgatcctgagactccggacgcaagctacctgtggtggatgaatggtcagagcctccctatgactcacagcttgcagttgtccaaaaacaaaaggaccctctttctatttggtgtcacaaagtacactgcaggaccctatgaatgtgaaatacggaacccagtgagtgccagccgcagtgacccagtcaccctgaatctcctcccgaagctgcccaagccctacatcaccatcaacaacttaaaccccagggagaataaggatgtcttagccttcacctgtgaacctaagagtgagaactacacctacatttggtggctaaatggtcagagcctcccggtcagtcccagggtaaagcgacccattgaaaacaggatcctcattctacccagtgtcacgagaaatgaaacaggaccctatcaatgtgaaatacaggaccgatatggtggcatccgcagttacccagtcaccctgaatgtcctctatggtccagacctccccagaatttacccttcattcacctattaccattcaggagaaaacctctacttgtcctgcttcgcggactctaacccaccagcagaatattcttggacaattaatgggaagtttcagctatcaggacaaaagctctttatcccccagattactacaaagcatagcgggctctatgcttgctctgttcgtaactcagccactggcatggaaagctccaaatccatgacagtcaaagtctctgctccttcaggaacaggacatcttcctggccttaatccattatagcagccgtgatgtcatttctgtatttcaggaagactggcagacagttgctttcattcttcctcaaagtatttaccatcagctacagtccaaaattgctttttgttcaaggagatttatgaaaagactctgacaaggactcttgaatacaagttcctgataacttcaagatcataccactggactaagaactttcaaaattttaatgaacaggctgatacttcatgaaattcaagacaaagaaaaaaacccaattttattggactaaatagtcaaaacaatgttttcataattttctatttgaaaatgtgctgattctttgaatgttttattctccagatttatgcactttttttcttcagcaattggtaaagtatacttttgtaaacaaaaattgaaacatttgcttttgctccctaagtgccccagaattgggaaactattcaggagtattcatatgtttatggtaataaagttatctgcacaagttcaa

SEQ ID NO: 6329 - DNA, 14271 bp, Homo sapiens
  SIMILAR (7024)..(7257): 891254mologous to Homo sapiens PSBG11w,accession number AC005392,Smith-Waterman Score=374.
gaattcggcacgagcagccctgctcaggaaagtctctggatcctaggctcatctccacaggggagaacacacagacagcagagaccatgggacccctcttagcccctccctgacactcagcacatcacctggaagaggctcctgctcacaggtgaggagaggacttcctgggagaggacaggaggaggaagcagagtgactggatggggtatcctggagaggatggggttctaaaaaataaaagaagccagcacttagggaggctgaggtgggtggatcacgagatcaggagttcaagatcagtctggccaacacagtgtagacgtgtctctaccaaaaaatacaaaaaattaaccaagtatggtggtgtgctcctgtaatcccagctttcgggaggctgaggcaggataatcacatgaacccaggaggcagaagttgcagctagccgagacagcaccactgcacgccagcctgggtgacagtacgagactccatttcaaaaaaaaaaaaaaaaaagaataaaaagaagaaagaaaaaaagggaaagaaggctctgttggagcctggataggggaaaatacaccagagagggacaggggtcaaaataggaaagtcacattgaaccggaattggtaagaggtagtaaaatcttaagtgttctgttttcctgattaatcatcaggggccaccacattttgaaaaatgataataatgactatatcagatgacacctcaaataaaaatgtaaccagggcatgaaacactttcctcagcaaaaaacctcaacaattgggggaaaaaaaacacccagggcatggagggccctgagaactctcacatctacaggagtctgcatcctgttccaggcactggggtgcaaccaacatgacaaaagtctctgtcctcacagagctcacactctcatggggaggaagacagacatgcaaagagatatagaatgtgaggtcaggtgttgacaagaaccctagagggagcagagcagggaaaggtcagaaagggaagacccagggtctctgaagcaggcatcaggaaagaagtctaaggatgccctgatgtgagcaggacctgagggcagtgtggagggggccgtgcggacccctggggaagaggattgcaaacagaaaaatgccaaggtcaggagtgttgaaggaatgggggtcatgctgctgaccttgacctagtaggacagtaggacacacacacatacacacacacaaacacacatgcccttttgtgtgtgtgtgtttgtatgtgtgtgtgtgcatatcttcaaggctgatgattgaagagaccttctcaggacacagggccccatcttttcaccccaatacataggtccaaatattaactgatgctgtctctacctcctagcatcacttttaaacttctggaacctgcccaccactgcccaagtaataattgaagccaagccacccaaagtttccgaggggaaggatgttcttctacttgtccacaatttgccccagaatcttactggctacatctggtacaaagggcaaatgacggacctctaccattacattacatcatatgtagtacacggtcaaattatatatgggcctgcctacagtggacgagaaacagtatattccaatgcatccctgctgatccagaatgtcacacaggaggatgcaggatcctacaccttacacatcataaagcgaggcgatgggactggaggagtaactggatatttcactgtcaccttatactgtgagtgattccgcatgatccctgggtgttggggggcaggggtcatttctacttcacacacacagaattgtcaggcctggactctgcctgtgtcactctctgcattatgtcccatgctggggtttgggcatttagtgcaggacacacacagaggagacacatttcaacagatcagaattcctttcccgcatccagaccctgcagacactcgctgcagaggaaggacagtctgatggggggactcagcaggaggagatcagtctcagccaagcacctcatgccctcttcataaatttgaccctgagaaagaccctggaaaactgagtagggcttggcctgaggggcccactgagataccctcagagaacctcagctctggaagcctcaatcccagacccctgtccctaaatccttgctccaggtaaagctgaggagcctgtgccaggactgggttgtggcttctttggcagggcttactgggaccaaggatttaccagctgtctgaggactgtgtctcctggagctgttcaccagccagggctcagtcctcagagcctcatctgggcaaggacagagctttcttcacctgacactcagagtggagaggacagaaagacaagctttgtaggccatcagccaactgccttaggaggcctaggacactccatagaaagtctaatatccccagaagcagaaacagaagagagaagatgcaccaggtagccgtttgtccacagggatctgacgcaaaggtgctttctcatggaagcaaattaataataaatgctgtttgtgtgaacacctccactgtgccaagcattaagtcagttgactgtgaatactttaacatttattcacagatagcatgaaaagccacagtccatttgccatttagctcatttgattgagagaaaactgaggcacaggaaggcacagtcactgagccacagtcacacaaacacaaaggggagatcggggtcacatgaggtctgtctgcagccacaggcccatcctctcctctaccagaagtgagggcttactgggttccaaggaccccatagtcatttattgactcaaatcctctcttcttaggcatccaaacctcagaggagtgagagcaaatggtcagctgattagtctgtactccagaactaaatcactggcttcaaccgccagagtcagtgcaaaaaaaatgtccaggtctccccctcagatcttaacctccatcactgaatgtgaaatcctgtgtttcccaagtgtccatgtcaccgtcatgagaggatcaaggagaggaccttgttttctttccccactcacaccctgcctcagcacaggcccagtgagagagacacactcaggagctctcacataacaaatgaaggaatggaatgaagaaatggatgatccaaaacctctttagagactggatcttggaatcagaatcctaggaggttctagccacacctgtcccttgtccttcagaggctgacacccatgtttcatccccccactacctcttgaccctaaagccaccccacctcatgcaactctgaagttctttggccaccggagggttctcagggctctttggtcctggactgtggagctgggggcacctggtccctggggtttttgaagtcagtgtctccctcactgctcactgccatggtgtctctgcctctctctgcttctctgtgtccctcatcttcctcccacttcattctgactggcaagccctgtcctgcacagcttcttcctccaaccctaggccttccccagacactccctctaactaggctggctgttctgttcccttcccgctaacactgtggcctggcccacctcccaggaaataggaaaggtgcagaaatcacctggagttgccactcctgccaggcttcctctcgagccaatgtccccaggtcactaagagaaaccttccactgtattcccatccagggctctttccctttgtgaggctgacctgtggacaagaccatgggacagggataggcagttcccccatccacccttgtaattgccagacaagttcctctggcctcctgcacacaaaaaaatataaaataaaataaaatttattgaaatggtggtttgcagtaaagaaagattttaagaactccaagtctgccaaacaggagggtggaggtttattattactcaaatcagcctccccagtggatcaggtgttagagattttcaaggatagtttcaggggcacaggactaaaaaatgagtactgctgattggtgatggaatcatgcgggcggagggaaatgatctgttagtgcttgaatctgcctctaggtaggggccacatgactggctgagccattaggcataggtatggatgaggtcagccggttgtcagaaggcaaaagaatgagaaacatttcaaaagaccaatctcacgttctacaatagtgatgttatctataggagcaattataggagcaattaagcccataggctcatttcacccatttcactagtgactccatcctcaacctgctatggagctcacattctccggtcactttctagagacttctggcttcctgtcaggcataaaacaagcttgaaatttgtcactcggttctaacactaagtaaaaagctgaacaaactcaaaagtcaacaactcattaaaatccttcagagatggctgggcacagtggctcacgcctataatcccagcactttgggaggctgaggcgggcacaaggtcaggagatagagaccatcctggctaacatggtgaaaccccgtctctactaaaaatacaaaaaattagctgggcatggtggtggtcacctgtagtcccagctacttgggaggccgaggcaggagaatggcatgaacccaggaggtggagcttgcagtgagctgagatcatgccactgcagctggggtgacagagcgagactctgtctcagaaaaaaaaatgctgttagagaaatgaagaatgcttttgatgcttactgatagaccgcacagagctgaggaaagaatccctagcttgagaatgtgtcaatagaaacttccaaaactgaaacaggaaagctcaaaaagagtggggaaaaaaagcggaacaacatattcaacttcatatttaatattttgttttgacaatagcaatttttaaattttgtagttgtgggacaactacaaaggctgtcacatacacttaacgggaatacttgtggtttggggaccagatggaggtggccaggtaggtcctatctcatggttttactgcctgtgccacatacaactatttcctcatgatgatgccgttttcataagttggagttcttcgtgtggggagacacaagagccattggcatctcacttagactcttcctaattcacacaaacttaaattttagtggtgtttcctgaccttaagagaaaatgaagaagacatttcacatacctgttttggggtcctccccatgttttgtaactctgcacagaaattagaagcaggttctttctatatttactaacataacacacatcacttcttttaatttggcatccttcctccttttatgtaattgacacactaaccagttcggtccttttaacaggactctctctacttaaggagttgctaatttcaaatcacctttggcatctttctttgagcataatgtgatcctgctggaattcatggcacacctaaaccttattttggtctcaagagaaatatgactaccagcaattgatcttagatgtttggaccatcagtaaaaatttccacttatgaaaacattttaaggtttcctccaaattttttttgttactagagtcagaatataacatgaggtctaaactcctgacaactttttatgggaaaattacagtattacaaattgagcatcggaaatccagaaatccacaatctgaaatgctcaaaactcaacacttctgaccactgatgtgatgctaaaaagaagtgctcactcgcgcattgtggattttaaatttttcagatttgggatgctaaaccagtacatatactgcaaatattccaaaataaaaaaaattagaaatccaaaacactttgttttaagctttctgcataaggagcactgtatctgcatgaagtataggcacgaggctgcacaggagatctctagaacctcctcatcctgcataacagaaaccgcacacccacggaacaacgccctatacccgtgatttcagttgctgcaaactactattctaatctctgattccctctggaatccactgatatgaggtacatagagtagtcaaactcagaatcagagagtagaatgtctaataagagaaagtatctgcaagacttcttcccaaatattggtctaatatccaccaaacacataaggtccctgagggccagacttctgtcatctgttcatgtttgccctttccaccagtcagttctgcatttgcaaacatcaacatgtatttctagaaagatccatatggtcctcaactgccctctacagggggaagggagcatcatggacccagaacagggatcatggtcttgggccaaacctatcagctcttgcctgtccctttcactctttgtaggtcattccttggactctgctctatctttagagtcattggctcaactcagtcactatgagacacctggaaaactgccccaccttgtggctccactgcctgatgactgaactgacctccaggcctgactctggtctcccctgtgttatttctgctgaagtacccagttccaggccaggctttctaatacccaaagggcttaaggacaatgggaagttccatcatccatctctaggatgtccttggcaagggaagctgatgagaaaacatacctcagggggcaaagtgagactgaaactaacaagattccagcactgcatgccccaagtaaggaccaaaaggtgggccaggcaggcagttggagacggagggactcagagaggcaccaggggctgtgactgctggtcctgtgtctttccatgacccaatgctgctgctcaattcacatttgagaaagtccatgcttctcctacataaagcaggcagcctcacaatcactgagccctcaggttgccatgcatctgtcttgtaacacacacacctgccatgggcttttaaggacttgggtgggctgagaggttggaaatgccaactctgattgaaaaatgcctttggaggaatcaaaggtgccacacagggcaatcttctctctgttttctgcacagcggagactcccaagccctccatctccagcagcaacttaaaccccagggaggtcatggaggctgtgcgcttaatctgtgatcctgagactccggatgcaagctacctgtggttgctgaatggtcagaacctccctatgactcacaggttgcagctgtccaaaaccaacaggaccctctatctatttggtgtcacaaagtatattgcaggaccctatgaatgtgaaatacgggaacccagtgagtgccagccgcagtgacccagtcaccctggattttcctccgtgaggtatcttctgttcctttgtgagccagggttggcccatcccaaatacaagtgggccagaggccaggcctctcagtccctctcaggtccaagtacagagacctttatccctgaacatcaaagctggccatgactttctgctccaggcaaaccagagtaggcctaggcttgatcaacaataagagagaagaggcttctcctgtcatgggagactcaggttccacagcttgtgatggaagaaacaggtgaatgtctcaggctccagatcagtgaacacagcggggatttggctgggacttcagtgttgcaacttggctcacagggtcactgtgactgtgtcccttccacagaccaggattttcccttccctctgacaatatcgcctgtgacattattctctttgctccgcatggcctggatgctcccaccgtttcttcctcatacacctattaccatacaggggaagtccccaagctctcctgcctcacagactctcacccactggcagagcattcttggctgattgatgggaagttccagcaatcagcacaagtgttctttataccccaaatcactaaaacatatagaggggtctatgtctgtttcatccataactcagccactggtggaacaaatctcataatcaagaggatcatagtccctggtaagtggatccctggagcattggcaccatgttttccagtaaagtctatctagctgtcagggaagagccacctgctctctgcaaagggagagggaaaatcaaaacccaggaaagggaatatgtttctgctccaaaaccaccagcttctgcctgtccccttcactctttctagatcattctttagacaatacactaacaatgaacaatctgaaaggaagttaaggaaagaatttcaattcacattaacatcaaaaggaataaaatattttggaataagtttaaccaaaaaggtcaaatgattataccctgaaaactacaaaacattgctgaaagaaattaaagacgatatcaatatatggaaacacatttcattttcatggattggaagaagcaatattgttagaaaggcaatactacccaattgagttgcagattcaatgcaacccctaccagaatcccagtaacattttttgcagaatttagaaaactctgtcctaaatctgagctgacaggctcttcttaatgactgccacaacacaaacactgagaaaaagaagcaaccagaaaaggtggaaagttctgatgacatagaaaatagcaatcagcctttctcacatcccaaagccttcaaaaatatacgagtgcagcatggccactatggaattcaccgaaaactaatcaccaagctagaaacatggtgagagaaaaaaaagggcaagaatatatctggcttatcacctcccacttttgcctactaatctgatgctgaaaagaaatgctcactgaagcattttacattttgaatctttcagatttgggatgctaaaccagtaagtatatgacaaatatttgagaatcaaaaaatatcagaaatccaaaacactttttgtcctaaaacttatgcataagagataatctgtgtgaactataggcatcaagctctacagcagatctctagaacctctccaacttgtataactgaaactgcacacccatgaacaacttctgattctccccactcccagctcctggcttccagcagcctcgtctcatattcaatctggaatcaacttacatgaggtccctagattagtggaacccatggaatcagagagtagaatgtccaatgaaagaaaatatttgcaaaacttctctccaaatttgtctcatatccatcaaacacacatggtccatgaggactagatttccagcagttcattcccaccctttccaccactcagttctgcatttgcaaatgtccacatgtatttctagaaagatccacatggtcctcacctgccctctgcagaaggagaggaaacttaaagaacccaggacagggaacatgcttctgctccaaagccaccagctcttgcctgtccccttcactctttctagatcattccttgcactctgctctatctttagaggtcactggttcaagtaagtcatcatgaaacacctgcaaaaaaactgccccacctggtgcctctagtgcctgatgactgaactgacctacaggcttgactctggtcttccctgtgttatttctgctgaaacatccagtcccaggccaggctgctcagtatctgcagggtttcaggacaatgggaagtcccattattactcatctctagaatgtccttggaaatggaagctgcagagaaatcacatctaggggggcaaagtaggatgtaatttggaaggggcccagcagttgcacattccaggtaaggaacccagggtgagccagccagtcaactgattatggagggactgggaggggtaccaggggctgtgactcccactgacgtgtctgtccatgacccaacactgctgctcaattgacacttgagaaagtctgtgcttccctaagacagagcaggaggcctcacagtctttgagcccttagatcatcatacatctgtcttgtgacacatgcaccagctactggctttcaaggactcatgtgggttgacaggtgggagatgccaactctgaatgaaggatgcctgtggaggaatcaaaggtgccacacaggacaatcttctgttatccacacagcgaagctgcccatgccttacatcaccatcaacaacttaaaccccagggagaagaaggatgtgttagccttcacctgtgaacctaagagtcggaactacacctacatttggtggctaaatggtcagagcctcccggtcagtccgagggtaaagcgacccattgaaaacaggatactcattctacccagtgtcacgagaaatgaaacaggaccctatcaatgtgaaatacgggaccgatatggtggcatccgcagtaacccagtcaccctgaatgtcctctgtgagtatcctttgttcctctgtgggccaggacaccagcttaactccaaacgaccagaggccaggcctctcagtctctctccggtccaagtatagacaactttacttctggacatcagacctggccatgactccctgccctgggaaatcctgggtaggcacagccttaaccaagaatataaggggaggggcgctcttgtcatgggacactaggggcccacagcttgtaatgagagaaacaggggaatacctcaggcttgggcttagtaaacatagatgggatttggctgtcacttgaggttgtgtcttggttcagagggtcactgtgtccctttaagagaccaggagcatccccttcccttggatgacatcacctgtggctttattctctttcctccagatggtccagacctccccagaatttacccttcattcacctattaccgttcaggagaaaacctcgacttgtcctgctttgcggactctaacccaccggcagagtattcttggacaattaatgggaagtttcagctatcaggacaaaagctctttatcccccaaattactacaaatcatagcgggctctatgcttgctctgttcgtaactcagccactggcaaggaaatctccaaatccatgatagtcaaagtctctggtaagtggatcccagcatccttggcaatagggttttaggtggagtctatctggctttcagagaagagtcaggaaaacatttgtattcccagactgtgtcccatgggcacaagcaaatcccaaattctcctcctgaaccctcccaacttatctctacagactctcttctgcttgtttttctgttttctcatggctgaccttgtgtctggcctgagaaaggtagggagggggctttatcagccctgagccctatgtggtagaagaggcttcacagagggacaagaaggagagtcctcaagatcaagttgcttctcgctgtcacgaacacatccccttctgccatgtctttgttttcttgtacctattccatgagctacaaggaacatctgaggctttgaaacaagctcacacttttcccccaaatgagaggaggaagccctttgggtgagggaggagcagctcagactctgcttcctgctctgctccgggctcctctggtgactggcctggccctgcctgactccacctggggtggaaccaacatgtgtggagaaagggccctggtggcctgtcctgaagttggctaaatcgagctgccagttgaagccaagcctcccccgggccaggctgcagggaaataagaagagagggagcttcagggctgactcctgagctgcatcctggctctgaagtcaccagctgtatgaggctttgggcacagcacgtgggacacagcacggaggacagtgactgatgcagagctagagaaatagggagattcacccctggggctctgcatggcaggaaaggggcagtgccaaaaagtgtgtaattatagagagggcaagaccacgagacactttatatatatctaatattagacttaccattaactaagtgtgcaatttagtgttgtgtaactatcacactatccatttccagaactttttcctcttaccatattaaacctctgtacccaataaacagtaactctcactccttctccccctaacccttaacacccaccattctactttctgtctctatgtaactggctattctaactatcttttataaatggaattatataataattatccttttgtgtctggcttatttcagttggcataatatcttcaaggttcatccattttgcacgatgtattgtaattttcttccttgttaaggttgaataacatttcaatgtatagatacatctcatttgcctacccacttatctttcaatggacttttcagttgtttccatttttggctagtgtgagtaatgcttctctgtacatcagtgtacaaatatttcttcaaatttctttcaattctatagggagtatgtccagaaggggaattgctggatcaaatggtaatttattgtttaattttttgaaaaacagccacactactttttacattggctataacatttcccattcccatcagcaatgcactagagctccaatttttccatctacttggaaacacctgttgtttagtgttgctgtcattgttgttgtttatcaaagccatcctaaagtgtgtgaggtgttgtaacattgtggttttgatttgcatatctctaagtattcgtgatgctgaggaactttgcatgggctatataaaaggttttgatttttatgaagtctgatttatccattttatttgttgcctatgcttttgttgttacaaccaagaaatcattgtgaaatccactatcatgaagtttttcttctaagagttgtatagtttttactcttacatttagatctttgatctattgtgggttaatttttgtacatggtgttaggtaaaggttccactcttcttgcccttggatatccacctttcccaatatcatttggtgagaacactgtcccttccccattgaacgatcttggcacactcgatgaaaatcatttggccatatatgcaagcatttctttctgggctatgatatttcattaatttctatgtcctcctttatgccagtaccacactgtattgattactggggctttgtagtaaatgctgaaatcaggaagtgtgagtcctccagcttcattcttcctcttcaaagctgtgtgtctatttagagtcatgagatgcaatataaattttaggacagatttttctttttctgcaaaaatgtcactgagattctgataggaattgtattgaatctgcagctcactttgggcagcactgtcctcctaacaatattgagtcttccaattcatgaacacaaaatgtctttcaatttattgatgtcatctttcatttctttcagcaatactttgtagatttcaggtataatcatttcacctctttggttaaacttattcctaaatattttattctttttgatgtgaatataaattgaaattatttttcttaatttcccttcagattgttcatggttagtgtattgaaatacaactgatgtttgaatgttgattttgtattgtgcaacattactgaatttattaattctaataggtttgttccatctttaggattttctacaaataagttcaagttatctataaacagaaataattttactccttccttccaatttgaatgtctttttaaaaattcttccctaatttttctgattagacctttcactactatgttgaataaaagtgtcaatagcaggcatccttgtcttttcctgctcatacagggaaagttttcagtctttctctgttatgtaagatgttagcattgggtttttcacatattgcctttatgttgaggtggttgccttccattcttagaatgtttttattatgaaaaaatactgaatttcatcaaatgcttttattgattcaatcttcttactgattatagttatattcatatttttgtgtgtttctaggagtttgtctatttcatctaggttatccaatttattggcatacaattatttatagtactttcataatcattattttattagaattggtagtaatcgcttcatttttcttttttctttttcttttaagacagagagacaggctctcactctgtaggccaccctaggatggaatacagtggtgtgattatggctcactgcagcctcaacctcctgggctcaagcaattctccttcttcagcctcccaagatgctaggactacaggtgcatgtcaacatgcccagctaattggttttttttttttttgtagagacagcatctccccaggttacctatgctggtccaaacacctggtttcaagaaatccttctgctgtgacctcccaaagtgctaggattaaaacatgacccaccatg

SEQ ID NO: 6330 - DNA, 2629 bp, Homo sapiens
  SIMILAR (617)..(1189): 641254mologous to Homo sapiens pregnancy-specific beta-1- glycoprotein,accession number M69245,Smith-Waterman Score=548.
gagaacaaccatcgtaatggatgtaaggtggtatctcactgtagttgtgatttttattttcctaatgattagtgatgttgagcatgttttcatgtgcttattggccatttgtaaattaattttacatttcctcctttgtaatgtaagaggtagcacaccgtgcattgttctgcttcttgtttttctcactgtgcggtgtatcttggaaaccttccccagtgcacagacagaaggatacctcattctttgccacagctgaccagtatccatgatgtggatcatggctcatgacccagttctctatggataaacgtcagggtcgttcccggtctgtgaccatcaccaacactgccgtgactagtctagaatgggtgccatttcatgcatttgcaattcccagaagtacactggttagtcagcagaggctcagcacagaaagaggaaggacagcacagctgacagccagtgctcagagagtttctggatcctaggcttatctccacagaggagaacacacaagcagcagagaccatgggaaccctctcagcccctccctgcacacagcgcatcaaatggaaggggctcctgctcacagcatcacttttaaacttctgggaacctgcccaccactgcccaagtcacgattgaagccgagccaaccaaagtttccgaggggaaggatgttcttctacttgtccacaatttgccccagaatcttacccgggctacaatctgggtacaaaagggcaaatgaggcacctctaccattacattacatcatatgtagtagacggtgaaataattatatatggggcctgcatatagtggacgagaaacagcatattccaatgcatccctgctgatccagaatgttcacccgggaggaccgcaggatcctacaccttacacatcataaaagcgaggtgataggactagaggagtaactggatatttcaccttcaacttatacctggagactcccaagccctccatctccagcagcaacttaaaccccagggaggccatggagactgtgatcttaacctgtaatcctgagactccggacgcaagctacctgtggtggactgaatggtcagaagcctccctatgactcacagcttgcagctgtccaaagccaacaggaccctctacctatttgggtgtcacaaactatactgcaggaccctatggaatgtgaaatatgggaactcagggagtgccaagcccgcagtgacccagtcacccctgaattctcctcccggaagctgcccaagccctacatcaccatcaacaacttaaaccccggggaggaataaggatgtctttaaactttcatctgtggaaccttaagagtgagaactacacctacatttggtggctaaatggtcagaagcctccgggtcaagtcccagggtaaagcgaccccattgaaaaacaggatccctcattcctaccccagtgttcacgaggaaatggaaacagggaccctattcaatgtggaattacggggaccgatatggtgggcatccgcagtttacccagttcacccttgaattgttcctcttatgggtccaggacctcccccagaattttaccctttcatttcacctatttaccgtttcagggaggaaaacctcgatttgttccttggtttcacgggaatttttaacccaccgggcacagtattcttgggacaattaatggaaaagttttcagcttaccaggggacaaaagctcttttattccggccatattactacaaagcatagcgggctctatgtttgcctctgttcgtaactcagccacctggcaagggaaagctccaaatccatgacaagtcgaagtctctgactgggatattaccctggaattctacttagttcctccaattccattttctcccatgggaattcacggaagaggcaaggaccccactctgtttccaggaaggccctattaaggtgggagggtgggacaactcaatgtaaaattttcatgggggaaaaccctttgttacctggaaggcatgaggccacttcaggaacttcacccaaaatatttcggacaaccttaaccaacagatgcttcaaactgtaaaccagggggcaacaagtgggatgactttcacactgtgggacagtttttttcccaaggtgttcaggaacaagactcccccatcatggatgagggtctcaccccctcttaactgtcccttgcctcatgccctgcctctttccacttgggcaggataatgcagttcattaggaatttcacatgtagtataggagcttcttgaggagtaacaacagagtgttcagattatgttcatcttcaaccttcaaactttttacgttaacatcttcagggggggaaatgtgggctctctccaccttgcattacagggctcccaataggaaatggaacacagaggtatttgcctgtgtgtttggcaggaggaaggtggtttgtatgaagacgtagggaaagctgaaattataatagagtccccctttaaatccacattgtgtggatggctcttgtccgtttcctaagagatacattgtaaaaacgtgacagtaatactgattctagcagaataaaacatgtaccacatttgctaaaaaaaaaa

SEQ ID NO: 6331 - DNA, 483 bp, Homo sapiens
  SIMILAR (159)..(290): 811254mologous to Homo sapiens Human myelin oligodendrocyte glycoprotein gene,accession number AAZ29204,Smith-Waterman Score= 196.
gagatggagtctctgtccactccaggctggagtgcagtggcgtgatctctgctctctgaaacctccacctcccgagttcaagcaattctcctgcctcagcctcccaagtagctaggattacaggtgcccgccaccatgcccagctaatttttttttttttttgtatttttagtagagacggggtttcaccatgttggccaggctggtctcaacctcctgacctcacgtgatctgcttacctcagcctcccaaagtgctgagattacaggcatgagccactgcccccggcccactctatcaaattctagagttctctaaacctgagaaatcacagagctggtgtatcaacaaacatgttccaatcagctagattaggggctggcaaaagcctgactggtttccagattgggccggctgccttagcctgtgcacccaacgtgggcatctgactgctggcacacgggtctggaggaattccaccac

SEQ ID NO: 6332 - DNA, 521 bp, Homo sapiens
  SIMILAR (165)..(245): 1001254mologous to Mus musculus putative,accession number AK008284,Smith-Waterman Score=132.
tctgcaagatggacgcgggattttttccgcggaacaagtgcagaacaggataatcgggtcagcaacaaacagaaggaaactactgaagcagctgaaatttgcagaatgcctagaaaaaaaggtggacatgagcaaagtaaatttggaggttataaagccttcggataacaaaaagagtaacggaaatccttgggtttgaagatgatgttgtgattgagtttatattcaaccagctggaagtgaaggcctgaaccaaaatggaagttattccttgcgtctgaagtatagcaccatcaccttattaggtcacagcagagtgagtgtcccaatgtcgctctgacccaactcccttgatgatgcagtgtgtgtttggagaatccagactccaaaatgatgcaaatcaacctgactggatttttgaatggaaaaaatgctcgagaatttatgggagaactgtggcccctgctgctaagtgcacaagaaaacatcgcgggaatcccttctgctttcctagaactgaa

SEQ ID NO: 6333 - DNA, 537 bp, Homo sapiens
  SIMILAR (1)..(174): 1001254mologous to Homo sapiens PRO2620,accession number AF130092,Smith-Waterman Score=300.
atgagctggctggaggagaacgtccacgaggttctgcaagcagtggacgccggggacccagccgtggaagcctgtgagaaccggcggaaggtgctctaccagcgtgcacccaggaatatccaccgccatgtgatcctctctgagatcaaggaagccgtcgctgccctgcccccgccccaccctaagctgatgaggaagcctcacgggccacccggggaatccagggcctgtgctcagctgctgctgctctgccccctggcggcccctccgtgtccctgcgagggaggcagctggcaggcagccccgctaagtcctatcagccatggaaacaccattgctctcttcttccggtcactgttgccaaactataccatggagggggagaggcccgaggaaggagtggctgggggtctgaaccgcaaccatggcctgaacaggctgatgctggctgtgcgcgacatgatggccaacttccacctcaacgacctggaggcgccgcacgaggacgacgctgagggggagggggagtgggactga

SEQ ID NO: 6334 - DNA, 1685 bp, Homo sapiens
  SIMILAR (1382)..(1543): 961254mologous to Homo sapiens FKSG26,accession number AF322111,Smith-Waterman Score=285.
  misc_feature (1)...(1685): n = a,t,c or g
gcggnggaattcgaggaaggatggtggctgtgctgagacggagaggatgaatgtgccctcaccatgctcaggggagagggtccttgtgttccccagcagagtcacgatgtgccgaggccctgtgccaggagcagagcacacggcacattgagagaacaaaagccccatggccagaccgggagagcagggctgcggcgcaagagggccaactgccaggcggccggtgtgtctggctttcagaatccgggtcattgaaaggctttttaccttttccttctgggctggaaagtacttgccttacccaggccccgtcacccgcacagcggtcgtcgtgattatccctgccggcagggtgttgcagcattgaggaatcgcggttctttgctgcctccctccgctgtggagcccaggctttcttccctccctagagctactgaggcctggccgctcaacgttctgtagagccgggccggtagcccttcgcaccgtgagggtctccgcttaacgcaggccctggaagcttctgcctttgcgtaaggagtgggtgctgaaggagacgttgaaactgcagcttttctgaaaagcaaggcacctgtgcagtgtccgaggatggctgtgggagcctcgctccggacgccacgcctgcctcagctgagttggtctccctcatcctgttcacgctgtccacagccccaccctaagctgatgaggaagcctcttgtttcacccggggaatccagggcctgtgctgagctgctgctgctctgccccctggcggcccctccgtgtccctgcgagggaggcagctggcaggcagccccgtgagccgggttgggtcccacgagtctcagttcagtgtcgtttctgacttttcttgactttctttcaggctaaagtcctattcagccatgggaaacaccatttgctctctttcttccggtcactgttgccaaactataccatgggaggtaggttgagctcgtcccagcccctgcctccccagtgggttgcgggcatatccattccagtgcgaatgcctggagcctccttgaaccaggactgtgccagccggcacagggagcagggaaggaccaaggctgcattgtgccagtggggtgcccattctgccggggaaactggggcctgcccagatggtagcagatgcagggccgtgagtcagccggcttgatcccactctgtgcctggcttggtctagacacggcatttggttttgagagcttcctcctcacagggaccctggggagggttcagggtccggtgctggggcaaagggccacctcgggctccacagtgcctcctgcttgggccccgggcccctagtcccagcacagacagcccccttctcagacatgtccccttgctgcagggggagaggcccgaggaaggagtggctgggggtctgaaccgcaaccagggcctgaacaggctgatgctggctgtgcgcgacatgatggccaacttccacctcaacgacctggaggcgccgcacgaggacgacgctgagggggagggggagtgggactgagcgtccgcagaggtgaccgaaaagccgtatgatgatgttcccgatttctctgttggtcggagtcggccagttgcctgaagtagggaagctgagtgtgtcgctccctggtccactgtttctcctataaatgtaaatgggt

SEQ ID NO: 6335 - DNA, 1826 bp, Homo sapiens
  SIMILAR (2)..(1663): 901254mologous to Homo sapiens FKSG26,accession number AF322111,Smith-Waterman Score=2547.
gaagaagaaaaaaaaacagaaaaacaagaaaagcagcacgggagaagcatcggaaaacggactagaagatatcgatcgcatcctagagaggattgaggacagcactgggttgaaccgtcccggcccagctcccctgagctccaggaagcacgttctctacgtggagcacagacacttgaatccagacacagaactgaaaaggtattttggtgcccgggcaatcctgggggagcaaaggccacggcagagacaacgtgtgtaccccaagtgcacatggctgaccacccctaaaagcacctggccccgctacagcaaaccaggtctgtccatgcggctgctggaatcaaaaaaaggcctctccttctttgcgtttgagcacagtgaggagtaccagcaggctcagcacaagttcctggtggccgtggagtctatggagccgaacaacatcgtggttctgctccagacgagcccttaccacgttgactcactcctgcagctcagcgatgcctgccgctttcaagaggatcaggagatggctcgagacctcgtagagagagcgctgtacagcatggaatgtgcgttccaccccctgttcagtctcaccagtggggcctgccggctggattaccgcagacccgagaacaggagcttctacctggccctctacaagcagatgagcttcctggagaagcgaggctgcccgcgcacggcgctggagtactgcaagctcatcctgagtctcgagccggatgaggaccccctctgcatgctgctgctcatcgaccacctggccttgcgggcccggaactacgagtacctgatccgcctcttccaggagtgggaggctcatcggaacctgtcccagctccctaattttgccttctctgttccactggcgtatttcctgctgagccagcagacagacctccctgagtgtgagcagagctctgccaggcagaaggcctctctcctgatacagcaggcgctcaccatgttccctggagtcctcctgcccctgctcgagtcttgcagtgtgcggcccgacgccagcgtttccagtcaccgcttctttggacccaatgctgaaataagccagccccctgccctgagccagctggtgaacctgtaccttgggaggtcacactttctctggaaagagcccgccaccatgagctggctggaggagaacgtccacgaggttctgcaagcagtggacgccggggacccagccgtggaagcctgtgagaaccggcggaaggtgctctaccagcgtgcacccaggaatatccaccgccatgtgatcctctctgagatcaaggaagccgtcgctgccctgcccccggacgtgaccacgcagtctgtgatggggtttgatcctcttgccctcttcggacacaatctacttcctacgtcaggccagagaggctaaagtccttatcaagccattggaaacacccattgctctcttcttccggtcactgttgcgcgaactataccatggagggggagaggcccgacggaaggagtggctgggggtctgaaccgcaaccagggcctgaacaggctgatgcgtggctgtgcgccgacatgatggccaacttccacctcaacggacctggaggcgccgcacgaggacgacgctgagggggagggggagtgggactgagcgtccgcagaggtgaccgaaaagccgtatgatgatgttcccgatttctctgttggtcggagtcggccagttgcctgaagtagggaagctgagtgtgtcgctccctggtccactgtttctcctataaatgtaaatgggtcacgctctgcaaaaaaaaaaa

SEQ ID NO: 6336 - DNA, 802 bp, Homo sapiens
  SIMILAR (441)..(623): 851254mologous to Homo sapiens IgG Fc receptor,accession number X17652,Smith-Waterman Score=282.
  misc_feature (1)...(802): n = a,t,c or g
tggttggttaacatcaggttactcttttgtaaggatgccaattgaaactggcctgtttgggagattagatttttaggttattaggttattatctctctctcctgatttttccaaaggccagataagaatgtagtttctgtttggtgacttgaaactttatcgtgggtgattccattttgatttttagtctgttctgtttgggcctagtgcaggagcttagtgcaaaacaacagcctcctaaaatttaaaagactttaaagaacatacatgagtttttcatcagataatatttatttgtattcattaatttatttgattggttaagtcttggctcccgagaatctttgctcagaggaatttttcaatccttggctattattctccttatagttattgtatttacctccccggtgtattgaattatcctatgggttttaaatgctttcctgcagccacctggacgtcatatgattgccatcagagagagacaacctggaagaaccaacagtgactatgaaacagctgacggcgtctacatgactctgaaccccagggcacctactgacgatgataaaaacatctacctgactcttcctcccaatgaccatgtcaacagtaataactaaagagtaacgttatgccatgtggtcacactctcagcttgctgagtggatgacaaaaagaggggaattgttaaaggaaaatttaaatggagactggaaaaattcctgagcaaacaaaaccacctggccccaagaaataggcttaaactttgctanactacaacacaagcaaaactcag

SEQ ID NO: 6337 - DNA, 658 bp, Homo sapiens
  SIMILAR (23)..(367): 961254mologous to Homo sapiens Peptide QQ3351-BF04 comprising a full length protein kinase,accession number AAY69159,Smith- Waterman Score=560.
gttccgtgtcgacgatttcgttcaaaaactccaggctggcagcattgcaatagtgaggcagactttcaataaggagatcaaaaccatgaagaaattcgaatctcccaacatcctgcgtatatttgggatttggattgatgaaacagtgactccgcctcaattctccattgtcatggagtactgtgaactcgggaccctgagggagctgttggatagggaaaaagacctcacacttggcaagcgcatggtcctagtactgggggcagcccgaggcctataccggctacaccattcagaagcacctgaactccacggaaaaatcagaagctcaaacttgctggtaactcaaggctaccaagtgaagatatgggtacctggctgagtttggggctggcaggcttcagcacaccaatggtgtcgatggcaggagtgcgtggtacaagaacatatgctgtcatgattgtgctacagtttctttaagaacaccagcttgcaggatttgagttgaggaaaacacagacttccatgagtttgggaactacgagagaaaagacagacagagtcaaatctacagcatatctctcacctcaggaactggaagatgtattttatcaatatgatgtaaagtctgaaatatacagctttggaatcgtcctct

SEQ ID NO: 6338 - DNA, 1313 bp, Homo sapiens
  SIMILAR (20)..(655): 1001254mologous to Homo sapiens Human protein kinase homologue, PKH-2,accession number AAY76749,Smith-Waterman Score= 1091.
  misc_feature (1)...(1313): n = a,t,c or g
agtcaagtgccgtggaattcccaacatcctgcgtatatttgggatttgcattgatgaaacagtgactccgcctcaattctccattgtcatggagtactgtgaactcgggaccctgagggagctgttggatagggaaaaagacctcacacttggcaagcgcatggtcctagtcctgggggcagcccgaggcctataccggctacaccattcagaagcacctgaactccacggaaaaatcagaagctcaaacttcctggtaactcaaggctaccaagtgaagcttgcaggatttgagttgaggaaaacacagacttccatgagtttgggaactacgagagaaaagacagacagagtcaaatctacagcatatctctcacctcaggaactggaagatgtattttatcaatatgatgtaaagtctgaaatatacagctttggaatcgtcctctgggaaatcgccactggagatatcccgtttcaaggctgtaattctgagaagatccgcaagctggtggctgtgaagcggcagcaggagccactgggtgaagactgcccttcagagctgcgggagatcattgatgagtgccgggcccatgatccctctgtgcggccctctgtggatgaaatcttaaagaaactctccaccttttctaagtagtgtatcaaaatctaaaccaaggagtctctggacaagaagctgggagaggcacaaactggacatctctctctctcatatccttcggcattgggttatctatgggagcaaggagtgggcacgcttctctgttacaaatagaaaacgattccagtcatacaggacacatcccactccaaatgatatttccaaaaacatacctctgacagtaactttgatagatggtttgtcaaatgtatctttctggggtatccacacctcttgggcaatggaaatttggcagctcctcccttccataaatgaagtctctttcccccaccatttgaatctggggctgggcactgtgacttgatttggatcaatagaatgtggaagaagtgactgtatggccagttcccaagcctaggtttcaagaggccttataaatgtctgttggaaccttacccagccatgaacatgttgagtgagcatgctggagaatgagagaccacatgaagcagaaacatgctttcctagctgaagtcatactagcccaaccaacatggcagctaacacatgaatgaggccaatcaagaccagaagaaccactcaagcagatcccagcccaaattgcccattccacaatcaggagctaaataaattnctgttgtcttaacac

SEQ ID NO: 6339 - DNA, 1654 bp, Homo sapiens
  SIMILAR (2)..(115): 861254mologous to Homo sapiens telethonin,accession number AJ011098,Smith-Waterman Score=177.
catggctacctcagagctgagctgcgaggtgtcggaggagaactgtgagcgccgggaggccttctgggcagaatggaaggatctgacactgtccacatgccaggtacagtcctgccccagggcctttgcatgggcagtgcactgcgtggaatgctgttcccctcactgtcctgaccaccctgtgtacaagccagcatccccgccgccctcgctctgtgccgccttccttctgtgtgccttgtcagaggacacaggtcaccaaggtcaccccctgtctctgccactggcctgtgagtcagagaggaggatggatggagcctcgccctgccatctctctccctgcacctgttatccctgcaggggagctgcccccgcaaccttcactttacagaaaagggtattagggctcagggagggaattaagtggcccgaggtcacctggaggagcaagtggccttctttgcagccatcagagggtgcagccctggtggagaaggccacgcttggcacaggggagcccgtctggagcatgagccagacatcactcctgccctcccatgggcccgggctcagcgtcagtgcccgcctgtgcccctggcctacccccagcccgccaaggctcgggccctcagggccagcgggaggagtgaacgagccctcttgcagctcagccgctctggcctggcatgttgggagtgatgaatggcaggttccaggcaggcagagagggagggtgcgagggcagggcctacgccgtcactgctgtctctgcgtcaagaccttggggaggccttgtccctacccagctcccactggaactggtcagaggttgcaggtgggttgaggtcttgactgtaacccagctcaggctggaactgctccctgtccccaagccagcctccctgtctctcttcaaagagtgtgagtccctttaggtcctggtgtgtggggacacacctccttcctcctctggcccggaggcttcggagcaggagagcctggagaagtgggggcactgtcggggctcctcggtacacagaccacgggacagatgcgtggcctggccctggcatccatgggcaaaggagagactgagacacaccgatgtgtcaccatgggcccggtgccacaccctttgcccagccccagttgggggcagacacggtttcctcgaaaggggaaagtaattgtggggcgggattaggacccaaaagcctcggtttcttgttgggaaagcaaccttggaatcccggcctcccttttgtgcatcagtttccgacatctcccagagtcctagggccccttcttcttgaagtgaacttaaatccctgaaagaagagtgtccctgtcaggggtcctcaagtctggctccccagggtgggcaccggcccagggcgtggagcgtcttggttccggccgaagccccacccggggcttgacatcacttccccattcccacagcgcacaactacggggaattgcgccgccgcctgcgtgtactttggcatagcggcctccctggtcaagatgggccggctggagggctgggaggtgtttgcaaaacccaaggtgtgagccctgtgcctgccgggacctccagcctgcagaatgcgtccagaaataaattctgtgtctgtgtgtgaaaaaaaaaaaa

SEQ ID NO: 6340 - DNA, 664 bp, Homo sapiens
  SIMILAR (1)..(159): 661254mologous to Homo sapiens Polypeptide with transmembrane domain,accession number AAW85737,Smith-Waterman Score=175.
  misc_feature (1)...(664): n = a,t,c or g
gtttttcgtcagtactgggatatccccgatggcaccgattgccaccgcaaagcctacagcaccaccagtattgccagcgtcgctgtagggactgaaggttggagaagcatattaactgctccagggtcatttgaagctgggctgcaagtccaggtcggctgacctgctcctaggggtctctgaagcaaggaatgttcccatcaggcctgaaccgccgcttgcctacagagtcaccacttcaaatcctccgggcaactttcctttgaaaggaagtggcctaagggttgcaccaataccaccttccactgccagctgctgtcggggcccgtgtttggcctcacccacctgcaatcagcgcccatnttccgcgagaagcccgacgacccccctgaactaccttccctccgcgtgctgcgccggacgctggactcctggggagcacgcacgcacaactacgggatttgnggncttggcgccgccgcctgcgtgtactttgccatagcggcctctcctggtccaagatgggccggctggagggctgggaggtgttttgcaaacacccaagggtttaagccctgtgcctgccgggacctccagccctgcagaatgcgtccagaaataaattctgtgtctgtgtgtgaaaaaaaaggaaaaagccacaagg

SEQ ID NO: 6341 - DNA, 402 bp, Homo sapiens
tttttgcagtacatgaatgttttattcttcataaagtgcttaaaacatgaagaacaagctctttataaagagccttaactaggaagacaaacagcaaagcagaaccatgcctgctccctgcccaacccacctgcaactttcctccaagtgtggcgaggagaagaaacatcaacttggccagaccaagagattaactttaggggaggggaacagcccacagcagtgctgtccattcccattcccagggccctgagagagccatccctatgtattcaacaggtgggagggggacgccacacagcgggagaggtcgacatccaggggctcttgacccgcccaccaaaggcacattttaattggtttccaaaagttcaaaccctgcagcaacacagagttttggca

SEQ ID NO: 6342 - DNA, 4384 bp, Homo sapiens
  SIMILAR (4374)..(4264): 291254mologous to Homo sapiens Rab11 interacting protein Rip11a,accession number AF334812,Smith-Waterman Score=40.
aatcttttttttttttttttttgcagtacatgaatgttttattcttcataaagtgcttaaaacatgaagaagaagctctttataaagagccttaactaggaagacaaacagcaaagcagaaccatgcctgctccctgctctaacccacttgcaactttcctccaagtcgtggctcggagaagaaacatcaacaagggaccctgggcttcgattcaaaaacttcctctgaagccattccatgccctgggcattagggaggcccacaaaggtcagggcccagggctgggagtgaattaaagcccaaaggaaatccccagtaggggggggtgactccccctctcttcagaaaagatacttactttctctaattacccaatggacccccaaaagcatggactggaaaccctggggaccagtgggatacttttctcagatttgatgagtggagtttaaggtaggtaacgttacaggggctttcctccatgtgtggcgctcctctgctccatcctggcagcagacagacatcacccagagggcacgtgtctgcctgaggccttccaaaagcaagcccacaggccctctcctgaagaagtggtggtcccagaggagctcttgcctcctcactaagctgttaagtatccttcttcagcacctcatcaccccccatttttgctaattcagggtgccccaagctgccaaagttccctgcagatgccttggggaagcctaccatgttttctacaagcaaaccaggggctgggccaaaggacagatacttcatttcaaagtgcactgcagccaagccaggcaagcccctggggcagaagggacaggctgagatagcagcttaatggatggatgggaggacaacaaaggctttttcctaagtataggtgtctcccaaaggcatagtgggacctccctcttccaggcaagctgactggtctagtatggctaagtcctgaggccagacaatgagagtgagcagggcagccccaggcctgcctgcccgcctgcccagcagtgtttatcctgggatcctcctattggggttgagggaggggaagacagcaggaaggttgagggagcagcaacttggccagaccaagagattaactttaggggaagggaacagcccacagcagtgctgtccattcccattcccagggccctgagagagccatccctatgtattcaacaggtgggagggggacgccacacagcgggagaggtcgacatccaggggctcttgaccccgcccaccaaaggcacattttaattggtttccaaaagttcaaaccctgcagcaacacagagttttggcatctggacaggcaacaagaatagacatggaggcttgatccccaaatcataagcagtcccaagccccagcctggagggacctacacattggaggtggtcaagagctcgaaaagcaaaaaggtgctctctccgcacccgcccctgcgccccacacattcccatgtgacactcgtggaaaggtcagaggggtcagggagcagcctgaagcacacacatcatccaccactgtccacatggcactcgccccacaaacagctccagactgaagcagactcaggacatggcagagactggcccagaccacacaggcttcttgctctcaggggaatgggtgtgaggctgaagaggctggttgcccgtaactcacagacaaacaggcagcgtggtcattgtcccagtaatactagaagcccctccagggactggagggaaatgaaggggatggggctttggctgtgggaagaaatggctgaccatccttgggggataataaagtatgtgctagcaaccagtcttgtcccagattactgcatcaagctacagttcacccctgctctgtcttgggggaagagttccaattccctggggcccccaaagctgagggatatgaaaacaggcaggtgggaaagacccagggctcccaaagacacacaagttgtgcacagaacctgatgcctccaaagggaatccagagggcccccttccagcagccccagttgaggcaggagggagaggagcaaggagtgacaaggcaagacagacgatgccccactgcagatgagagagttcaggaggagagagggcaggcagcaataggtccatgccaaccctcctgggggtagggtgaggaaggctatttgggggggcccggggggatctgcagcagcgtgggtgaggtctccatgatccgcaccagcagccggtcgatgtagctctccagctcctgcacatgctcgtcccgctggctcagctcccgctcccgctgcaggagcaggctgatgagctcatcgtgggtcaggtggtagtacttggccgactggtccagcacagctgagtccttcagccttttggtgtccaccatctggccagcctggggggcctgggtcacaggctgaatgctcccagatgtgactgttttgagcttctccagcccactgctcagggctatgctcagactggagcgggactgcttcctgtcggggctgccctccacaggggcggcactgaggggcttcacggggtggggactgggtttctgagtcgggtccttggcttctctcaagccaaaccagctactcttggccttttcctccccactggatgagtgatgtggggaggccccccaggatgggacccccccttttccccccagagagcttcggcgacccaactcgctccgacttaggccttggtggtggtggtggaagagacccatccggggcttgcgttcctccttccgggctccctccttctctgccacagcctcagaggaggccactatgggtgtggcaacctggactggcttgccctctggtagccgggcccccctcctcctctcccagggtggctggccccaggggccaggactttagcctgagcactcagctcctcctgtccaagcactgcctctgagctgctgttgctacgactgcctctgggccaggtgtcatctgtggaacgaggcccctcctcggagaaccgggaagagacagcttgcaaggagccagaggatggaagcgagcccgagatggagctgcggtgccgcacagggccctggggctcctcattgtaaatgtggctcccattgacacagagcgaagagcgggaggcagcatccaggtggccctgaaggtccagaagggcccgaggaggagccactcgcatctggttggcctcatcgctgtaggtcctcttatgggtgaacagcttgggggactgtgcagagtccctgcccccttcagtggacagccagctgctacggcttggtgagcgggtgaggagttcggcgccaggtccctggtaggccaagctcccgctggctgaggacagggtgctgtccgagcccagcgaggtgttggactgggtcagggacgacttgcgcagcttgttgcggaggaagaagcctttggctttgcccatcttgcccaggctgcccaggtcaggatcctctatggcgctgcttgggaggatggcagaggcagattccagatcatacttcttcttgcccttcatcttgtccctgatcttgctgaagggagaccttggcttgtccttcatggacaggtcaaacatactggcgctcaggttgttgcgcgtgaactggatggtgacttcaatctcgccgcgttccttctccttcttgcctggcttggagtgcagcttgtaccactgcgtgtgctgggcgcggcctgcgccgaagacctcgtccagcgccaccgtggcctggcccaggaacttgtcgacgccgatgagcgagcggtgcatggtggtgagcaccagctcgcaggcggcggcggagctcgcggcccagggcgccgggcccgcgtcggcctcctgcgcccgcagcaggccatccagggcccccggcggcagctcgaaggagcactcctcacgccactcgggacagccgtgcgtcttctccaccaccgacgtactgtacttctcgcggcccacctggatcaccgtgtacgcgtcgctggtgctgcccgctcccgagctcttgccccgcagcccgcgggcccgcagcaccgtcacctggacgtgcgtgggcagccagcgggaaggccccgccgccggctccgcgccccgcaccagggccatggcggagaagcggggggcgaggtctggccgagccggtgcagaccccaggacctggtgacaaacccggccgcggcagaaggcggtcaggaaccaactctgagcgccgccgcagctgcgggctgggctgggccgggccgaccggccgccgcctccccgcctcaccgggccgctggccgcgggccgcgccgcgacgtcagcgccccgccccctgccccgccccgcgcccgccgccccaaccggc

SEQ ID NO: 6343 - DNA, 983 bp, Homo sapiens
  SIMILAR (976)..(752): 761254mologous to Homo sapiens PRO2852,accession number AF130079,Smith-Waterman Score=275.
ttttttttttttttttttaatgaaaagatgtttgatgtttatttccaccttgcactcaggtctgagccacaagtacattaagacattgaatggtatcacccagggaatacgtaaccagacaacacacaagactgagatgccacaagtggtggtggtggtaattcacgacagaaggaaccagacagtaaaaacaaaaattgccccaacacacccaaatggatccaaatcccgcccacctcctaggataggccaaacttgattgctgggttaaagaaccctagaggtctgtttaaggtgggcagagaaggggggttttctcagcttagaattgtcctggacatctaactgccagcaaggcactgttacatattaatttccctgaggaaaccaagtcctttagttggggaaggggttttccctttggacccagatctttatggcttaaaattgggtcagggtttgcaaaaccttcaaagcctccataaccaaagctacgggagaggctctatactgctacaacgcagtacctcctcactgcaggtagtctgcgccttaaccctctgcagggagactgactgtagcaccaagtaccctggcttttaagactctacataggaatccaccaataattaagatgtataaccttgacctacagcctaaagcccaatatgcctccctcaagaacatcaacagtgttcaagcttagctttgttacagaaaatgaggtagggtgcggtggctcacatctgtaaatctcagcagtttgggaggccaaggcaggcgcatcagctgaggtcaagagtttgagaccagcctggtcaaaatgatgaaaccccatctatactaaaaatacaaaaattagctgggcatggtggcacacgcccgttatcccagctactcaggaggctgaggcactagaatcacttgaacccaggaggcggaggctgcagtgagctgagatcacgccactgcattccagggga

SEQ ID NO: 6344 - DNA, 2966 bp, Homo sapiens
  SIMILAR (338)..(760): 951254mologous to Homo sapiens Rab11 interacting protein Rip11a,accession number AF334812,Smith-Waterman Score=668.
  misc_feature (1)...(2966): n = a,t,c or g
ccgagatcctcccagcctctcatctgcatccccgccagggtcgagggaatcttctattcattctggtccagaagagctgcccactcccccagagcctgactttccaccgccccctctcccgccttgggccagccaccaccgtggggggcccagccctccatgctctcccctgtctgaagcctggcccctgactacctcctctgcaccaccaggggagccagccttactccctggcccccatgagccctccccacctgggggctcccctgccctacttagggaggacctcgctgcagccaccccagcctccccgcttgtgcttctgcccttggagacacgaccagctgaggagccacagcccagtgccagtccccaccccgtgaagcccctcagtgccgcccctgtggagggcagccccgacaggaagcagtcccgctccagtctgagcatagccctgagcagtgggctggagaagctcaaaacagtcacatctgggagcattcagcctgtgacccaggccccccaggctggccagatggtggacaccaaaaggctgaaggactcagctgtgctggaccagtcggccaagtactaccacctgacccacgatgagctcatcagcctgctcctgcagcgggagcgggagctgagccagcgggacgagcatgtgcaggagctggagagctacatcgaccggctgctggtgcggatcatggagacctcacccacgctgctgcagatccccccgggcccccccaaatagccttcctcaccctacccccaggagggttggcatggacctattgctgcctgccctctctcctcctgaactctctcatctgcagtggggcatcgtctgtcttgccttgtcactccttgctcctctccctcctgcctcaactggggctgctggaagggggccctctggattccctttggaggcatcaggttctgtgcacaacttgtgtgtctttgggagccctgggtctttcccacctgcctgttttcatatccctcagctttgggggccccagggaattggaactcttcccccaagacagagcaggggtgaactgtagcttgatgcagtaatctgggacaagactggttgctagcacatatctttattatcccccaaggatggtcagccatttcttcccacagccaaagccccatccccttcattttccctccagtccctggggggggcttcttagtattactgggattttgtctcacgctgcctgtttgtctgtgagttacgggcaaccagcctcttcagcctcacacccattcccctgagagcaagaagccctgtgtggtctgggccagtctctgccatgtcctgagtttgctttaatcctgaaccggttggtggggcaagtgccttgtggacagtggtggatgatgtgtgtgcttcaggctgctccctgacccctctgacctttccacgagtgtcacatgggaatgtgtggggcgcaggggcgggtgcggagagagcacctttttgcttttcgagctcttgaccacctccaatgtgtaggtccctccaaggctggggcttgggactgcttatgatttgggggatcaagcctccatgtctaatnccttgttgcctgtccagatgccaaaactctgtgttgctgcaagggtttgaaactttttggaaaccaattaaaatgtgcctttggtgggcggggtcaagagcccctggatgttcgacctcttcccgctgtgtgggcgttccccctcccacctgtttgaatacatagggatggctctctcagggccctgggaatgggaatggacagagctgctgtgggctgttcccctcccctaaagttaatctcttggtctggccaagttgctggctccctcaaccttcctgctgtcttcccctccctcaaccccaataggaggatcccaggataaacactgctgggcaggcgggcaggcaggcctggggctgccctgctcactctcattgtctggcctcaggacttagccatactagaccagtcagcttgcctgggaagagggaggtcccactatgcctttgggagacacctatacttaggaaaaagcctttgttgtcctcccatccatccattaagctgctatctcagcctgtcccttctgccccaggggtttggctgggcttggctgcagtgcactttgaaatgaagtatctgtcctttgggcccagcccctgttttggcttgtaggaaaacatgggtaggcttccccaagggcatctgcagggaactttgggcagcttgggggcacctggaatttagcaaaaatggggggtgatgaggtgctgaagaaggatacttaacagcttaagtgaggaggcaagagctcctctgggaccaccacttcttcaggaagagggcctgtgggctttgcttttggaaggcctcaggcagacacgtgccctctgggtcgatgtctgtctgctgccaggatggaagcagaggagcgccacacatggaggaaagcccctgtaacgttacctaccttaaactccactcatcaaatcttgagaaaagtatccactggtcccccagggtttcagtcatgctttttggggggtcattgggtatttagagaagtaagtatcttaatctgaagaagaggggaagtcaaccccccctactggggattccctcttgggctttattcacttcccagcccctggcccctgaccctttgtgggcctcccctaaatgcccaggggcatgggatggctttcagaggagtttttgaatcgaagccccaggggtccttgttgatgtttcttctcctagccacacttggaggaaagttgcaggtgggttgggcagggagcaggcatggttctgctttgctgtttgtcttcctagttaaggctctttataaagagcttgttcttcatgttttaagcactttatgaagaataaaacattcatgtactgcaaaaaaaa

SEQ ID NO: 6345 - DNA, 880 bp, Homo sapiens
  SIMILAR (26)..(127): 941254mologous to Mus musculus putative,accession number AK019174,Smith-Waterman Score=167.
cgacttcgctgacgacgatttggtactgaaggaattacgaggtcattcctcctttgttaacgaagcaacatttacacaagatggacattacattattagtgcatcctctgatggcactgtaaaggttaagtatttgctatcagtttattttgggatgtctaccccatctttgtcctttgaggagttttcagtggtgataatgggaatgattgtgctgtagtaaacctctttcctggctattttagctgtaattgaggtgagtctgagacaacaacagtattctgtgggtaattcccattggccttgggaccccaatctcaaaccttttcaatccaaacaaactttatcatgtgtaggaaaagaggaagggtgaagagtcctaaacttaagccatcccccattcacagatacacatggtggttaaatctgttttgccatagggatgtgccacctgctaacagtcaaattcacgaaagtctcagtggcctaataaatagatctcttttttgttgcacagcctcactgcactcctggtccccagatttagggccttcctagtagcatttatagaggaataggagaggtgttgagtaaaactaagccttctcctagatagttatttaataagtaatttgctgaaagtaatggatcttcagtacctttaaagatttagttatttgaagagaggttctcatttcctagaaaagatatgagaaacccaaatagaaaattattagagatctttgagacactctatttacattctggacctaatctttttgaattgtcttatatgagtgagtactttgtggcagaagatctagacattttaataaaacattttaatacaaatatctagatattttagatacatatttaa

SEQ ID NO: 6346 - DNA, 612 bp, Homo sapiens
cgatgatgggggaggctgtgtatatgtgagggtaggggatatatgggaaatctctgtaccttctgccccattttgctgtgaacctaaaatttctctaaaaactagtcttttatataaatgggcatacatatacatatatatgtcagcactaaaatatcacgttccaataaatataaaggagaaattattgaaagtcatgtacagtgaaatgtgtttccttccatctatcatggaattcatgaggagtgatactcttaggagtaaggtataatgggaataatgaaggggaccagaccttgttctagggtatgttaggaaggaagaggtgatctccaggcaccctcctgagagtcagctgacattgtcctaagttggggataatgttgtatcacgtaatatccaaaactgaaggaagaatagtgaagcttcagatacagtgctggatgaggtgaagggaggtaatgggtgagcagacattggtataagatgttgagcagcatgtgatgggccatcagatactgtgaagaagtgcccaagcagagataatgatggctcagtagccattgatctaaggtgaggtaatgggatgtgtccgaattcctccacagggat

SEQ ID NO: 6347 - DNA, 6359 bp, Homo sapiens
  SIMILAR (201)..(1673): 511254mologous to Mus musculus putative,accession number AK004905,Smith-Waterman Score=1243.
ggcctggctgttgctcaggtgaccagcttgtgtctctgggagggcgctgctttccccggccacccggcgcgatgatccagaatgtcggaaatcacctgcgacggggcttggcctctgtgttctccaaccgcacatcccggaagtcagccttacgtgcggggaacgacagtgccatggcagacggcgagggataccggaaccccacggaggtgcagatgagccagctggtgctgccctgccacaccaaccaacgtggtgagctgagcgtcgggcagctgctcaagtggattgacaccacggcttgcctgtccgcggagaggcacgctggctgcccctgtgtcacagcttccatggatgacatctattttgagcacaccattagtgttggacaagtggtgaatatcaaggccaaggtgaaccgggccttcaactccagcatggaggtgggcatccaggtggcctcggaggacctgtgctctgagaagcagtggaatgtgtgcaaggccttggccaccttcgtggcccgccgagagatcaccaaggtgaagctgaagcagatcacgccgcggacagaagaggagaagatggagcacagtgtggcggctgagcgccggcgcatgcgccttgtctatgcagacaccatcaaggacctcctggccaactgcgccattcagggcgatctggagagcagagactgtagccgcatggtgccggctgagaagacccgtgtggagagtgtggagctggtcctgcctccccacgccaatcaccagggcaacacctttgggggccagatcatggcctggatggagaatgtggccaccattgcagccagccggctctgccgtgcccaccctacgctgaaggccattgaaatgttccacttccgaggcccgtcccaggtcggcgaccgtctggtgctcaaagccatcgtgaacaatgccttcaaacatagcatggaggtgggcgtgtgcgtggaggcctatcgccaggaggctgagacccaccggcgccacatcaacagtgcctttatgacctttgtggtcctggacgcagatgaccagccccagttgctgccctggattcggccccagcccggcgatggtgagcggcggtaccgagaggccagtgccagaaagaagatccgcctggacaggaagtacatcgtgtcctgtaagcagacagaggtgcccctctccgtcccctgggaccctagcaaccaggtgtacctgagctacaataacgtctcctccttgaagatgcttgtggccaaggacaactgggtgctgtcctcggagatcagtcaggtccgcctgtacactctggaggatgacaagttcctctccttccacatggagatggtggtgcatgtggatgcagcccaggccttcctgctgctctcggacctgcgtcagaggccagagtgggacaagcactaccggagcgtggagctagtgcagcaggtagacgaggacgacgccatctaccacgtcaccagccctgccctcggaggtcacacaaagccccaggacttcgtgatcctggcctcgaggcggaagccttgtgacaatggggacccctatgtcatcgcgctgaggtcggtcacgctgcccacacaccgagagacgccagagtacagacgcggagagaccctctgctcaggcttctgcctctggcgcgagggggaccagctgaccaagtgctgctgggttagggtctccctgactgagctggtctcggcaagtggcttctattcctgggggctcgaatccaggtcaaagggtcgcaggagcgacggttggaatggaaaactagctggaggacacctgagtactcttaaagcaatccccgtggccaaaatcaacagccgatttggataccttcaagacacctgaaaccttatcatgagccagatgccaaggaagagactctgggaggatccagaggaccccctggttgcagccacgtagagactgacgctgaggaggactccaactatcatgagcaacacccgtcgaacacagccaccccgctaagaacagatcaagaagctgtcacagatggcggaagaaaacctgaggaaagcgggacaaccagtcacaatgaataatttaatggtagctatgatagcagttatcaccactgccgtgagtattccttcaataagggctggtaataatgcctggatgcaatcattctatgacacagttacacatgctttctgatctcagtatttaccataataaatcggctcctataattgaggcataccaccctcaaaaacctatttgtaaacaggattggacccagttagaaaaaatgaacgtacttatttaggaagattgctttgcagaataggcagagatgctgcacaacgattcctatggaatcattactaattggtcccccaaggggatgtttagcttgaattgcacctctcagtctgcatgccacggtcacactatgttcagatgatctgaacaaaacagtcagatggtagaaatgttaagtacggcaaaagttcctattatctggaaccatggcggtatagtggcacctcaacctcaaataatatggcccgctctaggagctaaacataaggatttgtaaaaactattaaatgctcttaataagatcaaaatttgggaaagaataaaagagtatctagaaggacactctacaaacttgtttttggatatagcaaaattaaaagaacaaatatgtaaagcatcccgggcaacctgaccttaatgccaggaaccagagtgcttaaaggagctgcagaaaaattagcagctagtaacccatttaaatgggtaaaaacacttggaagctctgtgatttcaatgatgactatgctttttaatctgttgtttgcctttgtatagtctgcagatgcggatcccgactcctgcgagagtctctttgcaaatcgaagaagggagacatgttgggagcaagccccccagagtctggccataaactggccccaaaactggccataagcaaaacctctgcagcactaaaacatgtccataatggccctaacgcccaatctggaaggttgtgggtttatgggaatgagagcaaggaacacctggcctgcccagggcggaaaaccgcttaaaggcattcttaagccacaaacaaaagcatgagcgatctgtgtcttacgggtgtgttcctgctgcaattaattcagcccatccctttgtttcccataagggatacttttagttaatttaatatctatagaaacaatgctaatgactggtttgctgttaaatgaaggggtgggttgcccctccacacctgtgggtgtttctcgttaggtggaacgagagacttggaaaagagacacagagacaaagtatagagaaagaaaagtgggcccaggggaccagcattcagcatacagaggatccacactggcaccggcctctgagttcccttagtatttattgatcattatcgagcatggcaggataataggataatagtggagagaaggtcagaaggtaaacacatgaacaaaggtctctgcatcataaacaaggtaaagaattaagtgctgtgctttagatatgtatacacataaacatctcaatgccttgaagagcagtattgctgcccgcatgtcatacctacagccctaaggcggttttcccctatctcagtagatggaagtatattccatgtaaagtaaatcggctttacacccagacattccattgcccagagacgagcaggagacagaagccttcctcttatctcaactgcaaagaggtgttccttcctcttttactaatcctcctcagcacagaccctttatgggtgtcgggctgggggatggtcaggtctttcccttcccacgaggccatatttcagactatcacatggggagaaaccttggacaatacctggctttcctaggcagaggtccctgcggcctttgcagtattttgcgtctctgggtacttgagattagggagtggtttgagattagggagtggtgatgactcttaaggagcatgctgccttcaagcatttgtttaacaaagcacatcttgcacagcccttaatccatttaaccctgagttgacacagcacatgtttcagggagcacagggttgggggtaaggttacagattaacggcatctcaaggcagaagaatttttcttaatacagaacaaaatggagtctcctatgtctacttctttctacacagacacagtaacaatctgatctctcttttccccacagttaataaatatgtgggtaaatctctgttgggggctctcagctctgaaggctgtgagacccctgattttctacttcacacctctatatttttgtgtgtgtgtctttaattcctctagcgctgctgagttagtgaccgagctggtctcggcaggggtgggcgggtcttttgagttcaggagttcaggagcagcctggccaacatggtgaggccccttctctactggaaatatgaagattgtccgggcatggtggtgtgcctctgtactttcagctactcgggaagctggggcacaagaattgctggagcatgggaggtgggggctgcagtgggctgagatcgtgccactgcactccagcccgggcgatagagtaagactctgtctcaaaacaaaaagagttttaggccaggtgtggtggctcacgcctgtaatcccagcactttgggaggctgaggtgggcagatcacctgaggtcaggagttcgagaccagtctggccaacatggcgaaaccccatctctctctactaaaaatacaaaatttagccaggtgtggtggtgggtgcctgtggtcacagctgcttgggaggctgaggcaggagaattggttgaacccaggaggcagaggttacagtgagcggagatcgtgccactgcattccagccggggtgagagagcgagactctgcctcaaaaaaagaaggcttagtgtgcaactcatcagagttgcacagggcagagaaagaatgggaaaaaaaacaatttctagaaaacttttcgaattttctgatcaacaccaaatattccaaataggaaaaatacaaaaaaatccatacctatatgtggcataatatgattgtagagcaccaaagtaaaagatcttattttttattaaaattaaaaaaaaattaaaatagagggtctcactatgctgcccaggctggtcttgagctcctggcttcaggctatcctcccaccatggcatcctaaagtgctgggattgcaggcatgagctgctgcatctggcccaaagtaaaagatcttagaagcagccagaaaaaatagatttgggctgggcatgaatagattgatcaccaaaaaggtggcagactaacttctcgacagaatccacagaagccagaaggcagtggaacattagctttgatgtactaaaataaaataccacgctaggctcctacatacagtgaaaatgttttgagaatgagaattataattttttggcaaacaaaactaaaggagtttacaactaagaaactcttttgtgagacggccttgctctgttgcccaggctggagtgcagtgacgaaatctcagctcactgcaacctcggcctcccgggttcaggcaattcttgtgtctcagccttccaagtagctgggattacagatgtgcgccaccaggcccagctactttttatatttttagtggagatggggtttcactgtgttggccaggctggtctcaaactcctgacttcaagtgatctgcccgccttggcctgctaaagtgctgggattacaggcatgagcgactgtgcctctccagtccctgtgtttttttttgtttttggaggttttatttgtttgtttttggaggcactttcactgtgttgcccaggcctgtctgttggcctcaagtgatcctcctgccttggatctcccagggtgctgggattacaggtgtgaaccactgtgctcagcccattttttatttgtttcttgaaggaaggtagcagtattaattaattttggactttgctcactaaagtttgaatgttaagaatagatgtatacagtctggatgcagtggtgcatgcttgtaattttagcactttggggggctgaagcgggaggatcgcttgggctcaagagtttgagaccagcctgggcaacatggtgaaaccttgtctctacaaaaaaattttaaaaaattagccagacatgatggcatgcacctataatcccagctacttgggaggctgaggtgggaggattgcttgagtccagggaggtcgaggctgcagtgagccatgatcacaccactgcactccagcctgggtgacagagtgatactgtctc

SEQ ID NO: 6348 - DNA, 1218 bp, Homo sapiens; identical to SEQ ID NO: 3804
  SIMILAR (979)..(1215): 861254mologous to Homo sapiens Novel protein kinase, SEQ ID NO: 165,accession number AAB65638,Smith-Waterman Score=346.

SEQ ID NO: 6349 - DNA, 1652 bp, Homo sapiens
  SIMILAR (792)..(1007): 931254mologous to Homo sapiens serine/threonine kinase 33,accession number AJ303380,Smith-Waterman Score=342.
atggtgtccctgctgattggagagctaaagagccaccaagatctgcacaccagtcactgtgctcagtgcccctgtgtgcccccaattcacccccagatggtacaaccctcctggtgttccccatggttcctatggagtgcatctggagtaggcttctcacaaagattccagaccagtggcaaaaatgaatgtccacctccaattccctcctatcaccctataagccataggtctagaaaaattctctgtgagtggcattatgccagcttggggaaggaagtggcacagactgaaacgaccttttctcttaccagtcatggcttatctcgatcctcccctgaagttatcagtgcccacgactatagccagcagtgtgacatttggagcataggcgtcgtaatgtacatgttattacgtggagaaccaccctttttggcaagcttaaaaaagaagctttttgagttaataagaaaaggagaactacattttgaaaatgcagtctggaattccataagtgactgtgctaaaagtgttttgaaacaacttatgaaagtagatcctgctcacagaatcacagctaaggaactactagataaccagtggttaacaggcaataaactttcttcggtgagaccaaccaatgtattagagatgatgaaggaatggaaaaataacccagaaagtgttgaggaaaacacaacagaagagaagaataagccgtccactgaagaaaagttgaaaagttactcaaccctggggaaatgtccctgatgccaattacactctagatgaagaggaggaaaaaccagtctactgcttatgaaaagcaatttcctgcaaccagtaaggacaactttgatatgtgcagttcaagtttcacatctagcaaactccttccagctgaaatcaagggagaaatggagaaaacccctgtgactccaagccaaggaacagcaaccaagtaccctgctaaatccggcgccctgtccagaaccaaaaagaaactctaaggttccctccagtgttggacagtacaaaaacaaagctgctcttgttagcactttgatgagggggtaggaggggaagaagacagccctatgctgagcttgtagccttttagctccacagagccccgccatgtgtttgcaccagcttaaaattgaagctgcttatctccaaagcagcataagctgcacatggcattaaaggacagccaccagtaaggctgggcaagtgggttgcagtggaaatcaactcaagatgtacacgaaggttttttaggggggcagataccttcaatttaaggctgtgggcacacttgctcatttttacttcaaattcttatgtttaggcacagctatttataggggaaaacaagaggccaaatatagtaatggaggtgccaaataattatgtgcactttgcactagaagactttgttagaaaattactaataaacttgccatacgtattacagcagaagtgcttcagtcattcacatgtgttcgtgagattttaggttgctatagattgtttaagacagcttattttaaatgtagaaaaataggagattttgtaactgcttgccattaacttgctgctaaattcccaatgtattgattaaatcaataaaaaacagatgttactcaaaa

SEQ ID NO: 6350 - DNA, 9534 bp, Homo sapiens
  SIMILAR (5230)..(5445): 731254mologous to Homo sapiens dyskerin,accession number AJ224481,Smith-Waterman Score=265.
  misc_feature (1)...(9534): n = a,t,c or g
cagtaaaaatatagcacagggccgggcgcggtggctcaggcctgtgatcccagcccaggctggcggatcacctgcggtcaggagttcaagaccagcctggccaacatggtgaaaccccgtctctactaaaaatacaaaaaatttaggtgggcgtggtggtatacgcctgtaatcccagctactcgggaggctgaggcaggagaattgcttgaacctggagaaggaggttgcagtgagccgagtttctgccactgcactccagcctggggaaagagtgtgaccgtctcaaaaaaaaaaaattatatatatataaatatgtgtgtgtatatatgtatattatatatgtatgtattatatgtatgtatattatatatatatagtacacaaggttataagtggtgcacccgaagaggagggcacttaccatgaatggagcttgctgagctggaagttgccctggttgagtcggtgactgaatgtgaaggcctcagacattacactactggagactttataatctgtacacctaggctacactaaatttataaaaatatatttttcttcagaataaatcaaccttagcttactgtaactttataaactttttacttcgactgttgtaataatacttagcttaaaacaaacacattatttagctgtacgtaaatattttctctgcttatctccttatttataagttttctattttaaaattttttaatttttttcttaaaaaatttttttttgttaactaagacacaaacacagcacacacagtagccttgacctacacagggtcaggatcatcaagacatcactaggagataggaatttttcagctctgttataatcttatgggggccaccatcacatacgcagtctgtacttgcaaaacattatgtggcatgtgactgtaattgtagacctaaaatccatttcctacctgccctaatttcggtctttattttaaacccttgtttcatttattcttggggaaaattcccaaatcctgtgtttgtttttttagtaattattttgccaaagaaacataagaagaaaaaggagcggaagtcattgccagaagaagatgtagccgtgagtagtaatgtgtttgacttcactttgactaaaaagaaagtttacttaaataacaaactaaaggaaagaagtgtttttaaaggtttccaaggaatgggccagcattggtagtcattgtgtagattcgaaaaagcactgaaatgacacagccccagacagtccaagtgtccttcaggcatagcttactaaatggtgctggccttaccaactgctgtctctgaatttgtcttccttatgccacccacagacccgccatccccctttctctttaaatgtttggacccatcttagtgacatttcacttcccctctgtactcctggttcatttcttctctctctttcccttggaggtcccagtgaaaaggcataggaagccttgttttctgtttaaaaggcatacatttccatggcagtaatggaattgttcaaaatcgggtgggaagtttaataggttatatttctgtcctgtcgaaggaaatacaacacgctgaagaatttcttatcaaacctgaatccaaagttgctaagttggacacgtctcagtggccccttttgctaaaggtatgtggttaaaatcgtgcatcagatgaatgcctgcttttacgttatttccaagtgttaaacaattgattgagaatgcttactgctggcatccttgactttgggaagtgcccactgatacagtttaaagcaggattccttaaggtatctgaaatgagaaccaagtttttaaaaaattggcagtgcactcaacactgttgtagaacacatgtccccacaatgttaaattgctgagtttgtcaacagttctcagtttttgtacttagtccatcttgcagacctatgccagtttgtgggccacatagtggtactgactctttttttacatgtgctcacgacatggtattttgttttgtgttgtgtcgttgctttgtagaattttgataagctgaatgtaaggacaacacactatacacctcttgcatgtggttaaaatcctctgaagagagagattggggactatatcaggtaagtgttgggaggaggcactgtgcaaacttactttcttttgaaaatgctttcacatcagctattcaggaaggcagtggcatgccagaatagctttgtcttgaatatataacctgtacccgcagtgaattatttttctttttaacttttcagatttgttgtttcactggagcattaagagtgggtgatacattaattttttttttttccattccaggacaggtttcattaatcttgacaagccctctaacccctcttcccatgaggtggtagcctggattcgacggatacttcgggtggagaagacagggcacagtggtactctggatcccaaggtgactggttgtttaatcgtgtgcatagaacgagccactcgcttggtgaagtcacaacagagtgcaggtatgtgggagagggagggaaggactggctagagtgaaaagctttctgtatttcccttctatgttttgtctgctggaaactatttcttcattaagaaaaaaaaaaatcctaaagcaaggatattgttttggtttctgtgtacgttctgtcccctgccagatcttggtggtccgcgctttttggaattccacatactaagcatgtattcatcaagctgactggatccatttgtccgggttcagctctcagcttgtcactccaggcttctcactctgtgctaccgcttctgcctaaagtatccttcgttcatttttatctgagaaaagcctgcttatcttgcaaggctttttccacgcagcttctacactgagtactcccaactgtccctgttagtacattgaattcccagtgagaaagtgtcttcattctttcccacatcatcaccatgaaatctctcttaatgcaaattttatagaaacacaaggtcaaactgccgcttttcctgctgtgcaaaatgggagtgactgagcatataagaaatatggaaaacagaaaactcagtggccacacctgactactcttttgtcatttttcaggcaaagagtatgtggggattgtccggctgcacaatgctattgaaggggggacccagctttctagggtaagtctgcaattgtagggaggacaccctttgttgacttggatctctgagcccctaaacatctggagatgggttagctgtcctgactgactccttttgtccccttttcagtcggctgctgcagccagcctggaccagtgactgcacatgtacattctgatgaggtgtttgttttcatttgtgtttgttcttaggccctagaaactctgacaggtgccttattccagcgacccccacttattgctgcagtaaagaggcagctccgagtgaggaccatctacgagagcaaaatgattgaatacgatcctgaaagaagattaggtgagtcattaggcctgtgagtgggtatgaacacattcttcaggattctgttctcttattaaaagtagatgcccttgaagttgaagactttctaaaacctgccctacagctgggatattgtctgtgggcgatagtttttgttatcttttgttgaaaaagtgaacagtgcctagtaaagtgagatggcttttacaccttttatgatgactgcttctgctggagttgaaatgttttcattctgcatttgtgtagttcggtgctttgttcaaaggtaagtgttttcaccaaagtatgttttgcatgtgttttttatttgctgcaattttgactgcttagaagtttctgttgtcagaagtaaatttaagacaatgccaattttcctcccatccatgaaacataccatgctgaatatacctgcaacttaagtgttaaaaattctgctaatatcagaattacagatctttttttttttttttttttttttgagacggagtctcgctctgtcgcccaggctggagtgcggtggcatgatctcggctcactgcaaactctgtctcccgggttcacaccattttcctgcctcagcctcccaagtagctgggactataggcgcccgccatcatgcccggctaattttttgtacatttagtagagacggggtttcaccatgttagccaggatggtcttgacctcctgacgtcgtgatccacccgcctctgcctcccaaagtgctggaattacaggcgtgagccaccgtgcctggccagaattacagatctttacagcaaatgcttatattttaagaagtgtgtctgtcacctctagtcttggtggctcagatgaaggataactgcatttctcaaccagtgatgtatttacagtaggtgctgcttttcttttgtgtgtgtgtatcttaggaatcttttgggtgagttgtgaggctgacacctacagtcggacattatgtgtgcaccttggtttgttattgggagttggtggtcagatgcaggagcttcggagggttcgttctggagtcatgagtgaaaaggtatgtgttacggggctagaagttttagagctggttcttaccatctgccagcctttgatggcactccacttgcttcatgtcgtgggaaagatgctttccaaagtgttgagttcagtccagggcagcttccctgttctgttaattaaactttgggacattaaaatgggctaagggagatgattgggtagaaagtattattctattcatttgcctcccagcctacaaaaatgcctgcttggggtctaatacttcaacggttaaagatgcctggaagagggcgcggtggctcacgcctgtaatcccagcactttgggaggccgaggcgggtggatcatgaggtcaggagatcgagaccatcctggctaacaaggtgaaaccccgtctctactaaaaatacaaaaaaaattagccgggcgcggtggcgggcgcctgtagtcccagctactcgggaggctgaggcaggagaatggcgtgaacccgggaagcggagcttgcagtgagccgagattgcgccactgcagtccgcagtcccacctgggcgacagagcgagactccgtctcaaaaaaaaaaaaaaaaaaaaaaaaagatgcctggaagagccaggactgaagaggctgaaaacataatgagcttggactagtaaacaagtgacattcagttttaggaagtttggggtctgatgggctgagatacaaataaactgaattattttcatacatggctgcttttcaggaccacatggtgacaatgcatgatgtgcttgatgctcagtggctgtatgataaccacaaggatgagagttacctacggcgagttgtttaccctttggaaaagctgttgacatctcataaacggctggttatgaaagacagtgcagtaagttccgggttaggagtttatatttggaaagaacgtactccaaagatgacgcttgctctttttattgttttccttgggttttattttatttttttcaagtccaaaccaagtatattaatttaaagtaaaagtttaatggtaggcatacttaaaaataaggcacattaggccaggcacagtggctgatgcctataatcctagcactttggcaggctgaggcaagaggatcacttgagtccaggaaggagtttgagaccagcttgagcccaggagatcaaggctgtgagctgtgtttttatgatgatcagagagttggccttttataaattaaaacattgtctttttctctaacttgagggataaaaatttctggatatttaaaatgtttgtagttggtaattatttatattcaaatcttgtatagatgttcacattttttgtatgtgtataggctgtaataaatactgaaagatggcaccataatagttgaaaaaactcagtcacaaaacagtggacaacataaatgtgatgtcctctccttatcaaaccattggcttctgggtgaatgtaaagggaggggagaatgtgatcaaaagaggtctaggtgagtggagatggtatgaggcagatgggtgcattgggtaccattgaacctctggagaggtagccttaacttgtacccactgacctataaattctgcaccaagacttttgtgtgattggttcaacagggctcagtaatcttgttctcaagttctttaagagcctgttattgcctggatctccagtaaatctgttctttctcctcataaggaggagagaggagtaattaaggaatgccaaggctatttttatgtttcaaatgaaaatatggaccacgtgcggtggctcacacccataatcccagcgctttgggaggccgggccaggcaaattgcttgagctcaggagtttgagaccagcctgggcaatatggtgaaaccctgtctctattaaaaatacaaaaattagctgggcgtggtggcacgtgcctgtaatcccagctccttgggagactgagaatcacttgaacttgggagatggaggttgcagtgagccgagaatgtgccactgcactccaccctggacaacagagggaggttctgcctgaaaattaaaaaaaaaaaaaaaaaaaagaaaatacttgtgagtctctagaacctgaaaacctgaaagtcttctttactacttttgagtcgtgtgtaatgtgcggagagtggtacctatagcacagtgaggtggctcttctgagtaccactcatgccccttgcagctagtgggctataagtgtcatccctgtttcctggtgtcaggccccactcccttgttgtcctcctttactctggtgtgggagtggggtggagggcagcagctgggccccttacacttggtgccatctctgcaggtaaatgccatctgctatggggccaagattatgcttccaggtgttattcgatatgaggacggcattgaggtcaatcaggagattgtggttatcaccaccaaaggagaagcaatctgcatgggtnagaggggatgtttatttcccaaattctaaatgtttgtggttacatactaggtgtatatatttatggggttcatgagatgttttgatacaggcatgcaatacataataatcacatcatggagaatggggcatccatcttaagcatttatcctttgtgttacaaacaatcctattttactgttagttatttatcaccttagttattttaaaatatacacttaagttattattgattatagtcaccccgttgtgctattaaatagtctcactcttcttgttcattcttttggttttttggtggtggtgttttttttttttttttttttttgagacagtcttgctcttttcacccagactgcagtgcagagacgtgacctcggctcactgcaacttctgcttcccaggttcaagcgattctcgtgcctcagccttccgagtagctaggattacaggtgcacaccatgacacctggctaattttttgtatttttagtagagacagggttttgtcatgttggtcaggctggtctcgaacttctgacctcaggtgatctgccctcccaaagtgctgggattacaggtgtgagccaccatgccgggcctgattttttttttttttgtacccattaaccatccctacctccctgccagccccccactaccctcccagtctctggtaaccattcttttactcttctctgtccatgagttcaattgtttcgattcttagctcccacaaataagtgagaacatgcaatgtttgtctttctgtgactggccgattacacttaatataacgatcttcagttccatccatgttgttggaaatgacaggatctcattcttttttaaggctgaatagtaatccatcgtgtatatgtaccacattttctttatccatttatctgtcgatgggcacttcggttgcttccaaatcttggctactgtgatctctttgataacactgatttcctttatttggggtatatacccagcagtgggattgctggatcctatggtagctcaatttagtttttcgaggaacctccaaactgttcttcatagtggttatactaatttacattcccatcaacaatgtacaaaggttcccttttctccacatccttgccagcacttgtcattgcctgccttttggatataaaccattttaactggagtgaaatgatatttcattgtagttttgatttgcatttctctcgtgatcagcattgagcactttttcatatgcctgtttgccatttatttgtcttcttttgagaagtgtctgttcaaatcttttgcctgttttttgatcagattattagattttttttcctatagtgctgagttccttatatattctggttattaatcccttgtcagatgggtagtttgcggatattttctcccattcttatgcatatggatatctagttttcccagcaccatttattgaagagactggtttttacccagtgtatgttcttggcacctttgtcaaaaatgagttaaatgtaggtgtgtgcatttgcttctgggttccttattctgttccattggtttatgtgcctgtttttatgccagtaccatactgttttggatactgtagctctatactataatttgaagtcaggtaatgtgattcctccaggtttgttctttttgcttaggatagctttggctattttgagtcttttgtggttccatgtaaagtaccagtgttttttaacttgtgaaagcttagctactgttggattgtctcttaagactttaaatgctctgcgcaccctcttagtgaatgaaccttagagctattcatttaatgggtctaatttgtaccagaagtaagcatgtcatcaggattccttagctctgtgagcaggcaaggcagccacggcttatggacagcagcagaaaaggaatccttaaaacttcaaaggttctgtggccccaaagggagtgtgcatgccgttcttatagacgtcttgagctgcaagcctgttatgtgtatcgttaggtgctttggttaggtgttttttaacttcagaagtttaacgtcatttcaaaggcctccttctcataatggagtatttcctccatatgcacatcctgagcaaaggtaaccccaattaaagtagtagctcagagttttaaaagttttaaagtggcatacaacagtagaattggggctcatcaattatcaattctttcacccttcaaataattcttttctttattcaatgcctgtagctattgcattaatgaccacagcggtcatctctacctgcgaccatggtatagtagccaagatcaagagagtgatcatggagagagacacttaccctcggaagtggggtttaggcccaaaggtaagtggtactgggttgcgtgccctgccaggttcttttttttttttttttttttttaaatttatttttttattgataatttttgggtgtttctcacagagggggatttggcagggtcataggacaatagtggagggaaggtcagcagataaacaagtgaa

SEQ ID NO: 6351 - DNA, 578 bp, Homo sapiens
  SIMILAR (1)..(342): 891254mologous to Homo sapiens unnamed protein product,accession number AX061647,Smith-Waterman Score=599.
atggacaagtccctcttgctggaactccccatcctgctctgctgctttagggcattatctggatcactttcaatgagaaatgatgcagtgatagaaattgttcagtgtaggatgtgccacctccagttcccaggagaaaagtgctccagaggaagaggaatatgcacagcaacaacagaagaggcctgcatggttggaaggatgttcaaaagggatggtaatccctggttaaccttcatgggctgcctaaagaactgtgctgatgtgaaaggcataaggtggagtgtctatttggtgaacttcaggtgctgcaggagccatgacctgtgcaatgaagacctttagaagttaatggttcttctgtgactccaatttctgggtgaggttgttgcctcagcctcttcacaatgactttctaaaaaaaatcacacacacacacacacacactacagaagaggattgcaaacacatggctccatcttctgcacacgaaaggaaagtccctctccttttctacagtctctgtcacgccccttaaaataagtaaataaataaccttgagagaaaaaacaagaaaa

SEQ ID NO: 6352 - DNA, 856 bp, Homo sapiens
  SIMILAR (3)..(221): 931254mologous to Homo sapiens MLD,accession number AF002668,Smith-Waterman Score=374.
attatgggcctctgaatttacttacctttaatgtgttttatcataatgaacatcatgatttgcccaacattcctggaaaaagtcttccactggtgaggaaaatagcagctgaatactatgacaacctccctcactacaattcctggataaaagtactgtatgattttgtgatggatgatacaataagtccctactcaagaatgaagaggcgccccccaggcagagatggcgctggacctaatatcattattgccctagggattcttctccaaaactttagatgataaaatggagcttttgcattattaaacttgagaccagtgatgctcagaagctcccctggcacaatttcaaagtaagaactcggtgatcccaataagtgaatctggcttttaaacagtcagcctgactctgtactgctcagtttcactcacaggaaacttgtgacttgtgtattatcgtcattgaggatgtttcactcatgtctgtcattttataagcatatcatttaaaaagcttctaaaaagctatttcgccagggcacggtggctcatgcctataatcccagcactttggggaggccaaggtggggtggatcaccttgaggtcagtagttcgagaccagcctgggccaacacggtgaaaccccatctctacttaaaaaatgcaaaaattagccgggcgttggccggcacatggcctgttaatccccagctacatgggaggctgaggtgggagaattgcttgaacccagggaggcggaggcagaggctgcagtgacccaagattgtgccactgcacttccaccctggggcaacagagcaagaccccatctcaaaaataaataaatatatat

SEQ ID NO: 6353 - DNA, 517 bp, Homo sapiens
  SIMILAR (517)..(311): 1001254mologous to Homo sapiens Amino acid sequence of a human secretory protein,accession number AAB08867,Smith-Waterman Score=406.
ttttatgttttacaatttgtatggctgattctacgcacgtttaaatgtgtttatgacaattgtagatttcggttttcctctggttaaaccaatgtggaagtacacaggatgggagctgagagacaagcatcctgggctcagccatgctggcctcagtgggccaagctggggacagatgtcctctgctccgtggatcctgctggctcagggtggggaaggggcctcaggagaggagtcaggctctcttctttattctcctcacagccatggtgaatggcattcctgggaggctggtttggagaactcgctgaaccatgctctgcatccagtctaggtggctcctagcggggcttggtgggttctccatcctcagcaccatctgcagcaccatcttggtcatctgagaagcagggttgcagaggacactgtggtctgggtggcagtctggtgccacatggcagaattcatcacagtagcaacttcccctcttgcagtggtgatccgtcccaagacagca

SEQ ID NO: 6354 - DNA, 450 bp, Homo sapiens
  SIMILAR (333)..(449): 641254mologous to Homo sapiens dopa decarboxylase,accession number M88700,Smith-Waterman Score=146.
cggcacgaggctgtctcagtgccgagtgcctcagcagcttctccacatgctcttcagtccccaaagttggagaatcccatcaaggagagtagccctgtaaggaattcgaatttccagcatttttcacctgtgacagagcccagactccatgaacgcacgtgaattccgaaggagagggatggagatggtggattacgtggcctactacatggaaggcatcgagggactcctggtctaccctgacgtgtagcccgggtacctgcgtgcgctgatccctgccgctgcccctcactagctagacacgtgtgaggacatcatcagcgacgctgacgaagattatcatgcctggcttgtcgcactggcacagccccgacttgttcgtctactttgacagtgtcagctcgtacgcgcgcatgcttgaagacatgcagtgcggggcccttgactgct

SEQ ID NO: 6355 - DNA, 418 bp, Homo sapiens
  misc_feature (1)...(418): n = a,t,c or g
tcagatgtttagcagaatgcccctaatgtggatttgtctgattatttcctcatggttagattcagattaaacnnnnnnnnnnnnnnnacaaaagcccacttgcatgaggctgggggggccttttaattgcaaggcctccatttaaaaggggaaaaagttcggggccggtggggcatttaaagcctaggggggtaggggggaggaggggatagaatgttaatttatgccccaaatcctcaaatccccaaggggggttgggggaaaggcccagggagctgagggataaagccacagtttcagccctggcaaatttcactgccaggaagggctgctgactgcggggccctgagggggggcagccagggccgaggggcaaactttttccaaaaggagttccaggggttcaggggcagccatt

SEQ ID NO: 6356 - DNA, 546 bp, Homo sapiens
gactttactcacagagttcttttcacagcctgaatgtgtttgcaaccaagttcttcactgtggcatttgtaaaactggaaacaatcaaaatgtccatcagtaggggattaggaacattaattcgtacagtggggaactcagtaccagaaggagggatgaggaagacctattgataaggggcagagtacataccatataatgcaaatatatatttgctttttcttaaaacagtgcaaagataaaagtctaaagtggttgctgtggaggacaggggtcagtggtggaagtgagaccgaaatagactctgaagtaatatctggactttgaaattgttaagtgttttacatattaccaaactaagtttttaagatagtccctaaaattgaaagaatggtatctgaaatgaatgaatctaaattccttggattgcattctacaggcgccaaccctgagaccaaaatttggaaggtggccctgagcagcagctgaagggaagtgggaggtgagacaggaaagaggcggcggcatggggcgtccgggagccgg

SEQ ID NO: 6357 - DNA, 655 bp, Homo sapiens
  SIMILAR (265)..(351): 891254mologous to Mus musculus putative,accession number AK004362,Smith-Waterman Score=142.
cggaattcccgggtcgaccagcgtccggagaatctggtacagtgtcattttcgttgctctgttccactctaccgatctgccgtcatttacagtcccctgttgcgcatgtagatcatttttgaatttgttattggaaaatactgcagcaaataccttaaagttcacatgccgtaaatctacttttatagttaaaatttttcaaaaggaacacaagagatggctttttgtacatttttgtgcttaacttaccactgacttcttttcaaggtcactgtggaatatagacccataatcgacaaaactttgaatgaggctgactgtgccactgtccccccagccattcactcctactgatgagacaagatgcggtgatgacagaatcagcttttgtaattatgtataatagctcatgcatgtgtcaatgtcataactgtctttatacgcttctgcactctggggaagaaggagtacattgaagggggattggcacccagtggccggggagcgtggcactttgtcccttgcttcattcttgtgacaagataaaactgggcacagctcttaaataaaatataaatgaacaaactttcttttatttccaaatccatttaaaatattttactgttgtgactttagtcatatttgttgacctaca

SEQ ID NO: 6358 - DNA, 2108 bp, Homo sapiens
  SIMILAR (1240)..(1359): 821254mologous to Homo sapiens Amino acid sequence of a human secretory protein,accession number AAB08867,Smith-Waterman Score= 155.
gttccgattcatgagttcgatcactctatgcccttccgtgggcacagaaagaagccctttggggggcactgggggaagcacaccctgtcctatgtggacgtcagcactgggaaggtcactgtgaaatgtagacccataatcgacaaaactgtgaatgaggctgactgtgcccactgtcccccccagcccattcactcctactgatgagacaagatgcggtgattgacagaatccagctttttgcacagcccagagaaacaaccccatcacacacaagaaacagttgtgcctcatgtgatggggccctcagcacctaggaaggagtggactgttggcgcacgcagcagcttgaataaatctgaaagtcacctacgctgcgtaagagaagccaaatttaaaaagtgcatgctgtggtacagagggtgtcgagaatgcctcctacgtgacggaaagcagatccgtggttccctgccagactggcaggagcagattccaaaggcacaggaagaagcttgcagtacaaagataaaaatctaaagtggttgctgtggaggacaggggtcagtggtggaagtgagaccgaaatagactctgaagtaatatctggactttgaaattgcagctgctcccaaccccagaacctttgctgtcttgggacggatcaccactgcaagaggggaagttgctactgtgatgaattctgccatgtggcaccagactgccatccagaccacagtgtcctctgcaaccctggtaactcacatacaggcccgattccaccgacagcaaagctggatgcgatggctggcagaggcaaaccctttgcctgcacttcaggccaaagccgggatgtggcctagatggttcctaaggtccctgacaatcctgagatcttgcatcttgtctatttcaggtcaaaggtgcctacatgctccttctagctttgtttccctgatgttccttgccacctgctactcctctctgagctacttttccaggttccacagggagaggttcatgctgtccgtggtagacatgagggtagagaatgaggtggttgggttccacttacctttctatcatcttgcagtatggatgtctcttgactggtaccgtgtagacttttgagggcacacagggagtctgcagagagatactgggggacattgaggcagcagcagtgggggttgggagggcagaaaatgagggacagggaacatttaccttgtgtttctctcagcttctcagatgaccaagatggtcatctgaagaaagctgaggatggagaacccacccaaagccccgcttaggagccacctagactggatgcagagcatggtgagctccctgcaggttctctgagaaggggtggatggcagcctgctccttgcctttgtgccctccaggccccaaagtcagggaaccaaaagaagaaaggggccgtagctagggcagagctccactgcaatgattgttttaggggtaggagccaggattgccgtctgtggacactgaaatttgaatctcatatacttttgtgacaaaacattcttcctcttttgttcttctcctaccatctaaaaatgtagaaaacattcttagcctatgagttgcacaaaaacaggcagtggccagatttgggccccaaagacccatagtttgctgacttctgccctaaatcatccctcccatttctttccttctgtgtccttgttactgacaaagccactttccctaaaatggggtctttccctgtttggtgccatgaagccaatatgcaaaaccgaaagtgagcctcaagcagtgcaggctttatttggtggccatggaattgagaagtgagagcttggctcacaaatcaacttttctgctcgtgagacccaggaagtcacagatacagggcatctttagtgaaggggctgagcattaaaagcaaggggaggagtggccaggtgcaatggctcactcccataaacccagaactttgggaggccaaaatgagaggattgctgagaccaggagttcgagaccatcctggtcaacatagtgatacacccccatctctacaaaaataaaaatgaaaaaagcaaaaaaaaaaaacttaaaaa

SEQ ID NO: 6359 - DNA, 298 bp, Homo sapiens
cctgttggccagactggtctcgaactcctgacctcaggtgatctgacagcctcggcttccctaaatgctggcattccgggcatgagccaccatgcctggctgaaacttttctagacatacaaaagtgagaatatgcatcccctgcagagctgcacatcatgaaaagtgaaaggaagtccttcccacagaagagcaatggtagcaaaagggaatctgactctacatgagagaatgaagagccctggaatcagtaactacatgggtaactacaagatccttttttcctattttaaaaaaa

SEQ ID NO: 6360 - DNA, 1735 bp, Homo sapiens
  SIMILAR (1)..(1338): 951254mologous to Homo sapiens Human SOCS15 protein,accession number AAW93272,Smith-Waterman Score=2264.
atggaggccggagaggaaccgctgctgctggccgaactcaagcccgggcgcccccaccagtttgattggaagtccagctgtgaaacctggagcgtggccttctcgccagacggttcctggttcgcctggtctcaaggacactgcgtggtcaagctggtcccctggcccttagaggaacagttcatccctaaaggattcgaagccaagagccgaagcagcaagaatgacccaaaaggacggggcagtctgaaggagaagacgctggactgtggccagattgtgtgggggctggccttcagcccatggccctctccacccagcaggaaactctgggcacgtcaccatccccaggcgcctgatgtttcttgcctgatcctggccacaggtctcaacgatgggcagatcaagatttgggaggtacagacaggcctcctgcttctgaatctttctggccaccaagacgtcgtgagagatctgagcttcacgcccagcggcagtttgattttggtctctgcatcccgggataagacacttcgaatttgggacctgaataagcacggtaagcagatccaggtgttatccggccatctgcagtgggtttactgctgctccatctcccctgactgtagcatgctgtgctctgcagctggggagaagtcggtctttctgtggagcatgcggtcctacacactaatccggaaactagaaggccaccaaagcagtgttgtctcctgtgatttctctcctgattcagccttgcttgtcacagcttcgtatgacaccagtgtgattatgtgggacccctacaccggcgagaggctgaggtcacttcatcacacacagcttgaacccaccatggatgacagtgacgtccacatgagctccctgaggtccgtgtgcttctcacctgaaggcttgtatctcgctacggtggcagatgacagrctgctcaggatctgggctctggaactgaaagctccggttgcctttgctccgatgaccaatggtctttgctgcacattttttccacatggtggaatyattgccacagggacaagagatggccacgtccagttctggacagctcctagggtcctgtcctcactgaagcacttatgccggaaagcccttcgaagtttcctaacaacttaccaagtcctagcactgccaatccccaagaaaatgaaagagttcctcacatacaggactttttaagcaacaccacatcttgtgcttctttgtagcagggtataatcgtcctgtcaaagggagttgctggatataatgggccaaacatctggtcttgcattgaaatatgcatttctttgggattgtgaatagaatgtatcctactcctgattccagtgtactagttatggatctttctctccctggcatgtgaaagtcagtcttagaggaagagattccacttgcacggcaacagagccttacgttaaatcttcagtccagttatggaacagcaagtgttggaactctttctgcttgttttgattcaaagggcagttactgatgttgttttgattatgcaactaagtaggcctccagagcctctctagtggcagagcagcttacacctccctccgttgagaacgatggcttctgcctagtacctatccttgtgtttctgatgcaggggtagcattggttcaagttctctcctgctgtggtcagagttgcttcgatgttggccaagtgcttttcttcttgggctccc

SEQ ID NO: 6361 - DNA, 429 bp, Homo sapiens
  SIMILAR (15)..(143): 1001254mologous to Homo sapiens plasminogen activator inhibitor 1,accession number X13338,Smith-Waterman Score=211.
gttttcggcacgagcaggcctccaaggaccgcaacgtggttttctcaccctatggggtggcctcggtgttggccatgctccagctgacaacaggaggagaaacccagcagcagattcaagcagctatgggattcaagattgatggtgagccacgggacaccaggggaggtgggtggcatgcagaacagacctaccagaagccaaggaaaggctggctctggcttagccgagccaagccccatacagctgtgctgcaggggccaccccatcttcttcccactacactccaagtcactggacccttgaatctccaagggtgtctgaccagtagatttaccgcttattcaccaccgtgtgatcttaacctcgttaagtttgcccatctacaaaatgaggattatttgctgtcctaaagaattcatgagccgg

SEQ ID NO: 6362 - DNA, 1588 bp, Homo sapiens
  SIMILAR (542)..(1387): 961254mologous to Homo sapiens PAI precursor polypeptide,accession number X12701,Smith-Waterman Score=1383.
  misc_feature (1)...(1588): n = a,t,c or g
gaactgaggctgatttgacgtcgtagacgcccgaacacgcgtncggccaagagcgctgtcaagaagacccacacgcccccctccagcagactgtaattcctagcagcgtaagcagaccgccgccagagcgaggagcgaaccgacaatcgcaaggcacctctgagaacttcaggatgcagatgtctccagccctcacctgcctagtcctgggcctggcccttgtctttggtgaagggtctgctgtgcaccatcccccatcctacgtggcccacctggcctcacacttcggggtgagggtgtttcagcaggtggcgcatgcctccaaggaccgcagcgtgggtttctcaccctatggggaggactcggtgttggccatgctccagctgacgacaggaggagaaacccagcagcagattcaagcagctatgggatacaagattgatggtgagccacgggacaccaggggagacaagggcatggcccccgccctccggcatctgtacaaggagctcatggggccatgggaacaaggatgagattcagcaccacagacgcgatctttcgtccagcgggatcttgaagcttggtccagggcttcatgccccacttcttcaagctgttccggagcacggtcaagcaagtggacttttcagaggtggagagagccagattcatcatcaatgactgggtgaagacacacacaaaaggtatgatcagcaacttgcttgggaaaggagccgtggaccagctgacacggctggtgctggtgaatgccctctacttcaacggccagtggaagactcccttccccgactccagcacccaccgccgcctcttccacaaatcagacggcagcactgtctctgtgcccatgatggctcagaccaacaagttcaactatactgagttcaccacgcccgatggccattactacgacatcctggaactgccctaccacggggacaccctcagcatgttcattgctgccccttatgaaaaagaggtgcctctctctgccctcaccaacattctgagtgcccacgtcatgagccactggaaaggcaacatgaccaggctgccccgcctcctggttctgcccaagttctccctggagactgaagtcgacctcaggaagcccctagagaacctgggaatgaccgacatgttcagacagtttcaggctgacttcacgagtctttcagaccaagagcctctccacgtcgcgcaggcgctgcagaaagtgaagatcgaggtgaacgagagtggcacggtggcctcctcatccacagctgtcatagtctcagcccgcatggcccccgaggagatcatcatggacagacccttcctctttgtggtccggcacaaccccacagaggaggctaccttctatcacccacagacagtgccgggtccccgctctgtgactcaggcagctgcgactccagacagctcactcatctgcctagatctcagtccttccacccacatccagcctgatgagctgtcccactccttctgcttctcaacccccatggttcttccaccctcaggaacagtccttttcatgggccaagtgatggaaccctga

SEQ ID NO: 6363 - DNA, 802 bp, Homo sapiens
  SIMILAR (2)..(277): 701254mologous to Homo sapiens Human myelin oligodendrocyte glycoprotein gene,accession number AAZ29204,Smith-Waterman Score= 336.
ttttttttttgagtctcactctgttgcccaggatggagtgcagttgtgcgatctcagcttagtgcaacgtccgcctcctgggttcaagcaattctcctgtctcagcctcccaagtaggtgggactacaggcacacgtcaccacacccagctaatttttgtatttttagtagagatggggttttaccatattggtcaggctggtctcgaactcctgacctcaggtgatccacctgcctcggcctcccaaagtgttgagattaaaggcatgagccacctcgtctggccaaagcctgaggttttaaggcactacacttaacagcttataaacacataaagtaacaaagggtaacagagtgggacacgtgggtgccaggggccctctaaatgggaagcctatacaggctcagaaaccatgaagatctcctggttctttctaaagaaaccagaagagcaggttttagcagcataaaattttaaagaggcccatcaaatcaaatagtctggtatctatactccccgttgtctctctaaggttggtcaccccacacccacgtctcttcccctgaggccaagaacccaggagtgaggttgaatgacattatctggttcaagccactccttttactcacaggcacagtgacagaaaagggcctggccctaagtcacacagcgcaggcaagcagtcaaaccctgatattccaggttggcagaagggaggcagcctttacctcctgcctgactctccatctactcactcaccggaccaacgatgtcagagacatgggagaccgtggtgcccga

SEQ ID NO: 6364 - DNA, 393 bp, Homo sapiens
ttttggtttgtttcctttaattaaatctcaaatttacaagagtccagactgtctggacagcccaacagggacacagagagttttacacactgatgtctcaacagcacagggttccatcgggacttcgtgagaaaatcaggatccatgtacgttcttgaagagctgtctctcggcctaagataagtggagaaggttgccttggaagcgtggggtagaggtaggaacagctggctctctggccaaggcctttggctttttcgcggaagcaaaaaccgaaccacgggaaggctgctccgagtctggggtcagaatttcctatcagtgagtgcagcagacaaattccaaatgtctcaaatactgaatggagccagctagacctaccttctcaccaag

SEQ ID NO: 6365 - DNA, 410 bp, Homo sapiens
  misc_feature (1)...(410): n = a,t,c or g
aagtcgtggtaccacccgagatgtgtgnnnnnnnnnnnnnnnnnnnnnnnnnnnnnnnnnnnnnnnnnnnnnnnnnnnnnnnnnnnnnnnnnnnnnnnnnnnnnnnnnnnnnnnnnnnnnnnnnnnnnnnnnnnnnnnnnnnnnnnnnnnnnnnnnnnnnnnnnnnnnnnnnnnnnnnnnnnnnnnnnnnnnnnnnnnnnnnnnnnnnnnnnnnnnnnnnnnnnnnnnnnnnnnnnnnnnnnnnnnnnnnnnnnnnnnnnnnnnnnnnnnnnnnnnnnnnnnnnnnnnnnnnnnnncacaatggaatatcgggatttcattatttggagaatcaggaaccaaccagccaaccatgttgcttttataagacagagctgagaaagcaaagcttggctgtcgtcttggctctg

SEQ ID NO: 6366 - DNA, 396 bp, Homo sapiens
  misc_feature (1)...(396): n = a,t,c or g
nnnnnnnnnnnnnnnnnnnnnnnnnnnnnnnnnnnnnnnnnnnnnnnnnnnnnnnnnnnnnnnnnnnnnnnnnnnnnnnnnnnnnnnnnnnnnnnnnngggcccaaaatttgcccggcctggggggtccccccctgtaaccctgccctttgggggggttgaaacgggttaatcccctgaaataaggatttaaaaacccccctgcccagggggggaaaccccctttttttttaaaaatacaaaattaacccacccttggggggggcccccttaatccccatttcctaaggaggttggggggggaaaatttttgaacctcggagggcaaaggttttggggacccaaatttggccctttgttctccgccaaaacaaaaaaagggacttcttttttaaaa

SEQ ID NO: 6367 - DNA, 1109 bp, Homo sapiens
  SIMILAR (8)..(160): 581254mologous to Homo sapiens PRO1902,accession number AF118082,Smith-Waterman Score=163.
tcccgcctcagccccgggtagctgggactacaggtgtgtcacgagcaccacccgtgctaatctttgtattttttgtagacagaaggtctcaccatgttgcccaggatggtctcgaactcctgggctcaagcgacctacctacctcggcctcacaaagtgtgcacattgtaatatcgtgatttcatatttggagaatcagcaaccaaccagccaaccatgttgcttttataagacagagctgagaaagcaaagcttggctgtcgtcttggctctggtaccacccacgagatgcgggcgattctcagctcagggcgtggaggcgtggtgtgggggagtctatttgccatttttgtttgtcagcagggggcaggggttctcaaagattgcaaaatgctgctgcaggtcaggaaggatattttgggtgcctgtgggggaggtgaaacaaggtcccatgacatgttttgcagaaccttgtctgtggagggtagaggttgcggcaggggcctgtgggccttacttggtgagaaggtaggtctagctggctccattcagtatttgaagacattttggaatttgtctgcatttaaaaccaagagatcacacacacctgtctggatttggagtttctcttggaaaactcgccagtccggccgtctgagcctgcaatgaagccctggtgaaagctgtgcaggggccgcccctctcccctttgggccaaaaatcctctcccaaatccctttcggcctctcccctggcctgctgcactcacttgataggaaatttctgacccccagactcggagcagccctttcccgtggttcggttttttcttccgcgaaaaaagccaaaggccttggccagagagccagctgttcctacctcttaccccacggttccaagggcaacctttcttccacttatttttagggccgagagacagctcttcaagaacgtacatggatcctgattttctcacgaagtcccgatggaaccctgtgctgttgagacatcagtgtgtaaaactctctgtgtccctgttgggctgtccagacagtctggactcttgtaaatttgagatttaattaaaggaaacaaaccaaaaaaaaaaa

SEQ ID NO: 6368 - DNA, 311 bp, Homo sapiens
  misc_feature (1)...(311): n = a,t,c or g
ccccnnnnnnnnnnccnnnnnnnnnnnnnnnnnngcagtgttcttgtttatttgtttactagttcatcnnnnnnnnnnnnnnnnnnnnnnnnnnnnnnnnnnnnnnnnnctcagctgtgtccaccatggtatcatgaactcagtaccaggcttggcaaaaagcgtgggactccttagaaccaggtatgattctcccaaacaacccttgctctgctctgaggctgtcgtactaatttgcaaagatctgagccgggggtggcagaagcctggtacccaggggattgggggctgatgagagacatgggaccagg

SEQ ID NO: 6369 - DNA, 1342 bp, Homo sapiens
  SIMILAR (329)..(1084): 321254mologous to Homo sapiens Protein polymer adhesive substrate PPAS1-C,accession number AAW49717,Smith-Waterman Score= 174.
  misc_feature (1)...(1342): n = a,t,c or g
cgctgtacccggcaaaactcagcgggggctggatagccatgcccaagtactggagggcgccgaactgctccaacactgggggccgcctgggtgcaaacaaccgccctgggagcttctacaagttcccactgaaggatggtccccggctgcaggcctggctgcagcacatgggctgtgagcactgggtgcccagctgccaccagcacttgtgcagcgagcacttcacaccctcctgcttccagtggcgctggggtgtgcgctacctgcggcctgatgcagtgccctccatcttctcccggggaccacctgccaagagtcagcggaggacccgaagcacccagaagccagtctcgccgccgcctcccctacagaagaatacacccctgccccagagccctgtctttccagtctctggcccagagcgcctagaggtgctgggccccacatcggggagccccaagactgtggccaccatgctcctgacccccctggcccctgcgccaactcctgagcggtcacaacctgaagtccctgcccaacaggcccagaccgggctgggcccagtgctgggagcactgcaacgccgggtgcagaggctgcaatggtgccaggagcggcaccaggcgcagctgcaggccctggaacggctggcacagcagctacacggggagagcctgctggcacgggcacgccggggtctgcagcgcctgacaacagcccagacccttggacctgaggaatcccaaaccttcaccatcatctgtggagggcctgacatagccatggtccttgcccaggaccctgcacctgccacagtggatgccaagccggagctcctggacactcggatccccagtgcataaggatcaagacagacaatgtcgagggacaaaagatagaagatggaggaggaaagacattatacgtgggcttggcccagccccaccgcccangccctgggtagtagcagtccctccctcaagggcctggggttataccaccccactcctagggatctcttgaaccttaggggtgacctgggcccaagtctctcatcagcccccaatcccctgggtaaccaggcttctgccacccccggtctcagatctttgcaaatcagtacgaccagcctcagagcagagtcaagggttgtttgggagaatcataacctggttctaaggagtncccacgctttttgccaagcctggtactgagttcatgataccatggtggacacagtctgagaaaaatccctgtccctcatggtgctcattctacttgagtagacgatgaactagtaaacaaataaacaagaacactgcagacatgaaaaaaaaaaaaa

SEQ ID NO: 6370 - DNA, 378 bp, Homo sapiens
  SIMILAR (9)..(149): 721254mologous to Homo sapiens Human transmembrane protein HTMPN-60,accession number AAY57936,Smith-Waterman Score=183.
ggcacgagggcccactagcactgggcttccacttggcctacatcaccatgaggcttttcttggccctcataatcaccaccatctaccactgtgagtaccaccttccctttctgacttcccctgaatgccacgactaccaccatattaagcaatgaccttctccccacaatgggtccctaagcaacaaacatgaccctccctccttaagcttatgataacacgcactggcatctcaggttacatgccattgctattagcagaacatgcctcatgggtgcgaaaataaccacactgggatgaccctactcttttacttctgaaaatgtgtgcttctccaactgggggtgttaaacctttatttggactctgggccctttc

SEQ ID NO: 6371 - DNA, 398 bp, Homo sapiens
  SIMILAR (25)..(120): 1001254mologous to Homo sapiens gamma fibrinogen type A (AA at 202),accession number K02569,Smith-Waterman Score=168.
  misc_feature (1)...(398): n = a,t,c or g
acccgggtcgacccacgcgtccggaagaaaaccactatgaagataatcccattcaacagactcacaattggagaaggacagcaacaccacctggggggagccaaacaggctggagacgtttaaaagaccgtttcaaaagagatttacttttttaaaggactttatctgaacagagagatataatatttttcctattggacaatggacttgcaaagcttcacttcattttaagagcaaaagaccccatgttgaaaactccataacagttttatgctgatgataatttatctacatgcatttcaataaaccttttgtttcctnnnnnnnnnnnnnnnnnnnnnnnnnnnnnnnnnnnnnnnnnnnnnaaaaaannnnnnggggggcctccacctccccct

SEQ ID NO: 6372 - DNA, 891 bp, Homo sapiens
  SIMILAR (102)..(167): 681254mologous to Homo sapiens fibrinogen gamma chain,accession number M10014,Smith-Waterman Score=69.
  misc_feature (1)...(891): n = a,t,c or g
ctggcatacaaatctgtgggtcggatatgagaaatatcatttgataatcacacagtctgccatcccatatgcattaagagtgaaactggaaggctggaatgggcagacccagtactgcagactatgccatgttcaaggttgtacatgaagttgacagagtaccgctttacatatgcatacttcgctggtggggatgctgaagatgcctttgatggctatgattttggcgatgatcctagtgacaagtttttcacatccccataatggcatgcagttcagtacctgggacaatgacaatgataagtttgaaggcaactgtgctgaacaggatggatctggttggtggatgaacaagtgtcacgctggccatctcaatggagtttattacccaaggtggcacttactccaaaagcatctactcctaatggttatgataatggcattatttgggccacttggaaaacccggtggtattccgatgaagaaaaccactatgaagataatcccattcaacagactcacaattggagaaggacatgcaacacccacctggggggagccaaacaggctggagacgtttaaaagaccgtttcaaaagagatttactttttttaaaggactttatctgaacgagagagatataatatttttccctattggacaatggacttgcaaagcttcactttcattttaagaagaaaaaaaccccatgttggaaaactccataaccagtttttatgctgattgataatttatctacatgcatttcaataaaaccttttgtttcctaagactaccagaaaaaaaccaaaaaaaaacacnnnnnnnnnnncaaataacactctttctttttttctcgcggcccctgggttcttctttgggggggggagg

SEQ ID NO: 6373 - DNA, 418 bp, Homo sapiens
  SIMILAR (118)..(408): 631254mologous to Homo sapiens Human myelin oligodendrocyte glycoprotein gene,accession number AAZ29204,Smith-Waterman Score= 274.
  misc_feature (1)...(418): n = a,t,c or g
actttttttttttttntagtagagatggggttttgccaagctgaccaggctggtctcgaactcctgacctcaggtgatccacccgcctcagtgtcccaaagtactgggattacagtattatcactttcttttttttttgagacggagtctcgctctgtcgcccaggctggagtgcagtggcgcgatctcggctcactgcaacgtccgcctcccgggttcacgccattctcctgcctcagcctcccgagtagctgggactacaggcgcccgccgccacgcctggctaatttttttgtattttcagtagagacggggtttcaccgtgtcagccaggatggtctcgatctcctgacctcgtgatccgcccgcctcagcctcccaaagtgctggggatacaggcgtgagccaagcgcccgtc

SEQ ID NO: 6374 - DNA, 614 bp, Homo sapiens
  SIMILAR (1)..(138): 671254mologous to Homo sapiens Human myelin oligodendrocyte glycoprotein gene,accession number AAZ29204,Smith-Waterman Score= 147.
  misc_feature (1)...(614): n = a,t,c or g
tttttttttttgagacggagtctcgctctgtcacccaggctggagtgcagtggcgggatctcggctcactgcaagctccgcctcccgggttcacgccattctcctgcctcagcctcccaagtagctgggactacaggcgcccgccactacgcccggctaattttttgtatttttagtagggacggggtttcaccgttttagccgggatgggtctnncgatctttcnccctttgggnaaaacccctccctttttccccggggtttgggggaaaaatttttcccccggcccgggggnnccccncccccccccccgggggggcccccccccccttttttttccccaaaaaaaagggggnncccccccccccccctttcccaaagtgctgggattacaggcgtgagccaccgcgcccggcctgtaccttctcttaagtcagcttgcaatttaaatttttagttagtaaatttaactaattttaaaatatgttagtgtctgtctgcttaactattgcatacttattaaagaaacatgcgtggttatccattggaagagatcgatcctagggcttcctgatacaaacacacccacagaccccagccactctagatttctg

SEQ ID NO: 6375 - DNA, 705 bp, Homo sapiens
  SIMILAR (240)..(533): 501254mologous to Homo sapiens Human myelin oligodendrocyte glycoprotein gene,accession number AAZ29204,Smith-Waterman Score= 202.
tttttttgagatggagtcccgctctgtcgcccaggctggagtgcagtggcgcgatctcggctcactgcaagctccgcctcctgggttcacgccattctcctgcctcagcctcccgagaagctgggactacaggcgcccgccaacactcctggctaatttttttgtatttttagtagagacggggtttcactgtgttagccaggatagtctcgatctcctgaccttgcgatccgcccgcctttttttttttttttttgagacggagtctcgctctgtcgcccaggctggagtgcagtggcgggctctcggctcactgcaagctccgcctcccgggttcacgccattctcctgcctcagcctcccaagtagctgggactacaggtgcccgccactacgcccggctaattttttgtatttttagtagagacggggtttcaccgttttagccgggatggtctcgatctcctgacctcgtgatccgcccgcctcggcctcccaaagtgctgggattacaggcgtgagccaccgcgcccggccgtacgtgtctatttttataacagaagtgtatttatagagtatgtgcaattttgtaaattgcttttcacgtttaaaataaatgtcaggtctcaaaatatattaggttctccgaatattctcaaaagccttttaaaaaatctaaattaattgtatctacccacgccacct

SEQ ID NO: 6376 - DNA, 459 bp, Homo sapiens
  SIMILAR (2)..(85): 711254mologous to Homo sapiens Human secreted protein sequence encoded by gene 112 SEQ ID NO:282,accession number AAB56188,Smith-Waterman Score=91.
  misc_feature (1)...(459): n = a,t,c or g
tttttttttttgagacggagtctcgctctgtcgcccaggctggagtgcagtggtgccatcttggctcactgcaacctctgcctcccaggttcaagtgattctcctgcctcaacctctcgagtagccggtgtgcaccatcacagccacctgagtagctgggactacagttgtgcgccaccatgcctggctaatttttgtatttttagtagagacggggtttcaccatgttggtcaggctggtctcgaacatcttgacctcaggtgatctgtccatctcggcctcccaaagtgctgggattacaggcgtaagctactgcgcccggccagatttgctttgactggcctgatgtttgctcagatgtggccagcaccagcacctgctcctgggtaatgaggttactgttaatatctngggtggtcactgctttcccaggtggctcaggggtcacctgatactct

SEQ ID NO: 6377 - DNA, 440 bp, Homo sapiens
  SIMILAR (14)..(238): 641254mologous to Macaca fascicularis hypothetical protein,accession number AB056753,Smith-Waterman Score=216.
cccacgcgttcggagggaccgcaggggcattatgccttttttaacatgcgactcttaatttgggacggacagaacagccgtacagaccagtagttctcagcgcctttgcttaccctgggttgctcagaagacttactggttactggttccttcttcccttttgaaggacttaaaggagaagaaggaagttgtggaagaggcataaaatggaagagacgcccctgctaacgggaatgctgtgagtgtctgctttgctcctgagccctggcagctaccgccccacaaaatttttcctgttctactttaaacatacctatatatgtgtgtgcatgtgtatatgtatagctttgcacagtggcagtatcgtagccaatgagctttacccgaggcgcgattattgctagttaaatatttataaaaacctttcgagcagcgcctgg

SEQ ID NO: 6378 - DNA, 583 bp, Homo sapiens
  SIMILAR (21)..(215): 601254mologous to Homo sapiens Human myelin oligodendrocyte glycoprotein gene,accession number AAZ29204,Smith-Waterman Score= 162.
  misc_feature (1)...(583): n = a,t,c or g
ggccgcccttttttttttttttttttttttgagaaggagtctcgctctgtcgcccaggctggagtgcagtggcgcgatctcggctcactgcaagctccacctcccgggttcacgccattctcttgcctcagcctcccaagcagccgggactacaggtgcccgtcaccacgcccggctaattttttgtatttttttagtagacacggggtttcaccgngttagccaggatggtctcgatcccctgacctcatgattcacccgcctcggcctcccagagtgctgagattacaggcgtgagccaccgtgcccggcctcgcttggctaattttttaatgttttgtagagatggggtctcactatgttgcccaggctggtctcaaattcctgggctcaggcaattctcctgccacggcctcctgaagtgctagggatgctctcctcttaccccaacaactcagggcttgaaatgtctactatttggcttattaaagtaactcttcaaaatatacttatatggggcctttcacatcccaaagaagaaaagcgttttctttttttgagacggagttttgcttgtcgccca

SEQ ID NO: 6379 - DNA, 566 bp, Homo sapiens
  SIMILAR (351)..(521): 681254mologous to Homo sapiens Human secreted protein, SEQ ID NO: 5327,accession number AAG01246,Smith-Waterman Score=185.
tttttttttttaatgttggtttcttcccccagatgaccaatggtgttagattgtttgctcatatttaagaataagcccctgaaaagaactaactgaaagatctgtgtgggaaaacagggcttaacgactggtagaattcacttaaggtactctcagcagaaagcctatcagtatctgaagatgctgttatcttcagtcttccacaggagaaggataggacaggcttgactgtgcagttctggaaggagagcagaggaagagagctaacacttctatagttcaggcgtaggtttcccttgatctccttgttttttttttttttgttttttttttgtttttttttttttgagacggagtctcgctctgtcgcccaggctggagtgcagtggcgggatctcggctcactgcaagctccgcctcccgggttcacgccattcgctctgtcacccaggctggagtgcagtggtgcgatcttggctcactgcaagctccttctcccaggttcaagccattctcctgccctcagccaaccgagtagctgggactacaggcacccgccaccacgc

SEQ ID NO: 6380 - DNA, 523 bp, Homo sapiens
  SIMILAR (289)..(522): 751254mologous to Homo sapiens Human secreted protein, SEQ ID NO: 4718,accession number AAG00637,Smith-Waterman Score=298.
  misc_feature (1)...(523): n = a,t,c or g
ttttagttaagaaacagaacaccttttgtttaagcaactaaattaacacgtgatggttcttggcaagatcccatccatgacagcattcccgtccaccaatcttttccgaaagtctggagcttactggacgtagtgtaatggcaactcctcccactaaaaggccccgtcaggctgggcacagcggctcatgcttctaatcccaacactttgggaggccaagacaggaggatgcttgaccccaggagttcaagaccagtcctggcaatgtagcaagaccccaactctataatttttttttttttttttttgagacggagtctcgctctgtctcccaggctggagtgcagtggtgcgatcttggctcactgcaagctccacctcccgggctcacaccattctcctgcctcagcctcctgagtagccgggactacaggcgcccaccaccacgcccggctactttnttgtatttttagtagagacagggtttcactgtgttagccaggatggtctcgatctcctgacc

SEQ ID NO: 6381 - DNA, 14624 bp, Homo sapiens
  SIMILAR (9153)..(9323): 1001254mologous to Homo sapiens cathepsin O,accession number U13665,Smith-Waterman Score=295.
  misc_feature (1)...(14624): n = a,t,c or g
tgggggctcaaggttctgctgctacctgtggtgagctttgctctgtaccctgaggagatactggacacccactgggagctatggaagaagacccacaggaagcaatataacaacaaggtgcctggggtcctggagggggcatggcaggaaggctgagacctgagctctctcatcttagcttccagactcccttcttcaatccaaatgctttattccaagcaaatcagtccctcttccctaactcatgttaacatacggttttcattcctatgcttcaatcatcctcttgtcaaacttgtattccttccctttggttttataagtgtgtaacattcctcttttgggaagagtcccaagattaatgctgttaatccataagcaatttttctgtctctccagagcttgtgtggttgtttacatattatctctcttcttgcaggctcttaattccatggttagttccccaactaaactgtaaacttttatgattgtgagtttcctttattctcctaaaacccttcacaatattacatatgaactgtagacagtctatacaagtactgactatgctttgtttaggtggatgaaatctctcggcgtttaatttgggaaaaaaacctgaagtatatttccatccataaccttgaggcttctcttggtgtccatacatatgaactggctatgaaccacctgggggacatggcaagtatagcttcagctcctgtcccacctgcaccatttgctttagttccctgctgatgcctggcctctttcttctttgtcttagaccagtgaagaggtggttcagaagatgactggactcaaagtacccctgtctcattcccgcagtaatgacaccctttatatcccagaatgggaaggtagagccccagactctgtcgactatcgaaagaaaggatatgttactcctgtcaaaaatcaggtactctcctttcttctgggtgtgcatatgtaatctggcatgaccttttcctttttctgctgctttgttcttgaggtgaaagggcaccaggaaaagagggcaaggaattaaggtacatctccccattcccattctgttatttaacctcatttgtttctgtacatttgggttgtttctggtttttctttttcttttcccttttttttttttttttttttttgagatagagtctcactctgtcgcccaggatggagtgcagtggtgcaatcttggctcactgcaacctacacctcccgggttcaagcgattctcctgcctcagcctcctgagtagctgagattacaggcacgcgccactacgcctggctaatttttctatttttatagagatgcgttttcaccatgttggccaggctggtcttgaactgacctcaggtgatccacctgcctcagcctcccaaagtgctgggattagagtcatgagccatcgcggcctggtttttctttattacaaatagtgttgcaataagcacccttgtgcatatgtttttgtgcacatgtacaaatatttatgcaaaataagtcctaaaattggaattgttaggtcacaaataatcctttccccccccccaaattttttttttttttttgagacagcgtctctgtcacccaggctggagtccagtggcgcaatcatggctcactgcagcctcaacgtctcaggctcaagtgattctccaacctcagcctccctagtagctgggaattagaagcacatgccaccacacccagctaattttaaaaaattttttgttagagacagggttttgccatgctacccaagctggtctcaaattcctgggctcaagcaatctgcccgcttcggcctcccaaagtgctaggattacagacatgagccaccatgcccagcccaaaaaagtttttgcaatcttacattcttactagcatgagaatgtcagttttttcacaacccaaacaacacaggattgtatcagcaagataaacaattgatttaacgttcatttaacaaacactttttgacccccagaacctaccagatgcagtgttaggcagcagagactcaagatgactaagacacaacctgtgtcctcaggaaatctcaatctaaaaaaatagaacaggaaagaaagaaaaatctacaatctagctgcacaaacaataatagctaatactttttgagattttattgtttgtcaggaacttcttaactctttacatgagtttaaatatttaatcccttataacaatattttatgcatagagaaactgagacacaggcaaatttagtaacttacccggggtcacatagctactgggtggcaaagtcagggttagctcccaggacaaatgcctccacagctggtactgtgctctgctttactgtagctaatagtaaaaatggtagcaaaaatcaatagcagtagaacagtgcaacagatattaagcggaagaggaagactcacaacaatgacaacatttgtgctgaaatttttaagaacacatggaatttccttcagccgggtagagagaagatatagaaatgtaaacaccaaagattcatagtttctctgtatccctttcagggtcagtgtggttcctgttgggcttttagctctgtgggtgccctggagggccaactcaagaagaaaactggcaaactcttaaatctgagtccccagaacctagtggattgtgtgtctgagaatgatggctgtggaggggctacatgaccaatgccttccaatatgtgcagaagaaccggggtattgactctgaagatgcctacccatatgtgggacaggtgagattgctccacacaattatacagctctgttggctcctcctccccagcatgatgttttgtactggaaacaattccagaaatactgttttctgttatcctatcctgctttcttgatggaataatttcccacagaaggccaagaagatttccacaatctgggggaatttagggagcttaagctactatagctcctatttgcatctctgccatggagagaaaacagaggctaggctacctaccccatagacttccgagctgggttctataaccctctgctcaattcctcactcccacaacaaacccacaaacccaccatgctattttcacaaattgtgtggctttattttatatgatctcagtgtgagttttcagaacatttcagcaaattatgtaagtttacatgctaacatctataaaatgagagaaaaaacaagttgcttcatataagagataagggattaactcagttcctcctgcatgatcctctagtcataggaaggaaatcatatctgaaagggaggcaacctgaggggttttttatacacatagggctgggtctgatagacaatataatgtagggccttcacaacagaaacctctgaaacagggacagcaagtttgagaataaaaatgatggctactgtgttctaagccgtgtccttagtgcattttttctttttctttttttcatttaatctcataacaactctgttaggtagacttatcttgaatgtataggtgaggaaatggacacttaaggagataagacagtataattcataccactagtatgtaacaatgtaagatgtatctaccagggatgtttatcttctgcaaacattcctaggtatatctcccatgcacatgtgcaagaatttcttactaggatataatgccttggaactgaattgtctgggtcttagggtatgtctgtcttcactttactacacaatgtcaaattgtttgccaaaatatttggaaaaatttatacctgcaatgtgtaagaaatccccttcaatcacctttttatcagtatgtttatctggccatttgcatttcttcttcagtgaattaactgtttttatctcttgctcatttgtttttctttttatttttttgaaatagggtcttactctgttgcccaagctggagtgtggtgaacagtcatagctcactgcagcctccacttccgggctcaagcaatcctctcgcctcagcctcccaaatagctaggatataggtgcatgccatcatgcccaccaatttcaaaaaacctttgaaatttttttttgtagaggctaggcatggtggctcatgcctgtaatcccagcactttgggaagctgaggtgggaggatcgcttgagcccagcactttgggaagctgaggtgggaggatcgcttgagcccaggaattggaggtcggcctgatacaacatagcaagacctcatctctacagaaaaaatttttaaaagtagccaggtatgatggcgtgcatagttctagctactccggaagctggttgggaggacaacttgagcctgggagttcaaggctgctgtgaactgtgatcatgtcactgctctctaacctgggtgacagagtgagaccctgtccccaaaaaacaacaaccgtttttttttggtagagacattgtctcgctatgttgccaaggctagtctcaaactcctgggctcaagcaatcctcccacctccccaaagtgctgggatttatagatgtaagccaccatgcctggcctaccctttttttttttttttgaaatggagttttgcttttgtcacctaggcttgagtgcagtggcgcgatcttggctcactgcaacctccacctcctggattcaagcaattctcctgcctcagcctcctgagtagctgggattataggcacccgcaaccacgcccggctagtttttgtatttttagtacagacagggtttcaccatgttggccaggctggtcttgaacccctgacctcaggtggtccgcccgcctcggcctcccaaagtgctgggattacaggtgtgagccaccatgccccaccccttactcatttttaattggattgttttttctctttcttagcgattcttaaaagtttaaagagaatatttggatacaatactatgtatttaaaagttgaggtctgtctttccattctttttatgatgtctttcaatctacaaaagttaattttaatagcctggcgccggtggatctcgcttattatcccctcactttgggaagctgagatgggtggatcacaatgtcacgagatcttgaccatccttcctggcgcggtggctgctaatggaagcggaacacgtataaagccagtccgcacaaacggtgctgaccccggatgaatgtctgctactgggctatctggacaagggaaaactcaagcgcaaagataaagcaggtagcttgcagtgggcttacatggcgatagctagactgggcggttttatggacagcatgccaaccggaattgccatctggggcgccctctggtaaggttgggaaaccctgcaaagtaaactggatggctttcttgccgccaaggatctgatggcgcaggggatcaagatctgatcaagagacaggatgaggatcgtttcgcatgattgaacaagatggattgcacgcaggttctccggccgcttgggtggagaggctattcggctatgactgggcacaacagacaatcggctgctctgatgccgccgtgttccggctgtcagcgcaggggcgcccggttctttttgtcaagaccgacctgtccggtgccctgaatgaactgcaggacgaggcagcgcggctatcgtggctggccacgacgggcgttccttgcgcagctgtgctcgacgttgtcactgaagcgggaagggactggctgctattgggcgaagtgccggggcaggatctcctgtcatcccaccttgctcctgccgagaaagtatccatcatggctgatgcnactgcgtttcaaaaaaaaaaaaagttaattttaatatagtaaaattagtaaaaggattaattttccctttgcaatttttgtaatgtgttttattcgtttatgaatggagaaaggtaagaaaaaataaaatttaaaaaagaagagatgtggccaggtacggtggctcacacctataatcccagtagtttgggaggctgaggcaggcagatcacttgaggtcaggagtttgagaccagctgggataacatggtgaaaccccatctctactaaaaatacaaaaattagccaggtgtgattgcgcacgcttgtaatcccagcaggctgaggcaggagaattgctcgaactcaggaggcagaggttgcagtgagccaagatcatgccattgcactccagcctgggtaacagagactctgtttcaaaaaataaaaagataaaaagggaagagatctgatagggcgcccagaaaaacattttaaaggggatggtattataagtttgttcccagcataatgccaggttatttctgactttaaagtatcatcacataatatctttttgagtcaatttccaagatattctgtttcacttgtaattctgtgtaatttttggcaccaggaggcatcagggatttggagcacatggcagaaacaaaggcatcttgaaaaatatcaaggcagtagaccactgtaatcttaaaatggcatatcaaatgctgctattgctgttaatatttagataatgttagataatgtatttttttagagggtatctcactatcttgcacaggctggagtagagtggctattcacagcatgatcacagtacactaaaggctcaaactcctgggcacaaacaatcctcctgcctcagcctgctgagtagtagataataagttcttgtggatgcaaccttagggttctgaaggggtagtctgtaggaaaatgaattgctgaaaagaatacaccaccttaacatgggctattattcgattccataattgtggcttgccaatgaaacattgctaactacctgtaaaatatagtgttggaagtcataggctaaattgctaagttctttaatctattttagtgtcttgttatgtacttttatattttgtctttgatgagagcacaaggatcacaccagttcccctgatataggtgcagagggcccaggtcttccctctagctaagccttggccttggcctcctacccacacagcagctggtgccttcctgccccctgaggctaatacatactatgtggccagaagatggtttatgctttttaaaaaaatcttatttcagaaatctttccctactgttttcctcccacatttatgtcttaaaacacctgtaggggattttttttttttttttttttttgagatggagtctcgctctcgcccaggctggagtgcaatggcgcgatcttggctcactgcaaggtctgcctcccaggttcacgccattctcctgcctcagcctccccagtagctgggactacaggcgcccgctaccacgcctggctaatttttttgcattttattaattttccctttgcaatttttgtaatgtgttttattcgtttatgaatggagaaaggtaagaaaaaataaaatttaaaaaagaagagatgtggccaggtacggtggctcacacctataatcccagtagtttgggaggctgaggcaggcagatcacttgaggtcaggagtttgagaccagctgggataacatggtgaaaccccatctctactaaaaatacaaaaattagccaggtgtgattgcgcacgcttgtaatcccagcaggctgaggcaggagaattgctcgaactcaggaggcagaggttgcagtgagccaagatcatgccattgcactccagcctgggtaacagagactctgtttcaaaaaataaaaagataaaaagggaagagatctgatagggcgcccagaaaaacattttaaaggggatggtattataagtttgttcccagcataatgccaggttatttctgactttaaagtatcatcacataatatctttttgagtcaatttccaagatattctgtttcacttgtaattctgtgtaatttttggcaccaggaggcatcagggatttggagcacatggcagaaacaaaggcatcttgaaaaatatcaaggcagtagaccactgtaatcttaaaatggcatatcaaatgctgctattgctgttaatatttagataatgttagataatgtatttttttagagggtatctcactatcttgcacaggctggagtagagtggctattcacagcatgatcacagtacactaaaggctcaaactcctgggcacaaacaatcctcctgcctcagcctgctgagtagtagataataagttcttgtggatgcaaccttagggttctgaaggggtagtctgtaggaaaatgaattgctgaaaagaatacaccaccttaacatgggctattattcgattccataattgtggcttgccaatgaaacattgctaactacctgtaaaatatagtgttggaagtcataggctaaattgctaagttctttaatctattttagtgtcttgttatgtacttttatattttgtctttgatgagagcacaaggatcacaccagttcccctgatataggtgcagagggcccaggtcttccctctagctaagccttggccttggcctcctacccacacagcagctggtgccttcctgccccctgaggctaatacatactatgtggccagaagatggtttatgctttttaaaaaaatcttatttcagaaatctttccctactgttttcctcccacatttatgtcttaaaacacctgtaggggattttttttttttttttttttttgagatggagtctcgctctcgcccaggctggagtgcaatggcgcgatcttggctcactgcaaggtctgcctcccaggttcacgccattctcctgcctcagcctccccagtagctgggactacaggcgcccgctaccacgcctggctaatttttttgcatttttagtagagacagggtttcactgtgttagccaggatggtatagatctctgacctcgtgatccacctttcttcagccttccaaagtgctgggattaacaggcatggagccccaccgcactggcctgtagttggtttttatgtgtggtggaaggcgggaatcctcttttcatattcgtttttgtgaggaagaacagaccctctttagaagccctagactgctgcctctgttagttcactggcatcactcaaaatattggttgagtttcttactcactgactcattgcctattgctttgtcctagtcctattacaatcttgtttcttccagccaggaagagagttgtatgtacaacccaacaggcaaggcagctaaatgcagagggtacagagagatccccgaggggaatgagaaagccctgaagagggcagtggcccgagtgggacctgtctctgtggccattgatgcaagcctgacctccttccagttttacagcaaaggtaagaagctgctgatcctatacagcactgtcttttatgatacaaacttgatggtttctcgaaggaccttgggtattttcagtacttagtttttgtattcacatggaggtggccagagagaaattaacaactgctgcagtatggagcagcatctctgtggtaaaccctcctgacacggatggaattcttcaaacagtctcctagactgggagatcccacagggtgacccttggattgcatagagcctcacgctggtagtttgtattctaggtgtgtattatgatgaaagctgcaatagcgataatctgaaccatgcggttttggcagtgggatatggaatccagaagggaaacaagcactggataattaaaaacaggtaatgatgggaacactacttttgttattcagtcacccttttaacactcaacctcacctccagcttcccgatattcctttctctgtcccaaatcaagaaaaaattatctcagagttctcacttctatcttctcagtcagaggctcttaattctcagtctgacacttaatggccagtgtgttagtccattttgcattgccacaaaagaatacccgagactgggtagtttataaagaaacgaggtttgtttggctatacaaagcgtggcactagtatctgctcagcctctgatgaggcctcagagcttttactcatggcagaaggcaaaagagggagcaggcatgtcacatagtgagagagggagcaagagagagagggaggtgccgactctttaaagaaccagctcttgcatgaactaatagagtgagaactcactcatcaccaaggcgatggcaccaagccattccatgaggaatccactctcataacccaaacacctcccactatgccccacctcccacattggggatcacatttcagcatgagactgggaggggacacacatccaaaccatatccgccagacaatagtgctcaattatgtgctgggcagatgctccctgtgtgcaaggtgcttagtgacatacataaaccaacgagcagatgacaccttcagtgagctcagagcccaataagacagacctaactaaccatgagataaagcagtacaaagaaccagcaggagctttggaattacgtatttttactttcttttgtctctaatgtgatcagtttcttagatggtttccattagcaatctgtctttaacagtaggggagcagcgttaaaggtttaatattccttttgaacagtttttttccttcaaaatacacttaagatacacgtatataagaacttgccaaagattgtgaagagaaacattttttagaaataagatataaacaaaaaaagttagtgttactttcctatgttggggaacaaagaaaactccagggtaccttgcttcccatttctctttagcaccttgtgacttttggggaggggcagattgataacaattatagttttcctttcctggctgatcaccattaacctggcagcagcactggctaaatctcctgtccttagtgccctccaaggagcaggagccctagactctgggtcgctgacagactcacgcagtggtgttgttcaaacctgaagcaactttttatatcacagttccaactcaaggtgaacctgagcatcttcccaagtctcccacagcttctgtcctgtgttgtcccttctcttgactcccaggtccaagcacttaccctgttctttcatgatcaggtaccatgtgtggagatagcttccaagagagctgggaggaagaaaggacacacccgggcaggatcaggaacactgggggcccctggagaaggggagagtgggggagggtacaggttttaaataaaatgtgttggtaattagagaattgctggttggggaaagaggtctgaaaacaattcaggaagataaacaagacaatctctcctctctcctctttctcacgtcgtctctcttgtcttctagtctcgctactcatttccttagtaatctcatccactctcatagtttcatccatctctcctatggggtttacccccaaatcaagattagtagagacagggtttcactgtgttagccaggatggtatagatctctgacctcgtgatccacctttcttcagccttccaaagtgctgggattaacaggcatggagccccaccgcactggcctgtagttggtttttatgtgtggtggaaggcgggaatcctcttttcatattcgtttttgtgaggaagaacagaccctctttagaagccctagactgctgcctctgttagttcactggcatcactcaaaatattggttgagtttcttactcactgactcattgcctattgctttgtcctagtcctattacaatcttgtttcttccagccaggaagagagttgtatgtacaacccaacaggcaaggcagctaaatgcagagggtacagagagatccccgaggggaatgagaaagccctgaagagggcagtggcccgagtgggacctgtctctgtggccattgatgcaagcctgacctccttccagttttacagcaaaggtaagaagctgctgatcctatacagcactgtcttttatgatacaaacttgatggtttctcgaaggaccttgggtattttcagtacttagtttttgtattcacatggaggtggccagagagaaattaacaactgctgcagtatggagcagcatctctgtggtaaaccctcctgacacggatggaattcttcaaacagtctcctagactgggagatcccacagggtgacccttggattgcatagagcctcacgctggtagtttgtattctaggtgtgtattatgatgaaagctgcaatagcgataatctgaaccatgcggttttggcagtgggatatggaatccagaagggaaacaagcactggataattaaaaacaggtaatgatgggaacactacttttgttattcagtcacccttttaacactcaacctcacctccagcttcccgatattcctttctctgtcccaaatcaagaaaaaattatctcagagttctcacttctatcttctcagtcagaggctcttaattctcagtctgacacttaatggccagtgtgttagtccattttgcattgccacaaaagaatacccgagactgggtagtttataaagaaacgaggtttgtttggctatacaaagcgtggcactagtatctgctcagcctctgatgaggcctcagagcttttactcatggcagaaggcaaaagagggagcaggcatgtcacatagtgagagagggagcaagagagagagggaggtgccgactctttaaagaaccagctcttgcatgaactaatagagtgagaactcactcatcaccaaggcgatggcaccaagccattccatgaggaatccactctcataacccaaacacctcccactatgccccacctcccacattggggatcacatttcagcatgagactgggaggggacacacatccaaaccatatccgccagacaatagtgctcaattatgtgctgggcagatgctccctgtgtgcaaggtgcttagtgacatacataaaccaacgagcagatgacaccttcagtgagctcagagcccaataagacagacctaactaaccatgagataaagcagtacaaagaaccagcaggagctttggaattacgtatttttactttcttttgtctctaatgtgatcagtttcttagatggtttccattagcaatctgtctttaacagtaggggagcagcgttaaaggtttaatattccttttgaacagtttttttccttcaaaatacacttaagatacacgtatataagaacttgccaaagattgtgaagagaaacattttttagaaataagatataaacaaaaaaagttagtgttactttcctatgttggggaacaaagaaaactccagggtaccttgcttcccatttctctttagcaccttgtgacttttggggaggggcagattgataacaattatagttttcctttcctggctgatcaccattaacctggcagcagcactggctaaatctcctgtccttagtgccctccaaggagcaggagccctagactctgggtcgctgacagactcacgcagtggtgttgttcaaacctgaagcaactttttatatcacagttccaactcaaggtgaacctgagcatcttcccaagtctcccacagcttctgtcctgtgttgtcccttctcttgactcccaggtccaagcacttaccctgttctttcatgatcaggtaccatgtgtggagatagcttccaagagagctgggaggaagaaaggacacacccgggcaggatcaggaacactgggggcccctggagaaggggagagtgggggagggtacaggttttaaataaaatgtgttggtaattagagaattgctggttggggaaagaggtctgaaaacaattcaggaagataaacaagacaatctctcctctctcctctttctcacgtcgtctctcttgtcttctagtctcgctactcatttccttagtaatctcatccactctcatagtttcatccatctctcctatggggtttacccccaaatcaagatcaccagcttcagcctccttcttatgctctaaactcacattttcaagattaatattccccaaatacagctctgatcatatcactctcccactcaaaatccctcactggctcctcacgatgatgggtcacagagtaaaggtgaagctttttaaccttgcagtaaaggtaattcaacctgatctcaatctgcctttccagacatctctcccactacaccctgttaggcacactgcttttcagctacatgatcctaacagtgccccacactttcctgcctctgttgttcatttcacacccttccactggcatccccttcccacaggtcgaaattctacttagccttttggctcagctcaaatgccacctcttacatcaagcctctaagattctcttgatcagaaggaatctttccctcctttgatacctacagtattatgccttctccctatttcttgactttaaactctttaaagttaaaaaacatcatattcatttttgtgtaccatcagtacctcgcacaatactcagtaaatattttaatgaataaataaactgagagtactaagtatttttcttgattggtcttacagctggggagaaaactggggaaacaaaggatatatcctcatggctcgaaataagaacaacgcctgtggcattgccaacctggccagcttccccaagatgtgactc

SEQ ID NO: 6382 - DNA, 9620 bp, Homo sapiens
  SIMILAR (2690)..(2983): 651254mologous to Homo sapiens Human myelin oligodendrocyte glycoprotein gene,accession number AAZ29204,Smith-Waterman Score= 327.
atgggtgccccgacgttgccccctgcctggcagccctttctcaaggaccaccgcatctctacattcaagaactggcccttcttggagggctgcgcctgcaccccggagcgggtgagactgcccggcctcctggggtcccccacgcccgccttgccctgtccctagcgaggccactgtgactgggcctcgggggtacaagccgccctcccctccccgtcctgtccccagcgaggccactgtggctgggccccttgggtccaggccggcctcccctccctgctttgtccccatcgaggcctttgtggctgggcctcggggttccgggctgccacgtccactcacgagctgtgctgtcccttgcagatggccgaggctggcttcatccactgccccactgagaacgagccagacttggcccagtgtttcttctgcttcaaggagctggaaggctgggagccagatgacgaccccatgtaagtcttctctggccagcctcgatgggctttgttttgaactgagttgtcaaaagatttgagttgcaaagacacttagtatgggagggttgctttccaccctcattgcttcttaaacagctgttgtgaacggatacctctctatatgctggtgccttggtgatgcttacaacctaattaaatctcatttgaccaaaatgccttggggtggacgtaagatgcctgatgcctttcatgttcaacagaatacatcagcagaccctgttgttgtgaactcccaggaatgtccaagtgctttttttgagattttttaaaaaacagtttaattgaaatataacctacacagcacaaaaattaccctttgaaagtgtgcacttcacactttcggaggctgaggcgggcggatcacctgaggtcaggagttcaagacctgcctggccaacttggcgaaaccccgtctctactaaaaatacaaaaattagccgggcatggtagcgcacgcccgtaatcccagctactcgggaggctaaggcaggagaatcgcttgaacctgggaggcggaggttgcagtgagccgagattgtgccaatgcactccagcctcggcgacagagcgagactccgtcataaaaataaaaaattgaaaaaaaaaaaagaaagaaagcatatacttcagtgttgttctggatttttttcttcaagatgcctagttaatgacaatgaaattctgtactcggatggtatctgtctttccacactgtaatgccatattcttttctcacctttttttctgtcggattcagttgcttccacagctttaatttttttcccctggagaatcaccccagttgtttttctttttggccatgttttcattgtaatgcagttctggtaacggtgatagtcagttatacagggagactcccctagcagaaaatgagagtgtgagctagggggtcccttggggaacccggggcaataatgcccttctctgcccttaatccttacagtgggccgggcacggtggcttacgcctgtaataccagcactttgggaggccgaggcgggcggatcacgaggtcaggagatcgagaccatcttggctaatacggtgaaaccccgtctccactaaaaatacaaaaaattagccgggcgtggtggtgggcgcctgtagtcccagctactcgggaggctgaggcaggagaatggcgtgaacccaggaggcggagcttgcagtgagccgagattgcaccactgcactccagcctgggcgacagaatgagactccgtctcaaaaaaaaaaaaaaaagaaaaaaatctttacagtggattacataacaattccagtgaaatgaaattacttcaaacagttccttgagaatgttggagggatttgacatgtaattcctttggacatataccatgtaacacttttccaactaattgctaaggaagtccagataaaatagatacattagccacacagatgtggggggagatgtccacagggagagagaaggtgctaagaggtgccatatgggaatgtggcttgggcaaagcactgatgccatcaacttcagacttgacgtcttactcctgaggcagagcagggtgtgcctgtggagggcgtggggaggtggcccgtggggagtggactgccgctttaatcccttcagctgcctttccgctgttgttttgatttttctagagaggaacataaaaagcattcgtccggttgcgctttcctttctgtcaagaagcagtttgaagaattaacccttggtgaatttttgaaactggacagagaaagagccaagaacaaaattgtatgtattgggaataagaactgctcaaaccctgttcaatgtctttagcactaaactacctagtccctcaaagggactctgtgttttcctcaggaagcattttttttttttttctgagatagagtttcactcttgttgcccaggctggagtgcaatggtgcaatcttggctcactgcaacctctgcctctcgggttcaagtgattctcctgcctcagcctcccaagtaactgggattacagggaagtgccaccacacccagctaatttttgtatttttagtagagatggggtttcaccacattgcccaggctggtcttgaactcctgacctcgtgattcgcccaccttggcctcccaaagtgctgggattacaggcgtgaaccaccacgcctggcttttttttttttgttctgagacacagtttcactctgttacccaggctggagtagggtggcctgatctcggatcactgcaacctccgcctcctgggctcaagtgatttgcctgcttcagcctcccaagtagccgagattacaggcatgtgccaccacacccaggtaatttttgtatttttggtagagacgaggtttcaccatgttggccaggctggttttgaactcctgacctcaggtgatccacccgcctcagcctcccaaagtgctgagattataggtgtgagccaccacacctggcctcaggaagtatttttatttttaaatttatttatttatttgagatggagtcttgctctgtcgcccaggctagagtgcagcgacgggatctcggctcactgcaagctccgccccccaggttcaagccattctcctgcctcagcctcccgagtagctgggactacaggcgcccgccaccacacccggctaatttttttgtatttttagtagagacgggttttcaccgtgttagccaggagggtcttgatctcctgacctcgtgatctgcctgcctcggcctcccaaagtgctgggattacaggtgtgagccaccacacccggctatttttatttttttgagacagggactcactctgtcacctgggctgcagtgcagtggtacaccatagctcactgcagcctcgaactcctgagctcaagtgatcctcccacctcatcctcacaagtaattgggactacaggtgcaccccaccatgcccacctaatttatttatttatttatttatttattttcatagagatgagggttccctgtgttgtccaggctggtcttgaactcctgagctcacgggatccttttgcctgggcctcccaaagtgctgagattacaggcatgagccaccgtgcccagctaggaatcatttttaaagcccctaggatgtctgtgtgattttaaagctcctggagtgtggccggtataagtatataccggtataagtaaatcccacattttgtgtcagtatttactagaaacttagtcatttatctgaagttgaaatgtaactgggctttatttatttatttatttatttatttatttttaatttttttttttgagacgagtctcactttgtcacccaggctggagtgcagtggcacgatctcggctcactgcaacctctgcctcccggggtcaagcgattctcctgccttagcctcccgagtagctgggactacaggcacgcaccaccatgcctggctaatttttgtatttttagtagacggggtttcaccatgctggccaagctggtctcaaactcctgaccttgtgatctgcccgctttagcctcccagagtgctgggattacaggcatgagccaccatgcgtggtctttttaaaattttttgattttttttttttttgagacagagccttgctctgtcgcccaggctggagtgcagtggcacgatctcagctcactacaagctccgcctcccgggttcacgccattcttctgcctcagcctcctgagtagctgggactacaggtgcccaccaccacgcctggctaattttttttggtatttttattagagacaaggtttcatcatgttggccaggctggtctcaaactcctgacctcaagtgatctgcctgcctcggcctcccaaagcgctgagattacaggtgtgatctactgcgccaggcctgggcgtcatatattcttatttgctaagtctggcagccccacacagaataagtactgggggattccatatccttgtagcaaagccctgggtggagagtcaggagatgttgtagttctgtctctgccacttgcagactttgagtttaagccagtcgtgctcatgctttccttgctaaatagaggttagaccccctatcccatggtttctcaggttgcttttcagcttgaaaattgtattcctttgtagagatcagcgtaaaataattctgtccttatatgtggctttattttaatttgagacagagtgtcactcagtcgcccaggctggagtgtggtggtgcgatcttggctcactgcgacctccacctcccaggttcaagcgattctcgtgcctcaggctcccaagtagctgagattataggtgtgtgccaccaggcccagctaacttttgtatttttagtagagacagggttttgccatgttggctaagctggtctcgaactcctggcctcaagtgatctgcccgccttggcatcccaaagtgctgggattacaggtgtgaaccaccacacctggcctcaatatagtggcttttaagtgctaaggactgagattgtgttttgtcaggaagaggccagttgtgggtgaagcatgctgtgagagagcttgtcacctggttgaggttgtgggagctgcagcgtgggaactggaaagtgggctggggatcatctttttccaggtcaggggtcagccagcttttctgcagcgtgccatagaccatctcttagccctcgtgggtcagagtctctgttgcatattgtcttttgttgtttttcacaaccttttagaaacataaaaagcattcttagcccgtgggctggacaaaaaaaggccatgacgggctgtatggatttggcccagcaggcccttgcttgccaagccctgttttagacaaggagcagcttgtgtgcctggaaccatcatgggcacaggggaggagcagagtggatgtggaggtgtgagctggaaaccaggtcccagagcgctgagaaagacagagggtttttgcccttgcaagtagagcaactgaaatctgacaccatccagttccagaaagccctgaagtgctggtggacgctgcggggtgctccgctctagggttacagggatgaagatgcagtctggtagggggagtccactcacctgttggaagatgtgattaagaaaagtagactttcagggccgggcatggtggctcacgcctgtaatcccagcactttgggaggccgaggcgggtggatcacgaggtcaggagatcgagaccatcctggctaacatggtgaaaccccgtctttactaaaaatacaaaaaattagctgggcgtggtggcgggcgcctgtagtcccagctactcgggaggctgaggcaggagaatggcgtgaacctgggaggtggagcttgctgtgagccgagatcgcgccactgcactccagcctgggcgacagagcgagactccgtctcaaaaaaaaaaaaaaaagtaggctttcatgatgtgtgagctgaaggcgcagtaggcagaagtagaggcctcagtccctgcaggagacccctcggtctctatctcctgatagtcagacccagccacactggaaagaggggagacattacagcctgcgagaaaagtagggagatttaaaaactgcttggcttttattttgaactgttttttttgtttgtttgttttccccaattcagaatacagaatacttttatggatttgtttttattactttaattttgaaacaatataatcttttttttgttgtttttttgagacagggtcttactctgtcacccaggctgagtgcagtggtgtgatcttggctcacctcagcctcgaccccctgggctcaaatgattctcccacctcagcttcccaagtagctgggaccacatagtagagacagggtttcactgtgttagccaggatggtatagatctctgacctcgtgatccacctttcttcagccttccaaagtgctgggattaacaggcatggagccccaccgcactggcctgtagttggtttttatgtgtggtggaaggcgggaatcctcttttcatattcgtttttgtgaggaagaacagaccctctttagaagccctagactgctgcctctgttagttcactggcatcactcaaaatattggttgagtttcttactcactgactcattgcctattgctttgtcctagtcctattacaatcttgtttcttccagccaggaagagagttgtatgtacaacccaacaggcaaggcagctaaatgcagagggtacagagagatccccgaggggaatgagaaagccctgaagagggcagtggcccgagtgggacctgtctctgtggccattgatgcaagcctgacctccttccagttttacagcaaaggtaagaagctgctgatcctatacagcactgtcttttatgatacaaacttgatggtttctcgaaggaccttgggtattttcagtacttagtttttgtattcacatggaggtggccagagagaaattaacaactgctgcagtatggagcagcatctctgtggtaaaccctcctgacacggatggaattcttcaaacagtctcctagactgggagatcccacagggtgacccttggattgcatagagcctcacgctggtagtttgtattctaggtgtgtattatgatgaaagctgcaatagcgataatctgaaccatgcggttttggcagtgggatatggaatccagaagggaaacaagcactggataattaaaaacaggtaatgatgggaacactacttttgttattcagtcacccttttaacactcaacctcacctccagcttcccgatattcctttctctgtcccaaatcaagaaaaaattatctcagagttctcacttctatcttctcagtcagaggctcttaattctcagtctgacacttaatggccagtgtgttagtccattttgcattgccacaaaagaatacccgagactgggtagtttataaagaaacgaggtttgtttggctatacaaagcgtggcactagtatctgctcagcctctgatgaggcctcagagcttttactcatggcagaaggcaaaagagggagcaggcatgtcacatagtgagagagggagcaagagagagagggaggtgccgactctttaaagaaccagctcttgcatgaactaatagagtgagaactcactcatcaccaaggcgatggcaccaagccattccatgaggaatccactctcataacccaaacacctcccactatgccccacctcccacattggggatcacatttcagcatgagactgggaggggacacacatccaaaccatatccgccagacaatagtgctcaattatgtgctgggcagatgctccctgtgtgcaaggtgcttagtgacatacataaaccaacgagcagatgacaccttcagtgagctcagagcccaataagacagacctaactaaccatgagataaagcagtacaaagaaccagcaggagctttggaattacgtatttttactttcttttgtctctaatgtgatcagtttcttagatggtttccattagcaatctgtctttaacagtaggggagcagcgttaaaggtttaatattccttttgaacagtttttttccttcaaaatacacttaagatacacgtatataagaacttgccaaagattgtgaagagaaacattttttagaaataagatataaacaaaaaaagttagtgttactttcctatgttggggaacaaagaaaactccagggtaccttgcttcccatttctctttagcaccttgtgacttttggggaggggcagattgataacaattatagttttcctttcctggctgatcaccattaacctggcagcagcactggctaaatctcctgtccttagtgccctccaaggagcaggagccctagactctgggtcgctgacagactcacgcagtggtgttgttcaaacctgaagcaactttttatatcacagttccaactcaaggtgaacctgagcatcttcccaagtctcccacagcttctgtcctgtgttgtcccttctcttgactcccaggtccaagcacttaccctgttctttcatgatcaggtaccatgtgtggagatagcttccaagagagctgggaggaagaaaggacacacccgggcaggatcaggaacactgggggcccctggagaaggggagagtgggggagggtacaggttttaaataaaatgtgttggtaattagagaattgctggttggggaaagaggtctgaaaacaattcaggaagataaacaagacaatctctcctctctcctctttctcacgtcgtctctcttgtcttctagtctcgctactcatttccttagtaatctcatccactctcatagtttcatccatctctcctatggggtttacccccaaatcaagatcaccagcttcagcctccttcttatgctctaaactcacattttcaagattaatattccccaaatacagctctgatcatatcactctcccactcaaaatccctcactggctcctcacgatgatgggtcacagagtaaaggtgaagctttttaaccttgcagtaaaggtaattcaacctgatctcaatctgcctttccagacatctctcccactacaccctgttaggcacactgcttttcagctacatgatcctaacagtgccccacactttcctgcctctgttgttcatttcacacccttccactggcatccccttcccacaggtcgaaattctacttagccttttggctcagctcaaatgccacctcttacatcaagcctctaagattctcttgatcagaaggaatctttccctcctttgatacctacagtattatgccttctccctatttcttgactttaaactctttaaagttaaaaaacatcatattcatttttgtgtaccatcagtacctcgcacaatactcagtaaatattttaatgaataaataaactgagagtactaagtatttttcttgattggtcttacagctggggagaaaactggggaaacaaaggatatatcctcatggctcgaaataagaacaacgcctgtggcattgccaacctggccagcttccccaagatgtgactc

SEQ ID NO: 6383 - DNA, 465 bp, Homo sapiens
  SIMILAR (2)..(175): 741254mologous to Homo sapiens Human secreted protein, SEQ ID NO: 7878,accession number AAG03797,Smith-Waterman Score=221.
ttttttttttttttttgagacggagtctcgctctgtcgcccaggctggagtgcagtggcgggctctcggctcactgcaagctccgcctcccgggttcacgccattctcctgcctcagcctcccaagtagctgggactacaggtgcccgccactacgcccggctaattttttgtatttttagtagagacggggtttcaccgttttagccgggatggtctcgatctcctgacctcgtgatccgcccgcctcggcctcccaaagtgctgggattacaggcgtgagccaccgcgcccggccgtacgtgtctatttttataacagaagtgtatttatagagtatgtgcaattttgtaaattgcttttcacgtttaaaataaatgtcaggtctcaaaatatattaggttctccgaatattctcaaaagccttttaaaaaatctaaattaattgtatctacccacgccacct

SEQ ID NO: 6384 - DNA, 567 bp, Homo sapiens
  SIMILAR (53)..(223): 641254mologous to Homo sapiens Human myelin oligodendrocyte glycoprotein gene,accession number AAZ29204,Smith-Waterman Score= 150.
tttgtgagacggagtctcgctctgtcacccaggctggagtgcagtggagcgatcttggctcactgcaagctccgcctcccaggttcacgccattctcccgcctcagcctcccaagtagctgggactacaggcgcccaccaccacgcccggctaattttttgtacttttagtagagacggggtttcaccgtgttagccaggatggtctcgatctcctgacctcgtgatacacccgcctcggcctcccaaagtgctaggattacaggcatgagccacctcgcccagccagcaaactttttctataaagggcggcctcccaaagtgctgggattacaggggtgagccaccgcgcctggcctacatgtgaaatctttaacatcatgcctgacgtagagtaaatcctcagcaaatgttaatcagctaccttgtctgtatcattcaaatcactgcagcaagttgtcagcctacaacttgcttgtcatcttacaaatgtgcagacctggttgctcttaaatcaatactgttatactttaaagtctctgataatttttcaatcagaaagtgtttg

SEQ ID NO: 6385 - DNA, 790 bp, Homo sapiens
  SIMILAR (719)..(471): 951254mologous to Homo sapiens delta-tubulin,accession number AF201333,Smith-Waterman Score=411.
tttttttttcttacaaatgaaataccaagtgaatgttttcattgaaaacatgcgattctccattttaaaaagttttcttccttttctgtgggcatagtatgcagaatagactcagcattctacgtggttactttaacagaatggaactttgaaaacattttttttttttttttttttttgagacggagtctcgctctgtcgcccaggctggagtgcagtggcgcgatctcggctcactgcaagctccgcctcctgggttcacgtcattctcctgcctcagcctcccgagtagctgggactacaggcacccgccaccgcgcctggctaattttttgtattttctggtagagacggtgtttcaccgtgttagccaggatggagaactttgaaaactttacagagaaaatagtattgaaaatattttagtccagaaatgccttaaggtatacttttcccattgttcaagatcagagattacagtaactggcaacaacctgctctaatgacgtgaaactgtctaaaaagtcctcttcttcgattccaaattttgtgtactgatgaatgtaggcttttgaagcaaacatattccatgccttcccaacaatcatatcaagtggttttactaagaactggctgttgctgaccaacactgcagacttctcatatttgctaaaggccccgctggttttccacacgttgaaagcattaacaggctcaaccaggaagtatacagagctggatctttaaatgcctcacatttgcactttgccatctttccacgaagaatgac

SEQ ID NO: 6386 - DNA, 540 bp, Homo sapiens
  SIMILAR (170)..(235): 811254mologous to Homo sapiens PRO2822,accession number AF119900,Smith-Waterman Score=86.
tttttttattttttgagacggagtcttgctctgtcgcccaggctggagtgcagtggcacgatcttggctcactgcaagctccacctcccaggttcatgccattctcctgcctcagcctcccaagtagctaggactacaggtacccgccaccacccccggctaatttttttttgtatttttagtagagatggggtttcaccatgttagccaggatggtctcgatcttctgaccttgggatctggccacctcagcctcccaaaatgctgggattacaggtgtgagccaccacacccatcctcgcccagttattaaataccttccctcttcaagtcctaaccttgcaggctaattcctccctggaagaagaggattccaatgctcctgagcataaaaaattcaggtccttgaatgacgtggacccattctccagctctctggtggtagaggcctgaggcctaatttattcagcacctccatccttcagtcagaacagatgaggacaatacaggcagctgtgcctcaggctgccaggagcaaaa

SEQ ID NO: 6387 - DNA, 551 bp, Homo sapiens
  SIMILAR (3)..(173): 771254mologous to Homo sapiens Human secreted protein, SEQ ID NO: 7878,accession number AAG03797,Smith-Waterman Score=220.
tttttttttttttttttgagacggagtctcgctctgtcgcccaggctggagtgcagtggcgggatctcggctcactgcaagctccgcctcccgggttcacgccattctcctgcctcagcctcccaagtagctgggactacaggcgcccgccactacgcccggctaatttttttgtatttttagtagagacggggtttcaccgttttagccgggatggtctcgatctcctgacctcgtgatccgcccgcctcggcctcccaaagtgctgggattacaggcgtgagccaccgcgcccggcctatttttagttttaaacaaaaaagtttaagaagtaaaaaaaaaacatgttttgttgtcgttttctttgagatcagcttgcaatttaaatttttagttagtaaatttaactaattttaaaatatgttagtgtctgtctgcttaactattgcatacttattaaagaaacatgcgtggttatccattggaagagatcgatcctagggcttcctgatacaaacacacccacagaccccagccactctagatttctg

SEQ ID NO: 6388 - DNA, 598 bp, Homo sapiens
  SIMILAR (265)..(564): 541254mologous to Homo sapiens prothymosin alpha1,accession number M14630,Smith-Waterman Score=230.
ccgttgagcccttcggtaccgatcgagaacccctgggtcgacccacgcgtccgctgaaaagccatctttgcattgttcctcatccgcctccttgctcgccgcagtttttctccgttttgcgcctcctccgccgtcgcggactccgggagctttatcgccagagaccctgaactctcgctttctttttaatcccctgcatcggatcaccggcgtgccccaccatgtcagacgcagccgtagacaccagctccgaaatcaccaccaagggacttaaaaggagaagaaggaagttgtgggaagaggcagaaaatgggaagagacgcccctgcttaacggggaatgctgagaatgagggaaaatgggggagcagggaggcttgacaatgaggtacaccaaaaagaggaataatgtggggaggaacaggaggaggaagaagaaggtgatggtgaggaagaggatggagatgaagatgacgagaccttgtcagctacggtcacgcgcgctactgaagatgaggatgatgacgctgtcgctcccaccaagcagacgactcgccttgatgaatagacacgtaataacggagccgctaaagctaaat

SEQ ID NO: 6389 - DNA, 741 bp, Homo sapiens
tgagatggagtctcgctctgtcgcccaggctacagtgcagtggcgcgatcttggcccactgcaagctccgcctcccaggaggaaattctaaagcgttatgtttgttagcaaaacagaaggcaaagatctctcctaaagaggaaataaagaagtttcaacatgcttttaaaaacaccatagaaaaaaagtaatacccagaagagcctaggaaaggaacagtgtgtgccctgtgaagtgggaaagggactcacccgttgaaaaagatctgggccaatttgaagagctcatggcccatttcaacactggacggcccgtggcgaacctccaccacgcagagactcctctgtagatgggtggctgacttttgccagtctcttaaggcagcacaggcccgggccaggccatccgcgatctctcccaccacggcgtgctctgcccacaggaagctctaggcgtcacgctggcaccccgacagccgctgaacagctcgctaatgtctgttccaataaagctgctgttttcttctgttttctctgtcagtggagaaaggcgctaggggaggcctccccacatttacactgtattttcaacattaacttcccaactcgaccaactctacctttcacgtacggccatgatttctcttgaccctgaaatctaagctaaaggtcaactttcataaagcagggtaaataaaaatcccatgatgtcaagctctaaggcagggtttgaattccaccg

SEQ ID NO: 6390 - DNA, 23891 bp, Homo sapiens
  SIMILAR (18199)..(18948): 451254mologous to Homo sapiens Human myelin oligodendrocyte glycoprotein gene,accession number AAZ29204,Smith-Waterman Score= 366.
  misc_feature (1)...(23891): n = a,t,c or g
atattctcaggggtgaattttcctggttcctgccggtcctgggaccagttggtaaagtagcaaaccagtttgtaggcagatccctggagtagaatgaagagagccagtgagatctcacggctgttgccttagagtccagaaagtcacaattttctccccaagtacagccattgcatcatttgctcattctgccagagcctctgagggtcattctgcctgggcctttagtgctggctcttgagtacccagaccccagttaagaaatacgctgaggctgggcacagtggcctcanacctgttatcccngcactttgggaggctgangcnngangacttcttgagcccaggagttcaagaccagctgtggcaacatagcaaaaccccatctctacaaaaaatttaanaattagccaggtgtagtggttcatgcctgtantctcagctactaaggaggctgaagttgggggattgtttgagcctgggaggtcaaggctgcantgagccanggtcacaccactgcactacagcctggaccttacagtgagaccctgtctcaaaaaaattaaaaaaaaaatacattgagagacagagataccaccaacatatgaaacacccatggagcactaagattcagtatgtatgtatggatggatgacacagatcagtagagaaacagataatacaaacattgtgtatgtttgtattcacacacacatattgaggccagctatgggggaggggtgagagagagagtggctcaaaaagaactagaacaagggatacacaaaaagatagaataaaaactcagtgtcataaatatgtcagtggcagaaccggagagagtaatcaagagaaaaagcatgtagcagaaaaagaaactgtacatcaaaaatgaaagcacccaagccaggagatccaggcggtagtgacttattgactacttacctccctggagaagcagcaagaccactactcctgcaatagatgggtggaaagagaaatctgttgagccaaacctggttctgctgtcccagataatggcagtgaaaatgtgggtgtgctcacatacaagatagagccacacttcatctgggctccccagccacagctgctgtggtttctttttttttttttttttttgagacggagtctcgctctgtcgcccaggctggagtgcagtggtgtgatctcggctcactgcaagctccgcctcccgggttcacgccattctcctgcctcagcctcccaagtagctgggactacaggcgcccgccactacgcccggctaattttttgtatttttagtagagacggggtttcaccgttttagccgggatggtctcgatctcctgacctcgtgatccgcccgcctcggcctcccaaagtgctgggattacaggcgtgagccaccgcgcccggcctgtggtttctttataggaccttgaggtccccagccctggggtgccttgtgtctctacattcctaggcagaaaaaatgcaaaaaaattagccaggcgtggtagcgggcgcctgtagtcccagctactggggaggctgaggcaggagaatggcgtgaacctgggaggcagaccttgcagtgagccaagatcgcgccattgcactccagcctgggcgagagcgagactccatctcaaaaaaaaaaaaaaaaaaaaaatcccctacaggtgttttaagacataaatgtgggaggaaaacagtagggaaagatttctgaaataagatttttttaaaaagcataaaccatcttctggccacatagtatgtattagcctcagggggcaggaaggcaccagctgctgtgtgggtaggaggccaaggccaaggcttagctagagggaagacctgggccctctgcacctatatcaggggaactggtgtgatccttgtgctctcatcaaagacaaaatataaaagtacataacaagacactaaaatagattaaagaacttagcaatttagcctatgacttccaacactatattttacaggtagttagcaatgtttcattggcaagccacaattatggaatcgaataatagcccatgttaaggtggtgtattcttttcagcaattcattttcctacagactaccccttcagaaccctaaggttgcatccacaagaacttattatctactactcagcaggctgaggcaggaggattgtttgtgcccaggagtttgagcctttagtgtactgtgatcatgctgtgaatagccactctactccagcctgtgcaagatagtgagataccctctaaaaaaatacattatctaacattatctaaatattaacagcaatagcagcatttgatatgccattttaagattacagtggtctactgccttgatatttttcaagatgcctttgtttctgccatgtgctccaaatccctgatgcctcctggtgccaaaaattacacagaattacaagtgaaacagaatatcttggaaattgactcaaaaagatattatgtgatgatactttaaagtcagaaataacctggcattatgctgggaacaaacttataataccatcccctttaaaatgtttttctgggcgccctatcagatctcttccctttttatctttttattttttgaaacagagtctctgttacccaggctggagtgcaatggcatgatcttggctcactgcaacctctgcctcctgagttcgagcaattctcctgcctcagcctgctgggattacaagcgtgcgcaatcacacctggctaatttttgtatttttagtagagatggggtttcaccatgttatcccagctggtctcaaactcctgacctcaagtgatctgcctgcctcagcctcccaaactactgggattataggtgtgagccaccgtacctggccacatctcttcttttttaaattttattttttcttacctttctccattcataaacgaataaaacacattacaaaaattgcaaagggaaaattaatccttttactaattttactatattaaaattaactttttttttttttgaaacgcagtngcatcagccatgatggatactttctcggcaggagcaaggtgggatgacaggagatcctgccccggcacttcgcccaatagcagccagtcccttcccgcttcagtgacaacgtcgagcacagctgcgcaaggaacgcccgtcgtggccagccacgatagccgcgctgcctcgtcctgcagttcattcagggcaccggacaggtcggtcttgacaaaaagaaccgggcgcccctgcgctgacagccggaacacggcggcatcagagcagccgattgtctgttgtgcccagtcatagccgaatagcctctccacccaagcggccggagaacctgcgtgcaatccatcttgttcaatcatgcgaaacgatcctcatcctgtctcttgatcagatcttgatcccctgcgccatcagatccttggcggcaagaaagccatccagtttactttgcagggtttcccaaccttaccagagggcgccccagatggcaattccggttggcatgctgtccataaaaccgcccagtctagctatcgccatgtaagcccactgcaagctacctgctttatctttgcgcttgagttttcccttgtccagatagcccagtagcagacattcatccggggtcagcaccgtttgtgcggactggctttatacgtgttccgcttccattagcagccaccgcgccaggaaggatggtcaagatctcgtgacattgtgatccacccatctcagcttcccaaagtgaggggataataagcgagatccaccggcgccaggctattaaaattaacttttgtagattgaaagacatcataaaaagaatggaaagacagacctcaacttttaaatacatagtattgtatccaaatattctctttaaacttttaagaatcgctaagaaagagaaaaaacaatccaattaaaaatgagtaaggggtggggcatggtggctcacacctgtaatcccagcactttgggaggccgaggcgggcggaccacctgaggtcaggggttcaagaccagcctggccaacatggtgaaaccctgtctgtactaaaaatacaaaaactagccgggcgtggttgcgggtgcctataatcccagctactcaggaggctgaggcaggagaattgcttgaatccaggaggtggaggttgcagtgagccaagatcgcgccactgcactcaagcctaggtgacaaaagcaaaactccatttcaaaaaaaaaaaaaaagggtaggccaggcatggtggcttacatctataaatcccagcactttggggaggtgggaggattgcttgagcccaggagtttgagactagccttggcaacatagcgagacaatgtctctaccaaaaaaaaacggttgttgttttttggggacagggtctcactctgtcacccaggttagagagcagtgacatgatcacagttcacagcagccttgaactcccaggctcaagttgtcctcccaaccagcttccggagtagctagaactatgcacgccatcatacctggctacttttaaaaattttttctgtagagatgaggtcttgctatgttgtatcaggccgacctccaattcctgggctcaagcgatcctcccacctcagcttcccaaagtgctgggctcaagcgatcctcccacctcagcttcccaaagtgctgggattacaggcatgagccaccatgcctagcctctacaaaaaaaaatttcaaaggttttttgaaattggtgggcatgatggcatgcacctatatcctagctatttgggaggctgaggcgagaggattgcttgagcccggaagtggaggctgcagtgagctatgactgttcaccacactccagcttgggcaacagagtaagaccctatttcaaaaaaataaaaagaaaaacaaatgagcaagagataaaaacagttaattcactgaagaagaaatgcaaatggccagataaacatactgataaaaaggtgattgaaggggatttcttacacattgcaggtataaatttttccaaatattttggcaaacaatttgacattgtgtagtaaagtgaagacagacataccctaagacccagacaattcagttccaaggcattatatcctagtaagaaattcttgcacatgtgcatgggagatatacctaggaatgtttgcagaagataaacatccctggtagatacatcttacattgttacatactagtggtatgaattatactgtcttatctccttaagtgtccatttcctcacctatacattcaagataagtctacctaacagagttgttatgagattaaatgaaaaaaagaaaaagaaaaaatgcactaaggacacggcttagaacacagtagccatcatttttattctcaaacttgctgtccctgtttcagaggtttctgttgtgaaggccctacattatattgtctatcagacccagccctatgtgtataaaaaacccctcaggttgcctccctttcagatatgatttccttcctatgactagaggatcatgcaggaggaactgagttaatcccttatctcttatatgaagcaacttgttttttctctcattttatagatgttagcatgtaaacttacataatttgctgaaatgttctgaaaactcacactgagatcatataaaataaagccacacaatttgtgaaaatagcatggtgggtttgtgggtttgttgtgggagtgaggaattgagcagagggttatagaacccagctcggaagtctatggggtaggtagcctagcctctgttttctctccatggcagagatgcaaataggagctatagtagcttaagctccctaaattcccccagattgtggaaatcttcttggccttctgtgggaaattattccatcaagaaagcaggataggataacagaaaacagtatttctggaattgtttccagtacaaaacatcatgctggggaggaggagccaacagagctgtataattgtgtggagcaatctcacctgtcccacatatgggtaggcatcttcagagtcaataccccggttcttctgcacatattggaaggcattggtcatgtagcccctccacagccatcattctcagacacacaatccactaggttctggggactcagatttaagagtttgccagttttcttcttgagttggccctccagggcacccacagagctaaaagcccaacaggaaccacactgaccctgaaagggatacagagaaactatgaatctttggtgtttacatttctatatcttctctctacccggctgaaggaaattccatgtgttcttaaaaatttcagcacaaatgttgtcattgttgtgagtcttcctcttccgcttaatatctgttgcactgttctactgctattgatttttgctaccatttttactattagctacagtaaagcagagcacagtaccagctgtggaggcatttgtcctgggagctaaccctgactttgccacccagtagctatgtgaccccgggtaagttactaaatttgcctgtgtctcagtttctctatgcataaaatattgttataagggattaaatatttaaactcatgtaaagagttaagaagttcctgacaaacaataaaatctcaaaaagtattagctattattgtttgtgcagctagattgtagatttttctttctttcctgttctatttttttagattgagatttcctgaggacacaggttgtgtcttagtcatcttgagtctctgctgcctaacactgcatctggtaggttctgggggtcaaaaagtgtttgttaaatgaacgttaaatcaattgtttatcttgctgatacaatcctgtgttgtttgggttgtgaaaaaactgacattctcatgctagtaagaatgtaagattgcaaaaacttttttgggctgggcatggtggctcatgtctgtaatcctagcactttgggaggccgaagcgggcagattgcttgagcccaggaattatcttgatttgggggtaaaccccataggagagatggatgaaactatgagagtggatgagattactaaggaaatgagtagcgagactagaagacaagagagacgacgtgagaaagaggagagaggagagattgtcttgtttatcttcctgaattgttttcagacctctttccccaaccagcaattctctaattaccaacacattttatttaaaacctgtaccctcccccactctccccttctccaggggcccccagtgttcctgatcctgcccgggtgtgtcctttcttcctcccagctctcttggaagctatctccacacatggtacctgatcatgaaagaacagggtaagtgcttggacctgggagtcaagagaagggacaacacaggacagaagctgtgggagacttgggaagatgctcaggttcaccttgagttggaactgtgatataaaaagttgcttcaggtttgaacaacaccactgcgtgagtctgtcagcgacccagagtctagggctcctgctccttggagggcactaaggacaggagatttagccagtgctgctgccaggttaatggtgatcagccaggaaaggaaaactataattgttatcaatctgcccctccccaaaagtcacaaggtgctaaagagaaatgggaagcaaggtaccctggagttttctttgttccccaacataggaaagtaacactaactttttttgtttatatcttatttctaaaaaatgtttctcttcacaatctttggcaagttcttatatacgtgtatcttaagtgtattttgaaggaaaaaaactgttcaaaaggaatattaaacctttaacgctgctcccctactgttaaagacagattgctaatggaaaccatctaagaaactgatcacattagagacaaaagaaagtaaaaatacgtaattccaaagctcctgctggttctttgtactgctttatctcatggttagttaggtctgtcttattgggctctgagctcactgaaggtgtcatctgctcgttggtttatgtatgtcactaagcaccttgcacacagggagcatctgcccagcacataattgagcactattgtctggcggatatggtttggatgtgtgtcccctcccagtctcatgctgaaatgtgatccccaatgtgggaggtggggcatagtgggaggtgtttgggttatgagagtggattcctcatggaatggcttggtgccatcgccttggtgatgagtgagttctcactctattagttcatgcaagagctggttctttaaagagtcggcacctccctctctctcttgctccctctctcactatgtgacatgcctgctccctcttttgccttctgccatgagtaaaagctctgaggcctcatcagaggctgagcagatactagtgccacgctttgtatagccaaacaaacctcgtttctttataaactacccagtctcgggtattcttttgtggcaatgcaaaatggactaacacactggccattaagtgtcagactgagaattaagagcctctgactgagaagatagaagtgagaactctgagataattttttcttgatttgggacagagaaaggaatatcgggaagctggaggtgaggttgagtgttaaaagggtgactgaataacaaaagtagtgttcccatcattacctgtttttaattatccagtgcttgtttcccttctggattccatatcccactgccaaaaccgcatggttcagattatcgctattgcagctttcatcataatacacacctagaatacaaactaccagcgtgaggctctatgcaatccaagggtcaccctgtgggatctcccagtctaggagactgtttgaagaattccatccgtgtcaggagggtttaccacagagatgctgctccatactgcagcagttgttaatttctctctggccacctccatgtgaatacaaaaactaagtactgaaaatacccaaggtccttcgagaaaccatcaagtttgtatcataaaagacagtgctgtataggatcagcagcttcttacctttgctgtaaaactggaaggaggtcaggcttgcatcaatggccacagagacaggtcccactcgggccactgccctcttcagggctttctcattcccctcggggatctctctgtaccctctgcatttagctgccttgcctgttgggttgtacatacaactctcttcctggctggaagaaacaagattgtaataggactaggacaaagcaataggcaatgagtcagtgagtaagaaactcaaccaatattttgagtgatgccagtgaactaacagaggcagcagtctagggcttctaaagagggtctgttcttcctcacaaaaacgaatatgaaaagaggattcccgccttccaccacacataaaaaccaactacaggccagtgcggtggggctccatgcctgttaatcccagcactttggaaggctgaagaaaggtggatcacgaggtcagagatctataccatcctggctaacacagtgaaaccctgtctctactaaaaatgcaaaaaaattagccaggcgtggtagcgggcgcctgtagtcccagctactggggaggctgaggcaggagaatggcgtgaacctgggaggcagaccttgcagtgagccaagatcgcgccattgcactccagcctgggcgagagcgagactccatctcaaaaaaaaaaaaaaaaaaaaaatcccctacaggtgttttaagacataaatgtgggaggaaaacagtagggaaagatttctgaaataagatttttttaaaaagcataaaccatcttctggccacatagtatgtattagcctcagggggcaggaaggcaccagctgctgtgtgggtaggaggccaaggccaaggcttagctagagggaagacctgggccctctgcacctatatcaggggaactggtgtgatccttgtgctctcatcaaagacaaaatataaaagtacataacaagacactaaaatagattaaagaacttagcaatttagcctatgacttccaacactatattttacaggtagttagcaatgtttcattggcaagccacaattatggaatcgaataatagcccatgttaaggtggtgtattcttttcagcaattcattttcctacagactaccccttcagaaccctaaggttgcatccacaagaacttattatctactactcagcaggctgaggcaggaggattgtttgtgcccaggagtttgagcctttagtgtactgtgatcatgctgtgaatagccactctactccagcctgtgcaagatagtgagataccctctaaaaaaatacattatctaacattatctaaatattaacagcaatagcagcatttgatatgccattttaagattacagtggtctactgccttgatatttttcaagatgcctttgtttctgccatgtgctccaaatccctgatgcctcctggtgccaaaaattacacagaattacaagtgaaacagaatatcttggaaattgactcaaaaagatattatgtgatgatactttaaagtcagaaataacctggcattatgctgggaacaaacttataataccatcccctttaaaatgtttttctgggcgccctatcagatctcttccctttttatctttttattttttgaaacagagtctctgttacccaggctggagtgcaatggcatgatcttggctcactgcaacctctgcctcctgagttcgagcaattctcctgcctcagcctgctgggattacaagcgtgcgcaatcacacctggctaatttttgtatttttagtagagatggggtttcaccatgttatcccagctggtctcaaactcctgacctcaagtgatctgcctgcctcagcctcccaaactactgggattataggtgtgagccaccgtacctggccacatctcttcttttttaaattttattttttcttacctttctccattcataaacgaataaaacacattacaaaaattgcaaagggaaaattaatccttttactaattttactatattaaaattaactttttttttttttgaaacgcagtngcatcagccatgatggatactttctcggcaggagcaaggtgggatgacaggagatcctgccccggcacttcgcccaatagcagccagtcccttcccgcttcagtgacaacgtcgagcacagctgcgcaaggaacgcccgtcgtggccagccacgatagccgcgctgcctcgtcctgcagttcattcagggcaccggacaggtcggtcttgacaaaaagaaccgggcgcccctgcgctgacagccggaacacggcggcatcagagcagccgattgtctgttgtgcccagtcatagccgaatagcctctccacccaagcggccggagaacctgcgtgcaatccatcttgttcaatcatgcgaaacgatcctcatcctgtctcttgatcagatcttgatcccctgcgccatcagatccttggcggcaagaaagccatccagtttactttgcagggtttcccaaccttaccagagggcgccccagatggcaattccggttggcatgctgtccataaaaccgcccagtctagctatcgccatgtaagcccactgcaagctacctgctttatctttgcgcttgagttttcccttgtccagatagcccagtagcagacattcatccggggtcagcaccgtttgtgcggactggctttatacgtgttccgcttccattagcagccaccgcgccaggaaggatggtcaagatctcgtgacattgtgatccacccatctcagcttcccaaagtgaggggataataagcgagatccaccggcgccaggctattaaaattaacttttgtagattgaaagacatcataaaaagaatggaaagacagacctcaacttttaaatacatagtattgtatccaaatattctctttaaacttttaagaatcgctaagaaagagaaaaaacaatccaattaaaaatgagtaaggggtggggcatggtggctcacacctgtaatcccagcactttgggaggccgaggcgggcggaccacctgaggtcaggggttcaagaccagcctggccaacatggtgaaaccctgtctgtactaaaaatacaaaaactagccgggcgtggttgcgggtgcctataatcccagctactcaggaggctgaggcaggagaattgcttgaatccaggaggtggaggttgcagtgagccaagatcgcgccactgcactcaagcctaggtgacaaaagcaaaactccatttcaaaaaaaaaaaaaaagggtaggccaggcatggtggcttacatctataaatcccagcactttggggaggtgggaggattgcttgagcccaggagtttgagactagccttggcaacatagcgagacaatgtctctaccaaaaaaaaacggttgttgttttttggggacagggtctcactctgtcacccaggttagagagcagtgacatgatcacagttcacagcagccttgaactcccaggctcaagttgtcctcccaaccagcttccggagtagctagaactatgcacgccatcatacctggctacttttaaaaattttttctgtagagatgaggtcttgctatgttgtatcaggccgacctccaattcctgggctcaagcgatcctcccacctcagcttcccaaagtgctgggctcaagcgatcctcccacctcagcttcccaaagtgctgggattacaggcatgagccaccatgcctagcctctacaaaaaaaaatttcaaaggttttttgaaattggtgggcatgatggcatgcacctatatcctagctatttgggaggctgaggcgagaggattgcttgagcccggaagtggaggctgcagtgagctatgactgttcaccacactccagcttgggcaacagagtaagaccctatttcaaaaaaataaaaagaaaaacaaatgagcaagagataaaaacagttaattcactgaagaagaaatgcaaatggccagataaacatactgataaaaaggtgattgaaggggatttcttacacattgcaggtataaatttttccaaatattttggcaaacaatttgacattgtgtagtaaagtgaagacagacataccctaagacccagacaattcagttccaaggcattatatcctagtaagaaattcttgcacatgtgcatgggagatatacctaggaatgtttgcagaagataaacatccctggtagatacatcttacattgttacatactagtggtatgaattatactgtcttatctccttaagtgtccatttcctcacctatacattcaagataagtctacctaacagagttgttatgagattaaatgaaaaaaagaaaaagaaaaaatgcactaaggacacggcttagaacacagtagccatcatttttattctcaaacttgctgtccctgtttcagaggtttctgttgtgaaggccctacattatattgtctatcagacccagccctatgtgtataaaaaacccctcaggttgcctccctttcagatatgatttccttcctatgactagaggatcatgcaggaggaactgagttaatcccttatctcttatatgaagcaacttgttttttctctcattttatagatgttagcatgtaaacttacataatttgctgaaatgttctgaaaactcacactgagatcatataaaataaagccacacaatttgtgaaaatagcatggtgggtttgtgggtttgttgtgggagtgaggaattgagcagagggttatagaacccagctcggaagtctatggggtaggtagcctagcctctgttttctctccatggcagagatgcaaataggagctatagtagcttaagctccctaaattcccccagattgtggaaatcttcttggccttctgtgggaaattattccatcaagaaagcaggataggataacagaaaacagtatttctggaattgtttccagtacaaaacatcatgctggggaggaggagccaacagagctgtataattgtgtggagcaatctcacctgtcccacatatgggtaggcatcttcagagtcaataccccggttcttctgcacatattggaaggcattggtcatgtagcccctccacagccatcattctcagacacacaatccactaggttctggggactcagatttaagagtttgccagttttcttcttgagttggccctccagggcacccacagagctaaaagcccaacaggaaccacactgaccctgaaagggatacagagaaactatgaatctttggtgtttacatttctatatcttctctctacccggctgaaggaaattccatgtgttcttaaaaatttcagcacaaatgttgtcattgttgtgagtcttcctcttccgcttaatatctgttgcactgttctactgctattgatttttgctaccatttttactattagctacagtaaagcagagcacagtaccagctgtggaggcatttgtcctgggagctaaccctgactttgccacccagtagctatgtgaccccgggtaagttactaaatttgcctgtgtctcagtttctctatgcataaaatattgttataagggattaaatatttaaactcatgtaaagagttaagaagttcctgacaaacaataaaatctcaaaaagtattagctattattgtttgtgcagctagattgtagatttttctttctttcctgttctatttttttagattgagatttcctgaggacacaggttgtgtcttagtcatcttgagtctctgctgcctaacactgcatctggtaggttctgggggtcaaaaagtgtttgttaaatgaacgttaaatcaattgtttatcttgctgatacaatcctgtgttgtttgggttgtgaaaaaactgacattctcatgctagtaagaatgtaagattgcaaaaacttttttgggctgggcatggtggctcatgtctgtaatcctagcactttgggaggccgaagcgggcagattgcttgagcccaggaatttgagaccagcttgggtagcatggcaaaaccctgtctctaacaaaaaattttttaaaattagctgggtgtggtggcatgtgcttctaattcccagctactagggaggctgaggttggagaatcacttgagcctgagacgttgaggctgcagtgagccatgattgcgccactggactccagcctgggtgacagagacgctgtctcaaaaaaaaaaaaaaaatttggggggggggaaaggattatttgtgacctaacaattccaattttaggacttattttgcataaatatttgtacatgtgcacaaaaacatatgcacaagggtgcttattgcaacactatttgtaataaagaaaaaccaggccgcgatggctcatgactctaatcccagcactttgggaggctgaggcgggcggatcacctgaggtcaggagttcaagacctgcctggccaacttggcgaaaccccgtctctactaaaaatacaaaaaattagccgggcatggtagcgcacgcccgtaatcccagctactcgggaggctaaggcaggagaatcgcttgaacctgggaggcggaggttgcagtgagccgagattgtgccaatgcactccagcctcggcgacagagcgagactccgtcataaaaataaaaaattgaaaaaaaaaaaagaaagaaagcatatacttcagtgttgttctggatttttttcttcaagatgcctagttaatgacaatgaaattctgtactcggatggtatctgtctttccacactgtaatgccatattcttttctcacctttttttctgtcggattcagttgcttccacagctttaatttttttcccctggagaatcaccccagttgtttttctttttggccagaagagagtagctgttttttttcttagtatgtttgctatggtggttatactgcatccccgtaatcactgggaaaagatcagtggtattcttcttgaaaatgaataagtgttatgatattttcagattagagttacaactggctgtctttttggactttgtgtggccatgttttcattgtaatgcagttctggtaacggtgatagtcagttatacagggagactcccctagcagaaaatgagagtgtgagctagggggtcccttggggaacccggggcaataatgcccttctctgcccttaatccttacagtgggccgggcacggtggcttacgcctgtaataccagcactttgggaggccgaggcgggcggatcacgaggtcaggagatcgagaccatcttggctaatacggtgaaaccccgtctccactaaaaatacaaaaaattagccgggcgtggtggtgggcgcctgtagtcccagctactcgggaggctgaggcaggagaatggcgtgaacccaggaggcggagcttgcagtgagccgagattgcaccactgcactccagcctgggcgacagaatgagactccgtctcaaaaaaaaaaaaaaaagaaaaaaatctttacagtggattacataacaattccagtgaaatgaaattacttcaaacagttccttgagaatgttggagggatttgacatgtaattcctttggacatataccatgtaacacttttccaactaattgctaaggaagtccagataaaatagatacattagccacacagatgtggggggagatgtccacagggagagagaaggtgctaagaggtgccatatgggaatgtggcttgggcaaagcactgatgccatcaacttcagacttgacgtcttactcctgaggcagagcagggtgtgcctgtggagggcgtggggaggtggcccgtggggagtggactgccgctttaatcccttcagctgcctttccgctgttgttttgatttttctagagaggaacataaaaagcattcgtccggttgcgctttcctttctgtcaagaagcagtttgaagaattaacccttggtgaatttttgaaactggacagagaaagagccaagaacaaaattgtatgtattgggaataagaactgctcaaaccctgttcaatgtctttagcactaaactacctagtccctcaaagggactctgtgttttcctcaggaagcattttttttttttttctgagatagagtttcactcttgttgcccaggctggagtgcaatggtgcaatcttggctcactgcaacctctgcctctcgggttcaagtgattctcctgcctcagcctcccaagtaactgggattacagggaagtgccaccacacccagctaatttttgtatttttagtagagatggggtttcaccacattgcccaggctggtcttgaactcctgacctcgtgattcgcccaccttggcctcccaaagtgctgggattacaggcgtgaaccaccacgcctggcttttttttttttgttctgagacacagtttcactctgttacccaggctggagtagggtggcctgatctcggatcactgcaacctccgcctcctgggctcaagtgatttgcctgcttcagcctcccaagtagccgagattacaggcatgtgccaccacacccaggtaatttttgtatttttggtagagacgaggtttcaccatgttggccaggctggttttgaactcctgacctcaggtgatccacccgcctcagcctcccaaagtgctgagattataggtgtgagccaccacacctggcctcaggaagtatttttatttttaaatttatttatttatttgagatggagtcttgctctgtcgcccaggctagagtgcagcgacgggatctcggctcactgcaagctccgccccccaggttcaagccattctcctgcctcagcctcccgagtagctgggactacaggcgcccgccaccacacccggctaatttttttgtatttttagtagagacgggttttcaccgtgttagccaggagggtcttgatctcctgacctcgtgatctgcctgcctcggcctcccaaagtgctgggattacaggtgtgagccaccacacccggctatttttatttttttgagacagggactcactctgtcacctgggctgcagtgcagtggtacaccatagctcactgcagcctcgaactcctgagctcaagtgatcctcccacctcatcctcacaagtaattgggactacaggtgcaccccaccatgcccacctaatttatttatttatttatttatttattttcatagagatgagggttccctgtgttgtccaggctggtcttgaactcctgagctcacgggatccttttgcctgggcctcccaaagtgctgagattacaggcatgagccaccgtgcccagctaggaatcatttttaaagcccctaggatgtctgtgtgattttaaagctcctggagtgtggccggtataagtatataccggtataagtaaatcccacattttgtgtcagtatttactagaaacttagtcatttatctgaagttgaaatgtaactgggctttatttatttatttatttatttatttatttttaatttttttttttgagacgagtctcactttgtcacccaggctggagtgcagtggcacgatctcggctcactgcaacctctgcctcccggggtcaagcgattctcctgccttagcctcccgagtagctgggactacaggcacgcaccaccatgcctggctaatttttgtatttttagtagacggggtttcaccatgctggccaagctggtctcaaactcctgaccttgtgatctgcccgctttagcctcccagagtgctgggattacaggcatgagccaccatgcgtggtctttttaaaattttttgattttttttttttttgagacagagccttgctctgtcgcccaggctggagtgcagtggcacgatctcagctcactacaagctccgcctcccgggttcacgccattcttctgcctcagcctcctgagtagctgggactacaggtgcccaccaccacgcctggctaattttttttggtatttttattagagacaaggtttcatcatgttggccaggctggtctcaaactcctgacctcaagtgatctgcctgcctcggcctcccaaagcgctgagattacaggtgtgatctactgcgccaggcctgggcgtcatatattcttatttgctaagtctggcagccccacacagaataagtactgggggattccatatccttgtagcaaagccctgggtggagagtcaggagatgttgtagttctgtctctgccacttgcagactttgagtttaagccagtcgtgctcatgctttccttgctaaatagaggttagaccccctatcccatggtttctcaggttgcttttcagcttgaaaattgtattcctttgtagagatcagcgtaaaataattctgtccttatatgtggctttattttaatttgagacagagtgtcactcagtcgcccaggctggagtgtggtggtgcgatcttggctcactgcgacctccacctcccaggttcaagcgattctcgtgcctcaggctcccaagtagctgagattataggtgtgtgccaccaggcccagctaacttttgtatttttagtagagacagggttttgccatgttggctaagctggtctcgaactcctggcctcaagtgatctgcccgccttggcatcccaaagtgctgggattacaggtgtgaaccaccacacctggcctcaatatagtggcttttaagtgctaaggactgagattgtgttttgtcaggaagaggccagttgtgggtgaagcatgctgtgagagagcttgtcacctggttgaggttgtgggagctgcagcgtgggaactggaaagtgggctggggatcatctttttccaggtcaggggtcagccagcttttctgcagcgtgccatagaccatctcttagccctcgtgggtcagagtctctgttgcatattgtcttttgttgtttttcacaaccttttagaaacataaaaagcattcttagcccgtgggctggacaaaaaaaggccatgacgggctgtatggatttggcccagcaggcccttgcttgccaagccctgttttagacaaggagcagcttgtgtgcctggaaccatcatgggcacaggggaggagcagagtggatgtggaggtgtgagctggaaaccaggtcccagagcgctgagaaagacagagggtttttgcccttgcaagtagagcaactgaaatctgacaccatccagttccagaaagccctgaagtgctggtggacgctgcggggtgctccgctctagggttacagggatgaagatgcagtctggtagggggagtccactcacctgttggaagatgtgattaagaaaagtagactttcagggccgggcatggtggctcacgcctgtaatcccagcactttgggaggccgaggcgggtggatcacgaggtcaggagatcgagaccatcctggctaacatggtgaaaccccgtctttactaaaaatacaaaaaattagctgggcgtggtggcgggcgcctgtagtcccagctactcgggaggctgaggcaggagaatggcgtgaacctgggaggtggagcttgctgtgagccgagatcgcgccactgcactccagcctgggcgacagagcgagactccgtctcaaaaaaaaaaaaaaaagtaggctttcatgatgtgtgagctgaaggcgcagtaggcagaagtagaggcctcagtccctgcaggagacccctcggtctctatctcctgatagtcagacccagccacactggaaagaggggagacattacagcctgcgagaaaagtagggagatttaaaaactgcttggcttttattttgaactgttttttttgtttgtttgttttccccaattcagaatacagaatacttttatggatttgtttttattactttaattttgaaacaatataatcttttttttgttgtttttttgagacagggtcttactctgtcacccaggctgagtgcagtggtgtgatcttggctcacctcagcctcgaccccctgggctcaaatgattctcccacctcagcttcccaagtagctgggaccacaggtgcgtgtgttgcgctatacaaatcctgaagacaaggatgctgttgctggtgatgctggggattcccaagatcccagatttgatggcaggatgcccctgtctgctgccttgccagggtgccaggagggcgctgctgtggaagctgaggcccggccatccagggcgatgcattgggcgctgattcttgttcctgctgctgcctcggtgcttagcttttgaaacaatgaaataaattagaaccagtgtgaaaatcgatcagggaataaatttaatgtggaaataaactgaacaacttagttcttcataagagtttacttggtaaatacttgtgatgaggacaaaacgaagcactagaaggagaggcgagttgtagacctgggtggcaggagtgttttgtttgttttctttggcagggtcttgctctgttgctcaggctggagtacagtggcacaatcacagctcactatagcctcgacctcctggactcaagcaatcctcctgcctcagcctcccagtagctgggactacaggcgcatgccaccatgcctggctaattttaaatttttttttttctcttttttgagatggaatctcactctgtcgcccaggctggagtgcagtggcgtgatctcggctgacggcaagctccgcctcccaggttcactccattcgcctgcctcagcctcccaagtagctgggactacaggcgctgggattacaaacccaaacccaaagtgctgggattacaggcgtgagccactgcacccggcctgttttgtctttcaatagcaagagttgtgtttgcttcgcccctacctttagtggaaaaatgtataaaatggagatattgacctccacattggggtggttaaattatagcatgtatgcaaaggagcttcgctaatttaaggcttttttgaaagagaagaaactgaataatccatgtgtgtatatatattttaaaagccatggtcatctttccatatcagtaaagctgaggctccctgggactgcagagttgtccatcacagtccattataagtgcgctgctgggccaggtgcagtggcttgtgcctgaatcccagcactttgggaggccaaggcaggaggattcattgagcccaggagttttgaggcgagcctgggcaatgtggccagacctcatctcttcaaaaaatacacaaaaaattagccaggcatggtggcacgtgcctgtagtctcagctactcaggaggctgaggtgggaggatcactttgagccttgcaggtcaaagctgcagtaagccatgatcttgccactgcattccagcctggatgacagagcgagaccctgtctctaaaaaaaaaaaaaaccaaacggtgcactgttttcttttttcttatcaatttattatttttaaattaaattttcttttaataatttataaattataaatttatattaaaaaatgacaaatttttattacttatacatgaggtaaaacttaggatatataaagtacatattgaaaagtaattttttggctggcacagtggctcacacctgtaatcccagcactttgggaggccgtggcgggcagatcacatgagatcatgagttcgagaccaacctgaccaacatggagagaccccatctctactaaaaatacaaaattagccggggtggtggcgcatgcctgtaatcccagctactcgggaggctgaggcaggagaatctcttgaacccgggaggcagaggttgcggtgagccaagatcgtgcctttgcacaccagcctaggcaacaagagcgaaagtccgtctcaaaaaaaaagtaattttttttaagttaacctctgtcagcaaacaaatttaacccaataaaggtctttgttttttaatgtagtagaggagttagggtttataaaaaatatggtagggaagggggtccctggatttgctaatgtgattgtcatttgccccttaggagagagctctgttagcagaatgaaaaaattggaagccagattcagggagggactggaagcaaaagaatttctgttcgaggaagagcctgatgtttgccagggtctgtttaactggacatgaagaggaaggctctggactttcctccaggagtttcaggagaaaggtagggcagtggttaagagcagagctctgcctagactagctggggtgcctagactagctggggtgcccagactagctggggtgcctagactagctgggtactttgagtggctccttcagcctggacctcggtttcctcacctgtatagtagagatatgggagcacccagcgcaggatcactgtgaacataaatcagttaatggaggaagcaggtagagtggtgctgggtgcataccaagcactccgtcagtgtttcctgttattcgatgattaggaggcagcttaaactagagggagttgagctgaatcaggatgtttgtcccaggtagctgggaatctgcctagcccagtgcccagtttatttaggtgctctctcagtgttccctgattgttttttcctttgtcatcttatctacaggatgtgactgggaagctctggtttcagtgtcatgtgtctattctttatttccaggcaaaggaaaccaacaataagaagaaagaatttgaggaaactgcgaagaaagtgcgccgtgccatcgagcagctggctgccatggattga

SEQ ID NO: 6391 - DNA, 12277 bp, Homo sapiens
  SIMILAR (8059)..(8376): 611254mologous to Homo sapiens Human myelin oligodendrocyte glycoprotein gene,accession number AAZ29204,Smith-Waterman Score= 309.
atggcaaagaaggtagctgtgattggagctggggtcagtggcctaatttctctgaagtgctgtgtggatgagggacttgagcccacttgctttgagagaactgaagatattggaggagtgtggaggttcaaagtaagtgagattttcttgggtcttgaacaggttgtgttgttatttcagggtgaatcacagttactgatgggtcatattgagaaatttattaaacaactctgatcagattttatttctatttattgatgtggccataatggaactgaagtcataggctggcatctctcccccagtcaatactaacccaacccaggtagctgacccaggcatgtaaaagatctcttcttttggattcagcaattgtcttacagcccatacttctgtcattctttaatacgctaatattagagaacattttacaaaaatagaagtaacagggattcttctcaagatatcacttctgtttcaattattaaaccaaatgcttctttagagaccatgctcttatcattactatttttctctgacaaatgaagcatgtttgtttactgagctttatcaatgacattctagtataactgctgtgaaactctttgttaaatatgttttattaaatttattctattaatcaaaccaaaatattgataatgctatttgtctgtattagtccattctcatgctgctatgaagaaatactgagactgggtgatttataaaggaaagaggtttaattgactcccagttccacaatgctggggaggactcaggaaatttacaatcatggcagtgggaaagagaggtgctgagcaaagggggaaaagccccttataaaaccatcagatctcattagaacgcactcactatcatgagaacagcatgagggtagctgcccccttgattcaattacctacccccaccaggtccttcccaagacatgtggggattgtgggaactacaattcaatatgagatttggatggggacacaaagctaaaccatgtcactgtccttaaaaatttgtataaaacttagaaagttgcatagatagctataaggagttacaattattccttcccacaacctctcaataggtagtagcttaccaccttctagctgtgagatcttgagcaagttatttacatcctgtgtttcaatttactcagttataaatggatataataacaggaaagtgtgattatctcatagtgctattttgaagattaagggagataattcatataaagaacttagataagttccggactcatagagttcaataaatgttagctactaataataactatatattttatagatgagcaaactgaaagtgagggaggttaagtgagatggccagggccacacaactggaggaactggccttcaaaccacggcctacgtgacttctaaacagataagccctgacttacaaccatgccctaacttgcattcttgctcaaaaagattaaacaaaagtttaagttcagaacccaaaagcaatgactttagaattatgtaatcaggtatccctgagatattaaaacacataagaatattccaaatgggagcaaaaggtttgaatacatgaaaatcaaactcatatcagcagagaccatataaagggctctcactgcaggctgactagttaggaggatggcaaggtgatccaggacctgcgcatgctttgtcagttcaaattgaatctcatgccaacagcgatcttttttaacatgtaacattaggtgtctcaggtacacatgaccataaaccacacctggagggtttcttttattttctttttaatatttttctgagacagggtcctactctgtcacccaggctaccatgcccagccatggagagtttcttaaagatactgattcctttggttaaacctgccaccaaaaaaaaaaaaaaaaaaaaaaaaaaatactgatttgtgggcactccatcccaaatctatggaatcaaaatcttctgggggtttttaataaacatctcaaatgaatcctatgataagacaaatttggtaattgttacacaaacacctaatttaaaaatctgatcattctactatctaaacacactcagagttaatgagggagaagggagaaattgattcttctgtaagacaggtagctttgcaaaaaggaaaacagcttaaatcacattcatttcttattaaaagctgatgattaatatcattttagtttttcctgggatggtgatataatatggtggtcattcctgtcttaaccaaagatatttttgtccactctaggttcacatgtagatttcagctggaatttttttttttttttttttttgctcccaggtagattcttaacctaaacaagaaatgtagaaattacagttggtccttggtatatgcaggagattggctccacaacctccctcccccagtataccaaaatccttgcatactcacatcccacagatttattgtcagcaaaagagatgagagttagtttgaacagtctgccaacaatatgatttgatgaattctaggaaggtattttctgcagtaaaatatttctccaactatccttttgccagtatctaaaatttcagattagagataacttcctattcactagaaaaactggattaaaacctgattaattaggctttattgaatattaagggttaagtatataactgtggaacttgtaacagtatcacatttcaaatttctcttaaaactatatccaatagaggaatgtaaactattgtctccactcaacgaagtcaaagagtccaaagagtctccctgcagagtgaaacataaaataagcaaaatttcataggctgcctgcactacggctatgtgagggttttggttaccaggtgactgggagtttccaagaaggatgctgggagccccatgctcttccctgggaaactttgccttttcactactctaccatccagaagcaattttttaaatgggttatttattaattttcgtatttacacaactcctactgagattacttaacatatttggtggtgacaagttaacaataaataagtaaatttaagaatccttgtcctatacccaacccagacaatagagttcttccagactctccagcaccccctagtggcacatatggaccatgggacgggtaggtaattagcatatatttttcgttctgtttccagcaacgggaagcacttggcaagcatcaccttcttttcttcgcaatactgctaggaagtatgtattatgattatctttatttacatattaagaagaaacagttttcagataaagaatttgctcaggggaacataggtggcgggagaaaaaaaacgagggtttacaatttcggagctctcacacttaataaccttgctgaagtattgatagaggaaaacatgatcttctttcagccgctaaccttctctgtttcctttattgttcctaataccttgtattcacgtgggagttaccatgtacattttttttcctgtgggttttcttttaatatttggatttggatctcctccttttccagatgtatatgtttagttattttaattttcatgtaatactctctagacatatctcaatcttggttttcttcctctaagttcaatctgaaatatcactttctctcttaaatttggctcccccaagatccaacattccaaacatattgccaatgagtgtataccttttagcttgaaagcagcagaaaaaaagtggtaaatacctgagccagggaacttaattagggggttctatcagtgatcaaggccagtgatcaagggagacaccagcctaatgaaagatgacagaagatagcaatactctaatagagatgtggttcacaaagttcattgtgcagaagcagctagggagagcttctaaaatacagaaatctgagcccgtcttttttcttttcttttttttttttttttttttgagatggagtctcgctctgttgcccaggctggagggcagtagcgcaatctcagctcactgcaacctccatcccccgggttcaagcgatttagctgggattacagccttgtgccaccacacatctggacccatcttctaatgcaactggtccactgactggcatttgggaattgcaattttgcctctaattgtaggacaaggaagtaagaagagttttaatcatattcaattcaagtaatggagcagatagatgtaaggtccatccgaaagagtgaaatgatagaatcacagaatattcttaaagaaaggcaattttattctttctaactgcttatggtaactacccatgaaagcaaaaatattgattggtaagggtcaatataatgatgtttcacgaagaaaaagtttaatttgtaagtttttgtaattcacatttataataaataaatctgtttctgctttataaatttcctcacttgagtagattaaatattacccttataatcttctttaaacttactgtttacaacctttttattgtcatgaagtcaaacataaacttcaattcagctcgtgatcaaaagatcataaattctaaataagtgctatctgaattaacttggtttgctagagttttctgacattctgaaaattctatattagaagaattctttattatatgataatttatgttaaacaaattatagcaaattctacacataaggaaattcagactatatttatgcttaattatccaggcagtagtagtacttaagtaaatatgtgagttaaatttatctgttttgaaaactgtgcctctgtcctcctcttgattgacaataaaccctctgtctccactttcacatctccaaagttcaagtgcattttaatacaatataacaataagcaccataaagatataaactatgtttgtactgttagcatcttatccctaaatccaagctcaggccctggtcagttcaagcatttgatacatacttgtctattaaatcaacattaatcatctcttcataactaggaaaactaggccaattttacccagatttgtctaaatacacagatgcctacttcagcaaactaaatgtagaaggaagcacatatgaagacaagggggtcttttttagctgctatttaccaattaacccaacaataaaagtttatcacttggctgggcgcggtggctcacgcctgtaatcccagcactttgggaggctgaggcaggtggatcacctgaggtcgggagttcgagaccagcctgaccaaaatggagaaaccccaactctactaaaaatacaaaattagccgggcatggtggcgcatacctgtaatcccagctactcaggaggctgaggcaggagaatcacttgaacccaagacggggaggttgcagtgagccgagatcatgacattgcactccagcctgggcaacaagagcaaaattctgtctcaaaaaaaaaaaagggattatcacttgatcttcagaaaaatagtgaggtcattattgtttgctgacagactacacaagtaaaatctcccaaaggccagttttgccctggccctaagattactgtagggcctcagacatcaaatcagttcttctcatcactcaaaattcccttaaaattgacctgacagagaagccaaccacatttttaagccaaattgttgggtcttttaaaaactagcattttggctgtagtataacagtcttagtttaactgattcaaaactatggctggcttagtaaatttaacgctagtggccaataataacagaaaagagataaatattcttaagtatgtattttgagccagggattctgctaagtactttattcactctcattaaagccttgaaacaattgttgcatgtttaagttattaatgagccccattttacagaggaaaatgaggaaactgacctatgtaacttgctcatggtcacaagccattaaaggtggcagaattaggatatcaatccagtcggtgtgactccagaaccctcctatttactctatactactcataaaattatttggtcttggggctgggcgcagtggctcatacctgtaatcccagcactttagggggttgaggtgggtggattgcttgagctcaggagttttagacctgcctgggcaacatggtaagacctcatctctacaaaaaaaaaaaaaaaaaaaatacaaaaaattagccggtgtagtggcacgcgcctgtagtcccagctacttgggaggttgaggtgggaagatcacctgagcccaggaggttgatgctgccgtgagccataatcatgtcactgcattccagcttgggccacagagtgagaccctgtctcaaaaataataataataatctggtcttgagaaaaaatagtatttttttcttcataaaatattttccattttgagaacttgattaagaaactcattgtcttgccaatgacattacattcaatcatgctgaaacatccagaaatagtttacacatcagtttgacatcagtattatgcaatttgaagccactgtttgaaaataaaaacactgtaccgtgatttgtttatccagagttcagattattatatccttgtatatgagacagaaacccccttgtattctagtgcaaactctctttggatcttaatatgtatagttaacaataataccatactacattctaactacctagaaagctagcataccttaacctgattaacttttaccaagttacttgaaattatagcaaagttaccatttaaatcttgattctggccaggtgcagtggatgaaccaagcatggtggtgcctgtaatcccagcactttgggaggctgaggcgggtggatcacgaggtcaggagattgagaccattctggttaacacagtgaggccccatctctactaaaaaatacacacaaaaaaaattagccgggcgtggtggcaggcacctgtagtcccagctactcaggaggctgaggcaggagaatgccgtggacctgggaggcggagcttgcagtgagccgagatcacaccactgcaccccagcctgggcgacagagcgagactccatctcaaaaaaaaaaaaaagatttgattctatcagtctactcacctttatagcttgacaatgattgatttgtgtaaaaggattcaaatcaaaatttgcaaactcccttcctccaaaggtactcattttataatactgaaattctctattatgttctctgcccagtgtcccagggtttattggtttctaaagaggtagtgggtatatacagcctccccaaggggaatttaggaagtaagctggttgtcacaaagactggcattaaataggtagagacctaggatgctaatatcttgcaatgtgccaaaataattgtccctgtccccaacctcaccattgccaatattacccctacccctcacagtgagcgtcacaggcaggcaacaaactggtgtcgtcacagaatgattgatggaacacatagactgcattcattacctaaacattgtcgtcacactgcagcaaccaaagacaatcgcattacccaggggttagatgtaggaagagtaaaaaacaaaaaatttttgaatgcgtaattatcactaattattttatttgatccttcaggagaatgtggaagatggccgagcaagtatctatcaatctgtcgttaccaacaccagcaaagaaatgtcctgtttcagtgactttccaatgcctgaagattttccaaacttcctgcataattctaaacttctggaatatttcaggatttttgctaaaaaatttgatctgctaaaatatattcagttccaggtattgtatttttggggaaatgggtttctctgcattagttcagctcatatttagatagaaaagttactctgataatgaaagcaattatgaatgaagtatcccattctaagtatttgttgaaatataacagcctcatataaaacccaaaaagtagtgtcattacccttggtattatagattatatacattaattgaagaggaaaatcatctgttaaaattaaaggtttgaataataatatattgatgtcaaaacttttttttttttttttctccctgagacagagtctcactctgttgctcaggctggagtgcagtggcatgatctcagctcactgcaacctctgccttccaggctcaagtgattctcctgcctcggcctccagagtagctgggattacaggcacacatcaccatgcctggttcatttttgtatttttggtagggacgaggtttcaccatttgggccaggctggtctcgaactcctgacctcaagtgatccacccgcctcggccccccaaagtgctgggattacaggtgtgaaccaccacacccagcctcaaaaattcatttaaactaatatctgttatcattgaatacacctagcttcatttgccttgaaagggcgtataccaaaattaaattgctgttttgttttcttagcttcttcatagaaatgggatttcttagatgtgtattaaataaattcattggtctctgttcatactagaaggctgtgggaagtatttgcttatcatttttttctgaatgcaatctcttacaacctaaagatggccagatcattttgaaaaacacttggaattaccttttcctgtgcttcctcaaaatcaacaaaaagcaatattttaattaagcatgctgaatttttatcaatggtctatactttgagaaatagctactatgcttagaaaataaaatataaatcacatttcttggccaggtatggtgattcatgtttgtaatcccagcactttgggaggctgaggcaggaagatcacttgaacccaagagtctgagaccaacctgggcaatacagtgaaaatctgtctctacaaaaaatttttaaaagattatccaggcatgttgatacccacctgtggtcccagctactcgggaggctgaggcaggagaatagcgtgaacctgggaggcggagcttgcagtgagccgagattgtgccactgcactccagcctgggcgacagagcgagagtccgtctcaaagtaaataactaacatttctggataaataactgttagtgaggcttatttttaatacatgtcattttcttagtaattctaatactaggcttatataatatcaacttacaatagtaaattttggtgaaaatttgtatttataaattccattaaaatgtccagttctacctaatgtagtttttcaccaattcctggtagatctaacttgtgaataacagattatgtataccagaaggttttgtaactttgtgcacttaactatcaatctacttaacaaatatattgcctttttatgatatataacttctattccattcttttaaagatcatgttagagtcgcaaggaagtcatttctcttggttattgtgttactgctacttttgtttcttggagagtgaagaggggttgggaagaaaggtttctgtttattggtctctgagttggtgtaagtcataggtgttagagctcaactcgagaagcaggcaaactgtaacaagccctgttgcttatgattgtcaatgtaatctacatcagtgcttctcaaactttaatgtggacatgaatcacctggatatcttgttaaaaatgtaggttctaatttaataggtatggggtaagttctgaaattctgcatttctgacaagcttccaagtgatactgaagatcctgatcctcaaatcacattttgaatagcaaggatctacagcacttagttaatatactactttgaactaccatctgaaatcttttctttcatctgaaaactgcccagatatttaaagcccttttacaagatttctactaatattccatatacatttttaaattgagacagcttaaaaattaccaacccagcagttggaaaaatatctgaaaatttgagatatataaaagactaaaatacttgcaaatgagaagcatgccattcctctagcattataaactttgcttccacttgacatcgtttcttaatccagcagatatgaaacatttatgtacaattttaaaaattaacagacctccagtgagctacatttaaaaaaatcaatgaaccaataaatcattttattcaaataagatcatgaactgtcttgctcacatgatgtactctgttttaaaaatagcaaatgttaaaaactatcattcagtggaatgctgaccatgtgtcaggcactctgcaaagtgttttgcgtgaaatatcttctctaatacaaagtccacaaagaggcggctacataaaacgttcctgacatatgccaattgcatgatcacttgaattattggtttgtttccttgttcagattatcaaataacaaacagagagaagttctttaaaagaaaagatatatatttggtgatagagcattgtaatgagaatgtacatgccatggtaaactatttgtgtattcagggagttaaaggaagacaaaggtttttaaatggggaaaaaatacaattacataattgttttgaaataattatataaagagcaataacaagggtgatgccagtctgagattggacagttactgagcagatgttcttgtagaagtcatttttgtgtaagattatgatggtctttgtgtaaggtggtggtttttgtagtttttgttatcaggcacacatcatgagaacccgctctttctggcctttcccaattctatttgtcgggtttcttaacattagtgactccatctagattctgacagttttcatgagaacttgcttttcttttctctctcaagtccttattcagtattcagcacccttaacagattagtcccactgctgagtcaggcctcttgcatgaagcagcaatgagaaagacacacttggccaatgttatcctggagtaattctcaatgatgccttctctgtgtttcttcaagacaactgtccttagtgtgagaaaatgtccagatttctcatcctctggccaatggaaggttgtcactcagagcaacggcaaggagcagagtgctgtctttgacgcagttatggtttgcagtggccaccacattctacctcatatcccactgaagtcatttccaggtgagacccgctgggattcccagctttttggagtaggtttccaggtactttatatgtagtttggattgacaagcaggattcattgctgcaactgggcagaacttggctcaataagattgagacagagctagaaagatgaaagacaccaaacatcatctttgtttctattggcctctgagtcttcatcacacatagatctcagagccaacttccttggaagtcactaagtccttggcataattttagagaattcacatcaaactggttctctgttggagaggcccttttagccatgtgcctgcgttggcctttttctaccctgccaaacaccgagcctttttcacagggccatactcacacacaaggggagagctcctagaaagaaatgctttgcaagttagtgatggggagagaagtgcaggaatagaaccctgcatccagctgttctggtccacccaagtctttcctcagagaacacacttctttcccaaggcccttaggaaaatatgtaatatagtggttcatagtccaggcctcatattagaatcacctggggagcttctaaagccctgatggcctggagacctacccccaaagattcaaacactatggagtagggttagagcaatgaaagtttgctcaggtgattttaatatacagtcaggattaaggcctgctcatctaaagcaattgttctcaaatagagtcacctggagggcttttgaaagcacaaattgctaggccccaccctccatatttctgattcaataggtgctatggcttgaatgtcctgtccaaaactcatattgagattaatccccaatggggcagtatgaagaggtggggcctttaagaggtgattgagtagtaagagctctgccctcaagaatggattaagccatttgtggataaataggttaatggattattgggttacacaggagtggaactggtggctttataagaagaggaagagagacctgagctagcatgttagcatgcttggctccctcaccatacaatgccctatgctgccttgggactcttcagagtccaaaccagcaagaaggctttcagcagacgcagcccttcaaccttgacttctcagcctccacaattgtgtgccagaagaaataacttccttcccctataaaatattcggtttcagatattttgtta

SEQ ID NO: 6392 - DNA, 380 bp, Homo sapiens
  SIMILAR (9)..(260): 801254mologous to Homo sapiens bA203I16.1 (KIAA0970 protein),accession number AL137000,Smith-Waterman Score=320.
agcacgagcgctttcgtgtatgtgccattcgccagggccaagactctctgggacaccaggacctcggatgtccctacagcaccacagggctctttatctctcagaggactgaaccaccaaccaccaccaacagatacactgtggaaagcacaaggacccgacgggcactgagtgacaagcaaagtgctgccgtcatccttgagctaggggctttcttttacattatgaacgcctttataattcagtactttgcgttcaagagaaaatataactccattttgtaactctatgacactttatcctgtcatgtgctaaaactatttctgtattgctgttataaaaaacagagggatttatccctgacattgagactataccac

SEQ ID NO: 6393 - DNA, 365 bp, Homo sapiens
  SIMILAR (2)..(175): 841254mologous to Homo sapiens HRIHFB2017,accession number AB015331,Smith-Waterman Score=250.
aagacaaaattcactgcgtgggtcgttccatagtgcacatgtattgaaaatggatgattttggtgccgtgccatgtacagaccttgtggtgcaaagcatctctccccatcagtccaaacagtcccagccagtcgaattagacccatttggtgctgcgccatttctttataggcagtaaatacttttgagggcttctcggcattatctcctgtttcaaaaaagtgtgaacagttttatgactttgaaagaaaatgtggtagctcttcatagcattctttttttaagatcagtcagattaggtgatttataaataccccttatcgaagaattaagtgtctaaacagggtattgaagatcaaggagaa

SEQ ID NO: 6394 - DNA, 1559 bp, Homo sapiens
  SIMILAR (1)..(489): 1001254mologous to Homo sapiens unnamed protein product,accession number AK021815,Smith-Waterman Score=877.
aaagatccagaaagcttttttaaggtattaatgcatcttaaagacttaggactcaatttccacgtgtctgtacttggagaaaccttcacagatgtcccagatattttttcagaggccaaaaaggcattgggatcttctgtcttacactggggctacttacccagcaaagatgactatttccaagtactgtgcatggctgatgttgtcatctcaacagctaagcatgaattctttggagtggcaatgttggaagctgtgtactgtgggtgttacccactttgtcctaaagatttggtttatcccgaaatatttccagctgaatatctgtattctacacctgaacagctttcaaaaaggctccagaatttctgcaagagaccagatattataagaaaacatctctataagggtgaaatcgctccgttttcttgggcagccctacatggtaaattcaggtctctgcttacaacagaacctagggaagatttgtgacagatggggctaagtcacaaacttgcagcgctaaggcagaatctgaagaactttccagagtgcgcccatatttacctgatcagagagaaaagaaaatctgctgaggaagctgagcccggctgcttgacatacctgacacagaggcatctgtcacaaacctgtggaggattgagatctccaatccctgccaccaccccaactcaaattaaatacagattcctagagacgttatgatggttacacatgtcctcggcatcacatgtaggagactgttcaaaaaaaatatgtggcctgttgtataaccgcactcatgtatcccatatgtggtgcccacattgaatttcccggttggaatccgtttttatcctttgtactggatgacatggtgcctgaattctttcttttcgccgacacgatgggcagccaaactgcagcttcaaacgctcacacttggctgggtttctacctaggttgcccaggttatcatcggagccttcttgtgtcctcaaaaggccacgaggcctgaaaggaggatcagaatgctttgggattaattgggcagccatcgcagaattgtttgtgggcaaagggctgctttagcacttttcttttagcaaattagacgactctcaggcaccagggggttttaagtgaaggtattaataagagggtctggcaggtattcccatggattcacagagttacatttggcatttgaattaatgcttaaagttgcaagataaacagctgttaatttcggacaaacatggacaaacacagtgaaaggccaactatcccattaaaaatgaacactggacatacttgttttaatttttttcccagcgtaaaaatagaaaaatcaaaatactcctaacaaaaccgagtgattttgataggaaatatttctccaatatacttggcatccacctacaaatattaaccttttcaagataaatcgcttatgatttcaatagtcaaactgctgtgtttgttgatgtaaagatgttttgaatggctagatggtaaaataaattcttaataaagtacccactgcaatttttaaaaaa

SEQ ID NO: 6395 - DNA, 700 bp, Homo sapiens
  SIMILAR (3)..(608): 981254mologous to Mus musculus putative,accession number AK006746,Smith-Waterman Score=1087.
  misc_feature (1)...(700): n = a,t,c or g
gcctacagtatcagaaagtggacaagttattcttgcacccaaagtttgatgactggctcctggacaacgacatagctttgctcttgctcaaatccccattaaacttgagtgtcaacaggatacctatctgcacttcagaaatctctgacatacaggcatggaggaactgctgggtgacaggatggggcattactaatactagtgaaaaaggagtccaacccacaattctgcaggcagtcaaagtggatctgtacagatgggattggtgtggctatattttgtctctattaaccaagaatatgctgtgtgctgggactcaagatcctgggaaggatgcctgccagggcgacagtggaggagctctcgtttgcaacaaaaagagaaacacagccatttggtaccaggtgggcattgtcagctggggcatgggctgtggcaagaagaatctgccaggagtatacaccaaggtgtcacactatgtgaggtggatcagcaagcagacagcgaaggcggggaggccttatatgtatgagcagaactctgcgtgccctttggtgctctcttgccgggctatcttggtcctatattttggaatgtttcttctaacctgatgattaaacgtgagaactgccaaatgccnnnnnnnnnnnnnnnngggccgcccgtttctaaaggatcccctgggggggcccaaaattta

SEQ ID NO: 6396 - DNA, 352 bp, Homo sapiens
  SIMILAR (2)..(136): 951254mologous to Homo sapiens dynamin,accession number L07810,Smith-Waterman Score=236.
gtccgccctggggggggcgccccccgtgccctccaggccgggggcttcccctgaccctttgggccctccccctcaggtgccctcgggccccaaccgcgccccgcccggggtccccagaatcactatcagtgacccctgaggagcgtcagccatgccgatcgggtcaggcaagtccatcccgtcctgagagccccaggccccccttcgacctctaaacagatccctcctcttctgagataccttcctttccaagcctgcctggacggctgttctgtgacttgacagtggctcccccagccccaaagccagcccacttcatctgtgacttaatctgtggaagaggtgaactgat

SEQ ID NO: 6397 - DNA, 2631 bp, Homo sapiens
  SIMILAR (1)..(2553): 991254mologous to Homo sapiens dynamin,accession number L07807,Smith-Waterman Score=4363.
atgggcaaccgcggcatggaagatctcatcccgctggtcaaccggctgcaagacgccttctctgccatcggccagaacgcggacctcgacctgccgcagatcgctgtggtgggcggccagagcgccggcaagagctcggtgctcgagaatttcgtaggcagggacttcttgcctcgaggatctggcattgtcacccgacgtcccctggtcttgcagctggtcaatgcaaccacagaatatgccgagttcctgcactgcaagggaaagaaattcaccgacttcgaggaggtgcgccttgagatcgaggccgagaccgacagggtcaccggcaccaacaagggcatctcgccggtgcctatcaacctccgcgtctactcgccgcacgtgctgaacctgaccctggtggacctgcccggaatgaccaaggtcccggtgggggaccaacctcccgacatcgagttccagatccgagacatgcttatgcagtttgtcaccaaggagaactgcctcatcctggccgtgtcccccgccaactctgacctggccaattctgacgccctcaaggtcgccaaggaggtggacccccagggccagcgcaccatcggggtcatcaccaagctggacctgatggacgagggcacagatgcccgtgatgtgctggagaacaagctgctccccctgcgcagaggctacattggagtggtgaaccggagccagaaggacattgatggcaagaaggacattaccgccgccttggctgctgaacgaaagttcttcctctcccatccatcttatcgccacttggctgaccgtatgggcacgccctacctgcagaaggtcctcaatcagcaactgacgaaccacatccgggacacactgccggggctgcggaacaagctgcagagccagctactgtccattgagaaggaggtggaggaatacaagaacttccgccctgatgacccagctcgcaagaccaaggccctgctgcagatggtccagcagtttgccgtagactttgagaagcgcattgagggctcaggagatcagatcgacacctacgaactgtcagggggagcccgcattaaccgaatcttccacgagcgcttccctttcgagctggtcaagatggagtttgatgagaaggaactccgaagggagatcagctatgctatcaagaatatccatggcattagaacggggctgtttaccccagacatggcctttgagaccattgtgaaaaagcaggtgaagaagatccgagaaccgtgtctcaagtgtgtggacatggttatctcggagctaatcagcaccgttagacagtgcaccaagaagctccagcagtacccgcggctacgggaggagatggagcgcatcgtgaccacccacatccgggagcgcgagggccgcactaaggagcaggtcatgcttctcatcgatatcgagctggcttacatgaacaccaaccatgaggacttcataggctttgccaatgctcagcagaggagcaaccagatgaacaagaagaagacttcagggaaccaggatgagattctggtcatccgcaagggctggctgactatcaataatattggcatcatgaaagggggctccaaggagtactggtttgtgctgactgctgagaatctgtcctggtacaaggatgatgaggagaaagagaagaaatacatgctgtctgtggacaacctcaagctgcgggacgtggagaagggctttatgtcgagcaagcatatctttgccctctttaacacggagcagaggaatgtctacaaggattatcggcagctggagctagcctgtgagacacaggaggaggtggacagctggaaggcctccttcctgagggctggcgtgtaccctgagcgtgttggggacaaagagaaagccagcgagaccgaggagaatggctccgacagcttcatgcattccatggacccacagctggaacggcaagtggagaccatccggaatcttgtggactcatacatggccattgtcaacaagaccgtgagggacctcatgcccaagaccatcatgcacctcatgattaacaataccaaggagttcatcttctcggagctgctggccaacctgtactcgtgtggggaccagaacacgctgatggaggagtcggcggagcaggcacagcggcgcgacgagatgctgcgcatgtaccacgcactgaaggaggcgctcagcatcatcggcaacatcaacacgaccaccgtcagcacgcccatgcccccgcccgtggacgactcctggctgcaggtgcagagcgtaccggccggacgcaggtcgcccacgtccagccccacgccgcagcgccgagcccccgccgtgcccccagcccggcccgggtcgcggggccctgctcctgggcctccgcctgctgggtccgccctggggggggcgccccccgtgccctccaggccgggggcttcccctgaccctttcggccctccccctcaggtgccctcgcgccccaaccgcgccccgcccggggtccccagatgcagccgtaggagcactttgctaactgccaacgtgagttcagattcttcagggtatttggcacccaggtctatggtgcggtgtgagatctgtgat

SEQ ID NO: 6398 - DNA, 711 bp, Homo sapiens
  SIMILAR (2)..(109): 911254mologous to Mus musculus P24 protein,accession number D83206,Smith-Waterman Score=174.
agacatcaaagcccacacccagccggttacaaaagctccagggccaggggaaacaaagattccagtcactttgtccagggttcaaaatgtccagcctctactggcaacctgaaacctttcccaccccagttcttcttgtctgatttatgcccgtggttaaaaagagcaggccagttttcgagataaagaagatttggcgttgactgccctagggctgtgttcagctgtgggcaatataatgggtggactcacacttgctcagttcaggcagctctgctggaagggcggtgccattgcctaagcctgtgcacatgcatccagctgcttaagatgggtgcttccttgtacccggccaccagaaaacccctgggaactcctctttcatagatcgtgactttgtgttattttccgtgttgtttgaaagtgccgaacagtttagaccagctcaccaatgggctaaatgtgggtccattttattttcttaatattgggttatctaaatgttttctgcgtgggtgctgtctttccattcctgtcttcactatgtgtaaaggattttgtcatatgtgttccataggaaacagggaattctctgatttggaggccgaacatgaggttttagactatatcctggacatgaggttcctgacattggatacaaagttatcaggcattcacaaatctttttggtttctccattttttttccctt

SEQ ID NO: 6399 - DNA, 1500 bp, Homo sapiens
  SIMILAR (241)..(1074): 991254mologous to Homo sapiens serologically defined breast cancer antigen NY-BR-99,accession number AF308303,Smith-Waterman Score=1404.
atgtctctggcagatgagctcttagctgatctcgaagaggcagcagaagaggaggaaggaggaagctatggggaggaagaagaggagccagcgatcgaggatgtgcaggaggagacacagctggatctttccggggattcagtcaagaccatcgccaagctatgggatagtaagatgtttgctgagattatgatgaagattgaggagtatatcagcaagcaagccaaagcttcagaagtgatgggaccagtggaggccgcgcctgaataccgcgtcatcgtggatgccaacaacctgaccgtggagatcgaaaacgagctgaacatcatccataagttcatccgggataagtactcaaagagattccctgaactggagtccttggtccccaatgcactggattacatccgcacggtcaaggagctgggcaacagcctggacaagtgcaagaacaatgagaacctgcagcagatcctcaccaatgccaccatcatggtcgtcagcgtcaccgcctccaccacccaggggcagcagctgtcggaggaggagctggagcggctggaggaggcctgcgacatggcgctggagctgaacgcctccaagcaccgcatctacgagtatgtggagtcccggatgtccttcatcgcacccaacctgtccatcattatcggggcatccacggccgccaagatcatgggtgtggccggcggcctgaccaacctctccaaggtgcccgcctgcaacatcatgctgctcggggcccagcgcaagacgctgtcgggcttctcgtctacctcagtgctgccccacaccggctacatctaccacagtgacatcgtgcagtccctgccaccggatctgcggcggaaagcggcccggctggtggccgccaagtgcacactggcagcccgtgtggacagtttccacgagagcacagaagggaaggtgggctacgaactgaaggatgagatcgagcgcaaattcgacaagtggcaggagccgccgcctgtgaagcaggtgaagccgctgcctgcgcccctggatggacagcggaagaagcgaggcggccgcaggtaccgcaagatgaaggagcggctggggctgacggagatccggaagcaggccaaccgtatgagcttcggagagatcgaggaggacgcctaccaggaggacctgggattcagcctgggccacctgggcaagtcgggcagtgggcgtgtgcggcagacacaggtaaacgaggccaccaaggccaggatctccaagacgctgcagcggaccctgcagaagcagagcgtcgtatatggcgggaagtccaccatccgcgaccgctcctcgggcacggcctccagcgtggccttcaccccactccagggcctggagattgtgaacccacaggcggcagagaagaaggtggctgaggccaaccagaagtatttctccagcatggctgagttcctcaaggtcaagggcgagaagagtggccttatgtccacctga

SEQ ID NO: 6400 - DNA, 491 bp, Homo sapiens
gtttgctcccagtgggtagagaacccggcattgtgggtaccttattagaactgaagcaggatgtaagcgtataatttgtcagacgggcaatatggtctagtggatccagaatttgaatattatttctggctctgctgctggcttcctttatgactaggagggaaatgtctctgggtgttgccagtttcggtatctggtgatagaaatgataatgaccaggctgagcgcaatggctcacacctgtaatcccagcaccttgggagactgaggcaggtagatcgcttgagctcaggagtttgagaccagcctgggctcaagcgatcctcccacctcagcctcccaaagtgctgggaccacaggtgaaagacactgcacctggactatctttctgttattgctgtggtggggagcacaccaaaatagtgcctgtcatcctcatccttcgcaggcatctttacccagcactgctgctgtgattagtcctcgtgccg

SEQ ID NO: 6401 - DNA, 2254 bp, Homo sapiens
  SIMILAR (575)..(2149): 951254mologous to Homo sapiens lymphoid-restricted membrane protein,accession number U10485,Smith-Waterman Score=2531.
tatattggcagttattgagggtaaagcaatatattgtaacagaatgtataaatatttttgataaaacagtctatattttattaaaaaatgaattataacccattttcagttttgcctgcatcataagagtgagcactccattgctttctttcctggccacactgctacaatccagcactaactatccatgtccagggtaaggatcgagatcgagaagcccacactgccagtgaaaaagctacgtctttactgcataaattagaggaagcaatttcggaacaacggaaccttcaaactataaatactgaattatcgaacacttgccaggcacttcagcagaagacaaggaaactgaagaagctttttagatgaggaatttcctcactatgattccctgtcctgcgcagatgcaattcaacaacctcttcaagaaaaattgaagcagtgttgccacaaactatatggtggtcaagaagcaagaatacatcagacacccctgaccttgaaacatacgtgctggtacacacctctgctggatgccttatctctggatagttttacagcagttccaaccctggaatcaacacctttctcaggtgtagccaaccaaatccacactctgtgtgaaaggcccacatatggagaagtaaaggatggtgctttggatgtaaaaagacaacacaagtgcccaggccccacaagtggccccagcccaggaacgaatctctcaggctgcatcaggatgaatgatgacccaagtatggaagagaatggtgttgaacgcgtgtgtcctgagagcctgctgcagtccaggggatattcctcactaccattacccagacacacttcatcgacagacggtactataacttcaagtgatcctggattagaaattctgaatatggcttcttgtgaccttgacagaaactcgctctgtaagaaagaggaggatacaagatcagcttctcccacgatagaggcccaaggcacaagtccagctcatgataatattgcattccaagactctacgagtaaggataaaaccatattaaatctggaagccaaagaggaaccagaaacaatagaagaacataaaaaagaacatgcttcaggagactctgtggtttcccctcttcctgtaaccactgtgaaatcggttaacgttagacaaagtgagaacacttctgctaatgagaaggaggtggaggcagaatttctcagattatctttgggatttaagtgtgactggtttaccttggagaagagagtgaagcttgaagagaggtcccgtgactgggcagaagaaaatttgaagaaagaaatcactaactctttaaaactattagagtctttaacacctctgtgtgaagatgacaaccaggcacaggaaatcattaagaagctggagaagagtataaagtttcttagccagtgtgcagcacgagtggccagtagggctgagatgttgggagccatcaatcaggaaagccgggttagtaaagcagttgaagtgatgattcagcacgtagaaaacttgaagaggatgtatgccaaagagcacgctgaattagaagaactgaaacaggttcttctgcagaatgaaaggtctttcaatcctcttgaagatgatgatgactgccaaattaaaaaacgttcagcttctctaaactccaagccatcttctctacgaagagtgactatggcgcttctttttttacccagaaaattatttgggaaatgcagggaatggtggctgggatggaaaataatgatcgattcacgtagaaggtcaagcagttggcgtattttggggtcaaagcagagtgaacaccgtccctcattacctcgatttattagcacctattcctgggcagatgctgaagaagaaaaatgtgaactaaaaactaaagatgactcagagccatctggagaagaaacagtagaaaggacaaggaagccaagtctttctgaaaagaaaaataatccatcaaagtgggatgtctcttcagtttatgacacaatagcttcctgggcaacaaatctcaagtcctccatcagaaaggctaataaggccctctggctctctattgcattcattgtactgtttgcagctttgatgagcttcctcacaggccaattattccagaagtctgtggatgccgctcccacacagcaagaggactcatggacgtctctagaacatatcttgtggccatttaccagactccgacacaatgggccaccaccagtgtga

SEQ ID NO: 6402 - DNA, 1864 bp, Homo sapiens
  SIMILAR (94)..(249): 941254mologous to Homo sapiens lymphoid-restricted membrane protein,accession number U10485,Smith-Waterman Score=247.
atgagataccacttcacacccacgaggatggctatggtgaaagaagaaaggaaactttcaaccatttcttctgttcacatacccaccatcaaccttactgaggaaagccgggttagtaaagcagttgaagtgatgattcagcacgtagaaaacttgaagaggatgtatgccaaagagcacgctgaattagaagaactgaaacaggttcttctgcagaatgaaaggtctttcaatcctcttgaagatgatgtgaagatgagcacagatataacagattctacattggggagcttcgaggctttgggaggagaaacatctaaaggagtcttagaggtgtctgatttgattgcctacgtagcagaccttcatttcaacaaaagaaaacttgaggaagaaaataataagtttaagttggctttagaaaccctggaagaaactaacagccagttatcagaggactgtaccgaattgcgccttcaggtaaaaagtgcccaccaggctattatgagaacaaatctgttaaaagaagaactggaggaactgaaacttagtatgaatgcttcagaagagcagaagagcatgattgtagcccagagcaaacaattagagacagaaaaccgggctctgattcttaagattcggattctacaggaagagaatttcaagaacatcatggatatagacagactggaaaagaagattgaagacttgtctaaaactgagacagagcaccaagtaagcacttcccaaatactgatgcagttacacacatatgagaacactttgcttaataaagatacaagtttgcagaagaaatgggatccagttgaatgttaatggagagtgtaacagtatcatctctgaaggagaaaagtctttacattacgaactcactcttgctcagtctgcagagaacactgaaacagaaaggcagcacaatgtaatcaacttgtcatctctggacgccatgatggatcaggaaatgctgctattactaagagagcccgcacagaaggcagtggaattcacagccacgcttcagaagctgcacgaagaaatttctaaaattgcaaccctcattgaaaactctcgacggtgggtaactaatccagaaattactgtgaaagaaaagtgggaggagcagcttactgaattcaacaatatcatggaagagaagctagatctttgcatattaatgctgaacatcttgggaaaccacaaagagtctcttgataaagaatttgccaaattaatagagattttgaagagattcaggcaggaatatttttatttcagaaaagaatttcttgccagaaccagagaatttaggcacaggttggacatgaggctaaaagagaccccagaactggaaactcatgctcccaaatcctgtcccctcctgtcactgaatgatgatgtgataccgaaactggcaacacccagagacatttccctcctagtcataaaggaagccagcagcagagccagaaataatattcaaattctggatccactagaccatattgcccgtctgacaaattatacgcttacatcctgcttcagttctaataaggtacccacaatgccgggttctctacccactgggagcaaacaagggaacgtgcagacgctggacagcatacgatggatgcctgcaactcctgtacctgcccccgaatgccaccagaaatatgccatctctactgaaacagcttttccaaccctgagcacgtttatgaacacggaaaagagtgtaaaggggtcaaatgcagactttacaaaaagaaacccaagatggagattcctgttggggatatactgcagggagggtaatggcttcctagagccagatgccagcacctga

SEQ ID NO: 6403 - DNA, 3738 bp, Homo sapiens
  SIMILAR (187)..(2706): 871254mologous to Rattus norvegicus SPANK-1,accession number AF159046,Smith-Waterman Score=3891.
atgatgtgtagaggaacagtgttccaggcaggtggaacagcaggtgcaaaggccctgagtccctatccggacgaggacggcggggacggcgggctgggcacaggggcggccccgggcccgcggctgcgccactccaaatccatcgacgagggcatgttctccgccgagccctacctccgactggagtctgcgggcagcggcgcgggctacggcggctacggggccggtagccgagcctacgggggtggcgggggcagcagcgccttcaccagcttcctgcccccgcgacccctggccctggatcccgcctccccgctggggctggccctggccgcccgcgagcgagcgctgaaggagtcctcggagggcggcggggccccccagccgcctcccaggcccccatcgccccgctacgaggccccgccgcccaccccgcaccaccactcgccccacgcccaccacgagccagtgctgcgtctctggggggcctccccgccggaccctgcgcgccgggagctggggtacagggccgggctgggcagccaggagaagtcccttcccgccagcccgcccgccgcccggcgttccctgctacaccgcctgccgcccaccgctcccggggtggggcccctcctgctgcagctggggacggagcccccggccccgcaccccggagtaagcaagccctggaggtccgcagcccccgaagaacccgagcggctgccgctgcacgtgcggttccttgaaaactgccagccccgggcccctgtgacgagcggaaggggtcccccctcggaggacgggccgggggtcccgccgcccagcccacgccgcgaagagaacgggctgcccctgctggtcctgccgcctcccgccccctcggtggatgtggaagatggcgaattccttttcgtggaaccgctgcctccgcctctggaattctccaacagcttcgaaaagccagagtcgcccctcacgcctgggcctccccacccgctgcccgacacacctgcccctgccaccccgttaccccctgtgccacccccggctgtggccgcagcccctcccaccctggactccaccgcatccagcctgacatcctatgacagcgaggtggccaccctgacccagggggcctccgccgctcctggggacccccatccaccaggcccgcctgccccagcagcaccggctcccgctgccccacagcctggcccggaccctccgcctggcacggattctggcatcgaggaggtggacagtcggagcagcagtgaccacccactggagaccatcagcagcgcctccacgctgagcagcctatctgccgaaggtggtggcagcgcagggggtgggggcggggctggggccggtgtggccagtgggccggagcttctggacacctatgtggcctacctggacggccaggcctttgggggcagcagtactcccggcccgccataccctcctcagctcatgactccctctaagctccggggccgggcgctaggagccagcggaggcctgcggcctggccccagcgggggactccgagaccctgttacccccaccagccccaccgtctcggtgacaggggctggaaccgatgggctgctggccctgcgtgcttgttcaggaccccccacggcaggcgtggcggggggtccggtggctgtagagccagaagtcccaccggtgcccttgccgacggcctcctctctgccccggaagctgctgccctgggaggagggcccgggcccaccgccaccacctctgcccgggcccttggcccagcctcaggcctcagccttggccacagtaaaagccagcatcatcagtgaactcagctccaagcttcagcagtttgggggctcctcggcagctggcggcgctctgccctgggcccgaggaggcagtgggggaggcggagacagccaccacgggggagccagctatgtccccgagaggacctcctccctgcagcggcagagactctccgacgactcccagtcctcactcctctccaagcctgtcagcagcctgtttcagaactggcccaaaccacctctgccgccactccccaccggaacaggggtctcccctacagccgctgcggccccaggggccacctcaccctcagcctcctcctcctccacgtccacccgccacctccagggcgtggagttcgagatgcggccccctctgctccgccgggcccccagcccctcgctgctgcccgcctcggagcacaaggtcagccctgcgcccaggccctcgtccctgcccatcctgccttccggacccctctacccaggcctctttgacatccgtggctccccaactggaggggcaggaggctcggctgaccccttcgccccagtctttgtgccgccacacccggggatatccggggggctcgggggagccttgtcaggggcctcgcgctccctctcaccgacccgcctgctctcgctgcccccggacaagccgtttggcgctaaacctctggggttctggaccaagttcgacgtggctgattggctggagtggctgggtttggcggagcaccgagcccagttcctggaccacgagatcgatggctcccacctgcccgccttgaccaaggaggactacgtcgatctaggtgtgaccagggtgggccaccgcatgaacatcgaccgggctctcaaattcttcctggagaggtacccagccctgccccgacccctcacccagcagactctgacctcccagccggaccccagcagtgaggagcggccacctgccctgcccttacccctgcctggaggcgaggaaaaagccaaactcattgggcagattaagccagagctgtaccaggggactggccctggtggccggcggagcggtgggggcccaggctctggagaggcaggcacaggggcaccctgtggccgtatcagcttcgccctgcggtacctctatggctcggaccagctggtggtgaggatcctgcaggccctggacctccctgccaaggactccaacggcttctcagacccctacgtcaagatctacctgctgcctgaccgcaagaaaaagtttcagaccaagctggcccaacgcaaactgcacttcagcgtctatgactttgaccgcttctcgcggcacgacctcatcggccaggtggtgctggacaacctcctggagctggccgagcagccccctgaccgcccgctctggagggacatcgtggagggcggctcggaaaaagcagatcttggggagctcaacttctcactctgctacctccccacggccgggcgcctcaccgtgaccatcatcaaagcctctaacctcaaagcgatggacctcactggcttctcagacccctacgtgaaggcctccctgatcagcgaggggcggcgtctgaagaagcggaaaacctccatcaagaagaacacgctgaaccccacctataatgaggcgctggtgttcgacgtggcccccgagagcgtggagaacgtggggctcagcatcgccgtggtagactacgactgcatcgggcacaacgaggtgatcggcgtgtgccgtgtgggccccgacgctgccgacccgcacggccgcgagcactgggcagagatgctggccaatccccgcaagcccgtggagcactggcatcagctagtggaggaaaagactgtgaccagcttcacaaaaggcagcaaaggactatcagagaaagagaactccgagtga

SEQ ID NO: 6404 - DNA, 2087 bp, Homo sapiens
  SIMILAR (2)..(1018): 311254mologous to Homo sapiens KUP protein,accession number X16576,Smith-Waterman Score=300.
tgagtgtgtccgcttgaaaccaactgacatacagcccgacatcttcagctatctcttacacttgatgtacactgggaagatggcgcctcagctcatcgacccggttcgattagaacagggcatcaagtttctgcacgcctacccgctcattcaggaagccagcctcgccagccagggagccttttctcaccctgaccaagttttcccactggcttcttcattgtatggcattcagattgcagatcatcagttgagacaagccaccaagattgcttcagcacctgaaaaactcgggcgagatccacggccacagacctccaggataagccaggagcaggtccctgaggcctcacagctctcccagctgacttcaaatctggcccaggtgaatcggacaaatatgactccctcagaccccctgcagacctcgctgtctccagaacttgtttccactcctgttcctccccctcctcccggggaggagaccaatctggaagcatcttcctcctatgagcagcctgcgtccctcacaatagcccacgtcaagccaagcatcatgaagaggaatgggagctttccaaagtactatgcctgccacctgtgtggacggcgcttcactctccggagcagcttacgtgaacacctccagatccacacaggagtacctttcacatctagccaacagggagaaagtcgcgtccccctgactctctgtagcaatgcagctgacctcgggaaagatgccatggaagtgcctgaagccgggatgataagtgacagtgagctgcagcacatctctgattctcccatcatcgatgggcagcagcagtcggaaaccccacccccctcagacattgctgacattgacaacctggagcaggccgaccaggagagggaggtgaagaggcggaagtacgagtgcacaatatgtggacgcaaatttatccagaaaagccactggagggaacacatgtacatacacaccgggaagcctttcaagtgcagcacttgtgacaaaagcttttgcagggccaaccaggctgcccgccacgtgtgcctcaaccagagcatcgacacttacaccatggtggacaaacagactctggaactctgcacatttgaagaagggagtcagatggacaacactgcagcggcccactgacctatagtatgaacgcaacttgcgtgacaaaacattctccactcccaatgaggttgttaaacattcatgccaaaaccagaactcggatgtttttgccctagacgaagggcgatccattctcctgggcagtggggactcggaaataacggagcctgaccacccagtgttagcttccatcaaaaaggaacaagaaaccgtcttactagactgaatgtcacttatctttttaaaaaactctcatttttacaaagactatcttccctcccttccctgaattcagaactgtagttctccatggcatgatacaaacaggttcttgttctcttctcctcttccacttttccacatcccagccccacctctgtaaaggctttgtgcattataaacctggaatgtatcgactttctttcaggggatattggaaagataatggtcattatacttataaactcaaattttgagagggtttagattattcagaagcatacttggaactaatgaagggtatataataaaacaactggaatccaatttggtaagctaaaattatgactttccctgggtaaaaagtcttctcagaaaaacaatgtcagaaaataacagcgtgctgcttagaaatacggctgggctctgtactatgcaaaatctagaaagtgtggggaaactttaaacccaagaaaacgttcttagtattcatcctccaggtgtcttacttcagaatgcatcctttgagattatgtccacttaagagaaatcatcagttaagaaatctactttaacaaaacaaaaaggaggaaaaagtaataatgtgatgggcaatcttaatttttggggtacaacattacaagctgtgagtttgtgtgttttgtaaggggaaaatgtgtggggtacttggctaattaaacagggtggatttaatgcacat

SEQ ID NO: 6405 - DNA, 582 bp, Homo sapiens
  SIMILAR (498)..(569): 951254mologous to Homo sapiens dJ462O23.1 (novel protein),accession number AL031431,Smith-Waterman Score=133.
tgcgtcgacgacttccgtgtggactcgcgaatgttaggcctgtgggtgccatttcgaccgggaggttgggctggccagattcagctgccgggaccggaccaggtgcttaggagaacatgcagtagaacttttcatcaaacaaatggaacacgtcacagaattttgctaacatggacaactctgcacagaaaaatgaacgcactggcaaacatcccagacgtgccagtgaagtacagaaagaatgatatcccaggacctgggttctacaatgttattcaccagtcaccggtgtccaacagtgtctcattgtccaagaaaggaacttgcatgtttccctcaatgtgcgcccgattggacaccatcgtttctaaataccctgcagcgaacgcatacactatcccatcggattttatttccaagagagactttagtaattcgtgttccagcatgttccagttgccaagctttatgaaagctctcaagtttgaaactccctggcaccaaactattacaatgcctctgtctcttgctgcaagagaagaaacaacgtctgtactcgagccgggttttaatggttccaaa

SEQ ID NO: 6406 - DNA, 3007 bp, Homo sapiens
  SIMILAR (214)..(645): 901254mologous to Homo sapiens dJ462O23.1 (novel protein),accession number AL031431,Smith-Waterman Score=689.
atggacaactctgcacagaaaaatgaacgcactggcaaacatcccagacgtgccagtgaagtacagaaagcccttcgcatctgcatccacaacacgagggttctcctgggctctcggcctggggtgctggagtacctggctccacagtgcctcctgctgcctgcctcactctccatggcagtcagttcctcttccgtccaccggggatcattctcacctaaagcaggaatcagcacccctgtcgtcacctcccatggggcaaggaatgatatcccaggacctgggttctacaatgttattcaccagtcaccggtgtccaacagtgtctcattgtccaagaaaggaacttgcatgtttccctcaatgtgcgcccgattggacaccatcatttctaaataccctgcagcgaatgcatacactatcccatcggattttatttccaagagagactttagtaattcgtgttccagcatgttccagttgccaagctttatgaaagctctcaagtttgaaactcctgcaccaaactattacaatgcctctgtctcttgctgcaagcagagaaacaacgtctgtactcgagccgggtttatgtcaaaaacccaaagaggatctttcgcttttgctgataaaggacctcccccagaggtgacttcatcatccagtcataaaacagaggaggcagctctgtttccggagcacccactccacgggcattatgatatcaacgaatcccttgtgaagcagtcgccaaatacattaatgtcttgttttaaatcaaaaaccaaccgtggattaaaactgacgtcaacaggcccgggacctggttattacaaccccagtgattgcacaaaagttccaaaaaagactcttttcccgaaaaaccccatcctgaacttctctgctcagccttcgcctctgcctccgaagccacctttcccaggtcctggtcagtatgagatcgtggactacttaggcccccgcaagcatttcatctctagtgcatcattcgtgtccaataccagccggtggacagcggcgccgcctcagccaggcctgcctggcccagactggtggcatccagagagtgttcagcccaggtcgatggaagaggagtttgaatggctgccttggcttggggccatgggtcccaaggagaagcggatattgtcctccagcactgggggcaggaatgaccaaggaaagaggccccagcaagctggaggccggctctgtggacagctacctgttacccaccactgatatgtatgataatggctccctcaactccttgtttgagagcattcatggggtgccgcccacacagcgctggcagccagacagcaccttcaaagatgacccacaggagccatccacatcaagtcaggcgagtcacccatggtctacctcaaacaaaggccagttctaccccgtcaccctgcggaccccagcaggtggcaaaggccttgccttgtcctccaacaaagtcaagagtgtggtgatggttgtcttcgacaatgagaaggtcccagtagagcagctgcgcttctggaagcactggcattcccggcaacccactgccaagcagcgggtcattgacgtggctgactgcaaagaaaacttcaacactgtggagcacattgaggaggtggcctataatgcactgtcctttgtgtggaacgtgaatgaagaggccaaggtgttcatcggcgtaaactgtctgagcacagacttttcctcacaaaagggggtgaagggtgtccccctgaacctgcagattgacacctatgactgtggcttgggcactgagcgcctggtacaccgtgctgtctgccagatcaagatcttctgtgacaagggagctgagaggaagatgcgcgatgacgagcggaagcagttccggaggaaggtcaagtgccctgactccagcaacagtgggcattatgatatcaacgaatcccttgtgaagcagtcgccaaatacattaatgtcttgttttaaatcaaaaaccaaccgtggattaaaactgacgtcaacaggcccgggacctggttattacaaccccagtgattgcacaaaagttccaaaaaagactcttttcccggctgtggggggtgtggtgtgctggtcatgttcacttcctgttttgctggtgcagcaatgtgcaacactgagacctgggccctgcatggcagaaagcactgtgctagcccggtgtggtgggagcacagcatatgctccaaaagatggatggagagaggaaaggccagcttcatggcagccagtaagctttgccctctttgaggacctgcatcccccagggacccggtcaaggcagggtggggtcaatcgtcatccagtgagagcctctctggcctggaatgggccccttcccccaagtggtcagtggatgtatggctgtggggcctctgtttatgtcttcccaggccaccctccatgggcacagtgtggtcgcagagccgtggcttccctggcagtcagtggtgaaaaagtctacaaaacctggagcccacagaagggttgctatgtaaagaaattgtccctggagccctacagtcagagactccatctgcccttggcctctccatgggtaactggagcacagaaggccacgtctttcttcttcgaagcattttttgttgctgcaatgttgcttgtatcgtgctacgcaattgatatctacttccctgactgggttgcagaggttcaagacaggtcaaatcctgtcagcgtgattcagtttgaatcaacaccatttaaatccacccaccatttaccaagcactcttcagtgccaggcacgtagggagaccctggggatgcagagatggcccaatccccaccctccatgggctttcggcatagttggagagccagctaccaataagctctatccacaccagtggtgctcaatcctgcagaaggttgtgagattgatacctaggcccactcagaacatggaactggaatctgtgccccctccatga

SEQ ID NO: 6407 - DNA, 442 bp, Homo sapiens
  SIMILAR (264)..(106): 691254mologous to Homo sapiens Human secreted protein, SEQ ID NO: 7217,accession number AAG03136,Smith-Waterman Score=189.
aacaagtctttgagcacctgttgtgtgggacatctcagcctgatgcctggtctggtgggagggtgaggaaggggacagagcaccatttaaaagcccaggcttataaaaaaaggataagatcatgtttcttgcaggaacatggatggatctgaaggccattattcttagcaaactaatgcaggaacagaaaaccaaatactgcatgttctcacttataagtgggagctgagtgatgagaacacatggacacaaagaggggaacaacaaacactggggactgtttgaaggtgcagggtggtaggagggagaagaggtgaaaatataactattgggtactacgcttaatacctgggtgacaaaataatttgtacaacaaacctcgtgacacgagtttacctatataacaaacctgcacatgtaccctgcacttaaaataaagctt

SEQ ID NO: 6408 - DNA, 1287 bp, Homo sapiens
  SIMILAR (3)..(335): 581254mologous to Arabidopsis thaliana glycine rich protein,accession number X58338,Smith-Waterman Score=335.
atggaggagggagtgcagcagggagtagagacagtggagtatggagtggaggagagagtggaggagggagtggaggatggagtggaggagggagtggaggagacagtggaggagggagtggaggagggagtggaggagacagtggaggagggagtggaggatggggtggaggatggaatggaggatggagtggaggagggagtggaggagggagtggaggatggagtggaggagggagtggaggatggagtggaggagagagtggaggatggagtggaggagacagtggaggatggagtggaggatggagtggaggagggagtggaggatgggcacgtcagcaacacgtcctgtcagtcactgttcccatggaaaacgggaatagcagatctgaactcaccccttgagaaacagggatggcaatggaaagggcagaagcaagacctggcaaaaacaccggtcatgctgggctgcattctccttggtccccagtgctactcccaggagtttccacttatcgattgtggcaaaagaagaggtatgggagacctcacctacaacatcaaaaatcaccttttgtatttgtttttctgttcgctggtgaaaaaaggtcaaggtgaactgaagaaaataagtctttccccaaaggaggtagaagatggggaagatgagatgtcagaagctaaggacaatggcagtagagatgaggttcttgtccctcataagaattgcaggaagaataccactgtcccgggaaagaaaggggaggaaaagtctctggctcctgtgtttgctgagaagttaatatcaccaagcaggaggggagccaagctcaaggaccgtgagagccaccaggagaatgaagacaggaacagtgagttggaccaggatgaggaagataaagaatccttctgtagggggggtgggggaaaagataaagctgggatgaaagttagagaagaccttcccatgagggctgaagatgatgaacaggatgacgacagtggcagtggcaaaggcagtgaggaagaggaggagggggaagaacctatcaaagaaacacctgataaacaaaagaaggaaatggccaatcagaaagagtcccctggagccaaaaagcagaaattagaagcaactgaaccacgtgtagcattccaactgtttgttggaaacctgaatttcagcaaaactgctgctgaactaaaagttggcctcagtgaattttttgctaaaaatgatcttgaagttgttggtgtcaaagttggcttgtccaggcccacttcttag

SEQ ID NO: 6409 - DNA, 1149 bp, Homo sapiens
  SIMILAR (3)..(329): 581254mologous to Arabidopsis thaliana glycine rich protein,accession number X58338,Smith-Waterman Score=333.
atggaggagggagtgcagcagggagtagagacagtggagtatggagtggaggagagagtggaggagggagtggaggatggagtggaggagggagtggaggagacagtggaggagggagtggaggagggagtggaggagacagtggaggagggagtggaggatggggtggaggatggaatggaggatggagtggaggagggagtggaggagggagtggaggatggagtggaggagggagtggaggatggagtggaggagagagtggaggatggagtggaggagacagtggaggatggagtggaggatggagtggaggagggagtggaggatgggggaatgtgcatcagccttcacctgcaagccccgggccccctgcactccagagatgctggactggaacccacccaaggcaaaggcgtcagttctggcccctctgttctcttcgtgtggcccccagcaggccagccgccccggctccacagcgtcctccacaaggggcctgccgagcagccagtctcacaggaagtaaggatgtccccgggtgtccccatcacgttgccggaggaccagccagcttcccgctctcagctggcagcagctgccggtgatggatgtgaagggacagttgtccacaagactctgggagctgaggggaggccggctctccaggcagcaccagagcaaggccatcgcagccccgccagccgggcttgttcacatggtggcctcggggctcccatggcagttagagaaatcaagcccaagtctcatatcacgttcactattctcccattgtccaaagcagaccacatggccaaggcccaagtctgtgtgaaaggatgtggatacagggaccccgaatgaaccagaggcaatactgctgcaagctaccacatagatgctgttcagagctttgcaggaccaaatcttttagggctgtttttccattgtggtataccctctccatttagattcaattgaacaaatatattctttggggctgcagtgtgtcagatgtggagacatggtcccactggctttcaagttgccatccatcttctagggagaatttctggccttttcggatggcatggtccaggccggagcaccagccccaggttgaaacatcaggcaggtttctaggaaatg

SEQ ID NO: 6410 - DNA, 3731 bp, Homo sapiens
  SIMILAR (987)..(1358): 1001254mologous to Homo sapiens serologically defined breast cancer antigen NY-BR-99,accession number AF308303,Smith-Waterman Score=649.
  misc_feature (1)...(3731): n = a,t,c or g
ctttgttgacctcactaggccagngcggnggaattccgagaggagaggcctcgggatgtctctggcagatgagctcttagctgatctcgaagaggcagcagaagaggaggaaggaggaagctatggggaggaagaagaggagccagcgatcgaggatgtgcaggaggagacacagctggatctttccggggattcagtcaagaccatcgccaagctatgggatagtaagatgtttgctgagattatgatgaagattgaggagtatatcagcaagcaagccaaagcttcagaagtgatcgggaccagtggaggccgcgcctgaataccgcgtcatcgtggatgccaacaacctgaccgtggagatcgaaaacgagctgaacatcatccataagttcatccgggataagtactcaaagagattccctgaactggaagtccttggtccccaatgcacttggattacatcccgcacggtcaaggtgagcgcagagaaggagctgggcaacagcttggacaaagttgcaagaacnattgaagaaccttggcagcagattctcaccaatgccaccatcatgggtcgtcagcgtcaacggcttcaacaccccaggggcagcaagctgtcggaggaggagctggagcggctggaggaggcctgcgacatggcgctggagctgaacgcctccaagcaccgcatctacgagtatgtggagtcccggatgtccttcatcgcacccaacctgtccatcattatcggggcatccacggccgccaagatcatgggccagctgccctccctctctgagcctcctttgcatctgccccttgcggaatgggccaggtcgcccgcctggcagggccatcgaggaatccaaccagaacttcatgtaaaggtgcccagcacacgtcgagcccccaggcagatttactcaccccactctctgctttcttctgaccgcccccttcctccctccctcccacgcaggtgtggcggcggcctgaccaacctctccaagatgcccgcctgcaacatcatgctgctcggggcccagcgcaagacgctgtcgggcttctcgtctacctcagtgctgccccacaccggctacatctaccacagtgacatcgtgcagtccctgccaccggatctgcggcggaaagcggcccggctggtggccgccaagtgcacactggcagcccgtgtggacagtttccacgagagcacagaagggaaggtgggctacgaactgaaggatgagatcgagcgcaaattcgacaagtggcaggagccgccgcctgtgaagcaggtgaagccgctgcctgcgcccctggatggacagcggaagaagcgaggcggccgcagagacgagaagagaggaggggaggcctcctccgccgccgccatcttggaccgggcccggtcagcttccgcggagccatcggcagacgccgcggcctcccttgagccccgacccccgtcgtcagaacaaccccgggcccaatcaaacaaacccactatccgacatacgcgccgctatcgcgatagcgcccgggcccggggcgcgagaaaaaggcggcgggcgctcgcctcccccgcctgtcgcgatacgctcctcagcggcggcgccagctcctgtgcgcggggctcccggcggggggcggctccctccctctcgccctcccgttcctgcgcctctttcacgttcctcagcgcctcccgggggtccttccgcgagcccggagccccgggccccgcccgccgccgcctccccgcgtggcatcgcgtcgggccccccggtgagattgatcgctgcctcaagaaggtgtccgagggcgtggagcagtttgaagatatttggcagaagctccacaatgcagccaacgcgaaccagaaagaaaagtatgaggctgacctaaagaaggagattaagaagctacaacggctgagggaccaaatcaagacatgggtagcgtccaacgagatcaaggacaagaggcagcttatagacaaccgcaagctcattgagacgcaaatggaacggttcaaagttgtggaacgagagaccaaaaccaaagcttacagcaaagagggcctgggcctggcccagaaggtagatcctgcccagaaggagaaggaagaggttggccagtggctcacgaataccatcgacacgctcaacatgcaggtggaccagtttgagagtgaagtggagtcactgtcagtgcagacacgcaagaagaagggcgacaaggatgatgcaagagtccagacctccagactttttctctccaaggacccagggagtccaagccccaaccctcaaccagacgcaagagtcctggcttccaacctcctagtctgtcagatccagcagtccaaacccctaaccttctcctccctcaggatgaccccagtccataaaagggttctaagcgattctctgcttagcaggatcggtccacagcgggacgtgagtcatttcctcctcgcggcttaccgctctctccgcctagtgccaggcctcgggatgtctctggcagatgagctcttagctgatctcgaagaggcagcagaagaggaggaaggaggaagctatggggaggaagaagaggagccagcgatcgaggatgtgcaggaggagacacagctggatctttccggggattcagtcaagaccatcgccaagctatgggatagtaagatgtttgctgagattatgatgaagattgaggagtatatcagcaagcaagccaaagcttcagaaggggaaactgagtccctcacccccttcaagaccccaggccgctcctcgctcccgcccctcgaggcccttcgccggctctgcctcctcccccttcccgaccccaccggccataagatgatgtggtccaacttcttcctgcaagaggagaaccggcggcggggggccgcgggccggcggcgggcgcacgggcagggcaggtcggggctgacgcccgagcgcgaggggaaggtgaagctggcgctgctgctggccgccgcgccgtgtgcgaagcggccccacctggggctgtggaaggcgtgcaccaagcggctgtggcaggcggacgtgcccgtggacagggacacctgcggccccgcggagctgcccggagaagcaaactgcacctattttaaattcttcaccacgggggagaatgcacgcatctttcagagaaccacaaagaaagaggtgaatctggcagctgcggtgatagcagtgctgggcctggcagtcatggccttggggtgcctctgtatcatcatggtgctcagtaaaggtgcagagttcctgctccgagttggagccgtctgctttggcctctcaggcctgctgctcttggtgagcctggaggtgttccggcattccgtgagggccctgctgcagagagtcagcccggagcctcccccggccccacgcctcacctacgagtactcctggtccctgggctgcggcgtgggggccggcctgatcctgctgttgggggccggctgctttctgctgctcacactgccttcctggccctggggcgggggcaccgggccacctagagccacgcttcccccaggtaccacatcgagcaactactccctgggtaacttcgtacgactgggtctggctgccgtaattgtggttatcatgggagctttcctggtggaggcctggtacagccggaatgtgtctccaggtgaatcagaggccttcaaaccagagtga

SEQ ID NO: 6411 - DNA, 1630 bp, Homo sapiens
  SIMILAR (23)..(211): 1001254mologous to Homo sapiens RNA polymerase III largest subunit,accession number AF021351,Smith-Waterman Score=341.
  misc_feature (1)...(1630): n = a,t,c or g
tgatacgccagcttgcacgaggctctttgacgctgcctacttcgggcagaaggactctgtgtgtggggtgtctgagtgcatcatcatgggaatcccaatgaacattggaaccgggctcttcaagctgcttcacaaggctgacagggacccgaaccctcccaagaggcccctgatcttcgacacaaatgaattccacatcccccttgtcacatagtccaaagaaagaggggaccatgcctgaccttgactccttgtcctgtctccagctgatgtataaagagttttgtgctccctgggaacggggtcctgaggtccccacctatgccagcaatcagagaagccctcttggcatccccaggagcagcttctcctctgatagggtgcagctcacaccagtgaccctgactgtgcccangctgctcgggagagctgagggttttattgtttgcttgcttgaaacctaatctatagacggccccacagctcctggcacacactgcttccctggacttaaagcccagcccaggtgtcatggtccatcccagctcactgcatacatccatcggctccccatggtgtcttcacaccctgacgatgagccaggcctgagcccccacacagggccagggcacattcttggattttccattccttggtcaagctggaaacctctcaaatgtgaacaaacttatgtaaaatattgttactattatttaattgttcccatttgagggatttggaatttttgttattttagttttatttttgaaaccaagcatctatagaaaccaagaaagtcagcatgtaagcgtcactggaaaaactggtttaagcaaatagagccgtctgggatttgtaactgaggtgcaactgtcatgaggcccaggcagctctgtaacatcttctatagatgcccctggctaccctgttgttttcatctacctcagacccctatcatggggctctaccctgtgacaagagccaaacccattctccatggcctatggaagcctcactggagtttggggcctgctgcaatggggatgagatggttttttgtagaattatacttacgttccttggatgatctctagttgattttttaagttctgagttgatgctgttaaggtacccggggtagccattggttcttggatctgtgctagaatgagtgctttcccttcctactgatgtgattgtggattacgaattcgtgaccgagtgatttttggccagtggttgggtttaaaattctattaaaatttgtagtttgggctgggtgctgtggctcatacctataatcccagcactttgggaggccgaggggggcagatcacttgagcccaggagttcgagagcagcctgggcaacatgacgaaaccccgtctctacagagaatacaaaaattagccacggcatggtggcccatgcctgtagtacctgctattggtaaggctgaggtggaaggttcacttgagcctgggaggtggaggttgtagtgagccaagatcgtgccactacactccagcctgggcaacaaagcaagatcgtgccactacactccagcctgggcaacaaagcaagactttgtctcaaaaaaaaaaaagaaaaaaattaagcgtaaaaaaaa

SEQ ID NO: 6412 - DNA, 1832 bp, Homo sapiens
atcactgcggcggaactctggagctctccgacgatgacacagatagtaagaccagtgatgtcaacgagacgcagccaccccagtcagagtaaagttgcaggaagccagaggaggcagtacagcgggacagttaagaatgcacccggggcctccatgcagatttcggaaattggcaagctacgggattccttcctgaaagatcaactgtgtcttaaggctctccagcctatgcatactgtatccatgcttcagacttaggtacaattgctcccctttttatatacagacacacacaggacacatatattaaacagattgggttcatcattgcgatctattttccatatagtcatcaagagaccattttataaaacatggtaagaccctttttaaaacaaactccaggcccttggttgcgggtcgctggggttattggggcagcgccgtgcgtcgtcactcagtcgctctgcatgctctctgtcatacagacaggtaacctagttctgtgttcacgtgggcccccgacgactcagccacatcaagtctcctaggaccactgtgggactcttaaactggcacttgtcttctctcattttcctttcaaattaattgatcaatggctatttttcagttgaggcaaactgtggaaagggggctttgggaaagagtagggagggggttgggcttgggatcgggaaagcaacacccatttgggggtttaccatgttcccatccccccaagggggcgcctgccctgcggagtcgatgggtgttcccgcattctacttcattgtggaacttggcctttgcgaggggctgggtctgttgcattagaagggatagtgggccacactgcagcttgaggccccagggttggcagccatggattcatgttaggactttccagatgggtttcccgaaccgcctgggttctgcccgcgcccttccttcacgttcaggagcaagcagccgtggacccccctaagccggagctgggtggaaaggcccctcccccgtcgccagccgggccctcatgctgaccttgcaaatttaagccgctgctttgagcccaaaatggggaatattgggttttggtgtccgaggctttgttccaagtttgtcaatgaggtttatggagcctccagaacagatggccatctttcctgaaatgttgacatgccaagtgggtgtgactccttcaattttttccttctcccttccctttgggacagtgttacagtgaaacacttaggcatcctgtttttggttggtagtttaaggcaaactgacatttacgggaaagtgcccctagaacaccaacagtaccctaagaacaatgttgaaataataatccattccggcccctcctataaccaatttaaatggtattccaagttttggacctggtggcctccatatccatggacccctctcctagtcaaaagtgggtattaccagacattccagtgaacaatgaatccagtgttaattcctaaatcccttgatccctctgcaatgtgccttgaaaacacaaaccctttttggggttaaaaagctttaacatccaattaagggaagaatttgtccctgtgggtttgggaatccttggattttccccctttatgaactgtacctggctgttgacccaccagacacctgaccgcaaatatcttttcttgtattcccatatttctagacaatggatttttgtaagacaataaatttattcattatagatatttgcgcctgctctgtttacttgaagaaaaaaagcacccgtggagaataaagagacctcaataaacaagaataatcatgtgaacgtgaaaaaa

SEQ ID NO: 6413 - DNA, 361 bp, Homo sapiens
  SIMILAR (13)..(114): 971254mologous to Drosophila melanogaster Actin,accession number X54848,Smith-Waterman Score=177.
cccacgcgtccgggtggctccatcctggcctcactgtccaccttccagcagatgtggattagcaggcaggagtacgacgagtcgggcccctccatcgtccaccgcaaatgcttctaaacggactcagcagatgcgtagcatttgctgcatgggttaattgagaatagaaatttgcccctggcaaatgcacacacctcatgctagcctcacgaaactggaataagccttcgaaaagaaattgtccttgaagcttgtatctgatatcagcactggattgtagaacttgttgctgattttgaccttgtattgaagttaactgttccccttggtatttgtttaataccctgtacatatctttgag

SEQ ID NO: 6414 - DNA, 1651 bp, Homo sapiens
  SIMILAR (142)..(1278): 831254mologous to Ovis aries beta actin,accession number U39357,Smith-Waterman Score=1530.
atgggggacaccccacgccagttcggaggcgcgaggccgcgctcgggaggcgcgctccgggggtgccgctctcggggcgggggcaaccggcggggtctttgtctgagccgggctcttgccaatggggatcgcaggctcaccatggatgatgatatcgccgcgctcgtcgtcgacaacggctccggcatgtgcaaggccggcttcgcgggcgacgatgccccccgggccgtcttcccctccatcgtggggcgccccaggcaccagggcgtgatggtgggcatgggtcagaaggattcctatgtgggcgacgaggcccagagcaagagaggcatcctcaccctgaagtaccccatcgagcacggcatcgtcaccaactgggacgacatggagaaaatctggcaccacaccttctacaatgagctgcgtgtggctcccgaggagcaccccgtgctgctgaccgaggcccccctgaaccccaaggccaaccgcgagaagatgacccagatcatgtttgagaccttcaacaccccagccatgtacgttgctatccaggctgtgctatccctgtacgcctctggccgtaccactggcatcgtgatggactccggtgacggggtcacccacactgtgcccatctacgaggggtatgccctcccccatgccatcctgcgtctggacctggctggccgggacctgactgactacctcatgaagatcctcaccgagcgcggctacagcttcaccaccacggccgagcgggaaatcgtgcgtgacattaaggagaagctgtgctacgtcgccctggacttcgagcaagagatggccacggctgcttccagctcctccctggagaagagctacgagctgcctgacggccagggtcatcaccattggcaatgagccggttccgctgccctgaggcactcttccagccttcattcctgggcatggagtcctgtggacatccacgaaactaccttcagactccatcatgaaagtgtgacgtggacatccgcaaagacctgtacgaccaacacagtgctgtctggacggacaccaccatgtaccctgggcattgccgacaggatgcagaaggagatcactgccctggcacccagcacaatgaagatcaagatcattgctcctcctgagcgcaagtactccgtgtggatcggcggctccatcctggcctcgctgtccacctttccagcagatgtggatcagcaagcaggagtatgacgaggtccggcccctctcatcgtacaccgcaaatgcttctagggcggactattgactttagttgcggttacacccgtttctttgacaaaaccttaatttgcggcagaaaacaagatggaggattgggcatggctttatttgttttttttgttttgttttggttttttttttttttttggcttgactcaggattaaaaaccgggaccggggaaggggaccccattgggtgggggggaccatcccccaaggtacaaaggggggccggggactttgatggcccatgggggtttttttaaaagccttcccaaaaatgaaaggcttggttacgggaagcccttggccttcttaaaacccaccccatttctttttagggaaaagggcccagccctttccaagtcccaaccgggggggg

SEQ ID NO: 6415 - DNA, 1488 bp, Homo sapiens
  misc_feature (1)...(1488): n = a,t,c or g
agacttctggtctcaagcaattctcccacctcagcctctcgaaatgctgagattacagacataagccaccacactcagttatttaatattttattatctatctcttttacataactacttgccaaaaaaaactaatatgacaaagcccaatgtattatatggttataaacagaaacatatctgtaaacattagtattataagcagtgtaatattaaaggtggttatctatttgaaaactcagaaggcagtgacttctacaattaaatttcaaaaaatcaaaacataaaacattattagacttcagttactataaaataaaggcatccggaatcttaattttaggnggctaatgggtaacttttaaataattccctaaatttcatggtaatctgttaaggatatattttgttaacatttagaaaagacaagagaataagagaatcaaaaccaacgaattaaaggagctttataatttagcaaaactttcaactttacatgtctctccaaacatttactgggcaaacacaatggactgcttatgagaaaatctgcatatgtcattctacaaacagtaatgtcattaatattctatttttagtttccaagggaagatcctaaacataacaaatccttccgttagcatttcttcgtgtatgcatgttcctacttcctgttcaaacatatgctgtaactattcaagtacgtcttttcaaaataaaactggattaaccacccaaaaattcaaaaacccaccaacatccaaggtggatattaggggcacatatcacttgaacttgacattttaatgatgaaaagcaaatttaagaagcaaaaaaattaacatatttaaattataatttgcacatcagattactttttcagatgtgtcagagctcacagataaaagtaatgaaaagaaacgtggtaaaatacattttaattttaccctccattataaattaaaatgaggccgtaagaaaaacattgagacccataatatataccatatgggaaaactgggcccactgaaagatggcaaataattccatacaatatagccgtaagcctttccatatataaattatatgtcatttccatcaactgttagtatcatcagtcctaaattttacaatatatattaaaatattaaaatgcctaaaaaaatcattgcaatatagaatacactgtggcaaaatacgtatttgtggctttatagacaatctaaatccattctatacaatagttttctaaaatataaatggcagtttacatgcaaaagaacacaccagctggatgacctcatataatatatcagaaattaggagaaaacacccttttaacaagacagttacatagcagaggtggaatgtagaatcagattttgccttaatacaatcttggataaaattaattatgaaaaaggacagtctctattactttcagttagcattttaaaaaataaaatctactgtgattttatattttct

SEQ ID NO: 6416 - DNA, 459 bp, Homo sapiens
  misc_feature (1)...(459): n = a,t,c or g
nacaggtaaggcactgggatgtcgggcttccccagtcagagaagcaggcgcggggatgggacacgcagcttccgggtcaagcgctttttctttttcctcccggaaacaacggtgtcattctctagttccggatctaaggtgacccagttgcgaagtccagccttctcgtctgctcatggagccttcagggccatatttgtccattataatgcctctcattgcaaggtttgaccatgttgtaatccattcatccgcattcaagtttgcagttatggtggaaattttggcctgttgatctgcctgctgattaaatagtcagactatggaggattcaccaccagtctgggaagcaacagcctgggctccagagtcggccactcgtccgtgcacagacgaggagaggtctcagaattccnccncgctggtctagangtcgtcaaagacatcatgcggcgcctg

SEQ ID NO: 6417 - DNA, 437 bp, Homo sapiens
  SIMILAR (19)..(66): 311254mologous to Mus musculus putative,accession number AK012106,Smith-Waterman Score=38.
ttcatgagacctctcctcgtctgtgcacggacgagtggccgactctggatgcccaggctgttgcttcccagactggtggtgaatcctccatagtctgggacaaatatggccctgaaggctccatgagcagacgagaaggctggacttcgcaactgggtcaccttagatccggaactagagaatgacaccgttgtttccgggaggaaaaagaaaaagcgcttgacccggaagctgcgtgtcccatccccgcgcctgcttctctgactggggtgaggccgcagcggactgccctctcccaagatggcgtcgaagataggaagcccgacatcccagtgccttacctgtatttcgacatgggggcagccgtgctgtgcgctagtttcatgtcctttggcgtgaagcggcgctggttcgcgctgggggccgcactccaattg

SEQ ID NO: 6418 - DNA, 1290 bp, Homo sapiens
tttctttccccagtaatctagatgcttacaaacaccactggttacaaatgtgctggtctccctggtggaggtaccctatcacagtattctcccctgccaccagtacattcctccttcaccaacacattaaaatatttaccttacatgtagaaaaagctcttaatgatagtagcactgaacttgtgttggtatcagatgaatttgctcacctgcgtactattgtgttgcaaaaccaaatggcattaaaaatgcttaccgcaccccaaggaggggcttgcacgctactgcaaactgaatgttgtgtgtatatctctggtaattctcacaatatgactctccttggaaagccatgctgagtgtggtttttattaattgtgcttttaattctcctgtgcttaccctgtatctgtaatctatatcaattgtggcttccctgtgtatccgtaagagtattttcctacagttgagtatcagattgaggccaaatgtggaggaaaagttaaatattaaatttgaactcaattgaacatggacacaaacaatggtcaccaagtcccggaacaggttgtgtgagccccttgaggcattcatccagcgctgtttcagataaatctctatttcaatctattcctatatgttagttattgaaaaacaacagacaatcgcaaaaacaagttgacctttttgtgttccttgagcctggtcatgaagggccctcgtgcctggagctcatgccaaacaactcattacaaaaagagctagggtcccagaccgcaccaaagacccatgagacctctcctcgtctgtgcacggacgagtggcccgactctggagcccaggctgttgtttcctagtctggtggtgaatccgccatagtctggtgagtgcagtgtccgactctcgagcccaggctgttgctgttgcttcccagtctggtggtgaatcctccatagtctggtgagtataaatacatatatctcttttcctttctccccttcccattgcaacttgcttactatatcatttgcttattatatctgcattgccatttatgtgggataaagcttgtttacccttaaaggtattgtatgtgtgccttttcttctcccctcactcgtctctcgcacagaacactaggcaggggtaggaggaactgggagtggggggaccacagggacaaatggctgtgttcatttttcaggggccaggccacccacccatccccctctgcccccccaattgtgaataaaaattgtttgctttgtaaaaaaaaaaaaaaaaaaaaaaaaa

SEQ ID NO: 6419 - DNA, 1162 bp, Homo sapiens
  SIMILAR (74)..(283): 701254mologous to Homo sapiens Human myelin oligodendrocyte glycoprotein gene,accession number AAZ29204,Smith-Waterman Score= 226.
gagacggagcatcgctctttctcccaggctggagtgcaatggtgctatctcggctcactgcaacctccacctcccgggttcaagctattctcatgtctcagccttccaagtagctgggactacaggtgcctgccaccatgctcagctaatttttgtatttttagtaaagatggggtttcaccatgttggtcaggttggcctcgaactcctgatctcaggtgatccacctgcctcggcttctcaaagtgctgggattccaggcatgagccaccatgcctggccgcatgtgtcattttcttgggtgttatactgatcgtatatttgcaggtttgcttttgtgacagacttcttctgggggaaaaaaagtatccttcctatctttttacttttgtccagttccaggtatccctgtttttttcttcactcttccttccttgttcatgggagtttttcttgaggacttcaagcccagcttcggagaatcctgggtgaggcatctcatctcctttctgctctcttctctacctagcctttccaccctcacacctcccggggtctgaaaatggaaagataagggtgtttccctgaaagttgctcttctgtgtggggatgacaggttctaaagactcttttctggtccctgccctcattgccatgattaatcacctaagtggcccgaggttttgtaacagcacagtcttaaaatgcttctcccaagtttaatttctctccatttgaccttttaaggatgtgaattggctttaagcagtagactccctttagtacggcgctgtgagcctctcagtgaatctgctacatccattccacccacgggtctggaaacttgtctgtttacctttccctaaaaacctaagatatatttttaagaagtgccttgtaacttttcatatagcctttcccctactttgggtagactgtttcttacaggaatttggtagatctttccaaagagaattctgtatctgtatttttaaagcataaatcctgtcaattttggaggagaactgatttggcttgagttttctcagacatgggaacttttgacctaagtttgtattttacattgttgaaagggaactccgggatcccagaaaacatatgggactgcaattgggtaaagtttctgtttcagtaacttatt

SEQ ID NO: 6420 - DNA, 479 bp, Homo sapiens
  SIMILAR (57)..(404): 981254mologous to Homo sapiens Human transferase TRNSFS- 14,accession number AAY79222,Smith-Waterman Score=560.
  misc_feature (1)...(479): n = a,t,c or g
attgatagctctcgccaggcggggaanncgnggntgaaggagnnnnnnncccctgccagcccctgaaggccaagaccagcctcccattctggtctgctgccatggatgccggcctggaagccatgcagaagtatggcaaggctgctccaggggacaggactatgctggattctctgtgggcagcggggcaggagctccaagcctggaagagcccaggagctgatctgttacaagtcctgaccaaagcagtcaagagtgccgaagctgcagccgaggccaccaagaatatggaagctggagccggaagagccagttatatcagctcagcacggctggagcagccagaccccggggcggnggcagctgctgccatcctccgggccatcttggaggtcttgcagagctagggtgtgtgactgcctcccttggcctcagctcctcgcctttgtcacttccttctgccttccaaccctcacctt

SEQ ID NO: 6421 - DNA, 376 bp, Homo sapiens
  SIMILAR (368)..(249): 1001254mologous to Homo sapiens Human secreted protein ls9_1,accession number AAY06405,Smith-Waterman Score=220.
gccacaaaagacctttaatggcctcctatttattgttcttttgttcatttgttagagttgaatgaactataataacttgtctgacataataagaatgccacaggtataacagataaacctggcaggtggtccaggaatgagagtgtcacaaaataatcactcaacacaagggccacagacctggagattcttcccagccatccctcactcctgcctaagtgagaagcagggcaagcgatgaagactggtggggaagaagtctgcaggaaagaggtcatcccaaacactaaaggatcttgtgtcagccccaaaggtttcagaagacactggagggcatatgtttgccatgcattgctccagcatttcatcagctctg

SEQ ID NO: 6422 - DNA, 3007 bp, Homo sapiens
  SIMILAR (2411)..(2560): 1001254mologous to Homo sapiens Human transferase TRNSFS- 14,accession number AAY79222,Smith-Waterman Score=232.
cgccgggctgaaggcatcccggtggagatggtggtgattggggacgacagcgccttcactgtcctgaagaaggcaggccggcgggggctgtgcggcaccgtgcttatacacaaggtggcaggtgctctggctgaggctggtgtggggctggaggagatcgcaaagcaggtgaacgtggtcaccaaggccatgggctccgaggaggatgaggcccacgagggttgcagccgagagaacctgggccggatccagttcagtgtcggctacaacttccaggagtccacgctcaccgtgaagatcatgaaggcccaggagctgccggccaaggacttcagcggcaccagcgaccccttcgtcaagatctacctgctgcccgacaagaagcacaagctggagaccaaggaggttgaccaggccagcctggaagacgaaggtgttgaagaacatgaggaaaatgatgatgatgttgaagaggactgcaatatcctggatgctgtagacataaaaaaaagtacaaccaatgaaggcctgtgtgaggacccaagagcagtggggacgctccttatcgtgaagaactacactggggatcggctcaacttcggcctggcccgggagcaggcccgggctgaaggcatcccggtggagatggtggtgattggggacgacagcgccttcactgtcctgaagaaggcaggccggcgggggctgtgcggcacggtgcttatacacaaggcgccagtggaaaaagcagacaaaatgtatgaacagatgagaaattctagcagagttggaaactccaaaagtcaaatggaaatgctaaaaacaaatacagtagcagatatgcagaatggtttcaacaggcccatcatgagatttgacatcatcaaggaaagaattagtggaagacagtggaccacagaccagcagctgatccaggttattcgctctataggagtctatgatgtggtggagttgaaatttgcagagaatcgagcaaatggccagtccaaagggtatgctgaggtggtggtagcctctgaaaactctgtccacaaattgttggaactcctaccagggaaagttcttaatggagaaaaagtggacgtgaggccggccacccggcagaacctgtcacagtttgaggcacaggctcggaaactccttcccgttcccaaaggaggaacagcccgagggtcctggagcaacggaaggaggactggatgcggggaagggcaaagggcgcggaacggggtggggagtctgcgggcgagctcggaggacactggcgcacctcccccgccggctcacggccgcatccgccacatccgaaggcgccgcgacttcccggagaccccgaagcgtgcgctctcatccgggtcctgcgggcgctggcggaaagaggcgaggcggtgctccgggggcggggcctccttcggttggcggcctcgggcttcgggagtcctccaagaggccagtgtcgcgctcgagtaccgacgggccgctccaagcctcgacatgtcgtacaactacgtggtaacggcccagaagcccaccgccgtgaacggctgcgtgaccggacactttacttcggccgtagacgtatacctgttgattgtcactaacacgagattagagatctatgtggtcacgccgagcggcttccgccgtcaaagagtttgtctcccttcacgtgcacacgtggcatgcctgggtctccccagtgcatctcctctcgggatccctgcgtgccatcgctgtatgtgtgtcgtcactgctgctgtggttggcctgactgtggcctctgccatcctctccctgcccctctggatgtctgtggggctcatgtgcatgttgcctgcaggagggaaggcggtgaacacagcccccgtgccaggccagacaccccacgatgagtccgaccgccggaccgagccacgttcctccgtctcagacctcgtcaactccctcaccagcgagatgctcatgcccactcaatgtgaagacaacaaagatgaagacttttatgatgatccacttccacttaatgaatactctggtgtctctgagggggacctgggaggactctcagctttcaacagatcaggcaggtactttgagaacatccccaagggtctagaccaggaaggctggactcgaggtggcatccagccccagatgccaggaggctacgccctcagccagccggtcagctgccatggaggccacccccaaccccatggagagcctgcggcacctgcatccccacgtgggaaggggaacacccctgcccagctactttcctaatgaaataaagagcattgaagcagagaagtgtgacatcactatcagggtggctggaaaaaggaggggtgagctggggcggtgtggaaacttctggatgcctgctcttagtgccgaagctgcagccgaggccaccaagaatatggaagctggagccggaagagccagttatatcagctcagcacggctggagcagccagaccccggggcggtggcagctgctgccatcctccgggccatcttggaggtcttgcagagctagggtgttgtgactgcctcccttggcctcagctcctctcactgctgtgctgaaggtggcctttgtcacttccttctgcccttccaaccctcacctttcccacggcctggccccattggcccaccctctaagttgagcaggaaatcctccaccaagcttccagaactacagacagcacccagagtgagctgggagtggggtccccattgcctctccagcaatgccctttccctttgcaggagggtggagtccctgggtcatgccctcccctgccagctctgggcttcagagataaggcattttccttgtgcagcctttacctggcaatcctaatttggttttaagactccctgtgaaatgctttccgcaccttaaccccagtgagcgtgaaaaagaaagttaataaactataatatcatggaagcaagaaaaaaaaaaaaaaaaaaa

SEQ ID NO: 6423 - DNA, 706 bp, Homo sapiens
  misc_feature (1)...(706): n = a,t,c or g
gtgtgtgtgtgtgtgtgtgtgtgtgtgtgtgtgtgtgtgtgttctgtacccactaggatttgtttaggtgcccattgcatctttttgtgctatggagttgtttacattaagcatgaccgaacgagagacaatactatttcccacaggagtccattgggttcagctttgaaagaggaatagaatcgaggctcctttgaccatcaaaatgatgaactttacttatgtggtacccaatgccagaatgtaagagttgcaagtgattttgtgctgctattcattaaaacttgtattccagtcttgccagcttaaggagatcaagatattaagaggtatccttgatttattttccagtattcagtagtaaaattttcctgtccactgtgaatcaaagcctgagtcactctatttaaccttgggacacactaataaggttttattttgattgtgttcctttccccccccccaatagtaaaaattttctcctcctttaactcctcctaccccccaagggtaaggaaacaaaaaacaaacaaacaaacaaaaataggaaggacaaaaggaaaggacatatggaaagggattgtaattgggcttaacaggaaacagtctggtaaaaacctaacagtgggtgncattctgttgtcngtgttgtgttatgtgggggtttttntcccaggtcnggcgggtatgacatttaccgttaata

SEQ ID NO: 6424 - DNA, 474 bp, Homo sapiens
  SIMILAR (102)..(233): 971254mologous to Homo sapiens human P5,accession number D49489,Smith-Waterman Score=212.
accggactggcctgggggggacgtgggcgcggggcggcgtgcggcacgtgcagggctgaagcggcggcgcggtggggactgcacgtagcccggcgctcggcatggctctcctggtgctcggtctggtgagctgtaccttctttctggcagtgaatggtctgtattcctctagtgatgatgtgatcgaattaactccatcaaatttcaaccgagaagttattcagagtgagagccacaacagaggcttcagaccattttcttttcttgggagccagtggatttttccagcagtgaagggacattctctacactcagatgactctaccagtggcccttttaaccaagaagtagtacttgattggtcatttgaaaacactgcaacagtgaacttttgcatctcaagaaaacattgaaaaattctatgaattgttgtagccggtgaattgagtcgtattctgtcacataatattttga

SEQ ID NO: 6425 - DNA, 1890 bp, Homo sapiens
  SIMILAR (1296)..(1385): 961254mologous to Homo sapiens human P5,accession number D49489,Smith-Waterman Score=159.
gaattcgggcgtgggcgcgggggcgcggcgtgcggcacgctgcagggctgaagcggcggcggcggtggggactgcacgtagcccggcgctcggcatggctctcctggtgctcggtctggtgagctgtaccttctttctggcagtgaatggtctgtattcctctagtgatgatgtgatcgaattaactccatcaaatttcaaccgagaagttattcagagtgatagtttgtggcttgtagaattctatgctccatggtgtggtcactgtcaaagattaacaccagaatggaagaaagcagcaactgcattaaaagatgttgtcaaagttggtgcagttgatgcagataagcatcattccctaggaggtcagtatggtgttcagggatttcctaccattaagatttttggatccaacaaaaacagaccagaagattaccaaggtggcagaactggtgaagccattgtagatgctgcgctgagtgctctgcgccagctcgtgaaggatcgcctcgggggacggagcggaggatacagttctggaaaacaaggcagaagtgatagttcaagtaagaaggatgtgattgagctgacagacgacagctttgataagaatgttctggacagtgaagatgtttggatggttgagttctatgctccttggtgtggacactgcaaaaacctagagccagagtgggctgccgcagcttcagaagtaaaagagcagacgaaaggaaaagtgaaactggcagctgtggatgctacagtcaatcaggttctggcctcccgatacgggattagaggatttcctacaatcaagatatttcagaaaggcgagtctcctgtggattatgacggtgggcggacaagatccgacatcgtgtcccgggcccttgatttgttttctgataacgccccacctcctgagctgcttgagattatcaacgaggacattgccaagaggacgtgtgaggagcaccagctctgtgttgtggctgtgctgccccatatccttgatactggagctgcaggcagaaattcttatctggaagttcttctgaagttggcagacaaatacaaaaagaaaatgtgggggtggctgtggacagaagctggagcccagtctgaacttgagaccgcgttggggattggagggtttgggtaccccgccatggccgccatcaatgcacgcaagatgaaatttgctctgctaaaaggctccttcagtgagcaaggcatcaacgagtttctcagggagctctcttttgggcgtggctccacggcacctgtaggaggcgggggttttccctaccatcgttgagagagagccttgggacggcagggatggcgagcttcccgtggaggatgacattgacctcagtgatgtgggagcttgatgacttaggggaaagatgagttgtgagagccacaacagaggctttcagaccattttcttttcttggggagccagtgggattttttccagcagtggaagggacattctctactttcttttcttgggagccagtggatttttccagcagtgaagggacattctctacactcagatgactctaccagtggccttttaaccaagaagtagtacttgattggtcatttgaaaacactgcaacagtgaacttttgcatctcaagaaaacattgaaaaattctatgaattgttgtagccggtgaattgagtcgtattctgtcacataatattttgaagaaaacttggctgtcgaaacatttttctctctgactgctgcttgaatgttcttggaggctgtttcttatgtatgggttttttttaatgtgatcccttcatttgaatattaatggctttttccattaaagaataaattggaaaaaagaaaaaaaaaaaaaggaattc

SEQ ID NO: 6426 - DNA, 1544 bp, Homo sapiens
  SIMILAR (700)..(819): 871254mologous to Homo sapiens protein disulfide isomerase- related protein 5,accession number U79278,Smith-Waterman Score=192.
gaagtttgtggactgcttaagtttgtgattgtcatagagtagtatttattaaatcatgaagtcagaatgtgaatatatctcctgtgatttttttttctaataatagggttgcttattctaacccattggtgccatagaatgggtagctagctttattattctatgagttgtttggtgaactctaaatatttgtgcccacagtatttctggctctggtttcccaacagccagattacaccaggtctggtatgtttcaagtactgatgtttatgcacatacgcaccccgctctctgccagcgcactggaaccagtcgcctcacttctgatatgctccctctgtacaggttcacagcagtcttagaaagctcgcaggcagcccatgttctagatcaactttgataattatttatgtatttaatttgtatttcagcaaatgctctgctatttttaaaagcttactgatagcaactgactttatctgatgcagggggcttagttgggaatgttgaatctggttgtaatgttgtccgtgattaaaaagataatgtcctcaaggtgtttctgaggaatgtagtgcagcaagagagaagaaatgcctctgcataaacaaagtaggcagactgttatttttaaagttgtttattcttctgcaccagcagtccattgtaaatgtgtgtgtgtgttttggtcatttttccctaagggagctctcttttgggcgtggctccacggcacctgtaggaggcggggctttccctaccatcgttgagagagagccttgggacggcagggatggcgaggtgagtgcccgggaggacagctgtgcggggcagcagatcctggtttactctcttgagcctgtgcatctctgcacctgggagtcaagtccttcccatcagacctcagccctgggtgcacccgtgggcctttttaagaggttcttctctgaagacccttcatcttccttatcacaagtttaaggtgctgcatggcatttgatactctttgacagccaagatacatttcagtagtaaggttgctttcccgaattattaccttaaagtgaacatttaacctggaattcatttactttaatcttagaaaaatagaaaatgatagctttgaaattagcacttatttctgtactgttgtgtcccaccctcctcaaaaggacacgttcaagtggcttccagtgttaaaatggtgagtgatgtgatgttgaaatgtttcacctgagttctgagcttttccatccgtataatcataggtacgaaggtcagggtaggagtcagactgaggagaacctggattgtagcaggagtagctccagagagtcgctcttccataaaatgagatgttgaccttccagggtgtccccttctgcagatctaacagtggctttctgtcgtctcccagcttcccgtggaggatgacattgacctcagtgatgtggagcttgatgacttagggaaagatgagttgtgagagccacaacagaggcttcagaccattttattttcttgggagccagtggatttttcca

SEQ ID NO: 6427 - DNA, 2063 bp, Homo sapiens
  SIMILAR (644)..(1288): 631254mologous to Homo sapiens protein disulfide isomerase- related protein 5,accession number U79278,Smith-Waterman Score=570.
gtctgtattcctctagtgatgatgtgatcgaattaactccatcaaatttcaaccgagaagttattcagagtgatagtttgtggcttgtagaattctatgctccatggtgtggtcactgtcaaagattaacaccagaatggaagaaagcagcaactgcattaaaagatgttgtcaaagttggtgcagttgatgcagataagcatcattccctaggaggtcagtatggtgttcagggatttcctaccattaagatttttggatccaacaaaaacagaccagaagattaccaaggtggcagaactggtgaagccattgtagatgctgcgctgagtgctctgcgccagctcgtgaaggatcgcctcgggggacgaagcggaggatacagttctggaaaacaaggcagaagtgatagttcaagtaagaaggatgtgattgagctgacagacgacagctttgataagaatgttctggacagtgaagatgtttggatggttgagttctatgctccttggtgtggacactgcaaaaacctagagccagagtgggctgccgcagcttcagaagtaaaagagcagacgaaaggaagagtgaaactcggcagctgtggatgctacagtcaatcaggttctggcctcccgatacgggatgtagaggatttcctacaatcaagatatttcagaaaggcgagtctcctgtggattatgacggtgggcggacaagatccgacatcgtgtcccgggcccttgatttgttttctgataacgccccacctcctgagctgcttgagattatcaacgaggacattgccaagaggacgtgtgaggagcaccagctctgtgttgtggctgtgctgccccatatccttgatactggagctgcaggcagaaattcttatctgggaagttcttctgaagttggcagacaaatacaaaaagaaaatgtgggggtggctgtggacagaagctggagccccagtctgaacttgagaccgcgttgggggattggagggtttggggtaccccgccatggcccgccatcaatgcacgcaagatgaaatttgctctgctaaaaaggctccttcagtgagcaaggcatcaacgagtttctcagggagcttctcttttgggggtggctccaacggcaccctgtagggaggcgggggcttttccctacccatcgttgagagagagcccttgggacggccagggatgccgaggcttcccgtggggggatgaccattgaccctcagtagatgcggagccttgatgacttagggaaagatgagttgtgagagcccacaaccagaggcttcagaccattttcttttcttgggagcccagtggatttttcccagcagtgagagggacattctctacactcagatgactctaccagtgggccttttaaccaagaagtagtacttgattggtcattttgaaaacacttgcaacagtggaactttttgcatctcaaggaaaacattggaaaaattctatggaatttgtttgtagcccggttgaatttgagtccgtattctgttcacataattatttttgaaggaaaactttggctgttccgaaacatttttcctctctggactgctgccttgaatggttccttgggagggctgtttccttatgtatggggtttttttttaatgtgatcccctccatttgaataattaatggcttttttccgttaaagaataaaatattttggacaatgccgataaatgtaatgaagttagtatcacatcataaatcagagtgatgtgtacagtagatcatattttgagtgatcacagatgtcttcgtcgcacgagctttttaacaaaaccagactcttcttagatgggcactatgcacacacaagatttcatgaaccgggcagtggactgatctgccaaattgcttggcggactagtgccatataagactactggtacagctgggtccagtgtatgaccaatcggtagcagacagcgcggtccacgaagggtcgataggacatcgatattgttggaatagctggtttcttagaccagctaaaagctatcggtcttg

SEQ ID NO: 6428 - DNA, 695 bp, Homo sapiens
tttgccattagttacgtttaattttaaatataccatctttggcagcaaaaatcaagctgggctttccttctcctttataaattgcatatatttttaacatatattaacactttaaaaccgtggggtggaaagtttaaaatgccataaaataagaatcatatatgcattctttacactgtaaagcattttaccagacattagaatctgcattcagaattctttctcagaacgtaagtgttcttgaagacatatattttgtcttactaatctgtttcttccaagcactactgtactaggcatacggtaaagatatacattcaagttttaaaagtaaatactttttcctggtagtggccagggcctgcgttcctcagaccaaaaagccgcaaaactggcattgctgtgatttcagaagagaagtgaaatgtataaaacgaagtaattctggggaaggaaaatgtcacaatttttcttcagtgttgtcaggcacactaacccgggaagccgtctctgggcctgaactatccaaattagtgtccgaggaagtgtgacaaatgcaggcccttccaagtttgaccctgattctcaaagttggccaaaagccgtctctagaaacggcggtggcagcggcgtgattctgggaggtccattcaacttttaacaggtccttgggcagtgaccgggttgctgggcag

SEQ ID NO: 6429 - DNA, 874 bp, Homo sapiens
  SIMILAR (174)..(212): 691254mologous to Homo sapiens PRO1902,accession number AF118082,Smith-Waterman Score=54.
gagacagagtcttttctccatcatccaggctggaatgcattggcaccaacttgtttcactgcaacttctgcctcccaggttcaagcgattctcttgcctcagcctcccgagtagctgggattgcaggtgtgttccaccatgcccggctaattttggtatttttagtagagatggggtttctgccatgttggccaggctggtcttgaactcctgggcctcatgtgatctgcccaccttggcctctcaaagtgctggaatgacaggtgtgagccactgcacccaatcagaattcttttttattttgatagctttgactgctttgatagttctccatcaagggaaaccttacaccaacagtgtgaggcatcgcctagggaatttttgttaggaggatggcaaatcctcagatcccaatgcagacttacttgataagaaactctggggatagggcccaggaatttgagattttacataagctccccccggtgaatgcctgaaaaatcattgtaagaggattgttgaatagcaggcccatgtgccaaaggattttttccctggtaagtgcccagggcctgcgttcctcagaccaaaaggcgcaaactggcattgctgtgatttcagaagagaagtgaaatgtataaaacgaagtaattctggggaaggaaaatgtcacaatttttcttcagtgttgtcaggcacactaacccgggaagccgtctctgggcctgaactatccaaattagtgtccgaggaagtgtgacaaatgcagacccttccaagtttgaccctgattctcaaaggtggccaaaagccgtctctagaaacggcggtggcagcggcgtgattctgggaggtccattcaacttctcgtgcc

SEQ ID NO: 6430 - DNA, 828 bp, Homo sapiens
ctagcttgtgcacgaggattgagcatgtgagggaagaaaaagaccgtaatataaatagagggataaataatatcactaaggcatttgggagccttgagactgctgattaattcctatttctcatgtttattttttgttaggaagacaattgtcacttttattattggccacggaaacatgtattactctatatccccaagtcctagagcatgacctgcatgttggagatgttgtacagcaatgtatttatccagacatacatatatgatatttagagacacagtgattcttttgataacaccacacatagaacattataattacacacaaatttatggtaaaagaattaatatgctgtctggtgctgctgttattgactacagtgttgtacagaatttatcatggattattgactgccgagaaagggacagtggaatttagccataccaaggactatactggaaacagacttctgctgctgaatgtgccctgatgtgaccaggttgcacttggaagagatcctccgcgtcttcatgaggcacttaaagcttataaaagaactgcggctggaactcatctggtgctccccatgagagtgctctgcttgtagactggccagtgtccatgaaacaactgtaaataccaacatgtgtgcatgggtcaacagtcttggccatttctcatcaaaagaagccaaattcatgatcaacatctctgaagtttcaagtaaggcccacacttctttgaattactcttcatgggcccacattaggttgtgctgtgaattacttaaggcagtgatactgatgtagtatagttttgtcttaa

SEQ ID NO: 6431 - DNA, 2358 bp, Homo sapiens; identical to SEQ ID NO: 1550
  SIMILAR (940)..(2355): 991254mologous to Cloning vector pBACe3.6 levansucrase,accession number U80929,Smith-Waterman Score=2471.

SEQ ID NO: 6432 - DNA, 1118 bp, Homo sapiens
ttcctctggccacaaaagacctttaatggcctcctatttattgttcttttgttcatttgttagagttgaatgaactataataacttgtctgacataataagaatgccacaggtataacagataaacctgggcaggtggtccagggaatgagagtgtcacaaaataatcactcaacacaagggccacagacctgggagattcttcccagccatccctcactcctgccccgggacacaacccatggcagggcccccattccatagggaaggagggcagggtcccacagtgtctgtgggcttaggacctttaacactgaggcaggaggatgcccggggaagatggcacttcctatgctcgttcccaagttgctctgctgcatcttgccatgcaggttcaggaccataccccgagtttgtgaggcacccacctctcatactcaccacctcatatgaccacctatcatacccacctctcctatgacccttgcaattgtcccagtgaggtgggaagagcctggactagccccattttgcacacagggaaactaaggacacactcggaccgaatgtaatacacccgtgtcatgcgcttgctgtgccctgagcttcacattttcacctagaattccctggggggtgggagtgggggacagggcaggcagggttttgtgccaagggctggtccagttctcactaaagtgtccaggattcctgggggaatcctgccctcaaaggagggacttttgtcataaaatcctccctgagtctgtcttttatgtgagccaagatttccatccatccggcgctgtgtaaagatgaatttaaccctagcctctctcctatcacactgcttctcctgctgtgtcccttgggcctaggccaggaaagtggggtgccagataggggtgcagacacaagtcctcagtgggggattgagcctgtttccttgctccagagctccccatgcttcatgggccaatatcagggtcacgacccatccccactgagcaccaggtccctgtccaaatcaaaccttggccagagattcagggtgggttggctagaaaaaccatcaactatgtacgtgtgtgtgtgtgtgtgtgtgtgtgtgtgtgtgtg

SEQ ID NO: 6433 - DNA, 957 bp, Homo sapiens
  SIMILAR (9)..(317): 741254mologous to Homo sapiens PRO2550,accession number AF130089,Smith-Waterman Score=390.
cgcgtcgacttttttttttttttttttttgagatggagtttcgctcttgattgcccaggctggatggagtgcaatggtgcgatctcggctcattgcaacctctgcctcccaggttcaagcaattctcctgcctcagcctcccgagtagctgggattacaggcatgcgccaccacgcccggctaattttgtatttttagtagagatggggtttctccatgttggtcaggctggtctcgaactcctgacctcaggtgatcctcctgcctcggcctcccaaagtgctgggattaccagcgtgagccaccgcgcccggccattactacatattcttaaccaaccgagataagaaataataaaagttgtacataagggaggcagacaatttgttttggggtattctgatgagtggtatagctatgtcacagcagattggggtgacatttgaggatcatgcagaagccttgaaccacccagcgtctctgcagttctcctttcccaagtatattatctgcccgctgcttgctggtttccatcttcgtttattcagttgagcccacaaataattgtatgcctattacataccaggtttctgtattatgtacaggaaatgaagaagataaagaagagacagccctcttcccatatttaatggcatatactgccctcattttagtttccttcctcctgttcataatttcattgtttgtttttgcatcagttcaaactgttgcttgcttatgtgaggtgacctcaaagtgactttttgaaagtcctgaccctttgcctttcaacatcatttaagaacagcaatagcatctggatcttctcagtaaaatgccttttcaacagctcaaagcaaggattgtttttgttttaatttgggaatgtttcaagtgaaacttagttccatcatttcctcgtgccaagcttggcgtaagcgtctaaagatgtcattg

SEQ ID NO: 6434 - DNA, 492 bp, Homo sapiens
  SIMILAR (187)..(354): 981254mologous to Homo sapiens unnamed protein product,accession number AK022579,Smith-Waterman Score=318.
gcggccgcagaccccgggcggggaggaaaggccggcgggacccaggcccgggaggcccccgcctagagaggggcaccagggagggtgagggaggccaggcgcgtggcccctggagagttcctctgcagacggtttggagtgaggacggggcccagggagatggcatggaccgtgcctttcatttcaggagacgtggttgtaccagttgcaaactgtggggtccaggaatacaactcgaaccccaaagagcatgtgactctcagagactacatcacctactggaaagagtacatacaggcgggctactcctctcccaggggctgtctctacctcaaagactggcacttgtgcaggtaatggggctagggaaggcagcgctgcgtgaacccagaggcctttctgatgaaggtggcccctgggtgcacaacggagctatttttccccgtgaggcactttaatcagtttaaaagaaactggattgtcttccgcatg

SEQ ID NO: 6435 - DNA, 549 bp, Homo sapiens
  SIMILAR (187)..(354): 1001254mologous to Homo sapiens unnamed protein product,accession number AK022579,Smith-Waterman Score=322.
gcggccgcagaccccgggcggggaggaaaggccggcgggacccaggcccgggaggcccccgcctagagaggggcaccagggagggtgagggaggccaggcgcgtggcccctggagagttcctctgcagacggtttggagtgaggacggggcccagggagatggcatggaccgtgcctttcatttcaggagacgtggttgtaccagttgcaaactgtggggtccaggaatacaactcgaaccccaaagagcacatgactctcagagactacatcacctactggaaagagtacatacaggcgggctactcctctcccaggggctgtctctacctcaaagactggcacttgtgcaggtaatggggcttgggacgcaccgaggcgctgccttccctagcgctgcgtgaaccccagagcctttctgatgaaggtggcccctgggtgcacaacggagctatttttccccgtgaggcactttaatcagtttaaaagaaactggattgtcttccgcatggctgcaagtgttgttctttgggaggtcatatggttttt

SEQ ID NO: 6436 - DNA, 1216 bp, Homo sapiens
  SIMILAR (1140)..(544): 731254mologous to Homo sapiens unnamed protein product,accession number AK022579,Smith-Waterman Score=703.
tcagtcccctgtggccctgggcaaggctggtccttctctgctcagccgggtgctgtcagggagggtgagcttgtcaggatcatttgggggttgataggctggcgggggtggcatcttggaggtggcatctctcctgcctgcctgccccatcaggagctggcactgcagctgcactctccctgcctgtttcctgacatcctcgtaaatgacggctgcaccagacgtaggggagctgcgtgtgctgcagacaagcctgccagccctttctgaggcagatacccaggaactaacccaggtaagatgtccccagtgccatgccagccagcgctgtgtcccagtcttcccgcaggctgctcctcttgcctttctgatcacaaacaagctctgggtcatccatccgtattggcctcgcaccaaggaggagctgctggcctccactcggcagctgttaattgcaatggtggccatgtagttggagaggccctcaagtgtccacacatcagactctcctgtcacgtgtggcgtgttcttcacctcaaagcccgggagcgttggggaggtggtcaggtgactgcacaagtgccagtctttgaggtagagacagcccctgggagaggagtagcccgcctgtatgtacttctttccagtaggtgatgtagtctctgagagtcatgtgctcctttggggttcgagttgtattcctggaccccacagtttgcaactggtacaaccacgtctccgtaggtccgtagcaggtggtcgaagtcgggcctccccgcgggcgtcacccaagcgccgccggctgccccagccctgcgtgaaggcgctggaaaacacgcagggcaggttgggcagcaagaagccccgcacaaagtcggcgtaggagaaggcgcccggctccgagacgaaggctacccggcccggagcctggccgacgccggggacatcgacccccaggcctcggaagtggctgtcggcgagggcgcgcgtctcgcggtccatccagctcagcacgggtcgaaggaccctcctcctcacttccgccggagcggaaacggtgaggaccagcctcggaaccagaagacgcagggcgccgcgtttctgccccaccagcgcctggggctccgggcctgcacgcatgcgcgcggctcgccgcggtcttcactgcgcaggcgccgagcggccgaggcagcgcggtcggctctgggactcgtct

SEQ ID NO: 6437 - DNA, 450 bp, Homo sapiens
  SIMILAR (101)..(229): 741254mologous to Homo sapiens Human secreted protein sequence encoded by gene 112 SEQ ID NO:282,accession number AAB56188,Smith-Waterman Score=165.
  misc_feature (1)...(450): n = a,t,c or g
gggtcgaggtcgacggtttcgataangtttttttttttttttttttttttttgagacggagtctcgctcttttgcccaggctggagtgcagtggcacaattgtatttttagtagagacggggtttcaccatgttagccaggatggtctcgatctcctgacctcgtgatctgcctgccttggcctcccaaagtgctgggattacaggcgtgagccaccgcgcccggccggcctcctttaatttcttaaccataaatatcctccccccacttttattatggacgttctgaagcacataaaaatagggagcatagtataataaatttgtacatatttaacactcagcttctataattagaaacaaatggcccatctggtttcatctaggcctctttgctatcctttcatctccaactagattattttacagcaaattctagatgacattctgc

SEQ ID NO: 6438 - DNA, 336 bp, Homo sapiens; identical to SEQ ID NO: 2211

SEQ ID NO: 6439 - DNA, 671 bp, Homo sapiens
  SIMILAR (273)..(449): 541254mologous to Homo sapiens Human myelin oligodendrocyte glycoprotein gene,accession number AAZ29204,Smith-Waterman Score= 145.
ttttttttttagacagagtctcgctccgtcacccaggctggagtgcagcattttacacctatctctgttatagcacatttcacaacacgacaggagctatttacaagtgctactggcctcatataagacagcaagcttcctttttttttttttgagacagagtcttgctctgtcacccaggctggagtgcagtggcgtgatcttggctcactgcaagctccacctcccgggttcacgccattctcctgccctcagtcccccaagtagctggtagctgggattacaggcgcccgccaccacgcccagctaattttttttgtatttttatagtagagaaggaatgtttcaccctgttggccaggatggtctcgatctcctggcctcgtgatctgcccgcctcggcctcccaaagtgctgggattacaggcatgagccaccgcgcccggcctgcacaggtgtcttgaatatgtatatacgcgactccagtatggttggaaatgatttgatttgttgtctatggaattgcacaacctggagccttcctaacatcagcggcttcatactggcatttccattgtggtgcagcaacaatctgagtgagcctccgtctctaagccacatcatttgacaaccggtcccagaaggtaactggaagtcatgatgacaactcc

SEQ ID NO: 6440 - DNA, 412 bp, Homo sapiens
  SIMILAR (409)..(287): 1001254mologous to Homo sapiens HSPC300,accession number AF161418,Smith-Waterman Score=210.
acgaggatggggctgcctgacgcgtctaggagaaggacttgtagaatggatccagagggatggcaggaagccatgagctcagcgtagggcaggataaccctacagagactgtctacgggagcctgagggtcagggcgggagggagaaggtgggacctgaaggaggaagtgaaaacccgcaacagccgaaggctgcgggagtcctctcaaagcatctccccggcgccccagcccaaccacctcagcggcctccctcctccccgcctccccttgctggcccgctgaccgaacgagttgagaaagtctgcgattttcttgatgctgctggtgattatctcaatgtactcccggttagcccagtcctggtgaatctcccgctgcacaggatcctcctgtcccgccatggccgccgc

SEQ ID NO: 6441 - DNA, 2124 bp, Homo sapiens
  SIMILAR (2119)..(1922): 561254mologous to Homo sapiens PRO1902,accession number AF118082,Smith-Waterman Score=161.
  misc_feature (1)...(2124): n = a,t,c or g
aattgaacccccctcgagtacccgtgccggaattgccccggaaatcccgcgccgacccacgcgttcgcggacgcgtaggaaaaatacgctttgtttctcaacctatcatgactggccccagagagtgagctctactattcttgggagtgactcctgtctaacttttcatactggcgagaagaaaagaagcctattttaacactttcgcggtgctgaaacacattacttactttctgaagatgtcccagggaatcctctgtcaattcactgccatatgtaatctatatgataaggaatgcatcttccttctaagtactgcccaaactcttgccagctcctctcccattgtcccttcatgtgaatatttcttggctaccttaggggaaatatagatcagtcttctccccatccatcctctcaaacataatgagattgtttactctttagatttatgcagtgaaaatgcccagtcaggtctgaatcgtcagtgcattatattgactctgagcactttagaatttagagttgcaattgaatgccagctgtggagatggggtgcatatcagatatataaataaagctcaggtttgctagggaaccaggtatagagaaaaataagtctgatatgaggaaaattgcacaatttagagtagttatgccgtagagaaaatttccacaaactagggaaatgtagagagttattctatagaatactccaaaagagggaaagtatgtgatttttgggaaacagggaaaatcttgcaaacttctttcttcacttcccttttgtgtttagctgacccctcccaaaggggaacaatgccctttgggaagtttggggaagaggtaacggggaaagtgggccctggatccccctgccttcccataccttcactccctcccatcccatcccttcccctcccctccttcccccctcccagcctaaatggacaattcctagcccaacattgagtcacctcaataagtcctcaacacgtgggtgtgtttgcttgagattgtcccagcgggttgagcagtttggtctcacctccctcgctagttgagacccaaaaagagacaaataactttttcatggtctttgaaacgataatgcttatttcgtggtcaatggctttaaaaaaatctggtttcttgttttcttcaacaaactcacttagtttccctttaaatgatattgtaaaaattaaagtaatcttgaaaaatgttttgacaaaagtaaaattaaagggacatcttttcttgttttgttttttttttctattgccacacatgaccgttccttcacctttaagcaaagagagtggttcagatggtttctaagatgccaacctgacctcgcattctgtcattctacccagctcttaattcaatttgcttccattatcctaacaggcttctttcttacttaggaacttgggaaagggctgctgtatttaataccctccaacactaacggcaggacttaggatagggtactgtttattggaaaacctactgaggtggaaatgtgcggttttaggaccttcataaacatctcatttaatctttctagcatccctgtgaaacagcccatgatttcacgttgataaacaaagaagaccaggggtccccagggatgtgaagcatcttgcccaggctttctgctgctggtgaccagtgtagccagggantcccaacccaggttttcctggactcaggaaagactgaggctttttcctgggatgttattaaatagcctaattgtgtcccaagcaacccaagggcccttgaagtcctgccttggttcctgccttatggccttcacattcaagaaaatggagcctagtcccatgtcctgtagtccccaatgctttgggaagcccatgatgggaaggttgtcgggaggccaaaagttcaagaaccaggctgggcaatatcacaagactccatctctacggaaaagtaaaaaattagccagtcatggtggtgtacacttatggtcctagttactcaggagacttaggcaggaggattgcttgatcctaggaattcgaggctgcagtgagctatgattgcacctctgcaccccaccctcggcgacacagcgagaccctctctcttaaa

SEQ ID NO: 6442 - DNA, 596 bp, Homo sapiens
  SIMILAR (573)..(262): 581254mologous to Homo sapiens HSPC300,accession number AF161418,Smith-Waterman Score=246.
cccaggctttttggctgtgaatggtctcaaattacatttgaccaagttaggatgtataaaatgttactgaaaaaggtaaaaatgcctaacgttcgttttccaacggttcctcctgaactttcttcccacataccacaccaccacccccagaattgccagaccccaaaaggcccaacacttttgaaaaaaaaggaaaacacgagaataaagcccctggttgctctttaaaggaagaaaaggaaggagctgaaaggcctgctggggccctttccccatgtggccctaatgttgtgtaaaagcaaacttccccaagcagcagcacgggcactgttcctaggtgagtgttctacccttttgtcacccgaggcttcaatgtactctaattctccgttcaagggctgtcaatttctcgtttagtgttgcaagtccttgacgacaagacatatcgaacgagttgagaaagtctgcgattttcctgatgctgctggtgaatatctcaaatgtactcccggttagcccagtcctggtgaatctccccgctgcaaccggatcctcctgtcccgccatggccgccgcctgaggaagagcctcgtgcc

SEQ ID NO: 6443 - DNA, 1065 bp, Homo sapiens
  SIMILAR (427)..(1029): 871254mologous to Homo sapiens cytokeratin 18,accession number M26325,Smith-Waterman Score=831.
atggctcccagcgtgccagcggcagaacccgagtatcctaaaggcatccaggccgtgctgctggggcctcccggggacggtaaaggcacccaggcacccatattggctgaaaacttctgtgtctgccattcggctactggggacaggctgagggccatggtggcttctggctcagagctagaaaaaaagctgaacgcaactatggatgctgggaaactggcagaaatgctcgatgacctcatggagaagaggaaaaagaagcttgattctgtgattgaattcagcatcccagactctctgctgatgattttagagtcaactgtgagacagagcctgccatgtgcacgcagtagagaacgacatccatgggctctgcgagctgcagctggagacagagatccaggctttcaaggaggagctgctcttatgaagaagaaccatgaagaggaagtaaaaggcctacaagcccagattgccagctctgggttgactgtggtggtagatgcccccatatctcaggacttcgccaagatcatggcagacatctgggcccaatatgacgaggtggctcagaagaacagagaggagctggacaataacaggtctcagcagattgaggagagcaccacagtggtcaccacacagtccaccgaggttggagctgctaaggcgatgctcacagagctgacacgtacagtccagttcttggagatcaacctagactccatgagaaatctgaaggccagtttggagaacagcctgagggaggtagtggcccgctatgccctgcagatggagcagctcaatgggatcctgctacacctggagtcagagctggcacaaacctgggcagagggacagtgccaggcccaggagtaccaggccctgctgaacatcaaggtcaagctggaggctgcgatcgccacctaccgccgcctgctggaagatggcaaggacttcaatcttggtgataccctggactgcagcaactccatgcaaaccatccaaaagaccaccacccgccagatagacccgccagatagtggatggcaaagtggtgtctga

SEQ ID NO: 6444 - DNA, 846 bp, Homo sapiens
  SIMILAR (208)..(810): 871254mologous to Homo sapiens cytokeratin 18,accession number M26325,Smith-Waterman Score=831.
gcagaaatgctcgatgacctcatggagaagaggaaaaagaagcttgattctgtgattgaattcagcatcccagactctctgctgatgattttagagtcaactgtgagacagagcctgccatgtgcacgcagtagagaacgacatccatgggctctgcgagctgcagctggagacagagatccaggctttcaaggaggagctgctcttatgaagaagaaccatgaagaggaagtaaaaggcctacaagcccagattgccagctctgggttgactgtggtggtagatgcccccatatctcaggacttcgccaagatcatggcagacatctgggcccaatatgacgaggtggctcagaagaacagagaggagctggacaataacaggtctcagcagattgaggagagcaccacagtggtcaccacacagtccaccgaggttggagctgctaaggcgatgctcacagagctgacacgtacagtccagttcttggagatcaacctagactccatgagaaatctgaaggccagtttggagaacagcctgagggaggtagtggcccgctatgccctgcagatggagcagctcaatgggatcctgctacacctggagtcagagctggcacaaacctgggcagagggacagtgccaggcccaggagtaccaggccctgctgaacatcaaggtcaagctggaggctgcgatcgccacctaccgccgcctgctggaagatggcaaggacttcaatcttggtgataccctggactgcagcaactccatgcaaaccatccaaaagaccaccacccgccagatagacccgccagatagtggatggcaaagtggtgtctga

SEQ ID NO: 6445 - DNA, 928 bp, Homo sapiens
  SIMILAR (39)..(350): 751254mologous to Homo sapiens adenylate kinase 2A,accession number U84371,Smith-Waterman Score=376.
ggcgtgcgaactggtggcagtgagagacttcggcggacatggctcccagcgtgccagcggcagaacccgagtatcctaaaggcatccgggccgtgctgctggggcctcccggggccggtaaagggacccaggcacccagattggctgaaaacttctgtgtctgccatttagctactggggacatgctgagggccatggtggcttctggctcagagctaggaaaaaagctgaaggcaaactatgaatgctgggaaactggtgagtgatgaaatggtagtggagctcattgagaagaatttggagaccccccttgtggcaaaaatggttttcttctggatggcttccctcgggactgtggaggcaggcagaaatgcttcgatggacctcatggagaagaggaaagagaagcttgattctgtgattgaattcagcatcccagaactctctgctggatccgaaggaatcacaggaaggctgattcaccccaagagtggccgttcctaccacgaggagttcaaccctccaaaagagcccatgaaagatgacatcaccggggaacccttgatccgtcggattagatgataatgaaaaggccttgaatatccgcctgcaagcctaccacactcaaaccaccccactcatagaagtactacaggaaacgggggatccactccgccatcgatgcatcccagacccccgatgtcgtgttcgcaagcatcctagcagccttctcctaagccacatgtaaagacttggttatgtttatctaatgttgggtccaagaaggaatttctttccatccctgtgaggcaatgggtgggaatgataggacaggcaaagagaagcttccttcaggctagcaaaaatatcatttgatgtatatggattaaaaaagcacttacttgatgtataaaaaaaaaaaaaaaaa

SEQ ID NO: 6446 - DNA, 1460 bp, Homo sapiens
  SIMILAR (999)..(1325): 461254mologous to Homo sapiens keratin 18 precursor,accession number M26326,Smith-Waterman Score=151.
tcgtccgcaaagcctgagtcctgtcctttctctctccccggacagcatgagcttcaccactcgctccaccttctccaccaactaccggtccctgggctctgtccaggcgcccagctacggcgcccggccggtcagcagcgcggccagcgtctatgcaggcgctgggggctctggttcccggatctccgtgtcccgctccaccagcttcaggggcggcatggggtccgggggcctggccaccgggatagccgggggtctggcaggaatgggaggcatccagaacgagaaggagaccatgcaaagcctgaacgaccgcctggcctcttacctggacagagtgaggagcctggagaccgagaaccggaggctggagagcaaaatccgggagcacttggagaagaagggaccccaggtcagagactggagccattacttcaagatcatcgaggacctgagggctcagatcttcgcaaatactgtggacaatgcccgcatcgttctgcagattgacaatgcccgtcttgctgctgatgactttagagtcaagtatgagacagagctggccatgcgccagtctgtggagaacgacatccatgggctccgcaaggtcattgatgacaccaatatcacacgactgcagctggagacagagatcgaggctctcaaggaggagctgctcttcatgaagaagaaccacgaagaggaagtaaaaggcctacaagcccagattgccagctctgggttgaccgtggaggtagatgcccccaaatctcaggacctcgccaagatcatggcagacatccgggcccaatatgacgagctggctcggaagaaccgagaggagctagacaagtactggtctcagcagattgaggagagcaccacagtggtcaccacacagtctgctgaggttggagctgctgagacgacgctcacagagctgagacgtacagtccaggtctttggagattcgacctggacttccatgagaaatctgaaggccaagcttggagaacagccttgagggaggtggaggcccccgtacgcccttacagatggagcagcttcaacgggaatcctgctgcaccttgagtcagagctggcacagaccccgggcagagggacagcgccaggcccaggagtatgaggccctgcatgaacatcaaggtcaagcctggaggctgagatcgccacctaccgccgcctgctggaagatggcgaggactttaatttttggtgatgccttggacagcagcaactccatgcaaaccatccaaaagaccaccaccccgcccggataagttggattgggcaaagtggtgtcttgagaccaattgacacccaaagttcttgaaggcatttaagcccagcaagaagcaagggtacccttttggggaagcaaggaaggccaataaaaagtttcagagttcaaaaaaaaaaaaaagaaaaagaaagttttg

SEQ ID NO: 6447 - DNA, 399 bp, Homo sapiens
  SIMILAR (3)..(278): 451254mologous to Homo sapiens Human myelin oligodendrocyte glycoprotein gene,accession number AAZ29204,Smith-Waterman Score= 147.
tttttttttttttttttttgagacggagtctcgctctgttgcccaggctggagtgcagtggcgcgatctcagctcactgcaagctccgcctcctgggttcacgccattctcttgcctcagcctcctgagtagctgggactacaggcgtctgccaccacgcccggctaattttttgtatttttagtagagacggggtttcaccatgttagccaggatggtctcaatctcctgacctcgtgatccgctggcctcggcctcccaaagtgctgggattcagaaaaactcttttttttttttggagacaagagtttccgcttttgttgcccaggctggagtacaatggtgtgatctcggctcaccgcaacctccgcctcccgggttcaagtgattctcctgtct

SEQ ID NO: 6448 - DNA, 388 bp, Homo sapiens
  SIMILAR (214)..(351): 601254mologous to Homo sapiens Human myelin oligodendrocyte glycoprotein gene,accession number AAZ29204,Smith-Waterman Score= 139.
gaaagctgggtacgcgtaagcttgggcccctcgagggatactctagagcggccgccctttttttttttttttgtattttttagtagagatggggtttcactgtgttagccaggatggtctcaatctcctgacttcgtgatccgcccacctcggcctcccaaatccttctgggattaaaggcgtgagccactgcatccagccaatctacttcttttttttttttttttttttgagatggagtctccctctgttgcccaggctggagtgcagtggcgtgatctcagctcactgcaagctccgcctcccaggttcatgccattctcctacctcactctcctgagtagctgggaggctgaggaacaagaattgcttgaacccggacgcgtgg

SEQ ID NO: 6449 - DNA, 1870 bp, Homo sapiens
  SIMILAR (1360)..(1692): 461254mologous to Homo sapiens Human myelin oligodendrocyte glycoprotein gene,accession number AAZ29204,Smith-Waterman Score= 166.
agcaaggataatatcttgtggtggtagagccagaagatcccaagatataatggacccccatggtaagtccctacccacctgccagatgtggcagggttattccatttggcagctttgcccgacagacttcccagacagtgaggcaggtcctgagctgtctggacagtattaccttctgcaccccacatttggcagcccaaaattccctggaaggctcactcccagctcccaatcctaataagttatgaaagatggcatttcacaattatacttggaactgcaaataattgggaatcttagtactttttcattatattcttgcatttttaaataagcatagagtcagtctttctggatttgtataaaatgtaccgtaactgaacattactataaacatgacaaaagtacattccttatgaatctactctgctaaaaggtaaaagcttaaccttcaatttcaatattaaagggccatgtatcgtaactggcagttaattgctatgcacacagaagtagttttggggcacttgattcctctgccatgattttcagttttgttttatttttttgagtcggagtcttgctctgttctccaggctggagtgcagtggcgtgatctcggctcactgcaacctccgcctcccaggttcaagccattctcccacctcagcctcctgagtagctgggactacaggcacctgccaccacacccagctaatttttatatttttggtagagacggggtttcaccatattggccaggccagtctcaaactcctgacctcgtgattcgcccaccttggcctcccaaagttctgggattacaggtgtgagccaccacaccctgcctagagtagtctttactctaggaggtggttctttcccctaaggtgtggtttttcaattgaatgcctatgatgttaaaaagttctctccactctggctaggtcagaacctcatatttctcagcactgtgcaacctctagtatctccattctttctttttctttttttttttttttttgagatggagtcttgctctgtcgcccaggctggagtgcagtggcatcatctctgctcactgcaagctccgcctcccgggttcaccccacacgccattctcctgcctcagcctcttgagtagctgggactacaggtgcctgccaccatgcccggctaattttttggtattttttaaatagagacagggtttcaccatgttggccaggctgatctcgaactcctgacctcaggtgatccgcctgcctcagcctcccaaagatctggggattacagatatgagctgccacgcccggcctttctagtcgtacatttttattaaaaacaaaacaaaacaaaaaagcctttttttttttttttgagacggagtctcgctctgttgccccaggctggagtgcagtggcgcgatctcggctcacttgcaagctccacctcccggggttcacgccattctcctgcctcagcctccctagtagctgggactacaggtcccctgccaccacacccgactaatttgtgtttttgtttttgttgtttttcagtagagacggggggtttcaccgtgttagccagggatggtcgcgatctcctgacctcatgatccggccgcctcagtctcccaaagtgctgggattgcaggcgtgagccacagcacccagcctccaaattttaaatgagccccttgtgagaaggaaaagaatctgctgtccacagaagccaggcgtggagctacttcaaccagaaactgtcacccatgacactctgtgtgggttcagtcacacagaccacgatccattatggaagggagggagaaaaggatcacatcaaatctactgtatgcctcatagac

SEQ ID NO: 6450 - DNA, 410 bp, Homo sapiens
  SIMILAR (342)..(13): 981254mologous to Homo sapiens HSPC262,accession number AF161380,Smith-Waterman Score=590.
  misc_feature (1)...(410): n = a,t,c or g
natcctatagagcggccgcacgaactcaaacaccggctcccgcatgtccagaagctggtggaagatgtaggtgacggagtcatcccagcggcactggaagaaggacaagccggctggagtcatggtttcttggtgtttcttgtagaaatcaaaagtgcggaaggtccgctgggccagctgatagcagggtgaggggcgtgcgtcctcagagaagtcaatcggctggtcctgcttgaagagcaggaaggcaagacggtgtatgccggagcctcgggcagggaagggggggaggtagggccacgtcacttgtccttcacccacccggttacccgggatgttggttctcggttggagtcccctcactgccgcagtacacaggcatcaggtcatcctcaccccgcacgcgtggg

SEQ ID NO: 6451 - DNA, 451 bp, Homo sapiens
  SIMILAR (290)..(451): 961254mologous to Homo sapiens Human secreted protein sequence encoded by gene 13 SEQ ID NO:66,accession number AAB25677,Smith-Waterman Score=283.
gatcgaaaccctagcgactggctgagtattacggcctctaccgagacctgttccacggtgccacctttgtgccccgagtccccctgcacgtggcctacgctgtgggtgaggatgacctgatgcctgtgtactgtggcaatgaggtgactccaaccgaggtaaccactcacttgtgcccctcctccctgccctgtgcaaacacagacacatcccatctcagtgtcacagacactcctgggtttggaattttgttgttctctgtctctttgatttcctggaagacgacaccatgacaatttcaaagaaaatagaacaaaatgaaggaaaaagaggctctgtcttagcacattcctgtgaccagcctgctgtctgtggtgtgccctcctggcccggccttggcacatgttcgtttttggtggtgttgcctggacaggcaactctgcagggctgc

SEQ ID NO: 6452 - DNA, 371 bp, Homo sapiens
  SIMILAR (40)..(369): 741254mologous to Homo sapiens calcium modulating cyclophilin ligand,accession number U18242,Smith-Waterman Score=363.
caccgacactgccacccctcccatactgtggacgggaggatggagtcaattgacgtcgctaccgacggcggttagaggacgggggtcctagcggtctcaggtctgtcggtttccctgcgtacggcggaactgagtacgagaaagctgctcatgaactcggaacagcgcatcaaccggatcatgggctttcacaggctaggcagcggcgcggtagaataaagacacacacaatcaatgcaacacgacagcgataaactgaactccctcatcattccttccgtttcaaagcgagtagtgctggtcgattcagtctgtacaggaacgactgaccatcagggtggcgtgctcgagcgaaaagtgaccacactggg

SEQ ID NO: 6453 - DNA, 1449 bp, Homo sapiens
  SIMILAR (796)..(191): 601254mologous to Homo sapiens Human secreted protein sequence encoded by gene 13 SEQ ID NO:66,accession number AAB25677,Smith-Waterman Score=523.
  misc_feature (1)...(1449): n = a,t,c or g
gttttttttttttttcccggcaagaaatcatgtttattcacatttccccaccccaccacctgagagtcactttcactccaagcccctgggctctaacgggagggggccaaagaggggggctgcctaaggcagggcccagaccccacagtgtggccatctggagctgtgtctttactcttgctgccgatcaatcccatgctctgaaatgcgcacactctggctccttagtagatgccataggtgggctcatgactgtccctgtaccggtccaaggtagcgcagggggctgccgggtgggggaaagcgcttctgcttggggtggtaagggggcggccgcagcgaactcaaacaccggctcccgcatgtacacagaagaattgtggaagatgtaggtgacggagtcatcccagcggcactggaagaaggacaagccggctggagtcatggtttcttggtgtttcttgtaagaaatcaaaagtgcgagaaggtccgctgggcccagcgtgataagcagggtagaggggcgtgcgtcctcagagaagtcaatcggctggtcctgcttgaagagcaggaaagagacaagacggtggatgccggagcctcgggcaggcgtagggggggaggtagggacacagtcacctgtccttcaggcgcaagcggttacccagggatgttggttagcaagccagtgggaggtacttcagcatcttggctcccagcagggtgccccatcccaagctagttgagttagcaacgttcacaagggagcccttcttcttgcctcataggtcacctcttggcgctttgggcagccttcggtttnggagtcacctcattgccacagtacacaggcatcaggtcatcctcacccacagcgtaggccacggtgcagggggactcggggcacaaaggtggcaccggtggaacaggtctcggtagaggccgtaatactcagccagacgctgcttgtggtaggggccacaggtcctctcccactcggccccgcacggcaatcccaacgggaacactggctgtgcggaaggcgggcaagcccgctnccttcttccaaaattggccccaaagctccctggatggcctgtttccgttccagtagctgttgggtccgggagactttgggtggaggcaggcccaatatcaatcttctctttgggatctgtcttctccccgaaatactctcggtaggtccgccaccagtgcggggcctgcgcctcctgctctgctcggcgccggtagcggtcgaagctccggtacttctccagccgctccaggttgctcaagtcgatgtcactgttgggcatcggccccagcgggggtgtccggcggcccaggacggccgaggtgctgaagccccgccatctccgacactcgcacagcgcggctcgccaccagggcgccgccatcttccctccggcctgcggaattccacca

SEQ ID NO: 6454 - DNA, 1856 bp, Homo sapiens
  SIMILAR (1)..(345): 981254mologous to Homo sapiens Amino acid sequence of a human secreted peptide,accession number AAY12924,Smith-Waterman Score= 597.
ccctccaggctcagagccagactgcgcctggaccttcttgttctgactccacgtgcctgcccggcctccagggtgcgggggcgcctttcttgcaggcggaccctgcccaggatggggccagcctcgtgctcagctttggccacaaatgcagcccctggcccaccccaccctgccggccctgccttctccagtatttcccacatggccacgactcctcagtcactagagcctcctgctgggaacagtgtcccccagagcctcatgtctatcctagaccctgcaagcagctgggtccccaagagtgcatctccccctagagttgcctgcccatgcccacctgctttgtaaccttcccaggagattcatgcttgctctgcacagcagggcttcgagggccagggcatgacacggaactgcctcaggtttgggtcagacctgcatcctggggcatctgctgaaatgtgagcacacaaaccacctcctttggcccagaagccccccaggcctagcatctcagtgccccaaccctctgcccagctgtggtatccagcaggtccttgggtccccacttgagcaggcacttggctgggatatggagcaatttaaagcccacaggggttgttcagtttctatgaaatggagcatggggtgcctgctagcctcaatcccccgaagtgggagcctcatgatagagtatagcttgggggtgggaggtgaggaaaatctgaggtacccaggggaacccccagcttaactggtctcttcagaggagtcccccagggcccgccagctatcacagggactcagaaacacccatttcctaatgacatggtgagtttcttgatttcttttttttgtttgttttgttttggttttcaacttggctgaccccgggtctatgatctattcacatcgaacccctgactggtctgcctgggtgccaggggtgagcgtgaccgtgagtgttgctttcgacagctggctcagcacacgctgtgtgatagggatctgagcttgttcatctccagtcgtgacttcatttcccttccttctgtcctcctcctgttcttgccttggacctgcaggtgtgcagacccgctctctctgccttccttgcatgtgggccaccagccatccctggatcttggtccccagagggcccagtcagcctgtggatgggtgtgaggggggttgtcccactgtgtgggttatccctttacccagcactttaaaacttggccaggagagggccagggcaacccttcacagggaagatggggagggcaccccaactccccacaagccatgcaaccaccaagttaggaaattgggggtcttgccccaaggtggggtgaagaccaaaattgaagttggattttgggggccaacaaggctaaggcaggagagacaaggggttaggttgggagggtcccccaatccctggcttgaccccagtgtgtttccccggagatgcttccttagctgagtgggaccccgggcaggagttggggacagtgctgtcccccacccctgcacacagccaggccctcaggctctgcggtcactcgcctccctgctggtcactggtcattggtctggagttatattttgatgccatgaagacactgtttatatctaatgtttatatattttaaagatttgtgccaagagagtatatttaataaaaacttaaatgacttcttctcctgctcctggctcttctttggctctgaccgcccccccatcttcccccatgaacccccaaacagggttgaagtgcttttgacacatttgtgataaaagttctgaataaaagtcttgaataaagaagtttttaaatgcaaaaaaaaaaaaaa

SEQ ID NO: 6455 - DNA, 496 bp, Homo sapiens
  SIMILAR (276)..(344): 951254mologous to Homo sapiens Human secreted protein sequence SEQ ID NO:159,accession number AAY87120,Smith-Waterman Score=136.
tgaaacagacgcacagagaggctgggaaggtggtgcccatgcacaggggcctggccagctcctgtgaaccttgcaaagctggcaccgtccctgactcagagcaagtggggagcgggtgtgttccccttgcccagtccatggccccacctggtcctgcgtggagggcggggcatcacatgaagaagatctgagaatccacgtccagggccattttttggttcttttttcaaacggtttggaacaaaccggggctggtccagaagggatgatgacccaggtggcccggggtctggatcccgatggcctcctgctcctcgacgtggtggtcaatggcgttgtccccgagagcctggctgacgcagatcttcaagtgcaggtcgggggtcaagcccgtgcgcgctgcggcaccgcgccaccaaagcgtcttcgtcttgctcatcgccgtgtccccctacccctactaaacgggagagggcattggcggccgcctcgtgcc

SEQ ID NO: 6456 - DNA, 514 bp, Homo sapiens
  SIMILAR (80)..(505): 601254mologous to Homo sapiens Human secreted protein sequence SEQ ID NO:159,accession number AAY87120,Smith-Waterman Score=371.
cgtcggtccccaagcgggaagaactgcagggacatcaccgagtgcgaggaggagagcatcgagtgtggacccgccaagatgtgcttcaacaccggttgccagctaccagtgtgtggacacaccctgtcctgccacctacggcaagggccccagccctgggacgtgcttccggcgctgctcgcaggactgcggcacgggcggcccctctacgctgcagtaccggctgctgccgctgcccctgggcgtgcgcgccccaccacgacgtggcccgcctcaccgccttctccgaggtcggcgtccccgccaaccgcaccgagctcagcatgctggagcccgacccccgcagccccttcgcgctgcgtccgctgcgcgcgggccttggcgcggtctacacccgttcgcgcgctcacccgcgccggcctctaccggctcacctgtgcgtgctgcggcaccgcgccaccaaagcgtcttcgtcttgctcatcgccgtgtccccctacccctactaaacggga

SEQ ID NO: 6457 - DNA, 324 bp, Homo sapiens
cggcggggggttcaggccgttattcccgcccctttggaggcccaagccagttggtccccctagggttgaaatttttggcccggcttgcccaccttgggaaaaccccttttcacttaaaattccaaatttacccggggttgttgggccatcggattattcccggttcttcggagggtttggccagaaaattgcctttaacccggaagggaaggttccgttaacccaaattcccgcccttgccttccttcttgggcaaaaaaagggaaatccgtttcccaaaaaaaaccaaaaaaaagatctttattaattcttccagctcgtgcc

SEQ ID NO: 6458 - DNA, 344 bp, Homo sapiens
  SIMILAR (245)..(328): 601254mologous to Mus musculus synaptonemal complex protein,accession number Y08485,Smith-Waterman Score=82.
aggaaaggcagaaacttcattacaaatattctaagcagtttctgactttgtttcaagattggaacacgaacagtgaaggctgaggaaccagaggaacaaaaactagctacaatgtttcgagagcaacaaaagagttgtctataagctagaatggttcagagacagagacactgaaacaaattaaactgaaatcagcaattcctacggagtttggaggacctagaagagaatcagagttcatcttactgatgaacaaagtgaccttagaaaagaaatggccaggttgcaaacaaaacttatgaaggaaactctgcagcaagacttggcacttattcactcgtgcc

SEQ ID NO: 6459 - DNA, 319 bp, Homo sapiens
tatatatatatatatttatgtatttataacatagaaaattggatagaaattattccaggcatatgggatgtggttcccctgggcatgcacacttggagggcaggggctttcaggagtcacaccagatcacgcttgggacctttttagagcctggctgagccacctttccagagttccagtgagcagggggcccctcagtgcatcttccccacctcccctgcttccagggacgctgggctgcagacttcgcagctgctgccacatggggttggagcctccaacagcatcatccctgagtagacctggtccactgagcccc

SEQ ID NO: 6460 - DNA, 945 bp, Homo sapiens
tttttttttttttttataggcatatatatatatatatatatttatgtatttataacatagaaaattggatagaaattattccaggcatatgggatgtggttcccctgggccagaaccacgtagggcagaggagccctgccctccaagtgtgcatgcccaccaaagagacaggggctttcaggagtcacaccagatcacgcttgggacctttttagagcctggctgagccaccctttccagagttccagtgagcagggggcccctcagtgcatcttccccacctcccctgtcttccagggacgctgggctgcagacttcgcagctgctgccacatggggttggagcctccaacagcatcatccctgagttagacctgggtccactgagtcccacaggtcggctctctgcagcctttccctgcaggtcaccaccctctacaggcaatggcaaggacgcgacatcacaggtagacagcccacatcctctcatccttccggtctcctggactggagttgtcccggtgccctggagacccagtcactgccacctctccacatgaatggactcagcaggggaaggactggaggccctgctcctgccctttggttatgcaagcacccccgaccagccatatatttcttcctcccccttcaagatcatccctgagaagacctcgagccccgagtgggtgcccttggggctgtcttgggagcctccagcaggcccctgggccactccactggcaggactaccgtcctggagtgagggtgaggcttcccgggtagggcgtgcttccaccagcctctcgagggtccggttgagggcctccacgccatcggccagacgctggctctgaacggccagccgctgcagcagcaggttttgctgggccatgagtgtgctcgaattcctccgcacttcctagcgtctacgagggtcttctat

SEQ ID NO: 6461 - DNA, 360 bp, Homo sapiens
  misc_feature (1)...(360): n = a,t,c or g
gccaaacctccctcggtcgccgtgttctccgcaagcctcctgcagcgcccgcctgccaatgtgaggctggcaccaggctgnagctccccaatcccagcccactttgctgtgtctctggcgggctgtcctccttggtgggagctgtcctgcacactgtaggatgcttaaaggtatcccttgcctccacccacccctagccagcagctcccagtcagacaacagccagaaatgtctccagactctgcccagcctccccaggtagccaccctcgagacacgacctcagagtctctgtgtctcctagaagcctgacagagacccccagggcagtnggttggtggcgggntagagacccttgcct

SEQ ID NO: 6462 - DNA, 1007 bp, Homo sapiens
tttttttttttctttttgaatagtttaatagttattaatttaaattaaggcttttggcgtgcttttcccacattttttaggtttttttctctatgtgtacacctttgcaagatgtatcattaacttcatgaaacccccaagctcctcaggccacgaaaaaggagggtagaaagaacgccagaaagggtgggtctgtgtgttctggggtgccgtggggcccgcccccgaggaaggtgccaaccgttccctggagagcagaatcaccagggcctggggaaagccatgcggggttcgagagcctgcgccatggccatgctggggcagggccaaaggggatgcccaggcgtctgcccactgagaacactgttagtgcggagggatccacaggaggggagagcggcgccagggtcccggacacaggcaagggtctctagcccgccacccacccactgccctgggggtctctgtcaggcttctaggagacacagagactctgaggtcatgtctcgagggtggctacctggggaggctgggcagagtctggagacatttctggctgttgtctgactgggagctgctggctagggatgggtggaggccagggatacctttaagcatcctacagtgtgcaggacagctcccaccaaggaggacagcccgccagagacacagcaaagtggtgctgggattggggaggctgcagtctggtgccagcctcacattggcaggcgggcgctgcaggaggcttgcggagaacacggcgaccgagggaggtttggcgggaaccacgcggaacagatcgtggtgggaatgaggctgcgcctactaacaataaccccacccaccctgacggccacaccagcctgtgaggaggacagggccgagcccgctggcaggtggggaaactgaggcccagagagcagcgagcctggtctggacccaggcccaccccaccctcccaccagctggtgtggactcttcttaaggagcttcaggctccacagtgg

SEQ ID NO: 6463 - DNA, 428 bp, Homo sapiens
gcttttgaaaactcagaaatgtgaatctgacaaaacccacaccccaaatgaactgaaaaaaacaatcacctgatttgacatcaaacacactaatgtagtctatggaaccagctgcaatgtgggtaccagagggatgccagctgagactcaggatgcgaccttgggagttggacaacaaaaaaagaaagtgacatacacataaatatacgaagagtaactgagctctcttcccacaactatctctagagtgttctacaatcttagctctctcatctatagtactccttgaagcaccattttatttatttatttatttatttatttatttatttatttatttatttatttatttttgagacggagtctcctctgtcgcccaggctggagtgccgcagtgggatctcggctcactgcaacctccgcctccc

SEQ ID NO: 6464 - DNA, 408 bp, Homo sapiens
  SIMILAR (137)..(403): 971254mologous to Homo sapiens JTV-1,accession number U24169,Smith-Waterman Score=429.
cggacgcgtgggcgaacgcccgcagcagggtcagattggaggtggccggtctccgtcgtgacctctgacggtttctgagcgttggcctttggcacgcgctacacccttttgctttggttctgccatgccgatgtaccaggaagagtctaacctgtctctgcaagctcttgagtcccgccaagatgatattttaaaacgtctgtatgagttgaaagctgcagttgatggcctctccaagatgattcaaacaccagatgcagacttggatgtaaccaacataatccaagcggatgagcccacgactttaaccaccaatgcgctggacttgaattcagtgcttgggaaggattacggggcgctgaaagacatcgtgatcaacgcaaacccgggcttccctccccttttcct

SEQ ID NO: 6465 - DNA, 348 bp, Homo sapiens
ctcgtttgggcccgcttgttgggttccgttggtaattcccgcccctttggagtcttaaaccgggctgtccccgggttcagagattggagcccttcctggtaacctggtttaagccccttttttctttaaccccaaaaatttacccggggctgttgggcccgcccggtgtcccccctttttgggggggttaagccaggggattggggggaccccggagttcggaatttccgttagtgggccttgggcccctggccttccgccttggcaccaagttaggccctgttttcaaaaaaaaccaagaaagcaaaaaaaagacttcagtgtagataaaatggcttaactcgtgcc

SEQ ID NO: 6466 - DNA, 396 bp, Homo sapiens
  misc_feature (1)...(396): n = a,t,c or g
aaacactaaggaaaaaattctttcagccaggaaaaacaaccaggttttccccccacacacccnnnnnnnnnnttttttccccaaaaaaaggaaaaactttagggagggaatccccccaaatttcccccccccaaaaaaaagccccccccaaaaaaaccacccaccccnnnnnnnnnnnccccccaaagnnnnnnnnnnnncaatcgcacgcccccccaaaaaaagggccccccccggagcctttaaaaaaaaaccccccccnnnnnnnnnnnnatcgtctttgtgcatttcgtatagttttatatattttttttctctaataaatttannnnnnnnnnnnnnnnnnnnccatgattcaactgtttactaatcagaaagggcggccgtcggtctaga

SEQ ID NO: 6467 - DNA, 1192 bp, Homo sapiens
  SIMILAR (68)..(39): 901254mologous to Homo sapiens Human secreted protein, SEQ ID NO: 7867,accession number AAG03786,Smith-Waterman Score=50.
aggtaccggtccggaatcccgggtcgacgcacgcgtgcgggtgaaaccccgtctctactaaaaatacaacagccaggtgtgatggtgcacgctcgtgatcccggctactcaggaggctgaggcaagaaaatcgcttgaacccggaaggcagaggttgcagtgagctgagattgtgccactgcacgccagcctgggcaagagagtaagactctctctcaaaaaaaaaaaaaaaagaatttaaaatcccaatttattttctaactcttttatgggatgtatttagaacacagtatacctatagtatacctatgtgtttattatgtggggaaatggtaactgacatttaattattagaagtacttacccctgccttcctccatttttattcatggctacttgagaaagcaaaaggaaaaaataatagttatcagtagtgtcactggaaagaagagaggagggacaaaactgagcagcagaattcgtatagacatttacgtttaaattctaaaagcccaattgagatgttcagggagggtttgttttgccctttggcctcatgaatgggtttcatgaatgggcttcagtggcttataaactctgtaaaattctattctaaattttgtacatttattttgttccggttaattccagaagacatttcaaacatttttcttacaccatataataaaaatacttaactaaattgacagttataaaaataaatcagtgaaatgtaccttatactttaataaaaaatgttttcagaaatagataagtgaaagctgagtgtttctttgataggttcccctgtactataggagtgataattgcagctattgcaatagtagtaattgttaaatggatactaatgaatagcatagcatagtgggtaagagtttatatagcacaggctctaggaatcagattaaggtaggttcaaataccagttctgccagtaactggttttagaaccttgggcaagttaaaggaatgtctcccagcctcagtttccctatttgtaaaatggaaataatggtagctacctcaaacctcattacgaattcaatgagttaaacttgaaaagacttattacagtagctggcccactaatgacttgatagtagtttatatggatgctatctcatattagcatatatggaattaatagtgtatcactatactttttttttct

SEQ ID NO: 6468 - DNA, 441 bp, Homo sapiens
  SIMILAR (103)..(213): 391254mologous to Rattus sp. reverse transcriptase homolog,accession number S80119,Smith-Waterman Score=64.
  misc_feature (1)...(441): n = a,t,c or g
caagttcaggatcgagatcagaatgcaggtttttgccacttctattcaatgtagtactagaaattctagctggagcaattaggcaaaaaaagaaaaaaaggcattcacattggaaaggtcaaagtatcaataaaattgacagaggtaatcaacaagttcatcaaagtagcatgatacaaaatcaacacaaaaatcagttgtgtgtttatacactaacaatgaacaattggaaaagaaatttaaaattnnnnnnnnnnnnnnnnnnnnnnnnnnnnnnnnnnnnnnnnntaatcactgaggcaaagacttgtataatgaaaacctcaaaacattgctgaaagagatgaaagaaaacaaatggatcaatatcccatgttcatggattagaagacttaataatgttaacatttcgatactatccaaagtgacctacaaattcag

SEQ ID NO: 6469 - DNA, 318 bp, Homo sapiens
  misc_feature (1)...(318): n = a,t,c or g
ncactatcaattgcgtggatataactgacatctatagactacttcatccatcaacagcagactgcacattctgtccaagctcgaatggaatatttaccaacataggccacattctgggtaataacacacattaacaaatttataagtatagagttcatataatgtctactatcagaccacagaattaaactagaaataaataacaaaacataggaaaattccaaagtacttatgaataaacacattaatcaaagagaaatgtgaagagcaattttaaaatactgtaaattaaaatccaaatacaatttaacacttctg

SEQ ID NO: 6470 - DNA, 88 bp, Homo sapiens
  SIMILAR (3)..(83): 1001254mologous to Homo sapiens alpha-1 antitrypsin,accession number X17122,Smith-Waterman Score=141.
ccgccatcttcttcctgcctgatgaggggaaactacagcacctggaaaatgaactcacccacgatatcatcaccaagttcctgggaaa

SEQ ID NO: 6471 - DNA, 1064 bp, Homo sapiens
  SIMILAR (5)..(1033): 691254mologous to Homo sapiens alpha-1-antitrypsin precursor,accession number J02619,Smith-Waterman Score=1019.
gacaatgccgtcttctgtctcgtggggcatcctcctgctggcaggcctgtgctgcctggtccctgtctccctggctgaggatccccagggagatgctgcccagaagacagatacatcccaccatgatcaggatcacccaaccttcaacaagatcacccccaacctggctgagttcgccttcagcctataccgccagctggcacaccagtccaacagcaccaatatcttcttctccccagtgagcatcgctacagcctttgcaatgctctccctggggaccaaggctgacactcacgatgaaatcctggagggcctgaatttcaacctcacggagattccggaggctcagatccatgaaggcttccaggaactcctccgtaccctcaaccagccagacagccagctccagctgaccaccggcaatggcctgttcctcagcgagggcctgaagctagtggataagtttttggaggatgttaaaaagttgtaccactcagaagccttcactgtcaacttcggggacaccgaagaggccaagaaacagatcaactgattacttggagaagggtactcaagggaaaattgtggatttggtcaaggagctttgacagagacacagtttttgctctggtgaattacatcttctttaaaggcaaatgggagagaccctttgaagttaaggacaccggaggaagaggacttccacgtggaccagggcgaccaccgtggaaggtgccctatgaattgaagcgttttaggcatgtttaaccatccagcacctggaagaagctgttccagctggggtgctgcttgatgaaaataccttgtgcaatgccacccgccatcttctttcctgccttgatggagggggaaacttacagcacctggggaaaattgaacttcaccccacgattattcattcaccaagtttcctgggggaaattgaaggacaggaaggtcttgcccagctttacattttacccaaattgttcctttattgggaacctatggattcttgaagagcgtcctggggttcaactggggcattcattaaggtctttcag

SEQ ID NO: 6472 - DNA, 374 bp, Homo sapiens
  SIMILAR (313)..(366): 881254mologous to Homo sapiens helicase SMARCAD1,accession number AY008271,Smith-Waterman Score=85.
cagagacccacccggaccgggccccgcgatcacagcaagagagcgaaaatgtgccaagcatgccttcattacatcagacaatagtgacacacctgaagctctgagtcgtactggctcaactaacgctagaggagcctacacattgccatgctaaccctgacctgatctttgaagatatggaagccatgacagacttggaactacatgaactttgtcaacaggaccgacacattaataactttcagttagacatggacttgattttagattctggaaaatttcaagttgtaggatgcatcttgtctgaattgaaacagaaggattcatctaattgatgagtttaataccgatatggatatctttgtgccactgct

SEQ ID NO: 6473 - DNA, 418 bp, Homo sapiens
  SIMILAR (278)..(153): 711254mologous to Homo sapiens Human secreted protein, SEQ ID NO: 7879,accession number AAG03798,Smith-Waterman Score=151.
ttgaggcggagttttgctctgtcgcccaggctggagtgcagtggtgggatctcagctcactgcaacctctgcctcccgggcccatgccatttccccgcctcagcctcccgagtagctgtgaccacaggcgcccgcgaccactcccggccaattttttgtatttctagtagagacggggcttcaccgtgttagccaggatggtctcgatctcctgaccttgtgatccgcccgcctcggcctcccaaagtgctgggatcacaggcgtgagacaccgcacccagcccccaagatacgtttttatgtgaaaaaaaaaacaagctgaacaactcatagtgattctgcttacgtaaacaatgtctatgtatctgtacacatgtcctatgtcaatgcttaggaaaagatctggaagaatgtctgc

SEQ ID NO: 6474 - DNA, 331 bp, Homo sapiens
  misc_feature (1)...(331): n = a,t,c or g
tgagactataggcgtgagccaccacactcggcttattttattttannnnnnnnnngcnnnnnnnnnnnnnnnnnnnnnnnnnnnnnnnnnnnnnnnnnnnnnnnnnnnnnnnnnnnnnnnnnnnnnnnnnnnnnnnnnnnnnnnnnnnnnnnnnncagcccttaatattaagatgtctaccacccagatccatctacagattcaattcaatccctatcaaaatccaagtgacctttttctggagaaaaagaaaaatctctcctgaaattcatacagaatctcaagggaccctgaataaccaaaactatcctgagaaagaagaaagttgacg

SEQ ID NO: 6475 - DNA, 494 bp, Homo sapiens
  SIMILAR (88)..(213): 1001254mologous to Homo sapiens JTV-1,accession number U24169,Smith-Waterman Score=240.
ggaggtggccggtctccgtcgtgacctctgacggtttctgagcgttggcctttggcacgcgctacacccttttgctttggttctgccatgccgatgtaccaggtaaagccctatcacgggggcggcgcgcctctccgtgtggagcttcccacctgcatgtaccggctccccaacgtgcacggcaggagctacggcccagcgccgggcgctggcccacgtgcaggaagagtctaacctgtctctgcaagctcttgagtcccgccaagatgatattttaaaacgtctgtatgagttgaaagctgcagttgatggcctcttcaagaagaatcaaacccccaagagccaccttggatggaaaccaacataatccaagcggatgagcccacgactttaaccaccaatgcgctggacttgaattcagtgcttgggaaggattacggggcgctgaaagacattgtgatcaacgcaaacccgggctcccctcccctctctcg

SEQ ID NO: 6476 - DNA, 269 bp, Homo sapiens
  misc_feature (1)...(269): n = a,t,c or g
gnnnnnnnnnnnnnnnnnnnnnnnnnnnnnnnnnnnnnnnnnnnnnntattcagaaatataaagcatcaaagggattataatgaacaataatatggcaaaaactagataatccagaagatatgaacaaattctaagaaacacgctatacctagcaaatctgcatcaagaagaaataggaatgctgaacagaccagtaacaaataaggtgctttaattagtgattaaaattcccctaacaaagaaaagcccagaaccagatggctttgtg

SEQ ID NO: 6477 - DNA, 1046 bp, Homo sapiens
tttttttttttttttttgtacattcgtttttattgtcctgcagtgggatgaataagtttctaatatacaaatttccccctcctcatacatggaaaagaaactgacagaggtcccaaatcagtttcctggcagccccagaattcccaaggtaactgaccaaagtctcctgccttctgtcctcatcgctgatctgtttgtatgagcaacgtggggcaacccctcgcttggttgcttgggacagccgcccacagacctcagctccagggaaggcactagggggtcactgagggctggacagcaacttaggaagtggcccctaagtgactctacccatggggttcaggccatcggtgtggcctgaacatattgggtcctggggtggaggaacactgcagagccacagaaatgccacgaaaacagccagctactgccccccacaatccccgcgactagttaaaatgcagattcctgaccccaccctgagtaaggattcagggtgagtgtgggatctgcaaacttaaatttcccagtgattctgatgtgggatagtcctagaagaatagttccagaggcaatcatttagatcctaaaactgtggggagtggggacagggtgaacgaaggtgcccccccaggttccacccacccctcactctagagcctaaggccctcccaggagggagtgcctgaggaggcaatgacccaggccctgaagcccagggttcggtcccctgtcctttcccaccagcgttgagttgatgggagtcaagactgttctctcccagggtgcaagcagggaaaggggttcttggggatagaagggttccccattgaatggaaggcagttctgggcccagggaggtgcccaagttgggtggcctggggaggaggaggtgggtggcgggggagcaacggaaaaggttaacagcctggagagcaagggtcgtccctccagccactgattccaccacccaggacgtggcgcatgggtcctcaggggtgatatctgggctggttccgggtctgggtcccaggtccccaccagtg

SEQ ID NO: 6478 - DNA, 315 bp, Homo sapiens
  misc_feature (1)...(315): n = a,t,c or g
nnnnnnnnnnnnnnnnnnnnnnnnnnnnnnnnnnnnnnnnnnnnnnnnnnnnnnnnnnnnnnnnnnnnnnnnnnnnnggaaagggattttctttttgtcccccgggttggattccaggggcccaatttgggttaattgaaatttccgcttccgggtttaccccttttttctggcttaaccctcccaaaaactggggattaaggggcccctttacaaccccgggttaatttttggattttttaaaaaaaagggggtttaatattgtggcccaggttggtttgaaattctggacctcaggggatcccccccctttgc

SEQ ID NO: 6479 - DNA, 827 bp, Homo sapiens
  misc_feature (1)...(827): n = a,t,c or g
gtaacccaaaccgggccggaangcccatcccccncgganccaaggcctanaaaaaggaaccctaccggggccataaaaataaggaaaccatatttaattccacccccttttgtccagttttcccggggaccccccaatagcatttccagtgttatagagagtgaccagtgaccttaatgcatgtatatgccacatagtcaattcagagcgtaataacctaaaaattcagaatgacttgttttttgaaagtacttggaaattgtgctgctacttaaatattgaaggaattcagaaagttgtgtatttatcttaaaatgttccttctcacttattctactggaattgaccatgaaaaagaaaatattatgccttatttatatctaattattgactgtgcaaactgtgactcagtggatatttgtatgccccccaaaaacattttaaagctgagcaatttttaataaagatgtataaataattttgattattctcattgtagttaagttactgttagtttgggtgcaatacattctttccttcctcatccttttaaaattaaatatataagatgtatgttttgttttattacattaagtgctatttttaaaaaattcattgtgtgtatatgagctaatacttgatttgtttctgtatagcatgattaaagataattgaaaattttgcacttattttaggcccttggaaatttgtattctaatactttttaagaatgtccatttattttgtacataataaattagctttgtatatgaaaatgggtttgaatcaaataaaaaaagtgatgttactttcttcaaaaaaaaaaa

SEQ ID NO: 6480 - DNA, 313 bp, Homo sapiens
  SIMILAR (236)..(310): 601254mologous to Rattus sp. reverse transcriptase homolog,accession number S80119,Smith-Waterman Score=59.
  misc_feature (1)...(313): n = a,t,c or g
ctgaatagggaaaaactaaaagcctttcctctaacatctggaacatgacaggaatgccactttcaccactgttattcaatgtagtaagggaagtcctagctacagcaatcaggcaagaaaaagaaataaggggcatccaaattggaaaggaagaagtcacattatccttgtttgtagatgatatgatcttatatttgaaaaaacctaaagactgcaccaaaaaaccattagaactgatacattcagtaaagttgcatgatacataattaacatacaaatatcagtagcatttctcaatgccaagagtaaacan

SEQ ID NO: 6481 - DNA, 375 bp, Homo sapiens
  SIMILAR (258)..(127): 811254mologous to Homo sapiens Human secreted protein encoded by gene 154 clone HE6FL83,accession number AAW74882,Smith-Waterman Score=183.
cctaagagtctctgcgctcaccatcacgaagtttctcatagccgtcgcccgcctatcgaggacacggatgcagtcgcccagcgtctacacacaacggggatccttgtagagcagaggccctcagtgatacgccagtcccccagtcatcagggtctggtgatcataatgaaaagggtccatctcggtctccttttcagctgcactgaccaggtccatgggggccagcaggctgcagaggaagaccagcaccaactccatggcgtctgcacagccggtcccctccgagactcccaggaggacccgccgagtcccgaggagcctgggagtggcggggccgcggggcagggcggtgggtgaggcttgagctgctttccc

SEQ ID NO: 6482 - DNA, 251 bp, Homo sapiens
  SIMILAR (136)..(246): 1001254mologous to Homo sapiens polycystwin,accession number U56813,Smith-Waterman Score=187.
aagaatgacatcgggtaagtataatggtgagcccttataattaatacattggtgaagaaaaatatactagtcatattaaggtaagtttcatatttctaaaacactgtaataaaatataaatattttgcttttcagctgtcagtggtagctataggaattaacatatacagaacatcaaatgtggaggtgctactacagtttctggaagatcaaaatactttccccaactttgagcatctggcatatcggca

SEQ ID NO: 6483 - DNA, 333 bp, Homo sapiens
  SIMILAR (217)..(306): 931254mologous to Homo sapiens polycystwin,accession number U56813,Smith-Waterman Score=133.
  misc_feature (1)...(333): n = a,t,c or g
nactaaggaaatgcaagcaatatactgttttacttattttatggcagggcttaacactttccatttgagtgagtgacttttaagaatgacatcgggtaagtataatggtgagcccttataattaatacattggtgaagaaaaatatactagtcatattaaggtaagtttcatatttctaaaacactgtaataaaatataaatattttgcttttcagctgtcagtggtagctatagatattaacatatacagaacatcaaatgtggaggtgctactacagtttctggaagatcaaaattactttccccaactttgagcatctggcatattggca

SEQ ID NO: 6484 - DNA, 299 bp, Homo sapiens
  SIMILAR (76)..(267): 431254mologous to Moloney murine leukemia virus integrase,accession number K03364,Smith-Waterman Score=135.
cccctcccttccgtacacatcaagctcggagatttgcccctacccaggactggcaaattggctttactcagcatgccccgagtcagaaaacaaaaatacctcttagtctaagtagacactttcactggataagtaaaggcctttcctacaaggtctgacaaggccactgctgtcattacttcccttctgtcagacataattcctcggataggacttcccacctgtatacagtccagtagcacactggcccttattagtcaaatcagtcacccatcatgtcaggctgctactatacagcg

SEQ ID NO: 6485 - DNA, 1110 bp, Homo sapiens
  SIMILAR (138)..(31): 751254mologous to Homo sapiens PRO0113,accession number AF090894,Smith-Waterman Score=121.
tttgagacagggcctcgctctagcacccaggctcatgcctgcaattctggcactttgggaggctgagacaggaggactgcttgagcccaggaattcaagaccatcctgggcaacatgaagagaacctgtctccacaaaaattttttaaaaattagctgggcgcagtgatgtgtgcctgtagtcccagctactcaggaggctggggtgggggggatggcttgagcccaggaggttgaggctgcagtgagatgtgactgtgccaccatactccagcctggggtgacagggagtgaggccctgtctcttaaaacagtaattaattaaaatacttttagccaaccaaaataccccaagggaaaggaaaaaaggcacagcttgggggcaagcatggtcaagtgtgggtaacactgaatttgaggtgaatgcgggttcccttaacaatccctgctttgtatattttgaaaaacttccctaaataaaaaaactaaaacaaattatctcctagaaaagtgaggttcccattaaacacaaaccaaaaacagcaagatctattttaataggaggcctaagtagaagatgcccaagaacaaaatttatttagaatctcgcacatgagcgagtgatgagatacctctgctggggtaggggcatgatcccactccttaggaaggaacattccagcttccacagcattagcttcaccagggagcggccacccctgccccacagcagtgctagctcaaaaccacccaaacctaacctgctgtccagacgccagggtgggttcccttaaaaacaaaaagacaactttgttagttcacagcatcagcaaggaccgtcgtcaggcaacagtaatgaaggggagaggaaccatcactcgctcatgtgcgagattctaaataaattttgttcttgggcatcttctactaggcctcctataaaatagatcttgctgtttttggtttgtgttaatggaacctcactttctagagataattctttagttttttatttaggaagttttcaaaatatacaaagcaggaatgtaaggaacccgcatcacctcaaattcagtgttacccacacttgaccatgcttgccccagctgtg

SEQ ID NO: 6486 - DNA, 456 bp, Homo sapiens
  misc_feature (1)...(456): n = a,t,c or g
ctcgagttcactacacagngggggaattcgatatctctgcctgggcaagagtgtggaggtgccgaggtgtcttcattctctcgcacatttccacagcacctgctaagtttgtatttaatggtttttgtttttgtttttgtttgtttcttgaaaatgagagaagagccggagagatgatttttattaattctttttttttttttttttttttttcactatccaaacctttaaagggggccccctttccccttttttttttttgctctttttcattaacccctttccccggtttttttttttcttttaaaccccgttcttaagggccttggccttttttaaacctttttttttttttaaaatagttttggccgaaccatattttttttttaccaacccccaaattttaatgagggggggggggggattttcgggccggggttcttaaaatatattatt

SEQ ID NO: 6487 - DNA, 337 bp, Homo sapiens
  misc_feature (1)...(337): n = a,t,c or g
ggctgcggaagtttttgttctattatgtgctgagttttttactgttttttaatcaggaagggannnnnnnnnnnnnnnnnnnnnnnnnnnnnnnnnnnnnntacgatatggtttactttttcagtctgttactatgatgaattacatggattgacttcaggatattaaaccagctttggattcactgattttctgtattggttttctgtattggtttcctgttttctgttccactgattttcactctgatactcactgtgtttcatttattttgcttaccttaggtttaattcttctttgtccagtgtttaatttggaagctgatgttattaattcg

SEQ ID NO: 6488 - DNA, 334 bp, Homo sapiens
  SIMILAR (5)..(184): 801254mologous to Homo sapiens ASR2B,accession number AF312032,Smith-Waterman Score=238.
  misc_feature (1)...(334): n = a,t,c or g
ctatgatgaggagtggcgtcggtctacggtccacccagatgaggtggggaatcttaagtaggaggaccggtgagccctgcaaaaccgactgagggtcttcctgtcccttatggacactggctggttagataaccttctcctggacatagacaaagctgatgtcattgtcaagatgctggatgcattccgtgattaagatggaaggaggcacggataatgatcttaacatcctggatcaggacgtggaggacgagcatgcatgaaagcctggtgagcccagcaagaatgaagaaggacgggctgtatcaggcctaggggacggggagcgcaaaan

SEQ ID NO: 6489 - DNA, 323 bp, Homo sapiens
gttgtttcttatcttttagtatttgaatctagcagtaagtaaaaaaagataatatatcaggactgcattggatttgtgcaagattgtcttaacattaattgaccccattgacagcttaaggggaaaaaatgtgatcatctcattggatacagaaaaagtagtaggtaaaatccaatagccatttatgacaaaaatttttagcaaactgggaatagaagggaactttcttaaatggctgaaatatcagcagagttctacagtaagtttacttaatgtttaaatactaaaagcattcctttcaagaacagaataaggatgcatgc

SEQ ID NO: 6490 - DNA, 690 bp, Homo sapiens
  SIMILAR (42)..(656): 301254mologous to Mus musculus putative protein kinase,accession number AJ245453,Smith-Waterman Score=171.
ggcaacatacattgtggactttggctttcagtacaacattcagagaggggcagatgctgacagctttttgtggcatgtacccctacgtggccccagaacgctccctgggccaggcatgccagtgacccgccagggacatacaaagcctcagtgtcatactgtatttcaggaatacagtaggtagaagggccaggactttgcccttttactcagggaagcctccaaacttcaagaaaaaattctcacaggaagataccatgccccaccactttttgcccttcaacttgactcattaaaaaattactaatgctgaacgccaggaagggtccttcactgtaactgatgaaaaatccatgggtgaaaaggatccagaagatgccactgataccatacgaagagccactcctggaccaccccaaacaatccagctcatggtggccatgggatttcaggccaagaacatctctgtggcaatcatagaaagaaaattcaactatcccatggccacctacctcattttatagcacacaaaacaagagaggaagtgctccaccatcagagaactgtcccttcctcccggggttgccacctctccttccccatccactgaactttccaccttccctctctcactgatgcgggctcatagggagccagcttttaacgttcagcctcccgaagaaagccagg

SEQ ID NO: 6491 - DNA, 338 bp, Homo sapiens
  SIMILAR (2)..(319): 791254mologous to Homo sapiens transformer-2 alpha,accession number U53209,Smith-Waterman Score=425.
  misc_feature (1)...(338): n = a,t,c or g
nagtagctcatatacaccagaatactggcagtgaaggagccgaagtcattctccaatgtctaaccagagaagacacactggcagaagggcaaatccagatcccaacacttgccttagagtgtttggccttagtttgtacacaacagacagagatcttcgcgaagtatgttcttgatatggacctttgaatggtgccaatgtggtttacaaccagcaaactgggcgatctcaaggatttgcttttgtgcatttttagggaatagatgactcaaaggaggctatggtaagggcaaacagaaaggagctggatgatagaagaaattcgggtggattattct

SEQ ID NO: 6492 - DNA, 841 bp, Homo sapiens
  SIMILAR (610)..(786): 431254mologous to Homo sapiens Secreted protein encoded by gene 94 clone HPMBQ32,accession number AAW88627,Smith-Waterman Score=131.
tcacccacccttctcctcccattagtcatttctctaagtacagctgatgtcatgtggggctgagaagaaagcagatcacacttcatcacagaaagaatgccttgtgattatcttctccacatctgaaattccttttgacacctgcattgggccgactgccattcccatgactgctgcacctgcgtttttagagaatgcctcataacccactgattctcattcacagagaatgggagaacggaatgaagaaagattccagcagcttatagaaggatagcaatattttgggacagggaaaatcctgtcatacctcatctcttcctcaggaggagttctgagctggtcctgcttttcatagttgtttcttttcttccacttaagaactcatagatttttcttactgtcctaaaggaagtccttacctctgaggtatctcctccaatgaatacctggtttcaaaggctggaaatagttcattaatgttaataaccttctttatgttctcaggggaaatgcttaggggggggtcacaaaatgtgccttttcttttcttttttttttttttttttagggggaaaatttttttttttttccccagcttgaaggccagggggccaattttgtttaatggaagcttccccttccgggtttaaccctttttttttgcttaaccttccaagggagtgggaattacgggttcccccacccacccggggtaattttttttgatttttaaaaaaaaacggttttattgggttaacccgggagggtttgattttcttaacttaatgatccccccgcttttgcttccaaaggggtgggattaacggccctaacccct

SEQ ID NO: 6493 - DNA, 343 bp, Homo sapiens
  SIMILAR (305)..(343): 691254mologous to Mus musculus putative,accession number AK014022,Smith-Waterman Score=42.
ggcacgagccaaatggattttatgccgaaattgaatgtgaaagatgtaactcacctgagctggatgaagaaggctacagcatcatacccgacgaacccggctctaccaatggaaagcacttttattcttcaagtgaatcggagtactaagaataatcacataagatctagtatccagattaaaccatcgctatctacagacattcttaataatgctgcgcctgtagatgaattgaaggcgtcaataggcaacatcgcactttccccatgaccagagggtgccattaaaaggaacttatccagagaagaagtggcaagacccaggcgtttcacaccatctccag

SEQ ID NO: 6494 - DNA, 382 bp, Homo sapiens
  SIMILAR (9)..(68): 1001254mologous to Homo sapiens similar to PID:g3877944,accession number AC004983,Smith-Waterman Score=102.
ggcacgaggaaaagaatgagaagattagaaatgtcggattgtgtgaagctattgtacagtttacaaggtaatacctctaagtgtgcctttagcgttcagtgaattcttaaaactgctgctggagaattgtcccaaacatatttttttaacctttgtaggacatttagcccatcaaaacctgcaaaatctttacatacacagaagaacagacagttcttcaatgaaccagaagaaaatttctggatggtcatggtatttacatacacagtgtatctttctgaaattgtatgggtagagttatggtgatctttactggtcagaatttaaaaaaagttctctgctgttgcatccaagtaaaattaaaataaaattggttgcaatt

SEQ ID NO: 6495 - DNA, 427 bp, Homo sapiens
  misc_feature (1)...(427): n = a,t,c or g
tcggcacggggaccagatggattcacagctgaattctatcagacattcaaagaagaattggtacaaatcctactgaaacaattccaaaggataaagggggaaatcctccttaaaatcattatgagaaaccagtatcaccctaatacccaaaaccaggaaagggacataacaaagaaactgttgactcgctctttctgggtttctctctgccccgtgctgtcatcccctgcagactctggagtccaggccctcttctatctctatgaatcanctttgcactctgtctgtttctctgttctgtctgcctctgctcacccacacgtgcacttgtgccccacatgccccaccctcggttctctctggttcccactgtgtctggtgtgtgtctctattcttcttctgattactctttcctcccccaccctta

SEQ ID NO: 6496 - DNA, 344 bp, Homo sapiens
  SIMILAR (11)..(268): 761254mologous to Homo sapiens CGI-41 protein,accession number AF151800,Smith-Waterman Score=317.
ggcacgagaccgtgcagcactggagacagtcatccgacgggcccggcccgagctccgtcggccaggcgtgcagggtatccccagggtccacgagctcaagattgaagaatatgtgcagcgggggctacagcgagtggggctagatccccagctgccactgaatctggctgccctttatgcccacgtggcctaggagaaacgtgtggtgagtatattaagccggactatactgattgttatactcggtggagagtcttatattattgattatagtgttgacctatggatatcagttatcgatattatgtacttgctcagtagggaatatattctagtttattatg

SEQ ID NO: 6497 - DNA, 764 bp, Homo sapiens
ggaggcaggagatgagacttgccagtgcctttagaggccactgtccaccccagaccctccactgggagaagcagaggccaggataggctgacttgtatgggtaggggattatttcagtctctaagtcctggccagtgtggacctaggtccctctgagagacactcctatccatggggaggtagcgtgtgacctcaggcagcctaccataatcctggggcttctctggaggaccccacacagatctatcataggataaatctacttgtctgtcgtagatctatctcaactaggaccattcatcagtgggccatttaatcagcccacttcagccaggaggcgcacaaacatgaagctactttgcactgaatcctatcagtgtggtgagaacattacacatgcctatagggaatgatctgtgtttttggttgatataaaatagagagcaattaattactgtttagtaaatgcagggcagtggaaaagaatctttcaaaagaggatccccacatggaaacaatcaaggtggcttttgtgatgacaagtggggaacgagatactggactaactgagcccatggctgggtagaggggaagctgaggctcatagtgagatgggccagccagaggtcatgaaactagtctggggcataggggggtctctggagatggcggaagcatgggtccctctctcactgcgaatgcactgccttctatatctcgtcctttccccgactcggtcaccgattctggcagcgcccctctcc

SEQ ID NO: 6498 - DNA, 932 bp, Homo sapiens
tttttttacagagaagttaaaccatctttattcgtggattgcaagattttgatcacagaaattccgaaagaatctacagagtattacaaataacaagggaacttagcaagatgcttgcatataaggtcagtatgttaaaatcaatattgtttattcttacgagtagaatataaaaaagtcaaaatgccatttaacattgtatacaaaacactaaatactcaagaataaatctaatgaaagatatatatgatctctatactgcaatctatccaagcacagctgcattaaaatatagatatatgtgcaatctacaaaatattgccaggagaaattaaagaccgcctttaaataaatggtgggggaagaatgatattcatggattgaaggacttgttgttaagatactagttttccccaaacagatctatagattcaatgcgagccccaataaaaaatccccccccctttttaacaagctaattccaaaattcccctagaaatacaaaggccgtagaataagccaaaccaatcttgggagaataagttacaggacttaaagatttattataaaactacattaaagtaacatagtttggtactggtatgaagttagacaaagactactccctcccgctcctcaatctgcccccatccctagaacgtgctggcagctttctccatccgatctgcaagggttaaagggcgctgaggaagggctgaccgactggggtgggaaacaaagcggcactgagataacttcaggccaccttcctcccctcagtaccttcggatgaaaggtttcccttcttggtctgggaagcccactaagaagaaagcctgggctgtggcgttctggggaagtgaatagtacggccgccgggcgcgtcgccccaggaaccagaaggctttttgccgctattagtgcagaatggc

SEQ ID NO: 6499 - DNA, 2544 bp, Homo sapiens
  SIMILAR (1)..(1869): 991254mologous to Homo sapiens PK-120 precursor,accession number D38535,Smith-Waterman Score=3115.
atgaagcccccaaggcctgtccgtacctgcagcaaagttctcgtcctgctttcactgctggccatccaccagactactactgccgaaaagaatggcatcgacatctacagcctcaccgtggactccagggtctcatcccgatttgcccacacggtcgtcaccagccgagtggtcaatagggccaatactgtgcaggaggccaccttccagatggagctgcccaagaaagccttcatcaccaacttctccatgatcatcgatggcatgacctacccagggatcatcaaggagaaggctgaagcccaggcacagtacagcgcagcagtggccaagggaaagagcgctggcctcgtcaaggccaccgggagaaacatggagcagttccaggtgtcggtcagtgtggctcccaatgccaagatcacctttgagctggtctatgaggagctgctcaagcggcgtttgggggtgtacgagctgctgctgaaagtgcggccccagcagctggtcaagcacctgcagatggacattcacatcttcgagccccagggcatcagctttctggagacagagagcaccttcatgaccaaccagctggtagacgccctcaccacctggcagaataagaccaaggctcacatccggttcaagccaacactttcccagcagcaaaagtccccagagcagcaagaaacagtcctggacggcaacctcattatccgctatgatgtggaccgggccatctccgggggctccattcagatcgagaacggctactttgtacactactttgcccccgagggcctaaccacaatgcccaagaatgtggtctttgtcattgacaagagcggctccatgagtggcaggaaaatccagcagacccgggaagccctaatcaagatcctggatgacctcagccccagagaccagttcaacctcatcgtcttcagtacagaagcaactcagtggaggccatcactggtgccagcctcagccgagaacgtgaacaaggccaggagctttgctgcgggcatccaggccctgggagggaccaacatcaatgatgcaatgctgatggctgtgcagttgctggacagcagcaaccaggaggagcggctgcccgaagggagtgtctcactcatcatcctgctcaccgatggcgaccccactgtgggggagactaaccccaggagcatccagaataacgtgcgggaagctgtaagtggccggtacagcctcttctgcctgggcttcggtttcgacgtcagctatgccttcctggagaagctggcactggacaatggcggcctggcccggcgcatccatgaggactcagactctgccctgcagctccaggacttctaccaggaagtggccaacccactgctgacagcagtgaccttcgagtacccaagcaatgccgtggaggaggtcactcagaacaacttccggctcctcttcaagggctcagagatggtggtggctgggaagctccaggaccgggggcctgatgtgctcacagccacagtcagtgggaagctgcctacacagaacatcactttccaaacggagtccagtgtggcagagcaggaggcggagttccagagccccaagtatatcttccacaacttcatggagaggctctgggcatacctgactatccagcagctgctggagcaaactgtctccgcatccgatgctgatcagcaggccctccggaaccaagcgctgaatttatcacttgcctacagctttgtcacgcctctcacatctatggtagtcaccaaacccgatgaccaagagcagtctcaagttgctgagaagcccatggaaggcgaaagtagaaacaggaatgtccactcagaaacaaccatgacaacccaaaccccagcctgcccttcctgctccaggagccgtgccccggctgtcccagcccccatacaggctccctctgccatcctgccactgcctgggcagagtgtggagcggctctgtgtggaccccagacaccgccaggggccagtgaacctgctctcagaccctgagcaaggggttgaggtgactggccagtatgagagggagaaggctgggttctcatggatcgaagtgaccttcaagaaccccctggtatgggttcacgcatcccctgaacacgtggtggtgactcggaaccgaagaagctctgcgtacaagtggaaggagacgctattctcagtgatgcccggcctgaagatgaccatggacaagacgggtctcctgctgctcagtgacccagacaaagtgaccatcggcctgttgttctgggatggccgtggggaggggctccggctccttctgcgtgacactgaccgcttctccagccacgttggagggacccttggccagttttaccaggaggtgctctggggatctccagcagcatcagatgacggcagacgcacgctgagggttcagggcaatgaccactctgccaccagagagcgcaggctggattaccaggaggggcccccgggagtggagatttcctgctggtctgtggagctgtag

SEQ ID NO: 6500 - DNA, 901 bp, Homo sapiens
  SIMILAR (709)..(900): 951254mologous to Homo sapiens PRO1851,accession number AF119856,Smith-Waterman Score=322.
acccagtgtatggacatcaggcctcccctccccaaggcaggacttcacctgtcctttactttcactgagtaggatccactatactctagaggctgactcatgaggaaaccttctaggaagggagggcttcctccgttcagaaagccaacagaggtcccttgaactgttttctgatccccaaatctgcactccgaatgcagctgcacggccaggcgtggacctatccctgacagcatgctcttctgtttgaaaatctcctgtgacaaatggccattctaaggtggagtgtatgtgtggcaggatggggggctggaagcttggtggcagcgctgctggttgcccgcctccttgactgccttcctgctccctttctgtttccggatgttcctgccctagttgcctgcttcagcaccaccagccacctcaaatcctgatccagctgtgtctcgtgtcatgaatatgaaaatcgaaggtgcccccaaggcgcagaggccctgtcctaacagggggatcctgggaggggagtgacctgtcacatgtctcgatgttgaagtagtgagggaacccagccacacctagtcactgctccctccctcaacctcccactcctcaggaaggggctgcctaaacccagactttttcttcttttagaaacaaccatgacaacccaaaccccaggtaagttcccagcccccttggcccctttccacatccttgcccccagcctgcccttcctgctccaggagccgtgccccggctgtcccagcccccatacaggctccctctgccatcctgccactgcctgggcagagcgtggagcggctctgtgtggaccccagacaccgccaggggccagtgaacctgctctcagaccctgagcaaggggttgaggtgactggcc

SEQ ID NO: 6501 - DNA, 3071 bp, Homo sapiens
  SIMILAR (130)..(2241): 1001254mologous to Homo sapiens PK-120 precursor,accession number D38535,Smith-Waterman Score=3564.
gccccacagtgagaggaaggaaggcaacagtcgccagcagccgatgtgaagaccggactccgtgcgcccctcgccgcctctgcctggccacatcgatgttgtgtccgccgcctgctcgcccggatcacgatgaagcccccaaggcctgtccgtacctgcagcaaagttctcgtcctgctttcactgctggccatccaccagactactactgccgaaaagaatggcatcgacatctacagcctcaccgtggactccagggtctcatcccgatttgcccacacggtcgtcaccagccgagtggtcaatagggccaatactgtgcaggaggccaccttccagatggagctgcccaagaaagccttcatcaccaacttctccatgatcatcgatggcatgacctacccagggatcatcaaggagaaggctgaagcccaggcacagtacagcgcagcagtggccaagggaaagagcgctggcctcgtcaaggccaccgggagaaacatggagcagttccaggtgtcggtcagtgtggctcccaatgccaagatcacctttgagctggtctatgaggagctgctcaagcggcgtttgggggtgtacgagctgctgctgaaagtgcggccccagcagctggtcaagcacctgcagatggacattcacatcttcgagccccagggcatcagctttctggagacagagagcaccttcatgaccaaccagctggtagacgccctcaccacctggcagaataagaccaaggctcacatccggttcaagccaacactttcccagcagcaaaagtccccagagcagcaagaaacagtcctggacggcaacctcattatccgctatgatgtggaccgggccatctccgggggctccattcagatcgagaacggctactttgtacactactttgcccccgagggcctaaccacaatgcccaagaatgtggtctttgtcattgacaagagcggctccatgagtggcaggaaaatccagcagacccgggaagccctaatcaagatcctggatgacctcagccccagagaccagttcaacctcatcgtcttcagtacagaagcaactcagtggaggccatcactggtgccagcctcagccgagaacgtgaacaaggccaggagctttgctgcgggcatccaggccctgggagggaccaacatcaatgatgcaatgctgatggctgtgcagttgctggacagcagcaaccaggaggagcggctgcccgaagggagtgtctcactcatcatcctgctcaccgatggcgaccccactgtgggggagactaaccccaggagcatccagaataacgtgcgggaagctgtaagtggccggtacagcctcttctgcctgggcttcggtttcgacgtcagctatgccttcctggagaagctggcactggacaatggcggcctggcccggcgcatccatgaggactcagactctgccctgcagctccaggacttctaccaggaagtggccaacccactgctgacagcagtgaccttcgagtacccaagcaatgccgtggaggaggtcactcagaacaacttccggctcctcttcaagggctcagagatggtggtggctgggaagctccaggaccgggggcctgatgtgctcacagccacagtcagtgggaagctgcctacacagaacatcactttccaaacggagtccagtgtggcagagcaggaggcggagttccagagccccaagtatatcttccacaacttcatggagaggctctgggcatacctgactatccagcagctgctggagcaaactgtctccgcatccgatgctgatcagcaggccctccggaaccaagcgctgaatttatcacttgcctacagctttgtcacgcctctcacatctatggtagtcaccaaacccgatgaccaagagcagtctcaagttgctgagaagcccatggaaggcgaaagtagaaacaggaatgtccactcaggttccactttcttcaaatattatctccagggagcaaaaataccaaaaccagaggcttccttttctccaagaagaggatggaatagacaagctggagctgctggctcccggatgaatttcagacctggggttctcagctccaggcaacttggactcccaggacctcctgatgttcctgaccatgctgcttaccaccccttccgccgtctggccatcttgcctgcttcagcaccaccagccacctcaaatccttgatccagctgtgtctcgtgtcatgaatatgaaaatcgaagaaacaaccatgacaacccaaaccccagcccccatacaggctccctctgccatcctgccactgcctgggcaaggtgtggagcggctctgtgtggaccccagacaccgccagggccaagtgaacctgctctcagaccctgagcaaggggttgaggtgactgggcagtatgagagggagaaggctgggttctcatggatcgaagttaacttcaagaaccccctgggtatgggtttcacgcatcccctgaaacacgtggtggttgattcgggaaccgaagaaagctctgcgtacaaagtgggaagggagacgctattctcagtgatgcccggcctgaagatgaccatggacaagacgggtctcctgctgctcagtgacccagacaaagtgaccatcggcctgttgttctgggatggccgtggggaggggctccggctccttctgcgtgacactgaccgcttctccagccacgttggagggacccttggccagttttaccaggaggtgctctggggatctccagcagcatcagatgacggcagacgcacgctgagggttcagggcaatgaccactctgccaccagagagcgcaggctggattaccaggaggggcccccgggagtggagatttcctgctggtctgtggagctgtagttctgatggaaggagctgtgcccaccctgtacacttggcttccccctgcaactgcagggccgcttctggggcctggaccaccatggggaggaagagtcccactcattacaaataaagaaaggtggtgtgagcctgggaa

SEQ ID NO: 6502 - DNA, 391 bp, Homo sapiens
  SIMILAR (134)..(310): 691254mologous to Homo sapiens Human latheo protein sequence,accession number AAW53459,Smith-Waterman Score=201.
cggacgcgtgggtaagtgtcctgtgctgtaatctttcagaagccaaaagaagaataaattctttatcatataatcaatgtgaaaacatccgacgtctaccatcttttaggacgtatggaatggtgaaaattctaggtacgtggaaaagcaagcttcagaacagcaagttgagctcttgaccaatgagagatatttgatggaggaatcacaattattactacaatacctgcatgtttatcatatgaattacttcctggatttgacatgtcgtcctacgttctactgttatcttaccgaggctccaataggttaaccgatgtgcaaaggctacctgtcatgatgatactgaatcatacctgactaccactgtgctccttaatgaccaaggctt

SEQ ID NO: 6503 - DNA, 380 bp, Homo sapiens
gtgggtcctggcactggcgggtcgcaacgctgtgggcgttccaggaggtggtcgtggcgaacctggcagctgcgggcatcatggtgggaggcttgaagaggaaacactctgatttggaagaggaggaggagaggtgctatgtgtaggctagttgccgttttgactttttttgtttattgtgctatcgagtattgttctctaatttgactgtattctgtttcgcttatcgctactttaatatatatatgtccttttgctttacattctttctttacttctggtggttatttgttatgattttcttcttattatgtattctgaactcttttaattgtactagtgtgtttctttcctgttagttttgtaatgtttctgatttt

SEQ ID NO: 6504 - DNA, 389 bp, Homo sapiens
  SIMILAR (281)..(337): 781254mologous to Mus musculus putative,accession number AK014038,Smith-Waterman Score=87.
cccacgcgtccggacttcttcgcccagcagcagcacttgacccctgacaagatctaccacgtcacagtgatgccctgctatgacaaaaagctggaagcctccagacccgactttttcaaccaggagcaccagacacgggatgtggactgtgtcctcacaacaggagaagttttcaggttgctggaggaagagggcgtctccctccccgacctggaaccagcccctctggacagcctgtgcagcggtgcctatgcataggagcccaccagccatagggtgagggggctcgggaggctacctggatcacgtgtttcggcatgcctctttacagctgtttgatagcatgtcgtttaagtttcttccatacacttgcgatgataggatgtctg

SEQ ID NO: 6505 - DNA, 502 bp, Homo sapiens
tccagtgtggtggaatttgcagcgccgcacaagcgccggaccgggtaccgctgtgcccggcctggccgtggcctagttccggcagacgggactgacgaggtcaccaagctctggccgagacggcgcgggtgtcagggacttgtggaatccccctcccccagtcccgatcccgctttcctttggggtttcacctcagaggacccgacagcactcttgcagaacagccgtctgcctgtcttcctggctcgctccctgcaggaatggtctggggcaaccccagcaacacggccacctgtggccagggtgaatagggatccagttcaggcttggcttccatggcaatcaaggcccaccaggccccagcaaccttccctaccccccattcctttttgctgcccccctccacaccaggcatgttccctgccacaccattgctgtcccctcacctgggctgccctcccaactcctctctgcctctggagatgctctgccattcaagaca

SEQ ID NO: 6506 - DNA, 831 bp, Homo sapiens
  SIMILAR (1)..(420): 951254mologous to Homo sapiens putative p150,accession number U93564,Smith-Waterman Score=700.
atgggcaaggacttcatgtctaaaacaccaaaagcaatggcaacaaaagccaaaattgacaaatgggatctaattcaactaaagagcttctgcacagcaaaagaaactaccatcagagtgaacaggcagcctacagaatgggagaaaatttttgcaatctactcatctgacaaagggctaatatccagaatctacaatgaactccaacaaatttacaagaaaaaaacaaacaaccctatcaacaagtgggcgaaggatatgaacagacacttctcaaaagaagacatttatgcagccaagagacacatgaaaaaatgctcatcatcactggctatcagagaaatgcaaatcaaaaccacaatgagataccatctcacaccagttagaatggcgatcattaaaaagtcaggaaacaacagaaagaaaaagaacaatatcaaattgtatgtatgcagagttttcatcacggataactgtgaggagctaatccctgaatacctgaacttcattagagtgctggtagactcggaggatctccctctaaatatttcccataagatgttacaacaaagcaaaattttgaaagttatcaggaagaatttggtcaaaaaatgcttagaactctttactgaactggcagaagataaagagaactacaagaagttctatgagcagttctctaaaaacataaagcttggaatacatgaagactctcaaaatcagaagaagctttcagagctgttaaggtggctaacaaagagaagggaagatggagctgccatcttgaacatgattggcacaactgatggcatctatgtctgcctagcttga

SEQ ID NO: 6507 - DNA, 775 bp, Homo sapiens
  SIMILAR (673)..(774): 581254mologous to Plasmodium falciparum heat shock protein 86,accession number L34027,Smith-Waterman Score=101.
aaacatatcccgtgagatgttgcaacaaagcaaaattttgaaagttatcaggaagaatttggtcaaaaaatgcttagaactctttactgaactggcggaagataaagagaactacaagaaattctatgagcagttctctaaaaacataaaggttggtgtaaataaccattagttttccaattggcctctttagttttttttttttttttttaattcagaaagtctttgtaaagaacatactttgtttcagcttggaatacacgaagactctcaaaatcggaagaagctttcagagctgttaaggtactacacatctgcctctggtgatgagatggtttctctcaaggactactgcaccagaatgaaggagaaccagaaacatatctattatatcacatggtaagagaacactatgttacagtcatacacgtcgttcttacaaccttgtaggctctgtgggtgtgttttctactcaggtagcactgttacaactggtattgatctaggcaagataattaacatgaactaggtcattttctgtcttaggttctgcctaggtatctggctagcaagaaaagtcagagctagatgaaaccattcttaactgttaaaaggtctaaaagtaactttgtaatacctcaggtgagaccaaggaccaggtagctaactcagcctttgtgggaacgccttcggaaacatggcttagaagtgatctatatgattgagcccattgatgaggactgtgcccaacagctggaggaattttgagggaaag

SEQ ID NO: 6508 - DNA, 384 bp, Homo sapiens
aaaagactcagagaggtcaaatatacactgatggatatgttagactctgaaatcagaaggccattggtgacttgggaacagctatagtgaaaaagtgagtgaatggcaaaaacagattttccaagaagtctggttatgaagggaaggagaaagagagagagaggagtatgaggggagggaaaatgggggtggaggggtaatgaaatagaagtatgagaccatacgctatagggactctgttaaaggccgattcacgatcttctaacaccttaccaagaactgcctacatctgcgggcgatcggtcttggagctgatgactcccacttttattcctgtgcaaatgatgtcgcggactctggaaccaccttattttttgattccga

SEQ ID NO: 6509 - DNA, 2963 bp, Homo sapiens
  SIMILAR (61)..(2301): 791254mologous to Homo sapiens 90 kDa heat-shock protein (AA 1-732),accession number X15183,Smith-Waterman Score=2790.
cagttgcttcagcgtcccggtgtggctgtgccgttggtcctgtgcggtcacttagccaagatgcctgaggaaacccagacccaagaccaaccgatggaggaggaggaggttgagacgttcgcctttcaggcagaaattgcccagttgatgtcattgatcatcaatactttctactcgaacaaagagatctttctgagagagctcatttcaaattcatcagatgcattggacaaaatccggtatgaaactttgacagatcccagtaaattagactctgggaaagagctgcatattaaccttataccgaacaaacaagatcgaactctcactattgtggatactggaattggaatgaccaaggctgacttgatcaataaccttggtactatcgccaagtctgggaccaaagcgttcatggaagctttgcaggctggtgcagatatctctatgattggccagttcggtgttggtttttattctgcttatttggttgctgagaaagtaactgtgatcaccaaacataacgatgatgagcagtacgcttgggagtcctcagcagggggatcattcacagtgaggacagacacaggtgaacctatgggtcgtggaacaaaagttatcctacacctgaaagaagaccaaactgagtacttggaggaacgaagaataaaggagattgtgaagaaacattctcagtttattggatatcccattactctttttgtggagaaggaacgtgataaagaagtaagcgatgatgaggctgaagaaaaggaagacaaagaagaagaaaaagaaaaagaagagaaagagtcggaagacaaacctgaaattgaagatgttggttctgatgaggaagaagaaaagaaggatggtgacaagaagaagaagaagaagattaaggaaaagtacatcgatcaagaagagctcaacaaaacaaagcccatctggaccagaaatcccgacgatattactaatgaggagtacggagaattctataagagcttgaccaatgactgggaagatcacttggcagtgaagcatttttcagttgaaggacagttggaattcagagcccttctatttgtcccacgacgtgctccttttgatctgtttgaaaacagaaagaaaaagaacaatatcaaattgtatgtacgcagagttttcatcatggataactgtgaggagctaatccctgaatatctgaacttcattagaggggtggtagactcggaggatctccctctaaacatatcccgtgagatgttgcaacaaaagccaaaattttgaaagttatcaggaagaatttggtcaaaaaatgcttagaactctttactgaactgggcggaagatccagcgaactaccagaaatctctatgagccagttctcttaaaaaccttaaagccttggaataccacgaagactcttcaaaatcggaaagaagcttttccagagctgttaaggtacttacacatctgcctcatagtgatgagatggatactctcaaggacttactgcacccagaatgaaggagaaccagaaacatatctattatatcacaggtgagaccaagggaccaggtagcttaactcaagcctttgtggaaccgtctttcggaaacatggcttaggaagtgatctatatgattgagcccattgatgagtactgttgtccaacagctgaaggaatttgaggggaagactttagttgtcagtcaccaaagaaggcctgggaacttccagaggattgaagaagagaaaaagaagcaggaagagaaaaaaacaaagtttgagaacctctgcaaaatcatgaaagacataaaaggagaaaaaagttgaaaaggtggttgtgtcaaaccgattgggtgacatctccatggctgtatttgtcacaagcacatattggctggacagcaaacatgggagagaattcatggaaagcttcaagcccttaaggagacaacttcaacaatggggtttacatggcagccaaagaaacacctggagataaaccctgaccattccattattgagaccttaaggcaaaaggcagaggctgataagaacgacaagtctgtggaagggatcttggtcatcttgctttatgaaactgcgctcctgtcttctggcttcagtctggaagatccccagacacatgctaacaggatctacaggatgatcaaacttggtctgggtattgatgaagatgaccctactgctgatgataccagtgctgctgtaactgaagaaatgccaccccttgaaggagatgacgacacatcacgcatggaagaagtagactaatctctggctgagggatgacttacctgttcagtactctacaattcctctgataatatattttcaaggatgtttttctttatttttgttaatattaaaaagtctgtatggcatgacaactactttaaggggaagataagatttctgtctactaagtgatgctgtgataccttaggcactaaagcagagctagtaatgctttttgagtttcatgttggtttattttcacagattggggtaacgtgcactgtaagacgtatgtaacatgatgttaactttgtgtggtctaaagtgtttagctgtcaagccggatgcctaagtagaccaaatcttgttattgaagtgttctgagctgtatcttgatgtttagaaaagtattcgttacatcttgtaggatctactttttgaacttttcattccctgtagttgacaattctgcatgtactagtcctctagaaataggttaaactgaagcaacttgatggaaggatctctccacagggcttgttttccaaagaaaagtattgtttggaggagcaaagttaaaagcctacctaagcatatcgtaaagctgttcaaaaataactcagacccagtcttgtggatggaaatgtagtgctcgagtcacattctgcttaaagttgtaacaaatacagatgagt

SEQ ID NO: 6510 - DNA, 405 bp, Homo sapiens
tgggacagagtggggcaagaacacacacggccgggcacagcctcttagccagctctccatgtcagtatgagcagtaaccagggaactgggcaattggcacatcagcctatcagaattcatgggaggttatttcttaagtgaaattctaaagagttaaaggatgaatttggacagtgatggaatggatgacatcatcagtcaagaatcctcattggatatggaggggaattataaaaaggcccagaaaaatgagagagaagctatcagactgatattggcactttgaagcttctttgatgatggctcaagaatttatatcagctggagcaaagtggaaagcaaatcttttctccccattgataggggattaacttccaaattggtttgtcatcaacgtggtctccg

SEQ ID NO: 6511 - DNA, 478 bp, Homo sapiens
  SIMILAR (163)..(372): 311254mologous to Oryza sativa Similar to Arabidopsis thaliana chromosome V P1 MJJ3; MJJ3.6 (AB005237),accession number AP002521,Smith-Waterman Score=68.
tcactttgttgatgtttaataataatgtctcattattaacattgactttttgtatgtttttagagttttctttgccttgtacagaagatgtaccaacttgtggagacagttgtgacaaagtacttgaatgcggaatccatagatgttcacagcgttgtcaccgaggtcccttgtacttaggtgatttatttccatgctgtttttcaggctggcccagaatgccttcattgtgaggaagggtgctccaagtcacggccactaggttgtcttcacccatgtattttgcgatgtcaccctggagaatgtccaccttgtgttcagatgcttgggactgctgaatcagctgttcttccccaagcctgtcactgtccccagttctgtcttcagtctccaccctttctcttcactcataaagagccacagtcatcctggagcagtggctagtctgtttgcctctttcttgagccttctgcattgg

SEQ ID NO: 6512 - DNA, 322 bp, Homo sapiens
  SIMILAR (2)..(130): 1001254mologous to Homo sapiens methylmalonyl-CoA mutase,accession number M65131,Smith-Waterman Score=222.
atctggatggtcacttactgagcaggatccctacaataatattgtccgtactgcaatagaggcaatggcagcagtatttggagggactcagtctttgcacacaaattcttttgatgaagctttgggtttgtcacactgttaaaagttctctaattccattttcactccactttctcttctcataacaattctctctttcttatatttctatctttttattcattttaattttcttttatttctatctctctcttcttattcatttcttttatattttctatctcatctctatttttttatttttcttcctattcatttatct

SEQ ID NO: 6513 - DNA, 425 bp, Homo sapiens
  misc_feature (1)...(425): n = a,t,c or g
agggaactgttggctttttggcaaaattttaagctccgcccccagggtccttttttttccccttggcccggggggggaaaaaaaacgttaaagcttacccaaaactcccccaaaagggggccctcctggccctttccgaatggaaggctgccttcggggggccaattgcccccgccaaggggtgggtgcctcaaggtnnnnnnnnnntccccaaggggccccaagggtggggcccgcctttcccataaagaagccccccctgccccccccacaggattggggtgccccaagtatcaagttccccaaccccaggtttggtttttcctaggggccctttaaaccctggtaatttgggtgggacnnnnnnnnnnnnnnnnntcagttccaaggccgctcgcgatctagaactagtccggacgcgtggg

SEQ ID NO: 6514 - DNA, 313 bp, Homo sapiens
tgacatttgttctttgttgataaaactcctgaaaataactcacaaggccagtgctgcactctggcacatgtaggttgttttgagggtttgttggttggttggttggctgcttgattggttcgttctcttacatcactaccgcactcgccacctaacccaactctctccctaccctcctaactaccaccttatggacctgtctacctctctcactaccctccctctccacccatcacttccctcacccatccccctccatctccctccccccccacctcactaccccctcctctctcccatcactcccacctcc

SEQ ID NO: 6515 - DNA, 378 bp, Homo sapiens
  SIMILAR (108)..(272): 831254mologous to Homo sapiens Rho-associated, coiled-coil containing protein kinase p160ROCK,accession number U43195,Smith- Waterman Score=283.
  misc_feature (1)...(378): n = a,t,c or g
aaatgaaggtgaatgtagaaaagatgtagagatggaaccagtacttcaagctgaaaaaactaatttccaaaatcacaaaggccatgagtttattcctacactctgcgcactttcctgccaattgtgatgcctgtgccaaacctctctggcatgttattaagccaccccctgccctagagtgtcgaagatgccatgtcaagtgccacagagatcacttagattatacagatgacttaattttcccatgtaatataagatacgatgtatcatctactcttagatatagctgactcttacatttctcggatgagataactatcatatagtactcctattatattctcctactacctacaccgtatacttataggatactcn

SEQ ID NO: 6516 - DNA, 369 bp, Homo sapiens
  SIMILAR (1)..(171): 701254mologous to Homo sapiens p167,accession number U58046,Smith-Waterman Score=181.
gagcacacaagggcagaagatcatatgctagaagagcgcgaagagagatagcgcgccgaacgagcacaacgcgaggaatagctaccagagtatcaggagcggatgaagacattataagaagcggataggaatatacgcccaagggagttggaaattgaagaacgagaacggctgtacagaggaagagagaatacttggcgatagctccctttctagaaaggactctcgctggggagatagagattcagaaggcgcctggagaacaggacctgaagcacattctgagtggacaataggctcgccacagatggagtggagaccttgagaatggctatatgacgacaggtcttatactggagattaaatacg

SEQ ID NO: 6517 - DNA, 512 bp, Homo sapiens
  SIMILAR (401)..(48): 661254mologous to Homo sapiens laminin receptor homolog,accession number S35960,Smith-Waterman Score=353.
cctggggctttccaaaggcacctcgcatgcctgtttggagcctgtcagccccagcacaggacaacatcttgttgaatgcggatgacgtggaagggttgaagccgcacccggatatggaagccatctttgccacaactttttaccatgtacttattggcaaaaattcgggcagcctccagggcttcagaggacagctgcttcatattcatctgacaccatgttgggcacaaaagcggaaactcatccaacttttgccttttttccggcccaaggtccaaaatgcgaatcttggcaatcaagggacacctcggcaagaagcgagactttgggtacggcttgttcttacaataccggtaacaactgggcgggggcggcggcccatggcgacaccgaggatcttcagtggctgcaacgaaaaagagagagtcggaacggaagacgagaacagacctaaaaggtgtgagaaccagcaacggcaccgcaagagacgacaactgcgcttactcaccaca

SEQ ID NO: 6518 - DNA, 709 bp, Homo sapiens
  SIMILAR (209)..(3): 701254mologous to Homo sapiens unnamed protein product,accession number AK027197,Smith-Waterman Score=214.
cccggactgtccttcacgtccgacaacgcacgcggcacgtcgcccggaaataagacagagaacgcacacaaaggccccaagagcgtatcgagcgccccgaaaatgcggtgaagcttgcaggacacaggccagaagatacgagggaacccgttcgcttccacaccgacacgggaacgaaggaacagacagtaatatttgcagactaaaaaatagccgggaggtgtaaaacatagggtcagttcccaagacagaggccgccgcacgggggaggctccaccccacaattgttttcagcggccataggcacttctttccccgcccgtttcccagcagtgaaagtacacggattcaagacttcaccaacggggcggggcggcggccattgggcgaacaccaggatctttcagttggcttgcaacgaaaaagagagagtcggaacggaagacgagaacagacctaaaaggtgtgagaaccagcaacggcaccgcaagagacgacaactgcgcttactcaccacaccgaagggaaagaggcgctcctccgcctgcgcatggcttatataggcggtctgtctgcgcgcgtaagaaccatatagtcctgtcgaagacgggtggacgctctgtcagacgtcatgaccatagacgcagccgctcttggcgcttgcgcccgggcgtatcccatcacatgcgcagatcacagaggtgaccgg

SEQ ID NO: 6519 - DNA, 364 bp, Homo sapiens
  SIMILAR (80)..(358): 721254mologous to Homo sapiens alpha-tubulin,accession number X01703,Smith-Waterman Score=343.
cgactcttaacttgccggggactgtaaccggaacccggtgtctgctcctgtcgccttctgctcctaatccctacccactattcgtgagtgcatctacatccacgttgtccacgctggcgaccatattggcaatgcctgctgggagctctactgcctgtaacacgggatccaccccgatggccacatgccacgtgacctgaccatcgggggcggagaggactccttcaacaccttcttcaccgagacgggcgctagcgagcccgtgccccgggctgcgtttgctgacttggaacccacagtcatcgatgaagttggtactgtgacctatggccagtatcttcagctttgacagcttatcaagtga

SEQ ID NO: 6520 - DNA, 357 bp, Homo sapiens
  SIMILAR (270)..(338): 651254mologous to Peromyscus leucopus reverse transcriptase,accession number U70932,Smith-Waterman Score=80.
  misc_feature (1)...(357): n = a,t,c or g
accctttttaaatcaaataacccaatccggtaaagtttcggggataaaaaacccctggcctttttaaaaatggcctgggggaaaaaaaccccaaaaaggcattttcttttttttagggtccnnnnnnnnnnccnnnnnnnnnnnnccctaggaatagatttaaccaagaaagtgaaaaagctctccaagaaaaactacaaaacattgatgaaaaaaattgaagatgacagcaactaaaaagacaactcatgcttatgaattagaagaccatattacccaaagcaatatacagattcaatacaatctctgtcaatatacccatgaggtttttaccggacgcgtgggcggacgcgtggg

SEQ ID NO: 6521 - DNA, 759 bp, Homo sapiens
  SIMILAR (30)..(386): 881254mologous to Homo sapiens RAB39,accession number AF322067,Smith-Waterman Score=537.
agaggagctcaagccatcatcattgtcttcacctgaatgatgtggcatctctggaacatccaagcaagtggttggccgatgccctgaaggagaatgaccttcccagtgtgcttctcttccttacccgtgctcagtatgcgctgatggagaaagacgccctccaggtggcccaggagatgaaggctgagtactgggcagtctcatctctcactggtgagaatgtccgagaattcttcttccgtgtggcagcactgacctttgaggccaatgtgctggctgagctggagaaatcgggggctcgacgcattggggatgttgtccgcatcaacagtgatgacagcaacctctacctaactgccagcaagaagaagcccacatgttgcccatgagggctgaggagactgttcagagactgcccagccctagggcactgtgccaccctcattcctccagagcttgacccctggacatttgcactgactttatccagaccaaagagctgcctcttggtggcagtattcccacagaggggtagctgggatcatgctagtcacttcctgcccccaggcaccgtgccaaagactggatgccccctactcctcaggggactgtccagggcgcccagtggtagtgagggagagtgtctctgttcttttgctcagcctgctgggccctttgtgtttgaggatgcttaatgattccagcctctcactgtgccttatgcattaaaatttctttgttacgagcaaaaaaaaaaaa

SEQ ID NO: 6522 - DNA, 147 bp, Homo sapiens
tatgcgctgatggagaaagacgccctccaggtggcccaggagatgaaggctgagtactgggcagtctcatctctcactggcatcaacagtgatgacagcaacctctacctaactgccagcaagaagaagcccacatgttgcccatga

SEQ ID NO: 6523 - DNA, 809 bp, Homo sapiens
  SIMILAR (246)..(512): 771254mologous to Bos taurus GTP-binding protein rah,accession number AF058807,Smith-Waterman Score=331.
ggaattcgggctgtttctgccactcttccagccatcatcattgtcttcaacctgaatgatgtggtatctctggaacataccaagtaagtgagcatcctgcaatataatgggaggctccgggaagagagggttcagaacagaggggtggtcaggaagaagaagaatgcatgtaggaccagagagggggtaattgggcctatgaatgtcagtgggaggggccctgcagactcactcatcccttactttccacctcccatggcaggcagtggctggccgatgccctgaaggagaatgacccttccagtgtgcttctcttccttgtaggttccaagaaggatctgagtgtgagtgtgccagtggggggacttcccagcttggtgagggaatgcccccctctgactctggccttccctcagacccctgctcagtatgcgctgatggagaaagacgccctccaggtggcccaggagatgaaggctgagtactgggcagtctcatctctcactggtgagttggaggctttagggctctgctgtgacactcttgcctggctctcctctcactgctacacctccagctgtgccctgtgtccccagacccagcactgcccctgagcacctatctgctctctgtgtcaggtgagaatgtccgagaattcttcttccgtgtggcagcactgacctttgaggccaatgtgctggctgagctggagaaatcgggggctcgacgcattggggatgttgtccgcatcaacagtgatgacagcaacctctacctaactgccagcaagaagaagcccacatgttgcc

SEQ ID NO: 6524 - DNA, 920 bp, Homo sapiens
  SIMILAR (255)..(521): 461254mologous to Bos taurus GTP-binding protein rah,accession number AF058807,Smith-Waterman Score=161.
  misc_feature (1)...(920): n = a,t,c or g
atggaacgatttgaggtgctgggcattcccttcagtttgcagctttgggataccgctgggcaggagaggttcaaatgcattgcatcaacctactatagaggagctcaagccatcatcattgtcttcaacctgaatgatgtggcatctctggaacataccaagcagggggtggccgaatgccttaaagaagaataaccctccagggtggttctttttcctgttaggtttcaaaaaggatttgagtacccctgctcaagtatgcgctgatggagaaagacgccttcccaggtgggcccaggagattaaaggctgagtactgggcagtctcatctctcactggtgagaatgtccgagaattcttcttcccgtgtggcagcactgaccttttgaggccaatgtgctggctgagctggagaaaatcggggggctcgacgtcattgggatgtttgtccgcatcaaccagtgatgacagcaaacctctacctaactgccagcaaagaagaagccccacatgtttgcccatgagggctggagggagactgtttcagagactgccccagcccttagggaacttgtggccacccttcatttccttccagagcttgaacccctgggacattttgcactggactttnattccagaccaaagagctggcctcttgggtgggcagttatttcccacagaggggttagctggggatcatgttagtcacttccttgcccccaaggcacccgtgccaaagacttgatgccccctaatttcttagggggactgttccaggggcgccccagtggtagtgagggagagtgtctctgttcttttgctcagcctgctgggccctttgtgtttgaggatgcttaatgattccagcctctcactgtgccttatgcattaccatttctttgttacgaaaaaaaaa

SEQ ID NO: 6525 - DNA, 405 bp, Homo sapiens
ttttttttttttttgcccgaaatgacaagtaccgtttattgtcgttacacaaatgaacccagcctctggttgggcaccgtccacggaccagcagatgagcatggtcagccgacccctttccccacccccgagtcatgtgcagtcatacactccaggcagaaagtcgcagtatcgaataccggacacaggttcccttggcttggtggtgcatctctgatccacagactggcccacctctcggagtggccaacgagtcgctgaaacgttgtcaaataagcaagtaagtgctacaggtgtgtgagccttataaaaccttggctgaacctaccgacctccaggagaatttcagccaaaacaaaaaagcaaatacacagagggaccctggaaccagaatccctccccatg

SEQ ID NO: 6526 - DNA, 562 bp, Homo sapiens
  SIMILAR (139)..(390): 911254mologous to Homo sapiens syndecan,accession number J05392,Smith-Waterman Score=396.
caggtgctttgcaagatatcgccctgtccatgcagaccccctctactgtcaaggacacgcagctcctgtcggctattccacagtctctagaactcacgcgcctggaggctacagctgcctccacctccaccatacacggctgtagaggggcccaagtagggagaggctgtagtcctgccagaagtggagcctggcctcaccgctcgggagcagtagaccaccccctgacgcagggagaccacacagctcccgaccactcatcaggcctcaacgaccacagccaccacggcgcaggagcccgccacctcccacccccacagggacatgcagcctggccaccataagacctcaacccctgcaggacccagccaagctgaccttcacactccccaaggccaggttctccgttagctcctgtggccccaccctgggccctgggctggaatcaggaatattttccaaagagtgatagtcttttgcttttggcaaaactatacttaatccaatgggtttttccctgtacagtagattttccaaatgtaataaactttaatataaagta

SEQ ID NO: 6527 - DNA, 331 bp, Homo sapiens
  SIMILAR (3)..(194): 761254mologous to Homo sapiens syndecan,accession number J05392,Smith-Waterman Score=250.
  misc_feature (1)...(331): n = a,t,c or g
tattacccagtttaccagaacccnccggcatgaggttacagttgccttccacttcccacctgccggtgaagaggggcnccaaggagggagaggctgtagtcctgccagaagtggagcctggcctcaccgcccgggagcaggaggccaccccccgacccagggagaccacacagctcccgaccactcatcaggccctgggctggaatcaggaatattttccaaagagtgatagtcttttgcttttggcaaaactctacttaatccaatgggtttttccctgtacagtagattttccaaatgtaataaactttaatataaagtaaaaaaaaaa

SEQ ID NO: 6528 - DNA, 496 bp, Homo sapiens
ttttttctaaactaggagacccaaatctggaagccaaaatgtaggcttagtttgtgtgttgtctcttgagtttgtcgctcatgtgtgcaacagggtatggactatctgtctggtggccccgtttctggtggtctgttggcaggctggccagtccaggctgccgtggggccgccgcctctttcaagcagaggccagaggcccccagcccagggctcctgcacttacttgcttatttgacaacgtttcagcgactccgttggccactccgagaggtgggccagtctgtggatcagagatgcaccaccaagccaagggaacctgtgtccggtattcgatactgcgactttctgcctggagtgtatgactgcacatgactcgggggtggggaaaggggtcggctgaccatgctcatctgactggtccgtgggacggtgcccaagccagaggctgggttcatttgtgtaacgacaataaacggtacttgtcatttcgggca

SEQ ID NO: 6529 - DNA, 2939 bp, Homo sapiens
  SIMILAR (1)..(864): 1001254mologous to Homo sapiens syndecan,accession number J05392,Smith-Waterman Score=1494.
caaattgtggctactaatttgccccctgaagatcaagatggctctggggatgactctgacaacttctccggctcaggtgcaggtgctttgcaagatatcaccttgtcacagcagaccccctccacttggaaggacacgcagctcctgacggctattcccacgtctccagaacccaccggcctggaggctacagctgcctccacctccaccctgccggctggagaggggcccaaggagggagaggctgtagtcctgccagaagtggagcctggcctcaccgcccgggagcaggaggccaccccccgacccagggagaccacacagctcccgaccactcatcaggcctcaacgaccacagccaccacggcccaggagcccgccacctcccacccccacagggacatgcagcctggccaccatgagacctcaacccctgcaggacccagccaagctgaccttcacactccccacacagaggatggaggtccttctgccaccgagagggctgctgaggatggagcctccagtcagctcccagcagcagagggctctggggagcaggacttcacctttgaaacctcgggggagaatacggctgtagtggccgtggagcctgaccgccggaaccagtccccagtggatcagggggccacgggggcctcacagggcctcctggacaggaaagaggtgctgggaggggtcattgccggaggcctcgtggggctcatctttgctgtgtgcctggtgggtttcatgctgtaccgcatgaagaagaaggacgaaggcagctactccttggaggagccgaaacaagccaacggcggggcctaccagaagcccaccaaacaggaggaattctatgcctgacgcgggagccatgcgccccctccgccctgccactcactaggcccccacttgcctcttccttgaagaactgcaggccctggcctcccctgccaccaggccacctccccagcattccagcccctctggtcgctcctgcccacggagtcgtgggtgtgctgggagctccactctgcttctctgacttctgcctggagacttagggcaccaggggtttctcgcataggacctttccaccacagccagcacctggcatcgcaccattctgactcggtttctccaaactgaagcagcctctccccaggtccagctctggaggggagggggatccgactgctttggacctaaatggcctcatgtggctggaagatcctgcgggtggggcttggggctcacacacctgtagcacttactggtaggaccaagcatcttgggggggtggccgcttagtggcaagggacagagtcccaatttgttttcgtggggaggtctaatctagatatcgacttgtttttgcacatgtttcctctagtttctttgttcatagcccagtagaccttgttacttctgaggtaagttaagtaagtgattcgggtatcccccaatcttgctttcctattctatggtcgggagcaagcatcagggttaagaagactttttttttttttttttaaactagaaggaaccaaatcctggaagccaaaatgtaggcttagtttggtgtgtgttctcttgagtttgtcgctccatgtgtgcaacagggtatggactatctgtctggtggccccgtttcttggtggtcttttgccaggctggccaggtcagggctcccgtgggggccgcccgcctctttcaaagcaagtcgtgccctgtgtcccatgcggttagggccattgctgaaggcctgggcccgctgcccacgtttggagaagcccgtgtgagaagtgaaatgctgggactcaaagccttcagacaagagaggacttgtaggggagggcggcagggggcctggagatccctttctgcagccacccgcccgtccttgcctgtggggcccgtctccagggggctgcttcctcctaggaaattgactgaaggggtgtcttggggcatagctggctctgatcgcctccatccaaggcccaggttctccgttaagctccctggtggccccaccctggggccctgggctggaaatcaggaaatattttcccaaagagtgaatagtccttttgcttttggcaaaactctactttaatccaatgggtttttccctgtacagtagattttccaaatgtaataaactttagtataaagtagtcctgtgaatgccactgccttcgcttcttgcctctgtgctgtgtgtgacgtgaccggactttttctgcaaacaccaacatgttgggaaacttggctcgaatctctgtgccttcgtctttcccatggggaggggattctggttccaggggtccctctgtgtatttgcttttttgttttggctgaaattctcctgggaggtcggtagggttcagccaaggttttataaagggcttgatgtcaattttctgtgtttgccaagcttccaagccccatctttctaaaatggcaaaaaggaaaggttggaatggcccccaagaacagcttgaccctgaaggctgtggtcaacagcgggaggtgtgggagccgaggccttaccccgtcagacaccttgggacatcctcctccccacccggctggcagaggccagaggccccccagcccagggcttcctgcacttacctggttaatttgacaacgttttcagcgactcccgttgggccactccgagagtggggccagtctgtgggatcagagattgcaccaccaagccaagggaacctgtgtccggtattcgatactgcgacttttctgcctggaagtgtatgactgcacatgactcgggggtggggaaaggggtcggctgaccatgctcatctgcttggtccgtgggacggttgcccaagccagaggctgggttcatttgtgtaacgacaataaacggtacttgtcatttcggaaaaaaaaaaaaaaaaaaa

SEQ ID NO: 6530 - DNA, 1257 bp, Homo sapiens; identical to SEQ ID NO: 303
  SIMILAR (430)..(1254): 991254mologous to Oryctolagus cuniculus elongation factor 1 alpha,accession number U09823,Smith-Waterman Score=1427.

SEQ ID NO: 6531 - DNA, 1049 bp, Homo sapiens
tttttttttttgaaacaggtcactttaccctccttaggacccattttgggggggaaaaaccaacacattccagagctttccaagtcctttgaacttcaggttcacattcagggatcacacagttcctgccctgtttctcaggggcacagccaactggccaatccccgctgaaaaaggccctcccctgggccacagcacagggctgcacggtgcacgcatttccctgaaggcagccccttcttcggaagcagctgttccaggcctcggaacagggcctgggtatccgcgtggtgggctggcagctgacggcctgctcagtggagccaggagctaactcagaccccaaagcaagcagggggccagtggcggggcccagcgcccagcaggacacccatgccaagaaggcttgagcccccccaacatcccaaggaacaggagagacatggagtggcgctggaacagtcacgacaaggactttgcctccagcactgggacacacctgtgtttaagaccagccctctgctttcccagtcccggcccagccttggggcaatccttccatgggctcagcactgagaggtcttgggtctgccacgttctatagctctccagtcacccactcatccagggtaggaggggttctccctgccccccccccgtgggccttgggatctcaccctctccatgtcctgggggacagcctcgccctcagccggactgcatccctcctgggggcctgagcttcgggattcagtgggacaccaaagttcaaaggaccaggcacccaccacgggccctgccagcctctgccttccccagctggcctgggttctggcctgggtgaggatctggaagctgttggcaggactcaaccaagcaatgctctctagctccagggcagtaagccacaggaggcagcgccctgcagcctcccgtccacactgccagcaatgcccctggcccagtgagcccagacgctcctccaccccttccagaccaagctcaacgcctccaagaccagcaggccaaggccaagccctgccccagat

SEQ ID NO: 6532 - DNA, 665 bp, Homo sapiens
  SIMILAR (14)..(130): 481254mologous to Homo sapiens DOCK180 protein,accession number D50857,Smith-Waterman Score=88.
cccacgcgtccgcctgaacggtatcgtagaccgatgagtcttgggatgcttaccatgctacgatttggggatctttactgaccgggacttgggcgttcatgctgacgcccatgacttggtcgagaacctgataggacctgattgcttgatagattccttttctggccgaagggatcagaatccatggagacaaagtcacggtggcactgaggccgttccacgagaggatggaggcctgtttcaaacagctgaaggaaatggtggagaatgagtacggcgtccgaatcatgccctcaagtctggatgattgaagaggcatccgcccccggtccatggtgcgggccttcacgatgccttcctcatcccgccctctgtctgtggcctctgtctcttccctctcatcggacagcaccccttccagaccaggctccgacgggtttgccctggagcctctcctgccaaagaaaatgctctccaggtcccatgacaagctgtacaaggatgacctggacacggacaagaaggactatatgacgtataactggacctgcagacagtttcagatctctcgtgataaaatgaaacgcaccgacgtttccctgtacattatgctcgtctcacctaatcccaatctatcttactgattcagccatataccaaatacc

SEQ ID NO: 6533 - DNA, 339 bp, Homo sapiens; identical to SEQ ID NO: 2943

SEQ ID NO: 6534 - DNA, 519 bp, Homo sapiens
  SIMILAR (192)..(314): 921254mologous to Homo sapiens Human myelin oligodendrocyte glycoprotein gene,accession number AAZ29204,Smith-Waterman Score= 231.
tattttatttttatttttattttattttatttcatttttgagatggagtttcacttttgttgcccaggctggagtgcaatggtgagatctcgactcactgcaatctccacctcccagattcaaatgactcgcctgcctcagcctcctcagtagctgggattacaggcacatgccaccacgcccggctaattttttgtatttttagtagagatggggttttaccatgttggccaggctggtcttggactcctgacctcaggtgatccacctgcctcggcctcccaaagtgttgggattacaggcatgagccaccatgccgggccaaccatgaagctcttaaatccacagtcagaggtaatcttttcacctcggaattcccacagcactctccttacaccactttcaagacatttaccacatcctatctcaatttctacttggtgtatacattatgctccattgcatactgtgagcatctccgcagaagaagccccatggctctttgcatgtccccagagt

SEQ ID NO: 6535 - DNA, 317 bp, Homo sapiens
  SIMILAR (217)..(315): 541254mologous to Homo sapiens PR-domain containing protein 17,accession number AF346626,Smith-Waterman Score=89.
cagaggagagcttcacagcccatatgctgcgccaccgtggggtgcaacccttcccctgtgggcaatgcgacaaggcctatggcacccagcgagacctcaaagagcaccaggtggtacattcaggtgcccggccctttgcttgtgaccagtgtggcaaggcctttgcccgccggccctccctgcggctgcatcgcatgacccaccaggagccagctgcctatgccccttgcccatgctctgtgtggtgcggcccctggcagccagggcttcctgtggaaccatatgaggcttcatacatgaaaaaagcctttcttgcg

SEQ ID NO: 6536 - DNA, 672 bp, Homo sapiens
  SIMILAR (562)..(639): 571254mologous to Homo sapiens neuronal thread protein AD7c- NTP,accession number AF010144,Smith-Waterman Score=63.
agcaaagaatgatataaagaaagagaaaaacaatataaaggacacaagggaggcacacagacaatcggagagagagcagtcgtctggactcacagagtatagagaatagtcccgtagtctcatgagcagaagtcacaggcaccaagctatcatgagtcacactgggttaggcttacctagaggaagcagctccaatatccctggagaaccaaagcccagttgttaaataacaaacaggccaaagaaactattcttatatttatgttgaagctcatgagtggtagcctctctgtacaagagagaagagtgaatacatgtgcacatcgtatagtcttgcacgttctagagtagggcaaactttgtgtaaaggagtgcagtggcgccatctcagctcactgtaacctccgcctcccgggttcaagcaattctctgcctcagcctcccaagcagatgggattacagatgcccaccaccacacctggctaattttttctatttttagcagagacagggtttcaccatcttggccaggctggccttgaactcctgacctcgtgacccacctgcctcggcctcccaaattgctgggattacaggcgtgagccaccgcgaccggctaataataaattttttagattttgaaggctacacatagtctgctacagattcttt

SEQ ID NO: 6537 - DNA, 461 bp, Homo sapiens
  SIMILAR (3)..(29): 1001254mologous to Homo sapiens Human calcineurin B-like protein,accession number AAY31625,Smith-Waterman Score=47.
atcagatcgagcagctccatcggagattttaagcagcatgagtggagatcagcctaccattcgcaaggagaacttcaacaatgtcccggacctggagctcaaccccatccgatccaaaattgttcgtgccttcttcgacaacaggaacctgcgcaagggacccagaggcctggctgatgagatcaattacgaggactttctgaccatcatgttctactttctgtccatctaaaccatcatgtatgaggtcctacttttgctgtaaatttatctagtagtcttaattatcattgacctttttatataattattattttattgatagaatcacaatatctgtttctatttaccttatatactatattatttgatgagtaatacactctattgaattgactttaaatatcttgatcagagtacttcactatagtatttatatattcaatctttcttaagaatcg

SEQ ID NO: 6538 - DNA, 360 bp, Homo sapiens
  misc_feature (1)...(360): n = a,t,c or g
nnnnnnnnnnnnnnnnnnnnnnnnnnnnnnnnnnnnnnnnnnnnnnnnnnnnnnnnnnnnnnnnnnnnnnnnnnnnnnnnnnnnnntaaaattaatatgggaatacttctcaaactggtgtacagattcagcatacaccctgtaaaaaccccagctggactgtttaaaaaaacgaacaatgataaacagagtttgacaagcggatcctaaaatccatatggaaatgcaaggaacatatagtacccgaacaatgtttaaaaagaccgaagctaaaggacttccttctcaatttcaaaacttactatgaagccacagaatttaagacatcgtaggaccagcaaaaggatcgatacaaagaac

SEQ ID NO: 6539 - DNA, 436 bp, Homo sapiens
  SIMILAR (13)..(351): 471254mologous to Homo sapiens Human myelin oligodendrocyte glycoprotein gene,accession number AAZ29204,Smith-Waterman Score= 219.
gcgtcgacttttttttttttttttttttttgagacggagtctcgctctgtcgcccaggtgggagtgcagtggcacaatattggctcactgcaagctccacctcccgggttcacaccattctcttgcctcagcctcccaagcagctaagaccacaggcgcccgccaccatgcccagccaattttttgtatttttagtagagacagggcctcaccatgttggccaagctggtctcgacctcctgaccttgtgatctgcccgccccggcccaccaaagtgctgggattacagacatgagccaccgcgcccggctgatagtttcactctttaaaaggcaaaaaacatatggtaacaactagggactgtttaaaattgccttgtcccaaaaaaattaaccaaaatctaccagcattattacaaacacgaaagagaattaaa

SEQ ID NO: 6540 - DNA, 1618 bp, Homo sapiens
  SIMILAR (87)..(539): 441254mologous to Rattus norvegicus elongation factor-1 alpha,accession number L10339,Smith-Waterman Score=217.
  misc_feature (1)...(1618): n = a,t,c or g
ccgcctgcaggaattcggcacgaggggtttgccgccagaacacacggtgtctgtgaaaaactaacccctaaaagccaaaatgggaaaggaaaagactcatattcaacattgtcgtcattggacacgtagataacgggcaagtatcaccactacttggccatctgatctataaatgccggtggcatcagacaaaagaaccattgaaaaatttgagaaaggaggctgctgagatgggaaagggctccttcaagtatgcctgagtcttggataaactgaaaagctgagcgttgaacgtggtatcaccattggatatctccttgtgggaaatttgagaccaagcaagtactatgtgacttatccatttgatgcccccaggacaccagagacttttatccaaaaacatgatttacaggggacatctcaaggcttgacntggtttggggggccccctttttgggggggttntcccctgattgtttgctgctggtgtttggtggaatttgaaagctggtatctccaagaatggggcagaacccgagagcatgcccttctgggcttacacacctgggtgtggaaacaaactaaattgttcggtgttaacaaaaattggatttccacttgaggccaccctacagcccagaagaagatattgaaggaaattgttaagggaaagtcagcacttacattaaggaaaattggctacaaccccgacacaagtagcattttgtgcccaatttctggttgggaatggtgacaacaatgcctggagcccaaatgcctaacatgccttggtttcaaggggatggaaaagtcacccgtaaggatggcaatgccagtggaaccacgctgcttgaggctctggactgcatcctaccaccaactcgtccaactgacaagcccttgggcctgcctctccaggatgtctacaaaattggtggtattggtactgttcctgttggccgagtggagactggtgttctcaaacccggtatggtggtcacctttggtccagtcaacgttacaacggaagtaaaatctgtcgaaatgcaccatgaagctttgggtgaagctcttcctggggacaatgtgggcttcaatgtcaagaatgtgtctgtcaaggatgttcgtcgtggcaacgttgctggtgacagcaaaaatgacccaccaatggaagcagctggcttccctgctcaggtgattatcctgaaccatccaggccaaataagcgccggctatgcccctgtattggattgccacacggctcacattgcatgcaagtttgctgagctgaaggaaaagattgatcgccgttctggtaaaaagctggaagatggccctaaattcttgaagtctggtgatgctgccattgttgatatggttcctggcaagcccatgtgtgttgagagcttctcagactatccacctttgggctgctttgctgttcgtgatatgagacagacagttgcggtgggtgtcatcaaagcagtggacaagaaggctgctggagctggcaaggtcaccaagtctgcccagaaagctcagaaggctaaatgaatattatccctaatacctgccacccaactcttaatcagtggtggaagaacggtctcagaactgt

SEQ ID NO: 6541 - DNA, 336 bp, Homo sapiens
  SIMILAR (62)..(334): 701254mologous to Homo sapiens transcriptional activator SRCAP,accession number AF143946,Smith-Waterman Score=292.
  misc_feature (1)...(336): n = a,t,c or g
cggggtgatacgggtcggacgttggcacagcgaggggccaggagctctgggttccaactgtgtgaatccgggccgccagttaaccagtgccgggtaaccgcactaatatgggaaagctcgagccgccatgcccacgccctctctggtgaggcctgttctcaaagtgggccacagtccgtcacctgaagtcagtggttcagccgcggaaattgccccctggaccatctcttctcctctccanganccatcctcactccctgggccagcctcttctccaatgccaattcccaactcctctccccttgctagtcctgtgtcctatacagtcctcgtgcc

SEQ ID NO: 6542 - DNA, 371 bp, Homo sapiens
  misc_feature (1)...(371): n = a,t,c or g
cgatcgaggccagaactaaatgattataaagataagaaagcagctactaagaatgtgcaaaagaaatgaatgcagagacaaaaaggaacattgcgattgatgccacagaaacacaaagaatcattagagactgttatgaacactataacaaaatgnnnnnnnnnnnnnnnnnnnnnnnnnnnnnnnnnnnnnnnnnnnnnnnnnnnnnnnnnnnnnnnnnnnnnnnnnnnnnnnnnnnnnnnnnnnnnnnnnnnnnnnnnnnnnnnnnnnnaaagtctcccatcaaagaaaaactcaggatctgagggcttcactgctgaattctaccaaagatataaaacaccacttatactcaaactattcaaaaaaat

SEQ ID NO: 6543 - DNA, 406 bp, Homo sapiens
  SIMILAR (32)..(307): 841254mologous to Homo sapiens NIK,accession number AB013385,Smith-Waterman Score=382.
ggcacgagcggcacgagtttttctccataggacatctcttaatttgagcaatggaggaacacaatgttagaaaaccatggttgtccatgatgatgaatatagtgaaccctgcatgaccccatccaaggagggcactctaatcgtacgccagactcagtccgctagtagcacactccagaaacacaaatcttcctcctcctttacaccttttatagaccccagattactacagatttctccatctagcggaacaacagtgacatctgtggtgggaatttcctgtaattggatgagaccataatccattaatgcattatcctactcagaaaggttcattgtctttctgaatttctactcatcacttatcctcaaagtgcattctgtgtaattttcttacactactgcg

SEQ ID NO: 6544 - DNA, 367 bp, Homo sapiens
  SIMILAR (308)..(364): 361254mologous to Homo sapiens Human secreted protein encoded by gene 3 clone HNHCT15,accession number AAB38012,Smith-Waterman Score=39.
ggctcacttttgccacttctgttcaacataatattggaagttttagctaaagcaatcaggcaagaaaaaagcatccaaaatgaaaaggaaaaagtataattatctctgctgacagatcacatgatctcatgtaaaaccctacagttaaaaagttaactacctgaaagctataaaatgttgctgaaaggaaattttaaaagacataaagacatcctgtattcatggataggaagactcactattgatgtcagttttattgtatattgatgtcagttttatctatagccctcagtgcactctcaaagcagtcaattattttgtggatggtgacaaaattactctaaagtttattatggaatctcgggcc

SEQ ID NO: 6545 - DNA, 501 bp, Homo sapiens
  SIMILAR (119)..(406): 1001254mologous to Homo sapiens uroporphyrinogen decarboxylase (EC 4.1.1.37),accession number M14016,Smith-Waterman Score=515.
gaggcctgctgtgaactgactctgcagccactgcgtcgcttccctttggatgctgccatcattttctccgacatccttgttgtaccccaggcactgggcatggaggtgaccatggtacctggcccaagctggctatgaggtggttgggcttgactggacagtggccccaaagaaagcccgggagtgtgtggggaagacggtgacattgcagggcaacctggacccctgtgccttgtatgcatctgaggaggagatcgggcagttggtgaagcagatgctggatgactttggaccacatcgctacattgccaacctgggccatgggctttatcctgacatggacccagaacatgtgggcgcctttgtggatgctgtgcataaacactcacgtctgcttcgacagaactgagtgtatacctttaccctcaagtaccactaacacagatgattgatcgtttccaggacaataaaagtttcggagttgaaaaaaaaaaaaaaaaa

SEQ ID NO: 6546 - DNA, 930 bp, Homo sapiens
  SIMILAR (675)..(899): 981254mologous to Homo sapiens uroporphyrinogen decarboxylase (EC 4.1.1.37),accession number M14016,Smith-Waterman Score=377.
cccacgcgtccgcccacgcgtccgctcagattcaggttaaattgtggattgagctcgcagttacagacagctgaccatggaagcgaatgggttgggcctccagcgtatacatactgacacctacccccacccccacctgatcgccagacctcagggttttccggagctgaagaatgacacattcctgcgagcagcctggggagaggaaacagactacactcccgtttggtgcatgcgccaggcaggccgttacttaccagaggttagggaaacccgctctgcccaggactttttcagcacgtgtcgctctcctgaggcctgctgtgaactgactctgcaggcactgcgtcgcttccctctggatgctgccatcattttctccgacatccttgttgtaccccagatgttttctccccctccaggcactgggcatgggaggtgaccatggtacctggcaaaggacccagctttccagagccattaagagaagagcaggacctagaacgcctacggggatccagaagttggtagcctctgagctaggcttatgtgttccaagccatcacccttacccgacaacgacgtggctggacgtgtgccgcctgattggcctttgctggtgccccatgggaccctgatgacatacatggttgagggtggtggctcaagcaccaatggctcaggccaagcgctggctctatcagagacctcaggctagtcaccagctgcttcgcatcctcactgatgctctggtcccatatctggtaggacaagtggtggctggtgcccaggcattgcagctgtttgagtcccatgcagggcatcttgggccacagtttttcaacaagtttgcactgccttacatccgtgatgtggccaagcaagtgaaggccaggttgccgggaggcaggcctggcaccagtgcccatg

SEQ ID NO: 6547 - DNA, 611 bp, Homo sapiens
  SIMILAR (611)..(426): 931254mologous to Mus musculus putative,accession number AK002836,Smith-Waterman Score=350.
tttcagactaaattttattaaatatggtgtcatttggctacaatcggtttgtctttataaaactaagtaacttattttgtagtaaaaacaaccccaacccactgcccctctttggcagcccttgaaactcagttcaaagctaggcctggctcccggccatggcccctgctgccttcacctgctgagcgctctaggaagcctcccaggacttgtaccctggctgccaagcagggtggggtgttttcatgaggattgcttttaaccaaaagtcctcagccttctgcagacccagggcagaggcgagttgctctacatcatgtgctttaagtagagccctttgccagccaggaggcccagccacccccttccctgccctgtggctttgcggggagacacagagtcacctcaaggccccagcccactcagcgcacggtgcacacatccaggatgcagaagcgtgcgcggcaggtggggcagggcacgcggctggccagccaggtgtcagggcgcagggggtcctggcggctggcgaaccacttgcccatgcaggtgaggcaccacatggggcggcagtaacactgctggcactcgcctgtggctgcctcctggca

SEQ ID NO: 6548 - DNA, 779 bp, Homo sapiens
atgacaaaagtttggttttaatatcgggcaacacaaaacacagtacatcacttcagactaaattttattaaatatggtgtcatttggctacaatcggtttgtctttataaaactaagtaacttattttgtagtaaaaacaaccccaacccactgcccctctttggcagcccttgaaactcagtttcaaagctaggcctggctcccggccatggcgccctgctgcctccacctgctgagcgctctagggaagcctcccaaatcccaaggggtagggcccccggagtccattacctttgccttaaacagccaaggcccagggggcttttggggccgcaaggtaatgaaaggcccctcccaagtaagccacacctgtgtgcagggctgtgcctgggggggcctgggccaacatcccccctcccctttgaaaccatcaggaactgggcaagacgcccaccagaggcttgaccacagggggcgtgcatccccttctgagcctgggagaccctaggggagtggggtagccctgggtatgaacccctggtgggcttgtgttctggatgtcgctatggcactttggtcctcaactcaaacccccacccctacccaggagtctgagacctcggccttccctggacttgttgggcagaaaaaggcaccaaggacaggatgagaaacccggaggggcagccccacaaatgagggcgctctgacctgtcctcccattgccaccccacccaggaacagcccctcaactggtcacagccaccaggaagcccca

SEQ ID NO: 6549 - DNA, 492 bp, Homo sapiens
  SIMILAR (166)..(264): 781254mologous to Homo sapiens Human myelin oligodendrocyte glycoprotein gene,accession number AAZ29204,Smith-Waterman Score= 132.
  misc_feature (1)...(492): n = a,t,c or g
tggggatagacttgaactcgatncccctngtttcgctcttgttggccaggctggaacgcagtgatgcgatctcggctcagtgcaacctccacctcttgggttcaagtgattctcctgcctcagcctccttagtagctgagactacaggcatgtgccaccatgctggctaatttttgtatttttagtagagacagggtttcgtcatattggccaagctggtctcgaacccctgacctcaggtgatccacccatcttggcctcccagatgctgggattacaggcgtgagccactgcgcctggcctaattgtcattttcgtttttttgttgagacagagtttctgtcacccaggctggaatgcagtggcacgatctcagctcactgcagcctctgcctcttgggttcaattgattctcctgcctcagcctcccaagtagctgggactacaggtgtgtgccaccacacccagctaattttttcatttttagtagan

SEQ ID NO: 6550 - DNA, 462 bp, Homo sapiens
  misc_feature (1)...(462): n = a,t,c or g
tctatatactagcaataactagaaaacagctttttgaaaaccttaccacttgcaatagcatgcagaaatattaaatacatgaatttaacaaaatgtgagagctgcaaactgagagaaattaacagatctaaataaatggggcagtacaccatgttcaacaattggaaaactcagaattgttaaaatgtcatttctccctaaattgatctataaatcccagaagactttctttttgcagacattgataaaannnnnnnnnnnnnnnnnnnnnnnnnnnnnnnnnnnnnnnnnnnnnnnnnnnnnnnnnnnnnnnnnnnnnnnnnnnnnnnnnnnnnnnnnnnnnnnnnnnnnnnnnnnnnnnnnnnnnnnnnnnnnnnnnnnnnnnnnnnnnnnggaattccaccgcatggactagtgtctacgattaggggtttcaaatnnnncnnntcttnnnngaattcc

SEQ ID NO: 6551 - DNA, 991 bp, Homo sapiens
ttttttttttgggcttaaaaaacaaactttattccaaattatcaaaaaaaaagtgttaactcctggaaaccatttaacagatttcttttaaaccccataggggtccataaaacccaacctatcaacaaaaaatagcattgtgccccttacccactttcaataatggacccttcaggaggaacatttagagactccccacacaatttggggagccataggcaacacatattttatattaagcaaagacagcattaaaaactaaaaatcctcaaatttcaagagaatacctgttcaagtctttgatatacatttgcacatgagaaaagaaatattttaattttaaaaaagagacccaagtctgagtgcttatcctttcttcaaatgtaatctcctgtccacccttcattttatgactgcatacgcctcactctacttcatttacactgaaccagtgttcgttcaacatgattggcttcactcgaaggccctctagatcccatttcatatatccccatcgaccaccattattccccttaccatggtttcacagccttatactgagcattacattgtaaccaagcttggggaatttcaggtatccaaaggtaattatatacacaaacgcttctgttttattgcacagttcacaatatagctggtgattacacaaccaaccatgttaagatgaatatcggactatttagacaaatacatcggattttgtccccaaccacaaatgaaacaagaaagacacacatattcgccaccatatcaaggttgtgtttactctgtggtgcagtcctgagggctcataccactctcagtgtgttcaatacggaatccataacatttctggtggcatcacacatgaagtataggacacaagaccataagtgtcctgcgctcatgagccatttgtgccacagacgtaacagaaaggccacttttaaagcttttcagatattcaatcacatttgccttttcaattttt

SEQ ID NO: 6552 - DNA, 1264 bp, Homo sapiens
  SIMILAR (921)..(1013): 611254mologous to Homo sapiens Human secreted protein encoded by gene 3 clone HNHCT15,accession number AAB38012,Smith-Waterman Score=103.
  misc_feature (1)...(1264): n = a,t,c or g
tttttttaaattggaaaagtaaaatactttattccacagatgacatgattatctacatagaaaatgctaaagaatctagaaaaaagctactagaataagttaactgatctaagttgcttgatacaagatcaatgtacaagtctaatgcatttctatatactagcaataacttaggaaaaccggctttttgaaaaccttacccacttgcaatagcatgcaggaaatattaaatacatgaatttaacaaaatgtgagagctgcaaactgagagaaattaacagatctaaataaatggggcagtacaccatgttcaacaattggaaaactcagaattgttaaaatgtcatttctccctaaattgatctataaatcccagaagactttctttttggcagacattgataaaagttgttttttttgagacagtttcactcctgggttgcccaggctagagtggcnatggccacgatctcaagctcactgaaaaccttccaacctcccaggttcaagcaattctcctggcctcagcctcccgagtagctgggattctacgagcgcctgccaccgacgcctggctaatttttttgtatttttagtagagatgtggtgatgcatgcctacagtcccaactacttgggaggctaaggaaagagctcacttgagcccggatgttcgaggttacattagctgtgattgtgccactacgctccagcctgggcaacagaatgagatttctgcctcaaataaaactacagtaatcaatatagtgtcatattggtgtaaagttatacacacaagaagaatggtgtccagaacagaccacttctatgtcacttcgagtttttacaaacctgtgaagacttggtcattgggaaagtagagtctcaacaaatagaaccgaaccaaccaaccacacagataaaaaagtgaatcttgacccttatcacatatggtacacaaaaatgaactcaaaatggatcacagacttaaatgtaaaaggtaaaactataaaagttccataaaaataaaaaacataggaaaaaatcatgtcctttgagtaggcaaatttcttaaactcaaattattataaaatatcataaatcattattattattatcttggtttactgcaacctctgcctcctgggttcaagtgattctcctgcctcagcctcccgagtagcagggactacaggggtgtgccaccgacccagataatttttgtatttttagtagagacggggtttcacacgttggccaggctg

SEQ ID NO: 6553 - DNA, 407 bp, Homo sapiens
  SIMILAR (1)..(150): 561254mologous to Mus musculus putative,accession number AK012469,Smith-Waterman Score=132.
gatgtttgcaagcctgacctgacggttggcctgcgatacgcacctcaccaatataaaagcgtggttgccacgaacctgccagaggcaaaatactgtttcttgaactggattgctgacctctctaaagctgccccacggaacaatgacagccctgggcactagcgctcaagcgtactatggctaccggaaacaggagcagatcctgctctgagaagaggatgcccttacaggaaccaatgagtccctggaacgccagatgcgtgaaatggaagagaactttgccgttgaagctgctaactaccaagacactattggccgcctgcaggatgagattcataatatgaaggaggaaatggctcgtcaccttcgtgaataccaggacctgctcaatgttaagatgggccctg

SEQ ID NO: 6554 - DNA, 3345 bp, Homo sapiens
  SIMILAR (1)..(861): 901254mologous to Homo sapiens putative p150,accession number U93572,Smith-Waterman Score=1322.
atgaacatcgatgcaaaaatccacaataaaatactggcaaaccgaatccagcagcacatcaaaaagcttatccaccatgatcaagtgggcttcatccctgggatgcaaggctggttcaacacaagcaaatcaataaatgtaatccagcatataaacagaaccaacgacaaaaaccacatgattatctcaataaatgcagaaaagacctttgacaaaactcaacaacccttcatgctaaaaactctcaataaattaggtattgatgggacatatctcaaaataataagagctatctatgacaaacccacagccaatatcataccgaatgggcaaaaactggaagcattccctttgaaaactggcacaagacagggatgccctctctcatcacttctattcaacatagtgttggaagttctggccagggcaatcaggcaggagaaagaaataaagggcattcagttaggaaaagaggaagtcaaattgtccctgtttgcagatgacatgattgtatatctagaaaaacccatcatctcggcccaaaatctccttaagctgacaagcaacttcagcaaagtctcaggatacaaaatcaatgtgcaaaaatcacaagcattcttatacaccaataaaagacaaacagagagccaaatcatgagtgaactcccattcacaattgcttcaaagagaataaaatacctaggaatccaacttacaagggatgtgaaggacctcttcaagaagatctaccaatcactgctcaatgacataaaagaggatacaaacaaatggaagaacattccatgctcagggataggaagaatcaatattgtgaaaatggccacattgcccaagtgtctaccaaccacctgcatccacatgataagacctcagtttagagttagcagtgtgaggagagacttcaattcagaggtagcaatggaagaacttaaacaaacgaggaaacccatctttctggcaagggaggtgcgaacactcaccagtttccccattttccaaccctatggttttcttattctacgtggccacagacaggaacaattcactagcacagtggttctcagaatcacctggacaaaaggtatactagtgattcaggtaaatccttggctgaccacactggaagctggcatctccaaggctcccgacaaaccctggaacccaagccaagttgctcctgcactaccccagaagccagctcaggtccttggcttgtggcttgctttttctgtcaacagaacatggatgcagctggagaccatcatccttagcaaactaatgcaggaacagaaaagcaaatactgcatgttgtcacttataagtgggagtgagtcagtcagcaagcgtcgcattgccctgggatcggcactgcacgtagaaggcccgaccgcacacagcaaggcgatggcccagctgtccccgcgccagagacgcagccgcgctcccaccacccacacccaccgcgccctcgttcgcctcttctccgggagccagtccgcgccaccgccgccgcccaggccatcgccaccctccgcagccatgtccaccaggtccgtgtcctcgtcctcctaccgcaggatgttcggcggcccgggcaccgcgagccggccgagctccagccggagctacgtgactacgtccacccgcacctacagcctgggcgacgcgctgcgccccagcaccagccgcagcctctacgcctcgtccccgggcggcgtgtatgccacgcgctcctctgccgtgcgcctgcggagcagcgtgcccggggtgcggctcctgcaggactcggtggacttctcgctggccgacgccatcaacaccgagttcaagaacacccgcaccaacgagaaggtggagctgcaggagctgaatgaccgcttcgccaactacatcgacaaggtgcgcttcctggagcagcagaataagatcctgctggccgagctcgagcagctcaagggccaaggcaagtcgcgcctaggggacctctacgaggaggagatgcgggagctgcgccggcaggtggaccagctaaccaacgacaaagcccgcgtcgaggtggagcgcgacaacctggccgaggacatcatgcgcctccgggaaaaattgcaggaggagatgcttcagagagaggaagccgaaaacaccctgcaatctttcagacaggatgttgacaatgcgtctctggcacgtcttgaccttgaacgcaaagtggaatctttgcaagaagagattgcctttttgaagaaactccacgaagaggaaatccagtgacctgcaggctcagattcaggaacagcatgtccaaatcgatgcgaatgttccatagcatgacttcacgactggcccgacgtgacgaacgtcagcaatatgaaagtgtggctgcccaagaacctgcaggaggcagaagaatggtacaaatgtcaagtttgctgacctcttctgagggcttccaaccggaaccaatgagccccttgcgccaggccaaagcaggagtcccactgagttaccggagaacagggtgcagtcccctcacctgtgaaagtggatgcccttaaaagggaaccaaatgaagtcccctggaacgccagaatgcgtgaaaatggaagagaacttttgccggtgaaagctgctaaactacccaagaccactattggcccgcctgccaggatgaagattcaggaatatggaaggaggaaatggctcgtcaccttcggtgaataccaatgacctgctcagacgttaagatgggcccttgagcattggagattgccaccttacagggaagctgctggaaggcgaggagagcaggatttctctgccctcttccaaacttttcctccctgaacctgagggaaacttaatctgggattcactccctctgggttgatacccactcaaaaaggacacttctgattaagacggttggaactaggagattggacaggttaatcaacgaaacttcttcagcatcacgatgacctttgaataaacaattgcacaacactcagtggcaggcgatatattacccaggcaagaataagaaaaaaatccatattcttaaagaaacagctttccaagggcctttctgcagtttttcaggagcgcaagatagatttggaataggaataagctctagttcttaacaaccgacactcctacaagatttagaaaaaagtttacaacataatctagtttacagaaaaatcttgtgctagaatactttttaaaaaggtattttgaattccattaaaacctgctttttttttttccagcaagtatccaaccaacttggttctgcttcaataaatctaaggaaaaactcca

SEQ ID NO: 6555 - DNA, 451 bp, Homo sapiens
  misc_feature (1)...(451): n = a,t,c or g
cccacgcgtccggtggaatggaaagttcagaaacaaattatttcaatacactatggtcaatagattgttgacaagggttccaggaccattcaatgaagaaagaacagtgtcttcaactaatagtgctaagacaagtgaatattcacatgcaaaagaatgaatttgtacctgtacttcatnnnnnnnnnnnnnnnnnnnnnnnnnnnnnnnnnnnnnnnnnnnnnnnnnnnnnnnnnnnnnnnnctttgagaagaaaatacaggaataaatcttcatgaccttggatttggcaatggtttcttagatatggcaccgaaagcacaagcaacaactgcttaactgnnnnnnnnnnnngacaacatccccttttatccctttctactttctggggtcctttttggaaagggtgaagcaccctccgcccaggggggataattattggtgtattttt

SEQ ID NO: 6556 - DNA, 2526 bp, Homo sapiens
  SIMILAR (1452)..(2522): 341254mologous to Homo sapiens putative p150,accession number U93572,Smith-Waterman Score=348.
ggcacgagaatgcacttaatccttataacaaccttatgaggtagttctatggccctttttatagcttaaggaaattggggtacagagaagttagccccaaggttatatattgcaagtaaagtggcagagcagggattcatacaaagaccttctcactcagcagtcttcactcttactattcctgccactaggtagaaaaagaaagatttcggccgggcacagtggctcacgcctataattcccagcactttgggaggctgaggtgggcggatcacgaggtcaggagatggagaccatcctggctaacacagtgaaaccccgtctctactaaaaataaaaaataaaaaaaaattagccaggcgtggtggcgggtgcctgtacgcccagctactcgggaggctgaggcgggagaatggcgtgaacccaggaggaggagcttgcagtgtgccaagatcgcaccactgcactccagcctgggtgacagagcgagactccatcaaaaaaaaataaataaaaaaaaaataaaagatttcattttatgtgaggaattattttaataaaaaaaagagggtttatgctctatagtaataaaatttaccagtaacacccaatcagaaaattttggttccttagtatttagggaagacttttgtttaaatctcttatggaattttacatgttttgatttagaaaagtagatgcaatataatatatttcaagttttatacatattagatgaattgcatggtattttaggcaacttaactataaacaaatttattcatagaagcattgttgccaacaatttagatgacctcgatgaaaaaacacaccaattgacaaaactggctcaaaaggaaataaaaaatccaaacagacctgtaacaagtaaagagattgaaccagtaatcaaaaatctccccaacaaaggaaagtccggggctaaatgagtttactgggcaaactatggccaaacatattaaaggaaggaattaacactaatccttcttgaactctcccaaaaaatggaagagaaaggagcaccctgtgacattctataaggcggacattaccttaacaccaaagccagacaaagacctcacagggaagctacagaccaatatcccttatgaatatagatgcaaaaaaacttcaaaatactagcaggccaaatccagcagcttattaaaatgatcacacagcatgacccaagtgagatttatcaaagaaatgcagggatggttcctacatacaaatgtcaatcgatgtaataatataccatattaatagaatgaaggggaaaaaacagcatgatcacctcaattgataagaaaaagcatttgacaaaaatccaacaccctttcatggtaaaaacactctgcaaactaggaagaaaagggaactttcttaacctgataaagacatccataaaaacccacagctaacaacataatagcaaaacattgaaaatttttcccctaatatcatgaaaattcctgatttccccactgctattcaacattatactagaaggtctagccagagcaattaggcaagaaaaagaaataaaatgaatcccaaataggaagaagtaaaactacatttgcagaaaacatggtcctatatattaaaaatcctaaagaatccacaaaatgattccggctgattttaaaaattcagcaatgttgcaggttgcaagatcaacacacaaaagtctaagaaaaacctgaggggaaattaaaacaatttcatttacaataacatgaaaaagaataaaatacttagaaataaatttgaccaagaaagtgcaagacttggacactgaaaagtacaaaacgttgctgaaagaaattaaagaagacctaaataaatggaagacatcctgtgctggcaggttggaagacttaacattgttaagatggcattactcccaaaattagtctatagatttaatacaatccccattaaaattccagtgacccttttacagaaactgaaaagctgaccctagaatttatatggggattgcaagttactgaaggtactcaagtctgttcaaaacaatcttgaacaagaataaagttgaaggactcacattttccaatttcaaaatttactgcaaagctacttcaatcaaaacagtgttgtgctggtataaaaatatataaagcaatagagtagaatggaaagtccagaaacaaattacgccaattccacttatggtcaattgatttttggccaaggggttccaggaccattcaatgaagaaagaacagtgtcttcaactaatagtgctaagacaagtgaatattcacatgcaaaagaatgaatttgtacctgtacttcataccatatataaaaacttaattcaaagatagatcaaagaccctaaatgtaagagcgtaaacccaataaaactttgagaagaaaatacaggaataaatcttcatgaccttggatttggcaatggtttcttagatatggcaccaaaagcacaagcaacaacagcaaaaaaaaaaaaaaaaa

SEQ ID NO: 6557 - DNA, 641 bp, Homo sapiens
  SIMILAR (366)..(497): 301254mologous to Mus musculus reverse transcriptase,accession number U15647,Smith-Waterman Score=39.
taaaaaaataaaaaacataaaaggttcaatacagcaagaaggtttaacagttgtaaacatgtatgctcctaatgacaaaccatcaacatatatgaaacaaaaattgacgtaattgaagggagaagtacaattctacattaatagttggagtctttaatatcactatctcagtagtggatagaaccatcaatatctaagcaaggaaatataggactttcacaacacaataaaccaactagatctaacaaccatatacagaacactctacccaacaatgaaatacacattcttctcaagtatacataggataaattccaagataggtcataaattaagtctgaattgattttaaaagacagcaaaatatcttccctgaccacaatgggatgaacttagtaatcatacccaaaaagaaaactggaaaatttaaaaatcatagaaattaacacactcttaaccattagatcaaaaaagaaaccacccggcattggttgaaaatcaccccccggctttggccatggcagcgggtgagattcggcgcccagagcctccaggggcctcagctcaccgcacgctgacacatgtgcggcggtgaaacccagccccaacaggccccgcggcctctccctgggtgcggccgc

SEQ ID NO: 6558 - DNA, 377 bp, Homo sapiens
  SIMILAR (10)..(234): 811254mologous to Homo sapiens dJ127B20.1 (Rho GTPase activating protein 8),accession number Z83838,Smith-Waterman Score= 312.
ggcacgaggtacttgacagagaaaggcctgcgcaccgagggcctggtccggagatccgtcagcgtgcagaccgtccgtcagatcctgaggatctacaacctagggcagcccgtgaactttgacgactacggggacatttacatccctgccgtgaatctgaaaaccttcctgcgagagctggccgagtcgcttctgaccttccaggcctacgatcagattctcgggatcacctgtgagtatctgccctggcgcaggagtggagggcttagtcctcacatgctgtccctgatctactggcccatggtcaggctctggggtggccgaggtgacgtgtacccatcctgctactgttgccatatggcactgtacggcatgag

SEQ ID NO: 6559 - DNA, 893 bp, Homo sapiens
  SIMILAR (1)..(891): 331254mologous to Leishmania major ppg3,accession number AC084329,Smith-Waterman Score=223.
tccatttcttctcaacaaacttgatcttcctgggccccttgctataggtcccttccagcttctacctgggcttcctctctttgttcatcctcttctctctcaatttctttttccttctcatctgtatactcatctcctcctggttcctccacacctttagcctccatactgtcagccttcttctgacctttggacttctcttccttggcctctgtctcttccctactcccttctctcaatctgacttttgtctcttggcttcccccagcctcccctctatcctcactggcctttccagcctccaccttggtctctggacttccctctgcctcttccctgatgtctagcctgcctccaggctcagcctgcttgtcctccccaacttcccagcatgcctgctcttccccaccctgtcccagagcctgccttccacatcctgctgcctctccctccagactccctgaacccttccagattgggggtttaggtcccagaaggggacttaggtcatcataggcactcaggaaaacttcctccccattttcctcctcaacttcaggcctggggccagcggagtccagggaacagcagctgggggccaagacaaactgtgcctcatccagagacaggtcatccaggtgtggctccacagagaactcctccacgtgaggcccaactcccaggagctcctccaggtagcccatcccagggtcgtcctccccaggggagaaggctgctcctgctgcttctgcgtgggccgcctccccatcctctgcccccacccactcaggttatgagctgcttgagtcctctaggaaggagaaggagtcctgcacctcctgggacagcgagtcctccagggcaggagccaagtcgtctgggcctgagtctgc

SEQ ID NO: 6560 - DNA, 1429 bp, Homo sapiens
gccactatggtgagtaagccgtgcggtttccggctgcttttatggaagcagggaaaagcgagccggcggggcgctggggccctgtatacagccgggaagggctggcctcagagccgtccgtttggagggcggaaaacgagtcgagaggccagggcgggagtggtgagacctcggtgtgtgtaaatagcgggggcccggaaaggtcgaggggcgccaggatttcttctcggactctggaagggatggggggctcgggctgccctccgccgtatccggagctctcttttgtcgcgtaactgtgtcctgggtgcggtccctcgagtccccgcagtcctttccagcgcatgcccttactccgccttgggtggacgcgcgccgcgacttttccagcccttactttctcttgagcgcgaaaagcgggggtgggaagcagctggagacaaaagcgcgcacgcgcgaccgttaccttcccgccgctcctgggcgggaaaccgccactgcgctttgcgcatgcgctctgggtcgcgacgcgactagggctacagggcgtgtctcctgttaacctgagtgttctttttttgatgaaagcaataagaggactgcggaagagctccctgtcaatgtaccgctctacaccagtgtattacgacagttcgtacacaacagtctgtagaggccacctgtctctccctgctgcgttaggaattcaggggagcaggtggtggcagtaagggattttgagggaacggaaatcggatcttgacccagatctgggccgccgataatctcctactgcgctcagactgctgtggaggtgttaggctgagcccgatgccggcaggcaagggaggatgggcggcttgtgcagcgcctttgcagacgtggccatttcgtgcctctgcagcaccgccggggggcgcaagagcgcgcgcccggaattgctcattcatcctgtgccgcagagccccgccccttgtccctgcggacagacatttcttctgcgctggtctggccacgggcttcctgtgctaggagctgcccggaaatgggaccacctaatctaaagtgggcttctggggcctgaacgctggaggaatgcccaccttctgtctgggtctccaaggaagaacctggactaaccgcctggactggaagagccctcccggttagagggaggcactccttcaagcgctttacttaagggacagctccaacatatctccctccatacgccttggaggacctgcctaaaccgacatcggcttgcaacactctccaagcacctatcctccacacgtgttacccatccccccaacaccttcgtcctggcgggtcgtggcagtcggtgctctctgctcgcgccaggataacttgcacgaccaaccccgcctctgacgtataagcggtctgcgtccgccctgacaacttc

SEQ ID NO: 6561 - DNA, 1720 bp, Homo sapiens
  SIMILAR (1160)..(177): 861254mologous to Homo sapiens alpha-tubulin,accession number K00558,Smith-Waterman Score=1435.
tgatgttaatgactttactttgagatatgatggaaaaatattacaggtacacatggaaaagacatgatcaccaagtgaaaacaatctaaccagaaagctttaacatctgtcagttaagctgaagctgaaattctgggagcatgacatgctgcagggccaaaaggaatggataattagtattcctctccttcttcctcaccctctccttcaacagaatccacaccaacctcctcataatccttctcaagggcagccatatcttcacgggcctctgaaaactcgccttcctccatcccctcacccacgtaccagtgaacaaaggcacgcttggcatacatcaggtcaaacttgtggtccaggcgagcccaggcctcagcaatggctgtggtgttgctcagcatgcacacagctctctgtaccttggccaggtctccaccaggcaccacagtgggaggctggtagttgatgccaaccttgaagccagtggggcaccaatccacaaactggatcgtgcgcttggttttgatggtggcaatggcagcattgacatctttgggaaccacgtcaccacggtacaacaggcagcaagccatgtatttaccatggccagggtcacatttcaccatctggttggctggctcaaagcaagcattggtgatgtctgctacagaaagctgttcatggtaggctttctcagcagagatgacaggggcatatgtggccagagggaagtggatgcgggggtaggggaccaggttggtctggaattctgtcaggtcaacattcagggctccatcaaatctcagggaagcagtgatggaggacacaatctggctaataaggcggttaaggttagtgtaggttgggcgctcgatatcgaggtttctacgacagatgtcatagatggcttcattgtctcccatgaaggcacaatcagagtgctccaggggtggtgtggtcggtgagaatgtagttgtagggttcaactacagctgtggcaagcctgggcgcccgggtaaatggagaactccagccttggatttcttgccattaatcaaactgagagacgttccaatgagcagggaggtgaaccccagaacccagttcccccaaccaaagctgtggaaaaccaaagaagcccttgaagaccggttgcactgggtcagccaagcttgcgaattcggtccaaacacaaggtccaatgatctccttgcccaatggtgtaaggtccctcggggcataggggggtttttttttaaaaattttttttgggggccagccatcttcccttgccctgtgaatgaagctgcctccagggtggaaagagcttggcggtaaggtgccaagtgcggaacttcatccaatgacttgtgggttccaagtctacaaacacaagcccggggcacggtgcttgccagcgccccgtctcactgaagaaggtgttgaaggagtcatctcctcccccaatggtcttgtcacttgggcatctggccaatcgggctggataccgtgttacaggcaagagagctcccaagcaggcattgccaatctggacaccagcctggccaacgtggatggagatgcactcacgcatagtggctagggattcaggaggcgaaggcgacaggagcatgacaccgggtcccggttaccgtccccgacaagctaagagtcgcggcacgagctcgtgccaagcttgacgtaatcagggtctgcggtc

SEQ ID NO: 6562 - DNA, 372 bp, Homo sapiens
  misc_feature (1)...(372): n = a,t,c or g
gcaccttggggggacccaccacccattgggcccttcaaaaaaggggtnnnnnnnnnnnnnnnnnnnnnnnnnnnnnnnnnnnnnnnnnnnnnnnnnnnnnnnnnnnnnnnnnnnnnnnnnnnnnnnnnnnnnnnnnnnnnnnnnnnnnnnnnnnnnnnnnnnnnnnnnnnnnnnnnnnnnnnnnnnnnnnnnnnnnnnnnnnnnnnnnaaaagaaaaaaaatactaaggatcaacaaaactaaaagctgattctttgaaaagataaacaaaatttataaaatgctaactcatttaagaagagataagagacaaaaaaaatcagaaattaaaaaaggtgatattacaactgataccacagaaatgaaaaaaag

SEQ ID NO: 6563 - DNA, 394 bp, Homo sapiens
  SIMILAR (163)..(213): 701254mologous to Homo sapiens Human secreted protein, SEQ ID NO: 8144,accession number AAG04063,Smith-Waterman Score=72.
cccacgcgtccgaaaccacccaattcagaaatgggcaaagaaggggcttgagtagccatctctctaaggaaggcccacaagggccatttcccacatgaaaaggtgtccagcatcaccagccaccagggaagccaaatcagagccacaggtgagacgcacctcagaggatgtggcaatatcggaactctcacgcgttgctagtggggatgtaaacgctgcagccattgtggaaaccagtctggtggttcctcagatcgctaagcataggattacgctgtgatctgtagcaactccactcctaagtgtatgccacaggcatgcaaaccaggaacacaaagagatcttcatacaacagtgtttactgcagcattgttcacagtagctgaaggacaga

SEQ ID NO: 6564 - DNA, 380 bp, Homo sapiens
  SIMILAR (17)..(166): 821254mologous to Sus scrofa fructose-1,6- bisphosphatase,accession number AF073474,Smith-Waterman Score=208.
  misc_feature (1)...(380): n = a,t,c or g
tgacacgagaacacacgtggcagaagaagataaactcgccatcatagtggaaccggagaaaaggggtaaatatgtggtctggtttgatccccttgatggatcttccaacatcgattgccttgtgtccgttgcaaccattttcggcttctatataacgaattcctcttgactaaccttctttcaatcatgcttctgtctacgtgacgtaatctgtatcttgtctctctcccatttcatttagctttcctctctacttttcatctttcctttctctttttttttctctccttcctctccctcttttcctatcttttttttctattctcttccttcttctcttctcnnnnnnnnnnnnnnnnnnnnnnnnnnnnnnnctccct

SEQ ID NO: 6565 - DNA, 1192 bp, Homo sapiens; identical to SEQ ID NO: 6467
  SIMILAR (68)..(39): 901254mologous to Homo sapiens Human secreted protein, SEQ ID NO: 7867,accession number AAG03786,Smith-Waterman Score=50.

SEQ ID NO: 6566 - DNA, 542 bp, Homo sapiens
  misc_feature (1)...(542): n = a,t,c or g
cgaaattaagaatattacagattcctagaagcaaaagaaaatagaaccgcaacttactaaaacttaaggaccacgcagcaaaagcagaattaagaggcaagtttatatcaatatatgcctacatcaaaaaactagaaaaatttcaaataaagaatctaacaatgcaatccaaaaaattagaaaaattttaaattaaaaaatctagcaatgtattccaaagagctagaaaagaacaaaccaaaccccaaattagtcaaaggaaataaatatcagagaaggaataaacaaaattgagantaaaccaatgccacaaaaaatcactgaaacaaccgttgcttagctagactaagaaagaccaaaataaataaatgagaaaagaaaaaggagacatcaaactgagcggacgcgtgggtcgtccggagtatctccagacggcnctcaaggnttcaaanngtgcgccggtggggggtttagccgcgatatgcgccgccgaactgcaccgcaatgactgcaagcgacgaggtgcaccgtcgaatgtaaca

SEQ ID NO: 6567 - DNA, 403 bp, Homo sapiens
atgccctacctcaacaagtacatcctggacaatgtggggcccagcttgtagggagcatctgtaacctctccccacttttccagcctggccagcagcctaataccttgccactccaactcttcgcccctgccataaactcctacttctgcctgctctgtccgtgactgctgtcccatcacgtccctcacatcccagccacctgcccccttcctgtccccctcaattcaccttcaatgtccctcatctctaatgaggtgggccccaccctacccataaccttccaccgaatccctgcccggccctcctccagcttccagggttctccacccttcccagactgtccccctgaactccccctccaactcctccaatctgtcactgtgtttccaggttcttggctcct

SEQ ID NO: 6568 - DNA, 433 bp, Homo sapiens
  SIMILAR (33)..(191): 691254mologous to Homo sapiens M phase phosphoprotein 10,accession number X98494,Smith-Waterman Score=170.
gcgttcttttataagagttttggtagtgtagggaggaagatgatgacctggttgaaagtgaagacagttaacaatggggagaaagcttgaaaagagtgagcttcactttgctggatgatgaggcaactgaagatgcaggtgatttaaatgtaaagaaaaattctgatgaagttaaatcctcttgaaaaaagacaggaaaaggagtcagcttaagtacagctccgcgtgttggttgcagaagtcgcctgtcttccccgcatgaggctgtttgctcgctttgacactgaatgctcccccaacaaacacgtttagcttgcttgcccttctcaccgactgcggagaggagtctcagtgcacagtcgcagagaaggcgtgcggtggcgtgcaggggctcacaggcgcctgcctctgcgggtgggaaaggaaggaggcg

SEQ ID NO: 6569 - DNA, 409 bp, Homo sapiens
  SIMILAR (144)..(404): 451254mologous to Homo sapiens putative p150,accession number U93563,Smith-Waterman Score=189.
  misc_feature (1)...(409): n = a,t,c or g
nnnnnnnnnnnnnnnnnnnnnnnnnnnnnnnnnnnnnnnnnnnnnnnnnnnnnnnnnnnnnnnnnnnnnngtaaatagaaatggaaatcaacagcagaaggaaattgaaaattcaaaaatatgtggaaattaaatgacacactgtaaacaaccattgggtcaaagaagaaatcaaaaaagaaattagaaaatacctcaagagaaatgaaaacaaaaacacaacataccaaaacttataggattcagcaaaacctgtactcagagagttcgttgtgataaatgcctacattaaaatagaagaaggatctcanataagcaacctaactttatacctcaaagacctagaaaaagaaattaaggccaaggttaacagaaggaaagatataaggattacagaagagataaacaa

SEQ ID NO: 6570 - DNA, 811 bp, Homo sapiens
  SIMILAR (436)..(810): 991254mologous to Homo sapiens x 010 protein,accession number AF168711,Smith-Waterman Score=686.
aatgtgcagtaggtctgccggcgatggagtggtgggctagctcgccgcttcggctctggctgctgttgttcctcctgccctcagcgcagggccgccagaaggagtcaggttcaaaatggaaagtatttattgaccaaattaacaggtctttggagaattacgaaccatgttcaagtcaaaactgcagctgctaccatggtgtcatagaagaggatctaactcctttccgaggaggcatctccaggaagatgatggcagaggtagtcagacggaagctagggacccactatcagatcactaagaacagactgtaccgggaaaatgactgcatgttcccctcaaggtgtagtggtgttgagcactttattttggaagtgatcgggcgtctccctgacatggagatggtgatcaatgtacgagattatcctcaggttccctaaatggatggagcctgccatcccagtcttctccttcagtaagacatcagagtaccatgatatcatgtatcctgcttggacattttgggaagggggacctgctgtttggccaatttatcctacaggtcttggacggagggacctcttcagagaagatctggtaaggtcagcagcacagtggccatggaaaaagaaaaactctacagcatatttccgaggatcaaggacaagtccagaacgagatcctctcattcttctgtctcggaaaaacccaaaacttgttgatgcagaatacaccaaaaaccaggcctggaaatctatgaaagataccttaggaaagccagctgctaaggatgtccatcttgtggatcact

SEQ ID NO: 6571 - DNA, 426 bp, Homo sapiens
attttaaccattatttggtaaatatttagccattatttttttcaaaagtttttgcgtctcccttttataatgttcattatgcatttattaggctgcaaggttgatttatttatttttcagtgttttttccacttagtgttttattttggattattttactatttgaagttattttgttatactttcaagtttactaattgtttcctctatagtttctcgtttactgttcatctcatttagtatatttttccctcagatattatgtttttatatgtggaagtttaattcaagtctttcttttaacgttacctccctctttgtcatgttcatgcttttatttccttcttgaatatattgagtatcgttgttttctagttgataataattgaccatattttattgtccttacctacttttctaccatat

SEQ ID NO: 6572 - DNA, 353 bp, Homo sapiens
  SIMILAR (217)..(351): 531254mologous to Homo sapiens kruppel-like protein HPF1,accession number M27879,Smith-Waterman Score=131.
  misc_feature (1)...(353): n = a,t,c or g
nnnnnnnnnnnnnnnnnnnnnnnnnnnnnnnnnnnnnnnnnnnnnnnnnnnnnnnnnnnnnnnnnnnnnnnnnnnnnnnnnnnnnnnnnnnnnnnnnnnnnnnnnnnnnnnnnnnnnnnnnnnnnnnnngatatttcttcctgaaaaaaaactttacaaacttgaaaaatgggacagggcttttgacaacacctaaaacttttaaacataaaaaatcatactggggaaaaatcctaaaaatgtaaaaaatgggacagggcctttaaagggtggccacacttcattataggtaagatagttcatactgaaaaaaacttctacaagggtgaacagtgtggcaaaacttttaatga

SEQ ID NO: 6573 - DNA, 1281 bp, Homo sapiens
  SIMILAR (771)..(1118): 381254mologous to Homo sapiens alpha-keto acid dehydrogenase precursor,accession number M19301,Smith-Waterman Score=153.
aaaagaaaaataaaagggaagtaatttataataaaatttatttcagtatttaatgatgtggcacaactatgccataaagcataagatcaagtgtttgcatctatctgtaaatagaatcatcgtgtaatttagaaagtatgtctgctgcctatacagttgtgtgcattgttgactcatgttgtgttgccattagtggtgtaatttcttcctgaaattgcagacaactcttaggaaagctctaaacaaagaattaatcaatactttctgagttgggaaaagattttttaaagtcacttagtagtccaagcactcatcttattgaatcaagatatattccctgtttatcataatttcaaagatccttacttctgttgtgtgaatattattgcacatgtgatcagtagagtgggaagtgttactgggactcctaattttttcttccaggtattgcttatggctttcagctgtgtgatatctgaagcgatactctttctcaattattcaaatgattggccttcatctttttttaaatcgcagcctgcagtaaccaatagaataccagtagtaaccagtagacacattcttcccatccgtgaaccgtgagaagctatatttaacgtctattcaaatgcctaactttaatgggcacaattttattgttctgtctagtacagtcgtgactagctacagttggcgattgagcagttgaaatgtacctggtggtctgtggcacagttgccatttcccgggtaaggatgtctgcagtctgtgtactgaggacctggagccaggaatgctgggccagctgatttggtttcactgttttccaaccatgtagtaatgttcatgttttgaaggcccaaattatgtgtgtttctttggattatccttcattccaagtatagtcatcccacataactttgtgaaaacaattaatgctgtatgtggacagcctggttcagttcagattcccagacactgaagaagggattagaaaagtaactgttaatgttatgtaaaagaaggagatacagtgtctcagtttgataacatcggtaaagttcaaagtgataaagcttctgttacccatcgctagtccttatgatggagtcattgaaaactctagcatagtctagatgatattgcctatgtggggaagccattagtaaacatagaaacagaagctttaaagggtactgttaatttgttttaccaaattgattattgtccaccttttgtcattgggtctcaattaaaagtgacctttaaaaaaaaaaaaag

SEQ ID NO: 6574 - DNA, 637 bp, Homo sapiens; identical to SEQ ID NO: 490
  SIMILAR (47)..(412): 991254mologous to Homo sapiens gamma-G globin,accession number X55656,Smith-Waterman Score=637.
  misc_feature (1)...(637): n = a,t,c or g

SEQ ID NO: 6575 - DNA, 418 bp, Homo sapiens
  SIMILAR (172)..(417): 401254mologous to Homo sapiens SMAP-7,accession number AB014735,Smith-Waterman Score=146.
  misc_feature (1)...(418): n = a,t,c or g
nnnnnnnnnnnnnnnnnnnnnnnnnnnnnnnnnnnnnnnnnnnnnnnnnnnnnnnnnnnnnnnnnnnnnnnnnnnnnnnnnnnnnnnnnnnnnnnnnnnnnnnnnnnnnnnnnnnnnnnnnnnnnnnnngataattcttactgaaaaaaaactctacaaacttgaaaaatgggacagggcttttgacaacacctaaaacttttaaacataaaaaatcatactggggagaaatcctaaaaatgtaaaaaatgggacagggcctttaaagggtggccacacttcattataggtaaaatagttcatactgaaaaaaacttctacaagggggaacaggggggcaaaacttttaatgaaggctcacaccttattgcacaggaaagcatttatacttgaaaaaaattgtccaaatataaagacg

SEQ ID NO: 6576 - DNA, 434 bp, Homo sapiens
  misc_feature (1)...(434): n = a,t,c or g
nnnnnnnnnnnnnnnnnnnnnnnnnnnnnnnnnnnnnnnnnnnnnnnnnnnnnnnnnnnnnnnnnngtctgtttattatatttctatgctcatttttaaattgggnnnnnnnnnnnnnnnnnnnnnnnnnnnnnnnnnnnnnnnnnnnnnnnnnnncccctaagcagatatatgatttgcaaatattttctctcattctgtgggttgccttttcactttgctgattgtattctttcgggcacaaaagtttaaaattttgatgtagcccaatgtatctattttttcttttgagacctaaaggtcttttaagatctcaaagatatactagttattttataaccaactacttaagaaattgagccagatttcaaaatatctgaattatattttaagcacaccattacaaagtagtggagaaagttataatacatcct

SEQ ID NO: 6577 - DNA, 510 bp, Homo sapiens
  SIMILAR (270)..(302): 901254mologous to Homo sapiens Human secreted protein, SEQ ID NO: 7870,accession number AAG03789,Smith-Waterman Score=44.
tttttctgagatagatagggtctcattctgtcacccaggctggagtgctgtggcgtgatttcggctcactgcaacctctgcctcctgggctcaagctgttctcctgcctcagcttcctgagtagctaggactacaggcgtgtgccaccatgcttggctaaattttgcatttttagtggagacggggttttgccatgttggccaggctggtcttgaactcttgactttgagtggtctgcccaccttgatcatgttgatctatataattgatcggcctcccaaagtgctgggattaaaggtgtgagccaccacacctggccccataaataccatttaaaaaatttaaatgtattctcttatcagtcaaaaagcacagttaataaccaactgagtagccaaatactgctactcaattaattcagaagacctcaggcccaagaatacctagaacagacttgagggttaatttatggtattcaatagctcttttcttcaaatgcagtttcttctg

SEQ ID NO: 6578 - DNA, 474 bp, Homo sapiens
  SIMILAR (141)..(473): 1001254mologous to Homo sapiens Similar to RIKEN cDNA 2410015A15 gene,accession number BC005848,Smith-Waterman Score=572.
cgcctgagtccatcaagagggccaaggagatggaccttgtggggctgggcctgcaccccctcttcagctcgcgttttgaggaggaggagctgcagcggctgaggctggtggacagcataaagaactaccgctcccgggcggacattttctcagaggtcgtgggccggaagcggcagcggtcaggacccaacaggggagccaagaggcgaagggaggaggcccggcagcgggaccaggaattctacatcccctaccggcccaaggactttgacagcgagcggggcctgagcatcagcggggaagggggagcctttgagcagcaggcagctggcgctgtcctggacttgatgggggatgaagcccagaacctgacgaggggccggcagcagctcaagtgggaccgtaagaagaagcggtttgtgggacagtcaggacaggaagacaagaagaagattaagacagagagcggccgct

SEQ ID NO: 6579 - DNA, 1069 bp, Homo sapiens
  SIMILAR (2)..(1045): 681254mologous to Homo sapiens Similar to RIKEN cDNA 2410015A15 gene,accession number BC005848,Smith-Waterman Score= 1094.
gcgggaggacaccaaggctgccgtgctgctccacctgctgcacaacgtggtgcggccccaggaccagaccgtggtgtttgtggccacgaagcaccacgccgagtacctcactgagctgctgacgacccagcgggtgagctgcgcccacatctacagtgccctagacccgacagcccgcaagatcaatctcgccaaattcacgcttggcaagtgctccactctcattgtgactgacctggccgcccgaggcctggacatcccgctgctggacaatgtcatcaactacagcttccccgccaagggcaaactcttcctgcaccgcgtgggccgtgtggctcgggctggccgaagtggcacagcctactccttggtggcccctgatgaaatcccctacatgcaggatctgcacctgttcctggggccgctccctcaccctcgcccgacccctcaaggagccctcagggtgtgggccggtgtggatgggcatgctggggtcggggtgccacagagtgtggtggacgaggaggacagtggtctgcagagcaccctggaggcatcgctggagctacggggcctggcccgcgttgctgataacgcccagcagcagtatgtgcgctcacgcccggcgccctcgcctgagtccatcaagagggccaaggagatggaccttgtggggctgggcctgcaccccctcttcagctcgcgttttgaggaggaggagctgcagttgcttgatgctggtgaacagcataaagaactaccgctcccgggcgactatctttgagatcaacgcctccagccgagacctgtgcagccaggtgatgcgcgccaagcggcagaaggaccgcaaggccatcgcccgcttccagcagggacagcaggggcggcaggagcagcaggagggcccagtgggcccagccccgagccgcccagcactgcaggagaagcagcctgagaaggaggaggaggaggaggcgggagagaagtgtgaggacattttctcagaggtcgggggccggaagcggcagcggtcaggacccaacaggtgagaccagaagcggggggaggg

SEQ ID NO: 6580 - DNA, 1012 bp, Homo sapiens
  SIMILAR (409)..(657): 581254mologous to Mus musculus putative,accession number AK006393,Smith-Waterman Score=218.
ctcccaagtcctggaacgggcctccccaccctccggggcaccgacactcacggagtcactccaacttctctgggtgctccgtggacgaagagcgctctaggacaagcaaggattcctcttctcctgtaaatgaccacagaggaagacaatgaatgaggtgaaagaatcccttcgcagcatcgagcagaagtacaagctcttccagcagcagcagctcaccttcaccgccgctctggagcactgcagggagaacgcccacgacaagatccggcccatctccagcattggacaaggtgcagatctacatggaacacttacttgcaacagcttccacagaccggcgggttctgctcatgttcctggacatctgttcagagctgaataagttctgccagcactttgaggccgtgcacttcttggcaccccagtcaccaacaacctccttggagaaattgcaaaaccctcgttaagccaaagcaaacgacttaaagcagcctcagagcaaaataccctcatgatgtggtgaaccacctcagctgtgacgaggcccggaaccactacgggcggcgtggtcagcctcatccccctcatcctaggacttaaatgaaagaatggatcgcccactccgagaagttgccgcgcaaggtgctgcagcacgtgagtgagccccaggcgcaccaggagagcaccaggggatccgctcgtcctgcccaggccatagggacccagcccagggccactaaacacaagtgtagacagctcacaaaagccagcctcaaacccaggggatgttcaaaaccaccctggaggcctcctggtgggaaattgtaactcagagccaggagctccgtcggcggagagctttgctgtttaatttggattttactggccggtccttttttcactggtacccatggaccctgccacttactaaccccaagggaatcagccaatatatttctgagacttcctctctctcaaaaaaaaaaaaaaaaaaaaaaaaaaaaaaaaa

SEQ ID NO: 6581 - DNA, 493 bp, Homo sapiens
  misc_feature (1)...(493): n = a,t,c or g
naaaaaaaaagcaaatattgtcagattggataaaaaagcaaaacccaactatatgctttctataaaaacccacttcaaaaaagatacaaataggttaaaagttaaaagtaaaaggagggaaaagatatcgcatgctaacactaatcaaaagaaagtgacattgaatcaaaatacaaaactcatgtgtttttctctatactagcaattaggagttagaaaataaaaatttggaagatatgtgtcatttatgatagcataaaaaataaaaagtcaggaataattctaatgaaagatgtatgaaaccttcactcagaagactatgaaaggttattgacaaaaattaaagatgactcaaataagtggactgatatgcagtttacaaggattagataatatcataaaatgttgattctcaaatgacctataatttatcgnacgcgtgggcggacgcgtgggtcggcccggtactacnggccatcaaaggggngtcaag

SEQ ID NO: 6582 - DNA, 247 bp, Homo sapiens
cccctctagcttcttgattacatgacagcaacacaaggagcccacagttccagaagagcctgggtttttccacagggagacacagatgccctgtttcttaataccatctgcaaagagtcctagctgcttggcaggctgaggcaggaggatcactttgaagcccaggaggtcgaggctgcagtgagctatggatgggccactgaactccagcctgggtgacagagcaagaccttctcagacggggcgg

SEQ ID NO: 6583 - DNA, 414 bp, Homo sapiens
  SIMILAR (406)..(2): 821254mologous to Mus musculus putative,accession number AK015437,Smith-Waterman Score=532.
ctggtttgtttatccaagtctgaatgtttacaacctcttttctatcatcatctgacattgaagaactgtcaatttcatctgtgtcgtattcttcttcatccccaatgctgaaaacaggctttacgccacggtaaggcttgcccactctgtcactgctgctcacatgccgctctgtacatgatctgtctggccaaggaagattgaaagacattcgatccacaggagttgatgtattctctataaaactgataactttttccctgacattaacggattttgtcttcaaagccacagtcattttatttactagtgatttcattcctctatcacttgagccattaggagattcaccatcaacagaattgatactgctccttgagcgtgaggtactagcaatccaatggccactcgtgc

SEQ ID NO: 6584 - DNA, 1899 bp, Homo sapiens
  SIMILAR (154)..(939): 711254mologous to Mus musculus putative,accession number AK015437,Smith-Waterman Score=874.
agcgaatcagctacaaggggaaggagtccggttctttgtggtggattgccgtcctgcagaacaatatggtgctgggcatttatcaactgctttccacttagattcagacctgatgcttcagaatccatctgagtttgcacagccattttataatccttgctggaagcacagaagcagtccattgagtctggctccatagctggtggggagcacctctgttttatgggcagtggcagggaggaagaagacatgtatatgaacatggtcctggcacactttttacagaaaaacacagaatatgtgagtattgccagtggaggatttatggcactgcagcaccacctggcagacattaatgtggatggaccagaaaatggatatggccattggattgctagtacctcacgctcaaggagcagtatcaattctgttgatggtgaatctcctaatggctcaagtgatagaggaatgaaatcactagtaaataaaatgactgtggctttgaagacaaaatccgttaatgtcagggaaaaagttatcagttttatagagaatacatcaactcctgtggatcggcatgtgagcagcagtgacagagtgggcaagccttacccgtggcgtaaagcctggttttcagcattggggatgaagaagaataccgacacagatgaaattgacagttcttcaatgtcagatgatgatagaaaagaggttgtaaacattcagacttgggataaacaaaccagatgtcaaacatcattttccttgtaaagaagtaaaagaaagtggacacatgtttcccagtcatctgttggttactgcaacacatatgtactgtttaagggagatttgttttcacggaaaaaaggattggcttattataccagttctcgacaagcggctgaattctggtagttaaaattaccatcccaaaaaaaaacatcctgaactcattaccttcaagtatggaaatagcagtgcttcaggaatagaaatcttggcaatcgaaaggtatttgattccaaatgcaggggatgcaactaaagccataaaacagcagatccatgaaagttttgggatgctttgggaaagttaatataaaagaaaattatataaaaagaaattaagacaaccaagagaaacatggacatatacctcctgactgaatactaactggagacctttcatttgctcatggggctgcttaaatagcaggtctaagaaagtgtaaatctattataatcaatctgtggacagtaaacttttttaaaaaattttttcttctgcatttttggttttataaaacgatgtattataaaggtcagttattaaattactttgaagtaactgaccctgtgcccttatggccctaagtaagggtacagaatgcagttctgttttgaagagctgttttaagggaacatgcatcactttcgggttcaaaaacaactgtacacatacatatctgcagtgtcttcactgaaaattagagatagaattagttgaagagacttccttaattgctacattgttttactcactgagcaatatcagmmactaaaacatagattaataattcactcactgtttctattcttcttaaaaagagtgaaatctttttaatggaatggttgaagattcctgccaactcaaaatacagtacagctagtaaaatgttgaaacatcagtttctaaatcacctttgctccattagctaattttttggacactaaatgcttcaaagataagaaacttcatcctaatgatttctaaagagcagttaaaagcattaaaataagtaggtaggctgttaagattaaaattaacattttggggacagaattgtgtctgtaaaaatgtcattggttttattacaagtggattattttattcatattt

SEQ ID NO: 6585 - DNA, 805 bp, Homo sapiens
  SIMILAR (102)..(308): 921254mologous to Homo sapiens gamma-globin,accession number M15386,Smith-Waterman Score=339.
  misc_feature (1)...(805): n = a,t,c or g
cctttgaacaccttgacaaggatcccagattcactggacgccgtattacaacgtcgggactggaagaccagaattcggcacgaggaggttatcaataagctcctagtccagacgccatgggtcatttcacagaggaggacaaggctactatcacaagcctgtggggcaaggtgaatgtggaagatgctggaggagaaaccctgggaaggctcctggttgtctacccatggacccagaggttctttgacagctttggcaacctgtcctctgcctctgccatcatgggcaaacccccaaagtcaaggcacatggcaagaaggtgctgacttccttgggagatgccataaagcacctggatgatctcaagggcacctttgcccagctgagtgaactgcactgtgacaagctgcatgtggatcctgagaacttcaagctcctgggaaatgtgctggtgaccgttttggcaatccattttcggcaaagcaattcacccctgaggtgcaggcttcctggcagaagatggcagaagatggtgactggagtggccagtgccctggcctccacatacccactgagctcacttgcccatgattcagagctttcaagggataggcttttattctgcaagcaaatcaaaatataaaatctattcttgctaggagatcaccaaannnnnatnntnnnnnnncccccggattttttatttagcgggccgcacctttttccccttttagggggggtaaatttatattgggccttgggccggggttttcaaaagcggggggannnnnnnnnnaaagagccc

SEQ ID NO: 6586 - DNA, 1424 bp, Homo sapiens
  SIMILAR (587)..(763): 451254mologous to Mus musculus putative,accession number AK004843,Smith-Waterman Score=104.
gcccggattcttctggataatgaccattacgccatggaaaaattgaagaaaagagtactggaatacttggctgtcagacagctcaaaaataacctgaagggcccaatcctatgctttgttggccctcctggagttggtaaaacaagtgtgggaagatcagtggccaagactctaggtcgagagttccacaggattgcacttggaggagtatgtgatcagtctgacattcgaggacacaggcgcacctatgttgggcagcatgcctgggtcgcatcatcaacggcttgaagactgtgggagtgaacaacccagtgttcctattagatgaaggttgacaaactgggaaaaagtctacagggtgatccagcagcagctctgctttgaaggtgttggatcctgaacaaaaccataacttcacagatcattatctaaatgtggcctttgacctttctcaagttctttttatagctactgccaacaccacttgctaccattccagctgccttgttggacagaatggagatcattcaggttccaggttatacacaggaggagaagatagagattgcccataggcacttgatccccaagcagctggaacaacatgggctgactccacagcagattcagataccccaggtcaccaccttttgacatcatcaccaggtataccagagaggcaggggttcgttctctggatagaaaacttggggccattatgccgagctgtggccgtgaaggtggcataaggacagcgtacggaagccaatttggaccgttctgatgtgactgagagagaaggttgcagagaacacatcttagaagatgaaaaacctgaatctatcagtgacactactgacttggctctaccacctgaaatgccgattttgattgatttccatgctctgaaagacatccttgggcccccgatgtatgaaatggaggtatctcagcgtttgagtcagccaggagtagcaataggtttggcttggactcccttaggtggagaaatcattttcgtggaggcgagtcgattggatggcgagggccagttaactctgaccgggccaagctcggggacggtgatgaaggagtccgcccacctcgctatcagctggctccgcaagcaacgcaaagaaagtaccaagctgaccaatgcttttggaagttttgatcttcttgacaacacagacatccatctgcacttcccagctggagctgtcacaaaagatggaccatcctgctgggaggttaccataagtaacctgtctcgccctcaactttttagtgggcggctggtacgttcagatgtagccatgactggagaaattacactgagaggtcttgctcttccagtgggtggaattaaagacaaagtgctggcggcacacagagcgggactgaagcaagtcattattcctcgg

SEQ ID NO: 6587 - DNA, 1381 bp, Homo sapiens
  SIMILAR (755)..(841): 681254mologous to Mus musculus putative,accession number AK004843,Smith-Waterman Score=106.
agccagagagtaagtgctgaatgtgacgcagaatcatgttaggtaacaaggactttgaggtaagtggctgaagtcttctgtggagtcagccgactcttgcaggattgtgtggtatcagtcacctttagcatttgccaacccaactctgatcattcttcttctttcaaggtatctcagcgtttgagtcagccaggagtagcaataggtttggcttggactcccttaggtggagaaatcatgttcgtggaggcgagtcgaatggatggcgagggccagttaactctgaccggccagctcggggacgtgatgaaggagtccgcccacctcgctattcagctgggctccgcagcaacgcaaagaagtacccagctgaccaatggtagggagccttgcaaccggccaaggcaggccttgacccagggaggcggtaccttccatggcggagactggcatgagctcgagactgccagttacacatctagcaaagtacacaccgttttgaacccctgtgttaaatcctagttcccatttcaggactatttgactagtgcctgaactagaaactaattcaaaaggtttattttgttttaatacgacttagagtagaatggaactgttcttccacaccctcacccaaattgtactgtccaccaatattttgaagaattcatttacccaaaacattcatttttgtttgtgactttttttttaggagaaaaagaaaacaggtttaatttttctacattaaagtccctttttcctttttaaagcttttggaagttttgatcttcttgacaacacagacatccatctgcacttcccaagctggagctgtcacaaaagatggacccatctgctggagttcccatagtaacctgtctcgcctcactttttagtgggcggctggtacgttcagatgtagccatgactggagaaattacactgagaggtcttgttcttccagtgggtggaattaaagacaaagtgctggcggcacacagagcgggactgaagccaagtcattatttcctcgagaaaatgaaaaagaccttgagggaatcccaggcaacgtacgacaggatttaagttttgtcacagcaagctggcctggatgaggatcttaaatgcagcttttgatggaggctttactgacaataccagaccttggctgttaaatatcaaactgtacgtccaaatctcaattttttagaattttaagttatgaagtgctcaaaggtactgacacagttgattttattcacaccattaggggtatgcaagatgtccctgttttataaacataatcacaacagtaataaacctcaagtagtggctagtgtttagtatagaaatataagatgttgatttagtaaactgataa

SEQ ID NO: 6588 - DNA, 411 bp, Homo sapiens
  SIMILAR (21)..(407): 371254mologous to Homo sapiens putative p150,accession number U93563,Smith-Waterman Score=185.
tccatcactttttaacatgtagaataaaaaacaagataaactatacaatagcaacaaaaacaataaaatacttaagaataaacttaagaaatttctaaagcctgactaagccaaaacttctgaaagacataaaagtagatttgaacaaatggaaaaatatttcttattcctggctaagataattcaagctcacaaatatatcagttcttcctatattaatttataaataaaatcccaatttaaaagatcaacactttttttataaagttagataaactgatgccaaagttcatatagaaaaataaacatgtaaaaataggtaggaaaacaccaaaaagaaaagctacaagggcatattaaccctatcagacattaaaacatactataaagtctctataatcaaaacggtat

SEQ ID NO: 6589 - DNA, 460 bp, Homo sapiens
  misc_feature (1)...(460): n = a,t,c or g
cagcttccccctgccctttccgctgcccccctgctcgagtccccagggaccacagctgctacgtaaggccatcaccaggccttggccaggcacatgcccttaccctgcctccacccaggttggtgaattcaccctcaggacaaggcctcagctcagtgtgggtgtgtaggaagaagggtgcccttacccatccccagcagatagccccatgtcagaagaccctggtgctgctcctccccaccaccccaggtcaccactgtagaggaacaggttactccaaaggaaaaactgctgtatttgcctggccagcctctcacctggcttcccccctccaacccactggcttgcctggaaagagaaacaatatgctaagtgtgcctaataatacccctcaaccggacgcgtgggtcgccccggaanttcggaggcggttccgcagcgnntctataaggggctcatt

SEQ ID NO: 6590 - DNA, 416 bp, Homo sapiens
tattctttccacactttttcaaatatgccattgtctttggagttcacagttgctgttaacaagtcactgtcaatatcattattgttgttcctcgaaaaataaaaacaaccttgcttggttgcttttgaaactttttctttataatttggaggcttgattcatacatctagctgtgattttcttgtatttatcctgcttggggttcactgcactttatgaatttgttgtttgctttcttttattagttttgcgaagttattctgtccttttgtttctctcctttccttctggaacttcagtcacacatattttagaacttctgtgtcccatatgtcttttaaactttgttctgttatttatgtatttttccttctctgtgcttcagtttgggtattttctatttctctgtcttcaag

SEQ ID NO: 6591 - DNA, 591 bp, Homo sapiens
  SIMILAR (292)..(62): 501254mologous to Homo sapiens Human myelin oligodendrocyte glycoprotein gene,accession number AAZ29204,Smith-Waterman Score= 145.
gagacaaggtctcactttgtcacacgggccagaagtgcagtggcatgatctcagctcaactgcaacctctgcctcccggactcaaaaagatcttcccaccttcagcctcccgagtagctgggaacacagatgtgcatcaccatgcctggctagtttttttcccattttttgtagagacggggttttgccattgttgctcaggctgttctccaaaatcctggactccaagctatctgccctccaatggcctccccaaagtgctgggattacaggcgggggccaccacacccggcccaagaataggaacattttttaaggagcttaccttcaactggagaaagctacttcggtgagttgtagcatatttcaaccagaaaaatcaaaatattagttcactttgaagagacaaactgaagcccatccttctggcaacttttgtagaaacagactgacagacttaattcaattgaccccaggctagttgattggttttataccatctaatataaaatggtagcttaatcctgcctgtgcctttgttcatgtaatttagttgagtacagtgaaatgagaaagaaactggaagtcact

SEQ ID NO: 6592 - DNA, 701 bp, Homo sapiens
  SIMILAR (104)..(256): 491254mologous to Homo sapiens PRO1722,accession number AF119851,Smith-Waterman Score=98.
gacggagcccgctctatcacccaggctggagtgcagtggcacaatttcggctcactgcaagctccgccccccgggttcatgctgttctcctgcctcagcctcccgaagtagctgggactacaggcgcccgccaccacacccagctggattttttgtatttttaagtagaagaacggggtttcactgtgtttagccagggatggtcttgatctcctgacctcgtgatctgcccgccttggcttcccaaagtgctggggattacaggcgtgacgacccaatgcccggcccagtttcttttaataggatggaaaacttgatggaaacagttgactaggtagggtcaaaacagagttttgcaaggaatattacaatatggggttacggggacaattactgggggcactttccttaggtttattgatgctttagcatatgtaaacagctttaatagatccctcaaagtcaaagcctgacacccaacaaacattaaaaatccctttgcttgttcagtaagagaagtaaaaattaaattaaaataaaatatctcaagaggacctagagaggtcaccagtgggtaatctcaatcaccacacaatctccaaatgaaagactgctagagggcgctgctgtctgagacttggaggcttgagtggcagtgttacaaaaatgctggcagtacacaaactgaagaacaaaccgat

SEQ ID NO: 6593 - DNA, 232 bp, Homo sapiens
cggccgcgtcgacccccaggcctcttcgtttcctcccctcccccactcgcggcctggtcccgaactagcgcccaagacggagaagaactagctccgcagctcattaccccggctcctgagccggcaccgaccagtgcgcgtcccactcgcagcaacacgcaccgccgcctttctccttggagttctaggcccgtgactgaggaaatgcagtcggcagcgaagcacaatggcg

SEQ ID NO: 6594 - DNA, 385 bp, Homo sapiens
  misc_feature (1)...(385): n = a,t,c or g
atcccctggtcaagagtgggttgaaaccaccctgtgaaaaatgcccatcttccaaaagcagtttcaaaattcaaaacaatttccatcaaaaaaccccccttatttttcccaagaatggaaaaaaccatccttaaatttctttgggacccnnnnnnnnnnnnnnnnnnnntccctgtgtagnnnnnnnnnnnnnnnnnnnnnnnnnnnnnnnnnnnnnnnnnnnnnnnnnnnnnnnnnnnnnnnnnnnnnnnnnnnnnnnnnnnnnnnnnnnnnnnnnnnnnnnnnnnnnnnnnnnnnnnnnnnnnnnnnnnnnnnnnnnnnnncaacccacaaaatcaagccaaatacttacagacaactcatctttgacaaagcaaacaaaaac

SEQ ID NO: 6595 - DNA, 409 bp, Homo sapiens
  SIMILAR (72)..(407): 481254mologous to Mus musculus Similar to KIAA0554 protein,accession number BC003867,Smith-Waterman Score=201.
ggaccggaaggaggagcggctgaggagcccaaggagcggggcggcggccactatgagctcaggaggcaagggcgtggccgagtgggacccacttccctgcctggacccagaactctgggatcagtttgacaacttagaaaatcgatagtcttgagaaattcatcatatctgccaaggaaaggactgagattgaactcagctatacaaaacaactcaggaatcttttaaagacatgccaacctaaaaggaactggaaggagaaagaatacattacgtaaaactctccttccctccctgtgaacaaaatgagtgatcacgctaggcagcattaagttatcttctttgaggtcttgaactttcagatcaccgtggagttacaagggcatgttcaaaaccaaaagcaggagag

SEQ ID NO: 6596 - DNA, 411 bp, Homo sapiens
aatcctcctgtcttggtggggattgctttaaatagggtgctgaggaaaagtctaagaagtgacatttcagccaaaagctaaaggagaaaagggagtaaagctgtggctatttggggaaagggatccaggaaagggagtggccaaaggccttgagcaggacagccagggccagaggggattcagctggggtagccacagatcagagataaaggggatcagatggggccgcacccgtgttggtaggtttgtgggactttgactccaaacacatctttttaagttttttgttgtgtggctgggcgtgatggcgcacctggggttaaggctcacttccctgcggctcagaagccatgggatggtggcttcccagggccctgaagtgctggagtcgggccaccacctatcccaaga

SEQ ID NO: 6597 - DNA, 501 bp, Homo sapiens
  misc_feature (1)...(501): n = a,t,c or g
tgcatttcccaggccccccctttatgacagccgatgatcagcntcgaancnccggncgacccacgcgtccggccggggacgcgcggcccccggtcgggcactgcaggcggtgaaacgacttgggaaggccctttcggggtaatagtccgggtcctgatgttcttgtcatatgagttacgggcagcagagctgggtgaagtcggggcgggaggtccgcgtggggcgcggcgtccatcccagacagagaccgctgcctagccggcttcccgcttcgtccgtggcctcgggccccagaccctgcgccccacgtccccgggacccaggcgttcccgtcccctactcggagacgagcctccccggcgccgggtgggcggtgcatcctttcctcccacccgtaacgggagcggtgcctggcgcgctctggcgcagaccctgctgggaatgtagctcgcgcagttttcttcggactactaaattatttcttttttttggttttgggtt

SEQ ID NO: 6598 - DNA, 4222 bp, Homo sapiens
  SIMILAR (390)..(1469): 931254mologous to Homo sapiens raf protein (aa 1- 648),accession number X03484,Smith-Waterman Score=1741.
  misc_feature (1)...(4222): n = a,t,c or g
ggtcgggaggacgagcaccgagtcgagggctcgctcgtctgggccgcccgagagtcttaatcgcgggcgcttgggccgccatcttagatggcgggagtaagaggaaaacgattgtgaggcgggaacggctttctgctgccttttttgggccccgaaaagggtcagctggccgggctttggggcgcgtgccctgaggcgcggagcgcgtttgctacgatgcgggggctgctcggggctccgtcccctgggctggggacgcgccgaatgtgaccgcctcccgctccctcacccgccgcggggaggaggagcgggcgagaagctgccgccgaacgacaggacgttggggcggcctggctccctcaggtttaagaattgtttaagctgcatcaatggagcacatacagggagcttggaagacgatcagcaatggttttggattcaaagatgccgtgtttgatggctccagctgcatctctcctacaatagttcagcagtttggctatcagcgccgggcatcagatgatggcaaactcacagatcctttctagacaagcaacactatccgtgttttcttgccgaacaagcaaagaacagtggtcaatgtgcgaaatggaatgagcttgcatgactgccttatgaaagcactcaaggtgaggggcctgcaaccagagtgctgtgcagtgttcagacttctccacgaacacaaaggtaaaaaagcacgcttagattggaatactgatgctgcgtctttgattggagaagaacttcaagtagatttcctggatcatgttcccctcacaacacacaactttgctcggaagacgttcctgaagcttgccttctgtgacatctgtcagaaattcctgctcaatggatttcgatgtcagacttgtggctacaaatttcatgagcactgtagcaccaaagtacctactatgtgtgtggactggagtaacatcagacaactcttattgtttccaaattccactattggtgatagtggagtcccagcactaccttctttgactatgcgtcgtatgcgagagtctgtttccaggatgcctgttagttctcagcacagatattctacacctcacgccttcacctttaacacctccagtccctcatctgaaggttccctctcccagaggcagaggtcgacatccacacctaatgtccacatggtcagcaccacgctgcctgtggacagcaggatgattgaggatgcaattcgaagtcacagcgaatcagcctcaccttcagccctgtccagtagccccaacaatctgagcccaacaggctggtcacagccgaaaacccccgtgccagcacaaagagagcgggcaccagtatctgggacccaggagaaaaacaaaatttaggcctcgtggacagagagattcaagctattattggggaaatagaagccagtgaagtgatgctgttccactcggattgggtcaggctcttcttggaactgtttataagggtaaatggcacgttatatgttgcagtaaagatcctaaaggttgtcgacccaaccccagagcaattccaggccttcaggaatgaggtggctgttctgcgcaaaacacggcatgtgaacattctgcttttcatggggtacatgacaaaggacaacctggcaattgtgacccagtggtgcgagggcagcagcctctacaaacacctgcatgtccaggagaccaagtttcagatgttccagcttaattgacattgcccggcagacggctcagggaatggactatttgcatgcaaagaacatcatccatagagacatgaaatccaacaatatatttctccatgaaggcttaacaagttaaaaatttggagatttttggttttgcaacagtaaaagtcacgctggagtggttctcagcaggttgaacaacctacctggctctgtcctcctggatggccccagaggtgatccgaaatgcaggataacaacccattcagtttccagtcggatgtcttactcctatgggcatcgtatttgtatggaacttgatggacggggggagcttccttattcttcacattcaacaaccgaggattcagatccatctttcatgggtggggccgagggtattgcctccccagatcttagtaagctatataagtaactgccccaaaagcaatgaagaggctggtagctgactgtgtgaagaaagttaaaggaagagaggcctcttttttccccagatcctggccttccattgagctgctccaacactctctaccgaagatcaaccggagcgcttccgagccatcccttgcatcgggcagcccacactgaggatatcaatggcttgcacgctgaccaagttccccgaggctggctggtcttcctagttgactttgcacctgtcttcaggctgccaggggaggaggagaagccagcaggcaccacttttcttgctcccttttctccagagggcagaacacatgtttttcagaggaagctggttgttaagggaccttcttaggattgnttcacaggggcctttaactttcatgttgccttcttttctattccctttgggcccctgggagaaggaagccattttgcagtgctggtgtgtcctgctccctccccaacattcccccatgctcaaggccccagctttcctgtagatgcgcaaatgggattgttgatggtagtacaaaaaagcagggggcncagccccaggctgttgggctacattgagtatttagagggaagtaaggtaagccaggccagtcccagccccttattgtgggagacaccatgggatttttggaaaatcagctttctggaaggaatgcatgtcaacaggcgggactttttttcagaagagtggtgcagccgcacgacattttgcacataaggcaccaaacaggcccaggactgcccgagtactctggcccgcccggaaggaaccctgcctttgggtacctanggaaacttttctttagggggacacgtcccctttcttcacagccttcctaaggtgtcccaagtgccaattggggaatgtttttccaggggaaaggcactcgggcaaatcccgcatcttcagcccctcctcagggagccagtccttcccatcatgctgaatttttgtctttccagggagctgccccctatggggcgggggccgcagggccagccttgtttctctaacaaacaaggggcccagccttgtttctctaacaaacaaacaaacaaacagccttgtttctctagtctacatcatgtgtataccaaggaagccccggggaatacaggttttattgatgatttgggttttaattttgttttttattgcacctgacaaaaaacagttatttgatggtccctcgaattatgttattttaataaaataaattaaatttaggtgtaatggctgggctgttacctccctttttaaagtaattctgagctcacaacttggaatgcccccatttgttcaccctcttcaggagcagaattcaagaacaggaaatgtgcccagagcctaggctgggaatgaatttgtaattaatttaacctttgtactctttgtaaacctctactgaagagttaagtagtaaaaattaattaagcagaaagtactctaaactcaggctaataccttaaagtaatacattttataaactatttatttatttgggtagggtacagcttttttaaacacaaaaatagattagataaattccagcttggaacaagctaggtgctggttcacaaggttatgctcacccttccaattaaaatcaaaatgactacaagacttgccatcagctctcttcaggaccactgtctgggtcagaatcaggaaaccttgggtgccatggaaatttttacaaaatttcaaatcaaagccagggctttgcaggctaggataatagatcacttgagtacggaaccacacatgtaagtgtcacgtatatttgagttcttcaatacaattaccctgatggggcaagaacccacaggtggagagcagaggcttggttcccctagagggccctggctggagggccccaaccaccaaccagacgacaggaggggccagattgctacccagttattgttacctcctgctccttcaagagcctccctaagggagaagaagatctatacttccactttgtttgctgcacatgtggcaacaagattgctaccctgatttgggacacttgagagaacttgaaa

SEQ ID NO: 6599 - DNA, 419 bp, Homo sapiens
aagagccacagtggatccaggccctgatgcctgagaaggagccagctaggcagagccggggaggagcactccggacagacagcagtgaaccatccagaaatgaagtgaagaagacaatctcatttataatattggcaaaaagaacatacctagaaatatatgcaacacaagatgcataaaacttgtgtactgaaaaatacaaaatatttttgaaaggaatcaaagagtatcgaactaaatggaaagatatcctgcagtcatggatcacgagacataatgttaagatggccaaactcccgaattcatctatagcttcacaatctgtatcaaaatgccatctgtctttttacaagctgatcctcatattcatgaggaagtacaagggttgcagaatagccaacacaatctagagagagagg

SEQ ID NO: 6600 - DNA, 425 bp, Homo sapiens
  SIMILAR (118)..(216): 601254mologous to Homo sapiens Human secreted protein, SEQ ID NO: 6688,accession number AAG02607,Smith-Waterman Score=96.
  misc_feature (1)...(425): n = a,t,c or g
cggacgcgtgggtgacttcaacaaatgctgataaagaatttgaaaaaattcaacatcccttaatgataaaactgtcatcaaaatgagtatacatatatgtcatatatatacccattattcaaaataataaagggtatatatgacaaatccttggttaatatcatattgaatgtggaaaaattgaaggcctttttttctaaggacgggtacaagagaaagacannnnnnnnnnnnnnnnnnnnnnnnnnnnnnnnnnnnnnnnnnnnnnnnnnnnnnnnnnnnnnnnnnnnnnnnnnnnnnnnnnnnnnnnnnnnnnnnnnnnnnnnnnnnatacttttccaaagacaatataatgttatacctagaaaaacctagactccatgactttttcnnannnnannnnnnnnnnnnnnnnnnnnnnnnnn

SEQ ID NO: 6601 - DNA, 408 bp, Homo sapiens
  SIMILAR (315)..(407): 961254mologous to Macaca fascicularis hypothetical protein,accession number AB055310,Smith-Waterman Score=152.
  misc_feature (1)...(408): n = a,t,c or g
agggaggcagccacggtggcggctctgggggcagctcttgtcttcggggagaaggcccttggagccgggctggcatcggccttctcggggtgagcgaggtcaccatgccagcttcccagagccgggcccgtgcccgggaccgcaacaacgtcctcaaccgggctgagttcctgtccctgaaccagccccccaaggggggcccggagccccgcagctcgggcagaaaggcctcgggcccatcagcacagcccccacctgctggtgacggggccagagagcgacgccagtcacagcagctgccagaggaggactgcatgcagctgaacccctccttcaagggcatcgccttcaactccctgctggccatcgatatctgtatgtccaagcggctggnggtgtgcgctggcc

SEQ ID NO: 6602 - DNA, 451 bp, Homo sapiens
  SIMILAR (175)..(339): 601254mologous to Homo sapiens NAG13,accession number AF194537,Smith-Waterman Score=153.
gggaggcctcaggaggctttcaaccatggcaaaaggaaagggggagtagacatgtcacatgaaaaaatcaggagcaagaaagtgaggagacacttccaaacttattctacaaggccagtattacactgataccaaaactggacacacaaaaataaaagaaaagaaaggaaaagaaaagaaagaaaaagaaaagaaaactagaagccaataacacatagaaatatttatgcaaaaatactcaacaaaatactggcacaccaaattcaacaatacattggaaagatcattcatcatgaccaagtaggatgtatcccagagcatttgataaaattcaatatcgctgcatgataagaaccttcaaaaaatggggatagaaggaacacacctcaatataataaaagccatatacatcagacccacagatagtatcatagagaatagagaaaaaccg

SEQ ID NO: 6603 - DNA, 422 bp, Homo sapiens
  misc_feature (1)...(422): n = a,t,c or g
atcaaaagcaaaaataaacggatgggattatatctaactaaaatgctggtatacagcaaagaaagcaatcagtggagtgaaaagacaacctacagaatgggaaaaatatttgcaaactagtcatctgacaggagannnnnnnnnnnnnnnnnnnnnnnnnnnnnnnnnnnnnnnnnnnnnnnnnnnnnnnnnnnnnnnnnnnnnnnnnnnnnnnnnnnnnnnnnnnnnnnnnnnnnnnnnnnnnnnnnnnnnnnnnnnnnnnnnnnnnnnnnnnnnnnnnnnnnnnnnnnnnnnnnnnnnnnnnnnnnnnnnnnnnnnnnnnnnnnnnnnnnnnnnnnnnnnnnnnnnnnnnnnnnnnnnnnnnnnnnnnnnnnnnnnnnnnnnnnnnnnnnnnnnnnnnnnnnnnnnnnnnnnnnnnnnag

SEQ ID NO: 6604 - DNA, 1287 bp, Homo sapiens
  SIMILAR (1285)..(1088): 801254mologous to Mus musculus DXImx48e protein,accession number AF229644,Smith-Waterman Score=274.
ttttttttcactgtttctcataagagcttctattgtggcatataataataggtactctatataatattaaattaaaaataaagctccagcaggttgcacaggttggctgttaataaatatatctctgggtaattgtgccccaagaccagctcacgaccactctccctcatccagagaattatacaaaaataaatacaggctcggggggtaggcggaggacatgcccagttccactctaaaagttcccctcacttcacaccatcttacccgttccctcatcttccactggtggtcaccacaagggaagccctgtgttgactggaggagcttgggggattgaggaaggcctctgctttgcagttgaggcattcttcagaaggcaaagggaccccagggtccccttcacttgcacagggccatgttattcccattctttaagggcttttgctggattccccacaaggcagggcctattgagaaccaagccagagagaggcacagcgcaagcaccaggagggacacaccgctgttcagagccacagggaccaccactagcccggccaggacccccagagtctgggtcaagggcccccggagctgaggaggcattgcaaacacaacattctgcagggactgctagggtgggaaaacttctttgggggttcaaggcttgggcctgcatccttttcatcctgggagctcacatgaggcctggctacactagagagacagacttcggcccccaagggactgaggagggtgggattttgcccctgcagaaggacgggagaggctggctccttgccagatatgggatccaagctgcctgcccactcactggtgacctctatctgggcttctgtcccggcctcccccagggactcagtcaccccagctatcaccctattcatgtgcaaagagctggtgtccttgcccatccctttctccaggatccccaatgaactgaccctctgtacccagaaccacagggccgtcacatcctgagccctctgcccatgggagccacacatctcccatcgtggctaccacagaacgggccccggagaggatttctggaggcgattccttggggctgtccccttctgggctggagggtgtgaacagagagcccctcttcaccctccccttcatcatcagggtcttcggtgtccttgatgagctccacgccacgccccagccgggcatagtgcagcgtgatctcctcagccagggcgctgttcagggcccgctcaaggccaggccacttcaagatcagttcgcggtccg

SEQ ID NO: 6605 - DNA, 2239 bp, Homo sapiens
  SIMILAR (550)..(882): 241254mologous to Gallus gallus Xin,accession number AF051944,Smith-Waterman Score=86.
atggaggaaagaaaaggacacaaagaaattcacttaagaagactgaaagtcagaatcctaagtgtgagaatgtcggccatcaaagaaagtcctagactgctaataggcaatcaagagccattgaagcaacttaaacaggagagtaagatgaataggtatgtctttaacacagattattctggctgtataagattgatacaaagcaggttaagtcatttcccagagagttcaggacaacaaaatccaaaaccgtatatgagaaaatttaagacacctttaatgattgctgaagaaaaatatagacaacaaaaagaagaaattgaaaaacagaaacaggagagttcttactacaacattgttaaaactcaaagccaaaatcaacacataacagaggtggaaaaggaaatgccattacaaaaaaccaatgaggaggtttccctatctggaattgattcagaatgcactgtggttcaacccagcccaggctctcaaagtaatgctcggatactaggagtgtgttctgataaccaactctccacaacatcgccagaaacagtcgctgccaagaggctccaccatgttttagcagcttcagaagacaaagataagatgaaaaaggaagttttacaaagctcaagggacattatgcaatccaaatcagcttgcgaaattaaacaaagtcaccaagaatgtagtacccaacaaacacaacagaagaagtatttggagcagttgcacttgccccaaagcaaaccaatttccccaaatttcaaacaatctgagattgatgttcaaacctttaccaaaaaacaatatctgaaaaccaagaaaactgaagcaagcactgaatgtagtcataagcaatctctggctgaaagacattatcagttacctaagaaggagaaaagagtgacagtacaattgcctacagaatccatacagaagaaccaggaagataagctcaagatggttcccaggaagcaaagagaatttagcggatctgacagagggaaacttccaggaagtgaagaaaaaaatcagggaccatcaatgattggtcgaaaagaagagagattaataactgaaagaaaacacgaacatctgaagaataaatcagcaccaaaggtcgtcaagcaaaaggttatcgatgcacatcttgattcacagactcagaattttcagcaaacacaaataccagaccgctgaaagtaaagctgaacataaaaaattgccccagccatataatagtctgcaggaagaaaaatgtctcgaagtcaagggcatacaagagaaacaagtcttctctaatactaaagattcaaagcaagagattacacagaacaaatctttcttttcctctgtgaaagaatcccagcgggatgatggaaaaggtgccttaaatatagtggaattcttgagaaaacgtgaagaactgcaacagattttgtcgagagtgaaacagtttgaagcagagccaaataaaagtggccttaaaacatttcagacactattaaatactatcccaggatggctgataagtgaagataagagagaatatgcagttcacattgccatggagaataatttagaaaaagtaaaagaagaaataacacatattaaaactcaagcggaagatatgcttgtgtcctatgaaaatataattcagacagccatgatgtcctccaaaacaggaaaaccggcaaatggggcccattagtctcgacgaagacatcgcccaaagtatctaatgttcatgtcagcaataatgaaaatagcgaacagaaagaaaattaaattgccaaagagaaaacagtccagcaccaagtagcagctcatgatgaagcaactgttcgtagtcacgtgaaaacccatcaggaaattaaactggatgatagcaacattcctcctccctctttaaaaacacagcccaccgtcaccaacttttatcacaatagaatctactgcccgacgaacagaaaaccctactaagaacgagctttctcagtcccctaaaaaggacagttatgttgaacccccaccaagaaggcccatgtcgcaaaaatctgaaattcacagagcaaacacttccccttctccacccaggagtcgctctgaacaacttgtcagactcaaagacaccactgcaaagttatccaaaggggccatcccatgtccagcagcaaccccggttccaattgtagagaagaggtctgaaatcatcatgtctcctgcaacactt

SEQ ID NO: 6606 - DNA, 461 bp, Homo sapiens
  SIMILAR (192)..(422): 971254mologous to Homo sapiens Human Diff6,H5,CDC10 homologue,accession number D28540,Smith-Waterman Score=387.
cccgggtcgacgatttcgtccgcggcgcggtcggtcggcgcctattctcgggctgtttggcgggcgtggaggactggccagcccccaaacctcaaggcccatcggctggatgccgtggataagcgaggggagagcgactaggccctgtctgcgggtaccttcggcgaggagaggcgacgaaggtctgcaccagcgagcaacagccaactcagtttataaatccagaaacacctggctatgttggatttgcaaacctccccaatcaagttcaccgaaaatcagtgaaaaaaggttttgagttcacactgatggtggtcggtgaatcaggtctaggaaaatcgactctcatagacagcctattcctaactgatctgtacccagaaagagtcatacctggagcagcagaaaaaattgaaagaacacgaaatcgtcgacccggcaatcgctacgtacagacgcac

SEQ ID NO: 6607 - DNA, 412 bp, Homo sapiens
tcctggtctccgtgtccagatgggttctgcacctatcgggtcttaagatcctgcccactctgcaacctgaatctgtcatagggtttgaatgaatcctctttgtcccctaccaagcactgcaaggattacgaatcccatttacagatgagacaccttgggttcagggcattttggtgactgactccaggtgtccgaagcccctgtttaatttcatctttgccaccaatgctagtctacagcacctgggagtggtaggcagaggacagtctccgaggagccatagccacatagcactgaggatgggcagagggggcagtggggagggacgagtctccagcacccagcacaggactgaatgtgcaggtcccctcgaagccccagctcccttcctcccaaaccactcccagggatg

SEQ ID NO: 6608 - DNA, 742 bp, Homo sapiens
ctgggcggaatcccacaagcacagtctaggtaaggagaagccagttaagttgggaagtagccagatttaagagtttgggcaatggccaaaggtgcagaagtttgaactacaaaaagttcagtgtagttggttcgtgtgtttccgtggagagaggacaaggtctggtggcactgccaagaattagaccgaaaaggtaaaaaagcaagccaggtttgtctgggccagtaggccaggtcacagttgggactccactgagaccacggaagccacaggtttgctcctcatccccgggccaactcggcggcctccaaccctataccataccccctgctgcctgtccgtgcctcgctggtgcagaccttcgtcgcctctcctcgccgaaggtacccgcagacagggcctagtcgctctcccctcgcttatccacggcatccagccgatgggcttggaggtttgggggctggccagtcctccacgcctcagggaggaaatggcaccgttagaaagacaagatggccacacaagctctaagtgtttgtcgggcctaaacctgtatcctccctccaagcaccaaaacctcccgacctcgaccgcactcgacgccccgaggcccagcaccgacgacagtgcagaggaattcccgcagggtcaacaaggggtcaccggaatccccactcccgcgcccgggcctgcccgtgtcggagccacatgtcgccggcactaggaccgcccgggacggggg

SEQ ID NO: 6609 - DNA, 433 bp, Homo sapiens
  misc_feature (1)...(433): n = a,t,c or g
atttgaagatatcaaataagtcataggtaaagtcaagaaaatgatgtctaagcaaaggggaaatatcaataaagggaaaataataaaaaggaaccaaaaggaaattgtggagctgaaaagtacagtaactaaaataaaaaatttacttggaggatttaaaaacagactgtaacagacagataaatgaattagttactttaagatacaacagttgaaattagtcagtctgggaaacagnnnnnnnnnngattggagggaagagaacagagcctaaagaacctatggaacaccatcaaactgaccagagtatacactgtgggagtctcagaaaaagaaaagaaagagcagattgtttgaaaaatatcagctggaaacttctcaaatttgattaaaaacatgaatataaatattcaagaagctcaaagaactccaa

SEQ ID NO: 6610 - DNA, 281 bp, Homo sapiens
cccaggccgaccgggactccgaagcgccaggtgctgatggcgcgggcccgcgaggggccctgcccgttcccgggggtcacggccaagatccagcggaggatggaccaggtgttcacgctggcggtgcgcgagacggaggccctgatcccgcccgaggtgcctacccgccaatgcccagcacacgaggctgtcggaaaggttcattggctaatttgccacagttggttttcaatatgtccatccctttttctgatttccagagctcagtatttctacccagg

SEQ ID NO: 6611 - DNA, 427 bp, Homo sapiens
  misc_feature (1)...(427): n = a,t,c or g
agtaaccggggggtgttaaaacccctaaatagggatcccccgcccccgggcttccaaaagggtggggttttaggggggggcccccagggccgggcaaatttgttttttttaaactcccaaaagggggttttcccggggccgaaatttttctgggggaatttttccaaagggggaaaaaaggactaggccccatttttccccctgtttttttaaaaaccgaagaggggggaaccctttccattccttttttaaaggaagggtttttttggtttttaaacccaaggccgggccnnnnnnnnnnnnnnnnnnnncaaactataaaccaatatacctcaataacacagatacaaaattctttaacaatatgttagcaaatagaatttagcaatgtataaaagaagttatgcaatatgaccggacgcgtggg

SEQ ID NO: 6612 - DNA, 731 bp, Homo sapiens
  SIMILAR (521)..(652): 681254mologous to Homo sapiens ubiquitous TPR-motif protein Y isoform,accession number AF265575,Smith-Waterman Score=172.
ttttgtgccccggggctgagtgagtcccccaggtggagctcgcccagataagtaaacatttattagatgaagccattagcaagcagtgcagcaaacagttcacacatgttgatttggtaaacttcagtgaaaccccagttctgtgttcctacaagatgtttcaaccataccttccatagatggttctctttaggttgatcgtgacaacaccttaaaagcataattggctaactttaatagtccagcaattataatcccagacttggactaacccctaagaacgattttgaaaaggtaggaagatttacagaaaagtttacccaaatcttatgcccctgtttaaaaaggcggggggagtatcccccaaaatatttaaggacaattccatatatggctgaatgcaacctaatttaaacaaaagacccactttctacccattcctccatggtaaaggcctttaggggctaaacaggaatattttcctttttgagacaggggtctctgtttgcccacgttagaagtgcagtgggcccccatcttgggctcactgcaacctccacctcccggattcaagcaattctcgtgcctcagcctcccaaatagctgggactacaggtgcatgccaacatgcccagctaatttttttgtatttttttgtattttttaatagagataggtttcaccaggttggccaggctggtgtcacaactcttgacctcaagtgatctacc

SEQ ID NO: 6613 - DNA, 589 bp, Homo sapiens
tgctggccaggtgggccaactgggtttccctggctgggcaggaggagagggcagaggaagaccccctctcctgtgactgagcctgccagggaggcagctacctcgggaggaaggtctcacatctgtctctgggcacccatgctggccagcagtttcccagggctccctggggttgaaaagccccaaggaaacctttgcgggtggggcgttactgccaaaactccagaggcaaagtggacctggcaaccacaagaccctccccataagcaggggaccagcagacccgggagctgtccctgtctgtcacagcacagtggggccacgaggctgacattctctggccttgcacacagtgccccctgagaagttcaacatttatttcttcacgtgtccagaaaattcctcatttaattccttgcctctgcccttcaggagcagcctggaaggaatccaagcaggagtttcatctgcatgggggcactctgcaggccctggaacattgggcctgagtggagatgggagacagaggcaggccagaaggttctctctgcacagctgcctcccttgctctccctgaggctggcctgcc

SEQ ID NO: 6614 - DNA, 463 bp, Homo sapiens
  SIMILAR (22)..(321): 541254mologous to Homo sapiens NAG13,accession number AF194537,Smith-Waterman Score=265.
  misc_feature (1)...(463): n = a,t,c or g
caaagtcatttaaattgaggtgagaaaactgataaaattcaacatcctctcatgataaaaaccctcacaaatctgggcatagaaaaagcatacatcagcataataaaagtcatacacaacagacccatggcctgtatcataataaatggagcaaaagtgaaagcctttcctgtaagatctgaaagacaaagatgttcgccttcaccattgctattcaacataggactgaaagtcccagttagagcaattgaaaaagagaaagaaatgaagggtatatgaattggaaagaaagaaatcaaattatgcttatctggaaatgataatgaccttatatttgaaacatcctaaaaactccaccaaaactattagaactgatacattcagtaaagttgcaggatacaaaaatacggacgcgtgggtcgncccgngntttccgaggggtgtcattagggtaaaatgccgt

SEQ ID NO: 6615 - DNA, 378 bp, Homo sapiens
  misc_feature (1)...(378): n = a,t,c or g
gaaaaaagactcaaagtgagacctgaaactagggaaacctgggggaaactctcatggacattggtctaggcaaagaattcatgactaagacctcaaaagcacaagcaacaaaaccaaaaatagatgggacttaaactgaaaaagtttctgcacagatacaaatatcatgcatatggttttaatttatctgtagcctagggcctagatgaatcttagattttcattccagctgtctgactcttgctttgtaagaaagcacatgaataggatatgggcctggattagtaaaacgttaatgtttgggccctaatcagtagatgtgggtataatttgcaaagactaataggaatgagtatggctagttcactcaacagtgtn

SEQ ID NO: 6616 - DNA, 779 bp, Homo sapiens
  SIMILAR (599)..(634): 751254mologous to Homo sapiens Human secreted protein, SEQ ID NO: 7878,accession number AAG03797,Smith-Waterman Score=51.
tcaatgaatattttcttctgaaaaactcaactttaaactttgtaattttacagttccattgagattatattgtttatttgttttaagacatatactataactgttttggttttgcttctagaaaaactgattgcttatcaacgagaattccttgctttgaaagaacgtcttcgaatagctgaacacagaatctcacagcgctcttctgaattaaatacgattgtgcaacagttcaagcgtgtaggagcagaaacaaatgggaagtaagggatgcgttgaataagttttcaggtacaaacagtattttttatattataaaaagattttatatatatatatatatatttttttttttttttttctttgagacagagtctcactctgtagcccaggctggaatgcagtggcgcaatcttggctcactgccagctccacctccagggttcacaccattcttctgccctcagcctcctgaaatggctgggacctaccaggcgcccgccacccaaaccctggctaatttttttgtattgttggtggagacggggttccacgatgttggcccaggatggtcttgatctcctgacctcgtgatccaccccctcagcctcccaaagtgctgagattacaggcgtgagccactgcacccggctgaaaaagattagatttgcaaaggggcatgtggaatttttttttgaaagtcatgtagaatagtttataagccagccctttcagaaagaaaaaccaccacacaaaactttcttttacttgtaaattac

SEQ ID NO: 6617 - DNA, 375 bp, Homo sapiens
  misc_feature (1)...(375): n = a,t,c or g
ggaaaatggatggtgctggatagctacatatggaagaacgaaaactggattcctatctctcactacatgcaagagttaactcaagagggacttggatctaggaactgaaaccatggaaattctggaggaaaacctgggggaggttcttctggacattggcctaggtaagaatttatgactaagacccccaaagcagattcaacggaaataaaaataaatagataagacnnnnnnnnnnnnnnnnnnnnnnnnnnnnnnnnnnnnnnnnnnnnnnnnnnnnnnnnnnnnnnnnnnnnnnnnnnnnnnnnnnnnnnnnnnnnnnnnnnnnnnnnnnnnnnnnnnnnnnnnnnnnnnnnnnnnnnntcagcgtcgacg

SEQ ID NO: 6618 - DNA, 1880 bp, Homo sapiens
  SIMILAR (1392)..(1880): 341254mologous to Streptomyces coelicolor A3(2) putative translation initiation factor IF-2(fragment),accession number AL355913,Smith-Waterman Score=145.
  misc_feature (1)...(1880): n = a,t,c or g
caggtgagaacttgtagcttccaggctgactggttcaggtgtgaagatgggaggagtcctcgccctgctgcctgcctgggccctgttccctttcaaactgcactgctgcatactcagagaacacacagaaagatcctccaccgacctctcaccctgcccagagcccacaggcaccaggagcgaggccctcatcctcttcctccccagcccactgggctgaacacttggcccagttgggagtaaccgctgactgggcttggttggtggaagcaggattctttctcccctggggcagactcagaccagactcaagctcccaccagcgttccacagcagtccagcttcccctgaagaccacacagtgaaatcaganccccaggcccaggagcaaagggctcctttgtggaaagccagcggccagtcaggccagaacaagaaacaaaaccagaagagaaaatctaagcccaagggacctctgccaatgtctggggaagggaaatgaggctccagaaacctgacgcaccattcgttaggtctgggagaagggaatgactaaaaagggctcctcggaattctttattcctgaacaagggaaggaggcttggccaggtgggagggaggggcactacttgtacagtggccttgactcgacgctcaatgtgtgacaggtaaggaaccgtgtagcaggtgaagtccccagggctacttgttcttagcctggagtccagggatgggtttcattcagggagtcccagtggctcctgaaaattgcttggggtttttgaagtctacagtcagttatttctgttttcctagggaaaggtccgtaacccttcatcaaattttccaagggcttcgtgtctcccaaagagctaagaagcactgctcagaaaaggaaaatgaaagcctggaaggtttcattcacatcttggaagaaggttttgcctctaagaaaccaggtctgccacccaactttgctgtggttagctttagaccaatcactttcctgtctctgaactctagccaagtggtggaccaggcgggagcagagaagccagctctccacacaggcatcgtcctaccaccagtggcagagagtgggggcctgtggccaggcagccaggatgaggtctgccccagctgtgattcccaccaggcctggagagtttgtccaccagagcttggaatctgcttccaattccaggctccaaccagtcacctccactggtcaccgcagtgcacctcttgaggcaggtcttcttactggatgtgtcctcatgcccgggtgcagtgccagccaggcctccatggaactccattcctggtctccgtgtccagatgggttctgcacctatcgggtcttaagatcctgcccactctgcaactgctctaggccggatgggccagagaaggagaaccatggccaggagccggaagcagctgtgcgcagccagccagagggtcccgagggaggaacgcgagcggggcggccggagcctggcggcggcccacaccttcaagagcccaaagccagcgaaacccataatcccgggatcccatctagagagggagctgcggcccagggccatctccaggggtcggggacgcacgtgcggggcgggaagcagccgtcggcagcaggccccgggcgcatcatagcacgcgtcctaagtgggccgcctggccctcgggcccgtggccgtggctgcgctgatgggtcttgagcgagccctcgcgcgcgaagctcttgccgcagcgggggcagaagtagggccgccgctccccgaagacgccggggcggcgcgggtgcggcgcgggcatgcgcgcgtgggtgcgctggtggttgagcaggaagcgcggctcgcggaagcagcggccgc

SEQ ID NO: 6619 - DNA, 382 bp, Homo sapiens
  misc_feature (1)...(382): n = a,t,c or g
ctcaacacatgaaacattctccaagatagaccatatgatagtccacaagtctcagtaaaattaaagaaacaattgtattaagtatctnnnnnnnnnnnnnnnnnnnnnnnnnnnnnnnnnactccaaaagtaaccttcaaaactatacaaatacatggaaattaatctgctccagaatgatttttaggttaacaatgaaatcaagatggaaacttaaaaattctttgaaatgaatgataatgacacaagttatcaaagcctctgggatacagcaaaagcagtgctaagataaaatcggaaagatcacaaattgacaacataacacctcaaggaactacagaaacacgaacaaacacaaagctaaaactagaaaataataaat

SEQ ID NO: 6620 - DNA, 400 bp, Homo sapiens
  misc_feature (1)...(400): n = a,t,c or g
ccaggtttaactcttaagggggtttggttcctaaaaaaaggcccaaccgtgttttaaataaaaaaatttagatggggccccaagccccctttaaaggaacccccgggggttttccggattttccaatcataaatttgggaatcccggcccggtccccggaaaagattttaaatttccaaattttccnnnnnnnnnnnngtgggggggaagggccccccccgtagtcccaaccaccccggggggttaaatgggaaggttcccttaacccccggcctttggggttccaagagggggggatgggtcccccccgcccggggcaccaaaagaagggcccctttccnnnnnnnnnnnnnnngaaaatgnnnnnnnnnnnnnnnnnnnnnnnnngagcgctcgtttg

SEQ ID NO: 6621 - DNA, 464 bp, Homo sapiens
  SIMILAR (4)..(249): 641254mologous to Homo sapiens PRO0898,accession number AF130051,Smith-Waterman Score=267.
gtttttgagacgagtctcgctctattgccaggctggagtgcagtggccgacctcggtcactgaacctccgcctcccgggttcaagtgattctctgcctcaccctcccgagtagctgggactacagacgcgcgccaccacgcccagctaaattttgtatttttagtagagactgtatttcaccatattggccaggatggtctccatctcttgaccttgtgaaccgcccgcctcagcctcccaaagcgctgggatttacaggcgtgagccaccgggccggccttgttttgtttttaaacaagccagtcacaggcctgggttttgatagtcatcatccctatcattctcagatttcagaaaaggaccctccccctatttcttctatttttaacaaaaaatctatacacacaaatcttttaattccaaattgatacagataaatttgtttgcctttttttttttcgag

SEQ ID NO: 6622 - DNA, 686 bp, Homo sapiens
ccctgggccgcctccggaagtgagacagcacattcgtgtcccagggacgagaacgggaagggcggccatttggccaggctcgtttcctgtggggtttcccctgcacagagcccagggccggggccaaagccccttccccttcccgcaaggcacaaaaggtctgggtcttgagtggaaggggtgctgccatgcaggtgcccaggagacagggtcccctttaccaatcatggtgcacttctcaggctcttgggagatggtgtccagggggaaaccaagctcctagcagctggaggcatgagggagagggcgggcccctgggctggggagcaaagcaggccccaggctgcatcaggacaccccggccagccaatgcatgtgggtatgcctgaataccccctccagacagcgtgtgcgtggaccagacacacaagggtatgtatgtgtaccgctacccccccaaccccatgctccaagaatgaatcaggggcagcttccgccgggggcgccaccaccacctccgcccccaagcctggtccccaaatactttccaccctcacagagcagctgggatcggaaaataccaaggctgcaggccccgccctgcccgccgcgccacgccctcccagcctgtcactaacgctttgcctaatgggcccagactctcagcagaagctccgtggctgggc

SEQ ID NO: 6623 - DNA, 603 bp, Homo sapiens
  SIMILAR (6)..(434): 951254mologous to Homo sapiens unnamed protein product,accession number AX073572,Smith-Waterman Score=690.
tcgggatgcagccgccggtgccctggcccttgggcctgctggaccccgcaaaagggctttcgaggaggaagaaaacgtcgctctggtttgtggggtctctgctgctggtgtccgtcctcatagtcaccgtcgggctggctgccaccaccaggacggagaatgtgaccgttgggggctactacccagggatcattctcggctttggatctttcttaggaattattggcatcaacttggtggagaatagaaggcaaatgctggtggcagcgatcgtgtttatcagttttggggtgggggccgccttctgctgcgccatcgggggcggcgtatttgcagcacagtacattgaaccgaggcccctcaccacgggaagatgccagttttactccagtggggtggggtacttgtacgatgtctaccagacagaggtcacctgtcactccctggacggcaagtgccagctgaaggtgagaagcaacacctgttactgctgtgacctctatgcctgcgggagcgcagagccctcgcccgcctactatgagttcatcggcatcagcggctgccaggacgggctgcacctggaacggctggttttgggccttg

SEQ ID NO: 6624 - DNA, 2489 bp, Homo sapiens
  SIMILAR (1247)..(978): 1001254mologous to Mus musculus putative,accession number AK010687,Smith-Waterman Score=467.
ctcctgggcccacagtaaggcaggtactggagggtcgttgaccatggccgggagagcagggtgtctggccccaggttcaggccttgcgttcctagctgctctgccacctggacgccacccctggccatgggatgcagcagctggtggttcgcccgcttcttgaggtggtgccgcgtgatcagcccttggtctatcacagccccgaccacccggtgcctcagacgccgctcccgattcaacacccgccggcgtttgaacagcttcttcttcagctctgatcccatctcgtgcgagataaaagggctcaggaacgcttgaggaaacaaagtcgcggcccccacacagtcaccgttcggggccggttgatctttccccccggagctcccatagtcgcgattccactccagttcacggtccgtacttccgctcagcgccggatccgcggggctccgccccggccttccgcgggccaatcgcaactcgggggcgggtcctcgggctccccgggcaacagcatcccatgtgcctttgtccagcagtagttggaaagagcctgaagaagccacagcccccaggttctgagcatcggcgtgcatgaagtggaggcttgaggcagggtgtccagggcatagaggtgtttggcctgggccaccctccaggaggctattcatgtgggccacagccacaggagaaaagtccacccccagcacatccactgggtgtggagatttggtgtagaggcctgtacataggctggaagtcccacagcccacatccagcactcgcagaggactggcagcctgtgcctcctgcagcaatggcagtaggagcccctggacttcgtcgtatccaaagaaccagtcgaaggtggggacagtgcccaaacgaggctgggcatgcagccgatcccagagacagcggtccgccaggcaactatcagccagtgagcctgcatatcctgcacatggatcctggaacttgttgacctgagtgacaacagcatccacgacctcccctttaaatggccggaaaacaatggccttgtacttaactggataaaggacaaagcctcggcctggctggatcacaccagcaccaatattgtcaatggtggtgacagcaattacaaagccatacttccctgtgcaggtcccctccacctcggtgaagagcttctgcttcaccgtgttgagcaagttggggccgaagtagcgcgggtgcagcaggatttcgtgctctagggagatagcatctcggtacttcccttcccggtagcgctggttcccttcctccttgtacagctgagcctcctgcagacgcttctccataactgtcgcccacggttcttgcggaactgggaagtgaaggagcaagtgaagaatgtcattcttgtccacacgggtccccacaatctttaagcggatctcatcgtcctgctgaatcacaatatcatgtcgagagatgaagcaagacatgggcccaatttctgtgaagagtccaacccctagaaggggtcccacttctggatctggtttgctgcgtttggccaggtcctcattgtgagccttgcggatgtggcggtagaggtcccctgactgcgtgtagctccgcaggcagtagcggcactcatagggtcgctcacgtgtgtgcaccgtggcatgtcgccgtagtgtgtaagagcatgagaaggtcttcccacatgtcttgcaggtgggaacatcctcagtaaaaaccccaaagcttcctggagctgcttcgtactcagaagacaggtaaagtggctcatgcagggatgcgggtgcaggcagaggtgaggtcaccagtcctcgatgatactgccctgcacctggcagcagatggtagggtagatgagggtctgttggcaggaagtggtcacttggccccacctcctccagtcctgctgcccctgggtcttcaaaagcctctggctgggagggctgtgccccatacactgctcctccagatgggaaagctctctcaggaccctgaggctgttcatctgacacatcagtctcttcatcagagatcacaatagcttcaactttcacctggaccagctcagcttcagctggggctggagcctgggatggaactggagctttcatctccagcattatagattcaggcacatcatctccctctacttccttcctcaactccagcctcttcttccaatcttcctcattagggacaaccaccaccactttccgagagaaggtcttgaacagcaatagcttccgccgttggccagaattgtacacattacacgaacgcgaagaagtggagatgattcggccacctctggtgtagcaggaaatggtgaccaagaacatgcccaaatcttgattcacaggggactctggcagctcaagctctaaggtaacacgatacggctgtccatacatcagcacattattaatcaagcactgacagtgctcagtctccccagccagctctggcacagtcat

SEQ ID NO: 6625 - DNA, 810 bp, Homo sapiens
  SIMILAR (629)..(306): 451254mologous to Homo sapiens Human secreted protein, SEQ ID NO: 8010,accession number AAG03929,Smith-Waterman Score=149.
ttttttttttttttttttcaaagggctagggctttattacaaatggagttgactgctaaagagacccttctccaatctttcttttgtaccttcttccctcccaaagacatccctctagggcgcggtcagtaggccattagggtaggaggaaatctggagagtgaaaaggggccttgcttttgtcaaagtcctcttgaaacaaccactgagtctgaaggctggcctccaagttgagaatcttctagtggaagaggtttagctcttcaatctttcaagggtccttcaattttctaacatccctggggggggcttttgtctttctttttgccctttttgaagctgtggttcaactaagtccctgggctggcctttgaagggggcttccactttccatgggctgtcttctcttttctgggcaaagccggaatctgcttggaaggagttttctgcgcttcttcccttgacagtgtaaatgttggcacgtgcactggacgcccgcttcttgaggtggtgccggcgtgatcagcccttggtctatcacagcccctgaccacccggtgcctcagacgccgctcccgattcaacacccgccggcgtttgaacagcttcttcttcagctcctgccggggagaaagatgcgaatcagatggagtgggctcgccgcgaccccgggcccctccaccaggcagccccggcccctcactgatcccatctcgtgcgagataaaagggctcaggaacgcttgaggaaaacaagtcgcggccccccacacagtcaccgttcggggccggttgatctttccccccggag

SEQ ID NO: 6626 - DNA, 411 bp, Homo sapiens
  SIMILAR (259)..(408): 741254mologous to Homo sapiens Similar to RIKEN cDNA 2210016F16 gene,accession number BC004407,Smith-Waterman Score=174.
tcctgtgcgccgccgtcaacagagccctcgacgaagggataccattaactagtgccttgtactacgcgacagtgaccctggatcaggttcggaatatacttcgttctgacacagacgtttccatgcctttagtagaagagaggcatcggatgctctatgataccggaaaaattctgctggagaagtttggaggctgttttctcaactgcgtccgagaaagtgagaatagtgcgcagaagttaatgcactcgtggggctgaaagttgtccttcttacagagatgtgactctagttgaggggaaaagagcttctttttacaaacgaacccaaatccttgtatcatatacgtgcattgtattggaaggcaaatgagatgcgtgcttgcaggacatcctcagtatcaccatgtta

SEQ ID NO: 6627 - DNA, 518 bp, Homo sapiens
agcaggcgggcctggactgccgtgtgtgccccacctgccagcaggtgctcgcgcatggcgatgccagcagccaccaggcgctgcatgctgcccgggacgacgacttcccctccctgcaagccatcgccaggatcatcacgtagctcccgccagcgtggccagagctgtcgcaccgtgagcgtccttcctccttcctctccgggctgccaggcagccaggtaaggcctgatttgggccctcccaaagctgagggctgcagcccgtggggcctcagagctgaaagctgcggcgccactggtgccagagtcagatgtcacagatgtgttgtgtaaacagttggctgtttcatgcttcaagaatgttcaggattaaaagcagacaagaaattgtgctacttgaagttgaatctttttatgagacaagctgaatctgggatctcaaattgcctctgaccttttataagacagtttatcttcaaataaatttattttgccataccccgaaaaaaaaaaaaaaaa

SEQ ID NO: 6628 - DNA, 1211 bp, Homo sapiens
  SIMILAR (1012)..(1128): 531254mologous to Homo sapiens Human secreted protein, SEQ ID NO: 6613,accession number AAG02532,Smith-Waterman Score=85.
attcaatagatgcactattcttgtttttactgcatgaacgtaatccagtatttggaaagtaatccagtttgaaatgtgaagatgtattccggcagaatagtgagtagaatgacatgcttactatacagaaggcaaaaataggactctcaggtaatagtttaaggaaacccttgattccttatatatgtttaagaaggttagttttctgtttctttgcagtttttcttctagagtccatagcaggaaagtatgtaaccagaattggttagtgtgaccccctcaagtagcaagtgatggaaaataagagtcaaataccttgatgtttgtgatctctaactcaaaaaatttgaagtgttttaagttgtttctgggtaagggagatgttaggagaaaggaaatgctgtaactaaagctcaattattatcagttctatgctaacgtatacattttaatcatagttacctaaggcagcatgcatttaattggaacctttaaaatgttccccactgcggctggggcctaaaacaaacttttttgaaaagctgttttcttaaaagattccttaaattcagatatgacagctaaattacctcatcataaattacttttatactacatcgtttccaagggttttaagagtagcttgaatgtttatttcacaagggcacccttaaattctatagaaataaaacctcagatgagtctccctccctagagtgttacaatgaatgggagtttacaacttttatgtgtcatgtttcccaacagctgtgtttggggtggtcactggcaggaggggaccgtatctcagaatggcacattatttctattttacacatgagcaaattgaggcatagagagttagataacttgcccaggttacacagattgtaagttgatgaagctgggatttgaatcttcacatgtgtgtacttataaatacaaatgtaaggaaaactctagtgagtccacctcttatattgagttattactgtgtgagtgccaagtactgttttagatgctttacatatactattttgtttaatatcctttttaaagaataaactaggttggtgcagtgggctcacgcctgtaatcccgggactttgggaagctgaggcaggtggattgcttgagtctcaggagttcgggaccaggctggttaacatggcgaaaccctgtctttactaaaagtacaaaaaattagctgg

SEQ ID NO: 6629 - DNA, 1359 bp, Homo sapiens
  SIMILAR (26)..(208): 731254mologous to Homo sapiens FLJ00086 protein,accession number AK024487,Smith-Waterman Score=235.
gaagctggccctggaggccaggcagcccgcagtcagcgagggtcctctctgggtcttgtcctgccacccctcaggcttcagcgctgtggtgctcctgaagggcacgcctcccccacccccgccgggcctggtgcccccaatcaactggccgccccctggcttctctggccttgtgcctagcccccacccggcctgtgttacccagccccgccaccaccaccaccacaaaagcacccaggctgctgcctgccccacgggccttacctagtccccgagaacttccgggagaggaaccttcagctcatccagtccatcagggacttcctgcagagcgacgaggcccgcttcagcgagtttcaagagccactcaggggagttcagacagggcctgatctccgcagcccacatattacaagagttgccgggacctgctgggggagaatttccagaaggtctttaatggagctgctggtcctgctgcccgacacgggccaagcagcaggagctcctgtcttgcacacacgggacttctggcaaccgcgagaagcctctgagcaccaagtccaagaagaacaagaagagcgcgtggcaggccaccacccaagcaggcgggcctggactgccgtgtgtgccccaccctgccaagcaggtgctcgcgcatggcgatgccagcaagccaccaggcgctgcatgctgcccgggacgacgacttcccctccctgcaagccatcgccaggatcatcacgtagctcccgccagcgtggccagagctgtcgcaccgtgagcgtccttcctccttcctctccggggctgccaggcaccaaggtaaggccttggtgaggccacttggcctctttggtttggccaggcccaccagggaagtcaccaggacagtccacccgccctgttggcacactcaagcggggagtccaccccttgcctcaagtggtgggccagtctcggtttgcaattcttgtgctttttgggaggtgccaaggggagggaagggctgggatgcttgggacctgttgtttgctggcaaagccagaggtcacagtggcctgatctgggccctcaccaaagctgagggctgcagcccgtggggcctcagagttgaaagttgcggcgccactggtgccagagtcaaatgtcccaaatggtgtggtgtaaacagttggctgtttcatgcttcaagaatgttcaggattaaaagcagacaagaaattgtgatagcttgaagttgaatctttttatgagacaagctgaatctgggatctcaaattgcctctgaaccttttataagacagtttatcttcaaataaatttattttgcaatacccccgcaaaaaaaaaaaaaaa

SEQ ID NO: 6630 - DNA, 841 bp, Homo sapiens
ctaatgggggagatgctgattctgccctggcgtgaccatagatagctagaagctgaagtcattttgagtcgggagaatacagttgggggcactgccggaaaggatctttaagtcagagaatgccctagggcgtgatcatatcccacccggtggcccttgcccacagtcccctagtccacgagattgcaatccgatctgggaaggtccctgctcccttggtagaaggaggctctgggatgggagaagggagcttcttagcgatttgaaaattagcatcccttcagtagcgcaaaccttatggaagaaaccttggccttaaaccattctcagaggggagactggcaggaacaggcctgtttattcaggggaaagttggagaagggagggcgagtttagcagaaaagctcgagatgcctggataacaaaaagtttgcgctcatacttccttcgagggacaatttgctgaatatttacacacctttgcgtgctgcgaggtctttgttggctactgggatgcgagatgtgtatgatgtgaatgtgcaaatatgtttgcatgtgcgaaaagtggctgcacatttgtgggccggtgcagtaagtgtgtgtttgtgccggtgacagagagcacttggctgaatgtgtgcgtgggtgcgtaaggcattggtgcacacgggcgtgagtgcgcatgtgtatagtgtgtgcacgtgtcatgtgtagtgtctaagtgagtggggtgtgcatttgcaaaagtccgtgtgtattgtgcaagagcatcgtaaacgtgtgtgagcctgaactcacacgtggttttgtgtgcacgtgtgcgtatgaaattcagcaaaaa

SEQ ID NO: 6631 - DNA, 863 bp, Homo sapiens
  SIMILAR (790)..(858): 431254mologous to Homo sapiens putative p150,accession number U93574,Smith-Waterman Score=74.
ctagtcaagagggtggccctttttttccctcgcatgggtaatattttttccccagaaacaaacaacaatttgtgagccgcccctttttttttttttaaacaaagtctcattctgttgccctggcatgatctcagctcactgcaacctcctcctcctgggttcaagtgatcctcgtgcctcagcctcctgaagaagctggtattacagacgtgcaccaccatgcctgactaatttttgtatttttagtagagacaagttttcgctatgctggccagggctgacctcgaactcctaggcctcctcatatgatccacccacctcagtctcccaaagtgctggggattacaagcgtgagccaccttggcacagccaaattcaaggtcacttttaaaatacaaatttatttatatgtctaagggacattattcggtaaaggtggaaaacacaacccacagaatgggggaggaaaatattttggcaaaccatggtatctggataagggggtctagaatccagaatatataaagaactcttacaactcagtaataaaaagacaaacgcctaattaaaaagtggggccaaggctcagcacagacacttctccagggaacatacacatatgggccaacagcacccagcaaaggtgcttgatagcatcactcatcagagaaatgcaaatccaaatgacaccagaggctacttcacactcattagaatgattataaccagaaagtcagataataactagtgttggcaagaatgcgcagaaattggaaccctcttacttactggtgggaatgtgaaatggtgcatggacgtgggaaaatagtttggcagttcctcaaaaatatacagttaccatt

SEQ ID NO: 6632 - DNA, 357 bp, Homo sapiens
  SIMILAR (18)..(80): 611254mologous to Mus musculus reverse transcriptase,accession number U15647,Smith-Waterman Score=76.
attcaatcagtaatgagaacttcccaacaaaggaaagccaaggaccagaaactttcactggtgaattctaccagacatttatagattatcaccaatccttctcaaactcttccaaataactgattaagcaggaacacttcccagctcattctatgagatcagcattaccataataccaaagccagaataaaaatcacaagaaaattacagtgcaatgtatcttatgaatatagacacaaaaatctttcagtaaaatactagcaacccaaatctaaccatatattaacgtcattatacactatgaccaggtggggatttatcccagggaatgcaaagttcatttaacgtaataaatcg

SEQ ID NO: 6633 - DNA, 207 bp, Homo sapiens
cggccgcgtcgaccacacccacccggggctgccacgccccctctgtccacacagccccgacccacacagcgtatgtaatcacatagcgctgtgggggcatcgggcctcgcagacccctatgagaggattgtggtatcataggacggcaattcttcttccccaaatcatcagggagatggagcttcacagacctctggtgaacaaatt

SEQ ID NO: 6634 - DNA, 801 bp, Homo sapiens
  SIMILAR (605)..(700): 1001254mologous to Homo sapiens Human secreted protein SEQ ID NO: 90,accession number AAB27936,Smith-Waterman Score=170.
caaccccgtgacccctcttcaggcacccaccaccctgatggtgacagagggggacagccagcacccatctgtccccgtcagggctcttgttctcacagccccctggagcatgccccatgccccattcttgggcctggctcctggcccagatggcacctggcctcttgagtctgctgggggaccccaaagttggtggtcccatagcctgccctcctgggtctccacctcatgcctggacaggacgctgtggcctgtccgggccttggccagccctgcagctgcaccccgatcctcatccctcaccccattccctgccagcatcctaaggctcctggcgggcatcctctctgctcaaaattattgacctgtctcccggccacacctgctgtgccctctcagccaggccatcatcaccccctgttcattatgtcaggcctcatgggagcctggccttctccagaagctggccccggcgtcctcccaagctggaccacggctgaatgaggaacgcgccactggacacatgaggaagaggctgctctgggagctactgatgctgtgacctcacctctctggctttgggcggcaggtccctgcacctaggatgcctgcctggaaatgtccttgcattcgtggcctccttcacagcctcctcctcagagaagcctctgcaagtgcacagggagtgtgtgcagccttgtgaagggctgggaccacttgcccagactggggcccctcaggcacaggcgtggggtcctactgacctgtctccccagctcccacacagaaagcatctaaaat

SEQ ID NO: 6635 - DNA, 926 bp, Homo sapiens
cctcttcaggcacccgccaccctgatggtgacagagggggacagccagcacccatctgtccccgtcagggctcttgctctcacagccccctggagcatgccccatgccccaaccttgggcctggctcctggcccagatggcacctggcctcttgagtctgctgggggaccccaaagttggtggtcccatagcctgccctcctgggtctccacctcatgcctggacaggacgctgtggcctgtccgggccttggccagccctgcagctgcacccccgatcctcatccctcaccccattccctgccagcatcctaaggctcctggcgggcatcctctctgctcaaaattattgacctgtctcccggccacacctgctgtgccctctcagccaggccatcatcaccccctgttcattatgtcaggcctcatgggagcctggccttctccagaagctggccccggcgtcctcccaagctggaccacgtaggccccagatcacaacctgggggtccagatgtaggggtccccgtgtgcacgcccaaatccagaccgagcacttgtgacactaccccaacacctctcccagggctgaatgaggaacgcgccactggacacatgaggaagaggctgccctgggagctactgatgctgtgacctcacctctctggctttgggcggcaggtccctgcacctaggatgcctgcctggaaatgtccttgcattcgtggcctccttcacagcctcctcctcgagagaagcctctgcgaagtgcacagggagtgtgtgcagccttgtgaagggctgggaccactttgcccagactggggcccctcaggcacaaggcgtggggtcctactgacctgtctccccagctcccaccacagaaagcatctaaaataaacacacgtgggatggaaagcgttaaaa

SEQ ID NO: 6636 - DNA, 426 bp, Homo sapiens
  SIMILAR (134)..(256): 871254mologous to Mus musculus putative,accession number AK002535,Smith-Waterman Score=196.
agggtctccagcctcagggcctggcttctgttgggggcagcacctcactgccgtcctgttcctactcaccaggggctcttcagagcagcaggacacctgctcaaacccagggccctgctcatcacctacggggaacccagaatgggggcttcgggacacagccctcctggaggacctgggaaaggccagtggcctgctcctggagaggatggtggacatgccagccaacaacaaatgcctgatcttccggaaaaagtaagcccctccttcacccccgcacacctgcatccctgccggaggctctgtgaggcacgaaccctgcctccctaggccggaccttgtggacgacagccccacccagtctgtgctctcagccgctggccgaagggcccagcctgctcagaataaagcatgtcctgctgccgg

SEQ ID NO: 6637 - DNA, 753 bp, Homo sapiens
  SIMILAR (656)..(751): 811254mologous to Mus musculus putative,accession number AK002535,Smith-Waterman Score=146.
cccatcgagatcactagtcagtgtggtggaattcccagatttgcccccatcacagtcggggtgagggtctccagcctcccccatcacagtcggggtgagggtctccagcctcccccatcacagtcggggtgagggtctccagcctcccccatcacagtcggggtgagggtctccagcctcccccatcacagtcggggtgagggtctccagcctcagggcctggcttctgttgggggcagcacctcactgccgtcctgttcctactcaccaggggctcttcagagcagcaggacacctgctcaaacccagggccctgctcatcacctacggggtgagtgggcctgtccacggcgggcctcccgctcccagtcctagctgctgtctcctgccctgctgagagtcctccctcctgggctccctgcccccccgccagccaccagcacggtctgccctccacttccagtctgtacccctccctgggtcatctgccagcctccctacccccttgcccaccaggctggccttggctgactccctcttggggacagggagggggtgccctttcattctccaaaccccagcctgcaagtctgtcccaggctctctgagaaataccccgaccttggtccagtgggctgggtccccatgcccacaaccctatgccatcaatgggaagatctccccccagagcaacgtggactttgacctgatgctcaaatgcacgaacccagaatggcggctttgggacacaag

SEQ ID NO: 6638 - DNA, 750 bp, Homo sapiens
  SIMILAR (183)..(245): 801254mologous to Mus musculus putative,accession number AK002535,Smith-Waterman Score=90.
gcggccgcggagcggaacaaggatcccatcttgcacgtgctgcggcagtacctggatccggcccagcgtggcgtccgcgtcctcgaggtggcctcgggctccggccagcacgcagcgcacttcgcgcgggccttccccctggccgagtggcagccgtcggacgtggaccagcgctgcctggacaggggctcttcagagcagcaggacacctgctcaaacccagggccctgctcatcacctacgggggagggggtgccctttcattctccaaaccccagcctgcaagtctgtcccaggctcttctgggaaataccccgaccttggtccagtggggctgtgtccccatgcccacagccctatgccatcaatgggaagatctccccccagagcaaacgtggactttgacctgatgctcagatgcaggaacccagaaatgggggctttcgggacacagccctcctggaggacctgggaaaggccagtggcctgctcctggagaggatggtggacatgccagccaacaacaaatgcctgatcttccggaaaaactaagcccctccttcacccccgcacacctgcactccctgccggaggctctgtgaggcacgaaccctgcctccctaggccggaccttgtggacgacagccccacccagtctgtgctcgtcaccggcgtgcgcgaagggcccagcctgctcagaataaagcatgtcctgctgccggaaaaaaaaaaaaaaaacctgtgccgaat

SEQ ID NO: 6639 - DNA, 460 bp, Homo sapiens
tccgtaaagaagataaatattttttggaatcggcctgtgtcctctggggtgaagagccagcatagagggccccgagcgcccaccgtgccaacccatgccctcgtctgacctcgctccctttctccccatagaccagccccacccccttctgtgtcggtgggcttcaggccaaggggcaagagaggcacccagggagacaaggggaagtgtcttgggtacagggggccgcagcagttgtgaccacatggtaccccaggcccaacgcagggccgacgggcaagaggctgttatctgcaacctggcgcttgggggcctttgttgagtcctccatgggaatgtgatgtgtgagagaggagataggagatacaaaaacaaacgcccctgggatcggcggtccggacaggggcagggaaacaacacgccaaactgtgccctttcgtgtccatccgagaattacaga

SEQ ID NO: 6640 - DNA, 380 bp, Homo sapiens
  misc_feature (1)...(380): n = a,t,c or g
caggtgtgagcnnnnnnnnnnnnnnnnnnnnnnnnnnnnnnnnnnnnnnnnnnnnnnnnnnnnnnnnnnnnnnnnnnnnnnnnnnnnnnnnnnnnnnnnngggaaaaaaaattccaatgctatattttgcagaaatagaacaatgcatcttaaaattcgtataaaagatcttgaaaagcaaaataaattctgccaaagaacaacaaagctggaggactcaaatttcctgatttcaaaacttactacaaagctgcagcatcaaaacatcaagtcggtggcctgtggaaggaactgaggagcaccctccaagcccagcagacctgggtccccagggaggagctgaggagcacctctccatcctatcagacccaggtccagct

SEQ ID NO: 6641 - DNA, 397 bp, Homo sapiens
  misc_feature (1)...(397): n = a,t,c or g
nnnnnnnnnnnnnnnnnnnnnnnnnnnnnnnnnnnnnnnnnnnnnnnnnnnnnnnnnnnnnnnnnnnnnnnnnnnnnnnnnnnnnnnnnnnnnnnnnnnnnnnnnnnnnnnnnnnnnnnnnnnnnnnnnnnnnnnnnnnnnnnnnnnnnnnnnnnnnnnnnnnnnnnnnnnnngtcataattactttgagtaatctacagagtcagcataatctctatcaaaataccaacgacatttttcacagaaatagaaaaaacctataatttgggaggaatgacaatagaccttgaatacctaaagctatcctgagcttatagaacaaagttggagacatcccactgcctgactatgaataccacttaaatatgaattgattacactctccgcccatatatta

SEQ ID NO: 6642 - DNA, 345 bp, Homo sapiens
  misc_feature (1)...(345): n = a,t,c or g
caggtgtgagannnnnnnnnnnnnnnnnnnnnnnnnnnnnnnnnnnnnnnnnnnnnnnnnnnnnnnnnnnnnnnnnnnnnnnnnnnnnnnnnnnnnnnnngggaaaaaaaattccaatgctatattttgcagaaatagaaaaatgcatcttaaaattcgtataaaagatcttgaaaagcaaaataaattctgccaaagaacaacagagctggaggactcaaatttcctgatttcaaaacttactacaaagctgcagcatcaaaacatcaagtcggtggcctgtggaaggaactgaggagcaccctccaagcccagcagacctgggtccccagggaggagctgagg

SEQ ID NO: 6643 - DNA, 412 bp, Homo sapiens
  SIMILAR (163)..(411): 381254mologous to CONTAINS: REVERSE TRANSCRIPTASE ; ENDONUCLEASE,accession number RETROVIRUS-RELATED,Smith-Waterman Score=74.
  misc_feature (1)...(412): n = a,t,c or g
tttttttttaagacccaacagtatgctgcctacaagagtcacctcacttttaaggacacccatagactgaaagtgaaaagtttggaaaaagatactccatgcaaatagaaaccaaaagaaagcagggatagctaaacttatatcagacaaaatagactttaagtcaaaaactgtaaaaagagacattatataaatgataagagcatcaattcatccaaggaggnttattaacagttatatatggcacccaacattggaaacacctaaatacataaaatattgaaggatctgaagggagggataaattgcaatacaataatagtaggagactttaatactctacagataatccagacagaaaattaataaacattgggcttgaacaatactgtagaccaaatggacctaactg

SEQ ID NO: 6644 - DNA, 471 bp, Homo sapiens
  SIMILAR (154)..(285): 721254mologous to Homo sapiens Human secreted protein encoded by DNA clone vq3 1,accession number AAB34695,Smith-Waterman Score= 150.
tgagacggagtatcactctgtcgcccaggctggagtgcagtggcgcgatctcagctcactgcaagctccacctcctgggttcacgccattctcctgactcagcctcccaagtagcagggactacaggtgcctgccaccatgcctggctaattttttgtatttttagtagagactgggtttcaccgtgttagccaggatggtcttgatctcctgaccaagtgatccacccacctcagcctccgaaagtgctgggattacaggggtgagccactgcgcctggcctatttctttttcttaaagacaatttaaaaaaactatcaagtaccaatttgttgtaacaataaatttttgccatgttcctcctctgtgcaaaggcaccatgcttggctttacagtgactacaagatgggggagaaggtcttgccttccagaatgcaaatgactatgctaggggagagtatgaggtaaatg

SEQ ID NO: 6645 - DNA, 580 bp, Homo sapiens
  SIMILAR (133)..(510): 391254mologous to Rattus norvegicus open reading frame 2,accession number X61296,Smith-Waterman Score=158.
  misc_feature (1)...(580): n = a,t,c or g
cgccataggaaccgnccctgattgaccggncccatcacgcgtccggataattaggaggtatctgtcagcacatccctctgaaaccattctgagcttcagctcaagcttcgtgttgcttgaaaaatgaaatgtacagctgatctgagtttgttagaaaaagatacataaattaaacttgaagaaaatagatgacaggaaagaataatgctaagagcagaagtcaatgaaatagaaaacaaaatagagaacattaataaaactggaagnnnnnnnnnngaaaaatattataaaattgataaccccctaacaagatcgataaggaggaaggtgaacataaattaccagtttcagaaatgaaaaagggagtgtcactacaaatcctactgaaatcaaaaggacagtaaaggaatacattatgaaaaactttatgccaataaatttaacaacttagatgaaatgaaaaagtttcttaaacacaatttaccaaaattgacacaaaaaataaacagaaaatcagaatgttctnnnnnnnnnnnnnnnnnnnnnnnnnnnnnnnnnnnnnnnnnnnnnnnnnnnnnnn

SEQ ID NO: 6646 - DNA, 588 bp, Homo sapiens
  SIMILAR (233)..(307): 1001254mologous to Homo sapiens unnamed protein product,accession number AK023232,Smith-Waterman Score=130.
  misc_feature (1)...(588): n = a,t,c or g
tagggaggctgccatgcatgccctccttcatagtgagaagttccaggtttgaccataagcacctctcacttaggtggaccagtcagctgctgtcgtcccagggtggagcccactgctacttcaggaggggcctgctcaggtgtagttaccacaggtgatggctgagttcagaaacaacccaggggaagtggaaggaagaaaggcaaaaagcatgaagggacagacaactgggaagaaccaggacaatcctgtgattgatgaaatagacttccttgaagcttttaaaaatattcagccctcatcgttttcgaagcgtcattgggattaatgggtatcaagcctgttgactgggaggagattggtggccttgaagatgtaaaacntgaagttaaaacagcccattgtcacttcgtcagaagtcgggtcactgcccagttgcgcgagactcccaacgggccttcttgcgacgctcgggtctgggtccgggtccggacgtgcaacagaagccgtcagtggccccgctggctaaaaaagggcaagcatcggaggctcgagccagcggccgcggcgcttcccgacagttcctaa

SEQ ID NO: 6647 - DNA, 1300 bp, Homo sapiens
  SIMILAR (623)..(739): 611254mologous to Methanococcus jannaschii cell division control protein 48 (cdc48), AAA family,accession number U67557,Smith-Waterman Score=141.
  misc_feature (1)...(1300): n = a,t,c or g
ctgtagggaggctgccatgcatgccctccttcatagtgagaaggacaatcctgtgattgatgaaatagacttccttgaagcttttaaaaatattcagccctcatcgtttcgaagcgtcattggattaatggatatcaagcctgttgactgggaggagattggtggccttgaagatgtaaaactgaagttaaaacagagcatttgagtcgcctctgacattcccttgggaatttgttagaatgggcctgacacaaccaaagggagttctcctctatgggccccctggatgtgctaaaaccactctggtgagggccctggccacaagctgtcactgctctttcgtttcagtgagtggagctgatctgttttcaccggttgttggagattcagaaaaagtgttgtctcagatatttcgacaagcaagagcaagcactccagcaattttgtttttggatgaaattgattcaatcttgggagcctcgctcagcccagcaagacaggatgtgatgttcaagaacgagttctttctgttctcctgaatgaattatatggcgttggacttaagacaatagagagaagaggaagtaaatcaagtcaacaggagtttcaagaagtttttaaccgaagtgtcatgattattgcagcaacaaatagacctgatgtgttagatactgctttgttacgacctggaagattagataagatcatctatatcccacctccagatcacaagggccaggctttctatttataaacgtctgtacaaaaaaccatgcccaatagggcctgatgtctccttagaaaacctcgcagcagaaacctgttttttttctggagctgatcttagaaacctctgcacagaagctgctttgctggctctgcaagaaaattggactagaccgcaacttacagtgaaacaagagcacgtgttctaaaatcacttaagactgtaaaaccggtcggttaaagttgcaaggacttggctttatatgaaaacttatttaagaaagaaggattttctaaccgtggaaggtatttaaaaatcaccttaaactcttgttcagttcacattaattgaaatgtgaccttgcctgtcgtttgcaacttcacacttttagaatttgtgtttatatttcctgtaagtgaatnnnnnnnnnnnnnnnnnnnnnnnnnnnnttgtgcctgataagctaaggctcatttatttttaaaaggcatattaaataaaatactgtaatttaggnnnnnnnnnnnnnnnnnnnnnnnnnnnnnnnttaatnnnnnnnnnnnnnnnncaact

SEQ ID NO: 6648 - DNA, 2049 bp, Homo sapiens
  SIMILAR (529)..(1026): 481254mologous to Arabidopsis thaliana Putative membrane protein,accession number AC011001,Smith-Waterman Score=437.
atggctgcaaacaggaaggattttattcaccgtcgatgcggccccgagttgtcccaaagcgaggcagtgccccaaggtctatgcagagcagaacgcagctccgccctcgcaatgctctccgggtctgtgccgaggagaacgcagctccgcccttgcaaaggcacacagcgccggtgccggcgtggcggagaagcggacagcggcggagaggcggtcggcggcggcgcggcggagaggcggtcggcggcggcgcggcggagaggcggtcggcggcggggcggcggagaggcggtcggcggcggcgcggcggagaggcggtcggcggcggcgcggcggaggcgaggcgggcggcggcggcgcggcggaggcgaggcgggcggcggcggcgcggcggaggcgaggcgggcggcggcggcgaggcgggcggcggcggcgaggcgggcggcggcggcgcggcgggcggcggcggcgcggcgggcggcggcggcgcggcggatagcggagagcggcggagaggcgcacagccgcggagaggcgcacagcggcggagaggcgcacagcggcggcgcaggcgcggagaggcgcaggcccaggctccactccccagctctgaaaactcatcctggtcagagttcagaaggacatgtggagtataagctgaatcacgtagaatttgaagatcaagatgatgaagccagagttcagtatgagggttttcgacctgggatgtatgtccgcgttgagattgaaaatgttccctgtgaatttgtgcagaactttgaccccctttaccccattatcctgggtggcttgggcaacagtgagggaaatgttggacatgtgcagatgcgtctgaagaaacatctctggtataagaaaatcctcaagtcccaagatccaatcatattttctgtagggtggaggaggtttcagaccatcctgctctattatatcgaagaccacaatggaagacaaaggcttctaaagtatacgccacagcatatccattgtggagccgccttttgggatattgtcttcatgcgaacttggtatcctgtttccatcccagccttctataacccagtaacatctttgttgaaaccagtgggtgagaaagacacctggtcaggaatgtggaccacgggccaactcaggctcgcccatggtgtcagactaaagacaaacaaggactctctgtataagtggtgggacacagcagcatctcagtctctgaaaggccaggcacagcatcagcaaggaccccagaatggtggagcactactgtggcttgagccctcgggggcagggaccagtacagcaactacttctctccctggggaggcagatatttccttttccaccatagtcctcaaagcactccaaatgtccaattgcaaatcctacaaaaagagtgtttcaaaactgctcaatcgaaggactcaaagggctcctaatgtgcacttgcagattctacaaaaagagtgtttaaacctgctcaatcaaaagaaatgttcaacccggcctcaaagcgaacaaaatgtccgcttgcagattctacaaaaagagtgtttccaaactgctcaaccaaaaggcaggagtgtgtgcttcttcccagcaaaggcagaggcagggcctacagaaactgtgcccgcagcctatagtgatggggtctatgaggtaattcaggcagatgaggcagacatttcttctgcctccaggatggaggtagagaatcttggccttggaccacgcactgtggaccatgctgggctgccgtggacagtgacggactcatgttctcaccaggatccccaaaataggcccctgaaaaaaatgttaccatcagggcaagttgctttggcagatatcattctcattaataaaacagacttggttccagaagaagatgtaaagaaattaagaacgacaattaggagccgctcatctgctggcagaggtagccgaagaatgccctttagtgtaagtcctctacaaccatacaccaaatgtgctccctgcatttcaaattccattgtagaaagtctctga

SEQ ID NO: 6649 - DNA, 4342 bp, Homo sapiens
  SIMILAR (3596)..(4309): 431254mologous to Arabidopsis thaliana Putative membrane protein,accession number AC011001,Smith-Waterman Score=475.
atgagtgctttcgaatcagtgccagatgatgaagaagtggatgtagacgcagtaccagaaaataagttgacattcgacaatctggcagaggggttccgattattcaagactgcttgtgacttcttgtaccatatggacctttctatgaatgaagatatagagaaagaagttaaggaagaaattgaccccgacgaagaagaaagccccaagaaaaagcatttggataagaagagaaaattgaaggagatgtttgatgcagaatatgatgaaggagaaagcacatattttgatgatcttaaaggagaaatgcagaaacaagcacagtgcctaggagggagaagcagtgtgagcatgcaggcacacaggaggccagttgtacatggaggcgacagttgttcagatcctgctgccatgttaactacggtgaaggcagagttcaccactggaggagtccttcagcgtggaggccttcagcaatcttggcaagcaccaattttcatggatgtaggagaatgggagcagaggaactggaggctcaactgcagaaaacttttgtggggttttgctgcagagagaagcagagaaatgaagccgttgttggtggaagaagtggaatcaaaaggttttgagataagagagagaacagagggaagagctgttggaataaagtccaggaagagtggatggtgtctagggtgccccaggaggacagaaaaccaacctgcttgcctgcagtcagacctaaactcagacccaagagcacttgtgattagaaccagtacaaaggtaaaagaaacgctttcactggaagaagggactgtgaagaatacggattactctgaactagggcacatgggcagggagcagtggtctagtgagcagcccctggagcagacacttcaagactatacaaagagatacacgcagcaacattatacagaaatagatcaagatggagggactcaggatttgaagacaaaaaagcatcatattccagtggttgatcgaactccactagagcccccaccaatagtggtagtggtgatgggacctccaaaagttggaaagagcactttgatacaatgcctcattcggaactttacccggcagaagttgactgagatcagaggccctgtgacgattgtgtcaggtaaaaagcgcagactcaccattattgaatgtgggtgtgacattaacatgatgattgatctggctaaagtagcagatctggtactgatgcttatagatgccagctttgggtttgaaatggaaacgtttgagtttctaaacatctgtcaagtacatggctttcctaaaattatgggagttctcacccacctcgactccttcaagcataataagcaactgaagaagacaaagaagcgattaaaacacaggttctggacggaagtttacccgggtgccaagctgttctacctttctggaatggtgcatggagaatatcaaaaccaagaaatccacaatctgggccgttttattacagttatgaagtttaggcctctcacatggcaaacttctcacccttatatcctggcagacaggatggaagatttgacaaacccagaggatatccgaacaaacatcaaatgtgaccggaaggtgtcactttatggttatttaagaggagcacacttgaaaaataaaagccaaattcacatgccaggggtaggagattttgccgtgagtgacatcagtttcctcccagacccttgcgctcttcctgaacaacaaaagaagcgctgtttaaatgagaaggagaagctggtttatgcgcctctttctggagttgggggtgtgctgtatgacaaagacgctgtctatgttgaccttggtggcagccacgtttttcaggtatcggatgaagtggggcccacccatgagctggtccagagtctcatctctacccactccaccattgatgccaagatggcttcaagtcgagtgacgctgttttctgattccaagccacttgggtcagaggatatagataatcaagggctaatgatgccaaaggaggaaaaacaaatggacttgaacactggtcgaatgcgtcggaaagccattttcggagatgaagatgaatctggagatagtgatgatgaagaagatgatgaaatgtctgaagatgacgggttggaaaacggctctagtgatgaggaagcagaagaggaggaaaatgctgagatgactgatcagtatatggctgttaagggcatcaaacgacggaaacttgagttggaagaagacagtgaaatggatttgccagcatttgctgacagtgacgatgaccttgagaggagctcagcggaagaaggggaagcggaggaagctgatgaaagcagtgaagaagaggactgcactgcaggagagaagggcatttcaggatcaaaggctgctggagaaggtagtaaagcagggctgtcaccagctaattgccagagtgaccgtgtgaatctggagaagtctttgctgatgaagaaagcagctctccccactttcgattctgggcattgcacagctgaagaggtgtttgcatctgaagatgaatctgaagaaagctcctcactcagtgcagaggaagaagactcagaaaatgaagaggctattagaaaaaagctttcaaagccttctcaagtgagcagtggtcagaaactggggccacagaacttcattgatgagaccagtgatatagaaaatttactcaaagaggaagaagattacaaggaagaaaataatgattccaaagaaacgtcaggtgccctcaagtggaaggaagacctttccagaaaggcagctgaggcctttctgaggcagcagcaagcagctccaaacctccgaaagcttatttatgggacagtgacagaagataatgaagaagaagatgatgatactctagaagagcttggagggttgtttcgtgtcaaccagcctgacagagagtgtaagcacaaggctgactctttggactgctccagatttcttgtggaggccccccatgactgggatttagaggaggttatgaacagtatcagagattgcttcgtgactggaaagtgggaagatgataaagatgcagccaaggtcttagcagaagatgaggagctctacggtgactttgaagacttggaaacaggggacgtgcacaagggaaaatcaggccccaatactcagaatgaagatatagagaaagaagttaaggaagaaattgaccccgacgaagaagaaagtgccaagaaaaagcatttggataagaagagaaaattgaaggagatgtttgatgcagaatatgatgaaggagaaagcacatatttttgatgatcttaaaggagaaatgcagaaacaagcacagctgagtcgcgcagaatttgaacatcaagatgatgaagccagagtgcagtatgagggttgtcgaccagggatgtacgtccgcattgagatcgaaaatgttccctgtgaatttgtgcagaactttgacccccattaccccattatcctgggtggcttgggcaacagtgagggaaatgttggctacgtgcagatgcgtctgaagaaacatcgctggtataagaaaatcctcaagtcccgagatccaatcatattttctggaatgtttaattctgccttggaagtggccaaatttgaaggtgctgtgattcgaacagtcagtgggataagggggcagatcaagaaagcactccgagctccagaaggagctttcagggccagctttgaggataagctgctgatgagcgatattgtcttcatgcgaacttggtatcctgtttccatcccagcgttctataacccagtaacatctttgttgaaaccagtgggtgagaaagacacctggtcaggaatgcggaccacgggccaactcaggctcgcccatggcgtcagactaaaggcgaacaaggactctctgtataagccaatcctgaggcaaaagaaacattttaattcactgcacattccaaaagccttgcagaaggccctgccatttaagaacaagcccaagacccaagcaaaggcaggcaaggtgccaaaggacaggcggagaccggccgtcatacgcgagcctcatgaaagaaagatccttgcactgctggatgctctgagtacggtgcatagtcagaagatgaagaaggccaaggagcagcggcacctgcacaataaagagcacttcagagccaagcagaaggaggaggaggagaagctgaagcggcagaaggacctcaggaagaagctcttcagaattcaggggcagaaggaaagaagaaaccagaagtccagtttgaagggggctgagggccaattgcagtga

SEQ ID NO: 6650 - DNA, 539 bp, Homo sapiens
ggccgccctttttttttttttttttcccgtgaagaagataaatatattttggaagctgcctgtgtcctctggggtgaaaagccagcatagagggccccaaacgcccaccctgccaacccatgccctcctctgacctcgctccctttctccccatagacccgccccacccccttctgtgtcgctgggcttcaggacaaggggcaagagaggcaaccaggggagacaaggggaagtgtcttgggggacagggggcccacagcagttgtggccacatggtaccccagggccgacgcagggccgacgggcaagaggctgttatctccagcctggcgcttccgggcctttcttgaggccaccatgggaatgtgatgtgtgagagaggggctaggagagacagagacacacgcacctgggatcggcggtccggacaggggcagggaaaccacacgccctactttgccctttcctgtccatcccagacctactcagatccctcagtgcaaaagaaaacagaacagtgaggactgggggttagggga

SEQ ID NO: 6651 - DNA, 1373 bp, Homo sapiens
  SIMILAR (314)..(604): 381254mologous to Arabidopsis thaliana Putative membrane protein,accession number AC011001,Smith-Waterman Score=151.
ccactccccagctgtgaaaggaggagctctacggtgactttgaaaacttgcaaacaggggacgtgcactagggaaaatttggccccgattctcttaatgaagatgtacagaatccaggaagaaattgaccctgaccgaagaagaaagtgccaagaaaaagcatttggataagaagagaaaattgaaggagatgtttgatgcagaatatgatgaaggagaaagcacatattttgatgatcttaaaggagaaatgcagaaaagaagcacaggtaaacagcatacaaggtttcccccccgcgcaccacgtcatgtacagctgaatcatgcagaatttgaagatcaagatgatgaagccagagttcagtatgagggttttcgacctgggatgtacgtctgcgttgagattgaaaatgttccctgtgaatttgtgtagaacctttgacccccgttaccccattatcctgggtggcttgggcaacagcgaagggaaatgttgaacacgtgcagatgcgtctgaagaagcatcgctggtataagaaaatccctcaagtcccaagatccattcatatcttctgtaggtggaaggaggtttcagaccattcctactctattatattgaagaccacaatggaagacaaaggcttctaaagtataccccacagcacatgcattgtggagcagcccttttggggtaaaatatgattacaataacttgcctattgccgagattaaactttacaggctgcgttactatagctttgtgcttttcctttcataaaattccactcctaagatttttctcttttctgggagcagggaggtggtttggagtatatacgtaaatctatatccaaatctaaatgcccggaatccagtatgttaaactagaatctaaaatttctggtttgctatatttctttttttccttttcctttaagaccctatcactccacagggaactggtttcttggcaatacagtctgtcagtggcataatggtaactatcttggacaatttcttttacagattggttttgagaaatatatcctgaatgtggattactatgtacatgagactttaagttgaaaattactcatttttattaatataaagtaaatttccctttgcttttaatcttcgtacatccttttcagtagggtgtgggattagaggaggggaggtggaagaattataatggtacatttcctatttttgtgcatcttttgcatttatttatctaagcaagtacttaagcagtgctcaccatgtgctaagcactgtatgaggttgtgaggagccatcagagaccacccagacacaagactccctgcagctgtgcgtgggtagcagtctgttcactccattttcatttg

SEQ ID NO: 6652 - DNA, 432 bp, Homo sapiens
  SIMILAR (145)..(201): 841254mologous to Homo sapiens Human secreted protein, SEQ ID NO: 7870,accession number AAG03789,Smith-Waterman Score=78.
  misc_feature (1)...(432): n = a,t,c or g
cggacgcgtggggtaacattttctttattcagtcttccattgatggatacttaggttgattccgtatctttgctattgtgaatagcgctgtgataaacatatgagagcgagtattttcttcttcttctttttttattttttcggagacagagtctcgctctgttgcccagactggagtgcagtgtcaaaatcatagctcactcatagtaacgtcaaactactggactcgagtgatcttcctgactcagcttctcgagtggctggaattgcaggggcgtgccaccaagcccaactaatttttatttttatttttgtagagatggggtcttgcttgagttcctttctctcagtaggtttaaatcaattgttttgatttaaaacaacaacagattggaccttaatgtttggtctcaaagtaaatgaaaggtttgn

SEQ ID NO: 6653 - DNA, 464 bp, Homo sapiens
  SIMILAR (22)..(201): 611254mologous to Homo sapiens PRO2550,accession number AF130089,Smith-Waterman Score=170.
ctggtttttttttcttggtgtttgtttgtttgtctgtttgttttaaagactgagtctcactctatcgcccaggctggagtgcagtgacgtgatctcagctcactgcaacctcctcctcctgggttcaaccgattctcctgcctcagcttgctgagtagctgggattacaggcgtgcgcaactatgcccaactaattttattgttggccagctggtctcaaactcttgacctcaggtgatccgcctgcctcagcctccccaagtgttgggattacaggcgtgagccactgtgcccagccaagaattgtttcttttactagcaatattatcctcaaattcaaaaacagtttaagcaagggatgtttgatagaagcatactttgataagacagtgaaagccacagtgcttgaatatcttgccctaagaaatcccaaaccagaagaacacatctggggatttttatat

SEQ ID NO: 6654 - DNA, 652 bp, Homo sapiens
gcggggagggtttaaaggtggctgccagcagggtcagcagcgttctttcagggccctctcacccacagagcggcccgaaaggtccacagttcagtttctcttttttgtttggcccttcaggggttccagggtgggtaggtggggcaaccaatttcagattttttactgggacattcatgacagaatcgagatgtgcatccagctgcatcgcccaacccatccgctgcccagggcagctgacgagcaaaaacacactctgcaggggcccttgtccgtgccggggccctcgcccgcagcaccgcacgttctttgtaggagcaaaacccgaaactcaaagcacagcttgccctgataactgtcttcccagctgggcagccctctagaagatgtgggaaatgacaccctcctgtccagacacaagccacagtcacccccctcccgagggcgtccacggcctgaggggacccggctccatttcagcagagccgcagcggctcaggtcctctcggcaacccacgatcacggcccacgtggtcctgcccatgcccccgctgcccacgccccctgctgcccacgcatgccccccgctgcccacgcatgcccggggaacgagcagcaagcaggcagaaccaccacccagcgcctgctcccc

SEQ ID NO: 6655 - DNA, 480 bp, Homo sapiens
  misc_feature (1)...(480): n = a,t,c or g
cggcgtttgaacaacttcgatgacttctggannnacnnaanannngggnggancaacgcgtccgaccgagcacttgaagcttagctcggctgtttctccgggtttttgtcgatggcctccatctgcgccgaaagctgaactgagccccgcggtgccccggagccacagcagcaggtgcagcgacaatcgccgtcgtgcgcagtcgctggagtcctggagagccacgctgtcctctgcagacaacagcatcagtccgctgtgccccaatgcatcgacgccctgtggacggggcctgcagtccacccgtggtctgagcttgccgggctgcagctcggctgggacccagggaggggccaccctgggacccacagtctcctcagtcacgtgcagagcaaaaaatgcttcctgtgtttggaagagcaagtgacgcaccatttattgataaaaaaggatttttctgtctgatttcatgctgcggcg

SEQ ID NO: 6656 - DNA, 2253 bp, Homo sapiens
  SIMILAR (983)..(1996): 311254mologous to Homo sapiens alpha-1 (III) collagen,accession number X15332,Smith-Waterman Score=145.
tttcaggtgatgggtggtgttttttactttttaaaaaaagccacaattggattttgaaaaacacagacaatggagggctgggccaaccatgaggagtgcaaagggtggcaccggccagtgcccctggacacccggcttgtctggcccctgctccctgtgcttcctggacaccaaacagcatccaccgaggctgggtgaaggcaaaagtgtttattcaagactttctaccacactgtgggaagcatcgataaacagtcataataattatcaattctgagtcactgcaagcgtggggttggatgctggctcttcacagtagccctgggttgggaccatgagcagccatgcgcaccgtccacgcacggccgagctcaacccgaagaccacgcgtgctccctggcaggagcaggaggcctgcacacaaacgctagcagctccccagcctgagcctggggagtgcaccagccaagctcgcagcggagggcccgtttctcctcacaaggctgggagtgaagctcaagagtcctaagaaggttcagaggaccctcaagactaagagctgcaacaagaacggacagccaagaacattcttgggaaacgattgccacagtgaatcattttatactgtcactcacacttgggtgaagggcctcagacatgaaaccctggggagaggcgagtgtgacctccagagtttgggttgggatgcggctgagacagactctgctgctggccgaggagggcagtggctggcgtggccctcatggccagcaggtgctagtactcctctggaggcccaggcgcctgtctaagctggcggctgtggaccacctgcagagctccccccgcagcctggcggagctgggcatccagggcgccaccggaggtggttcacttggacatcaggcagggggttaaggccaatgatgaccccatccctcggggccagcatgaccctctgcatgagggccaaggtcccgccgtcgcctccggaggtcggagccagcctgcagtttcaggtcccggttgggcttggcattgtccggcctctggccccccgggaacaagctcgtttgagccccagctctggctctggcctctgcctgggctccctggacagcagcgtcctccccgcctctcggctgctcgtgggccacaggcacatggtcccccccgcgggcctttctcatctccaggtgaccgccatggtccagccggtggccctgctgtccaccctgctcgccatcagagatgacccgcagttccggctggcgtaacacagcctggggctgtgcagctgctccttccgccccaccgggcaggtccgctgcaaggcccaggtctcggctcacttgcttgggcttcatgcgagggtcccccgtctctgctcctggccctgccacgagccagttggcttcaaacagaaaactggtgccagtggctgccacctccttcccaggttgtttcctgtcttgggaaccgccagtaacgtcctgactttgcccagggaattcctctgcgaggcgctcctctgggcccccggcttccctggcggggtctggcacgggcacctgctccgggcccttggggagctccttcacagtgccagctgccctgggggcggcatccttctggccatctctcagcttgccctgggctgcccgaggctctgtgtcagggccgccgtcaggagggccagcagggtctccgcccacaggcccctcagagtgctccagggagcgctggttaaggtcctgggatggcgcagggcggcccccaggagctctgaggacagggtccaaaggcaggggaggcagattctccaccgtctccctggccttgccttcaggggcctcctggcctctgggcaccgctgccccgggctcttgatgcacctccacctgcctgggtttatcctcctcgtcctcctgcctctgctggtggatctccttgtgctgctcctcgatcaccgccagcagcttctcctgctggtccagcaagcggctttttgctgcacctgcttgttctttgatcaccttgaagcaggacggcggtggtcccagcatctccggccctgccagcttcctccagctggcttggccgcctggtttccacccggctcggctccacggtccctctgctcgcgaggctcgggcgggcagcccaggccctggagccggcttctccgctgggaggggaggcttcccaccgtggtcgctgtcctctgcgggctgccctgtgtccccggcggcg

SEQ ID NO: 6657 - DNA, 412 bp, Homo sapiens
  misc_feature (1)...(412): n = a,t,c or g
nccgccacttgtgcttcaggtccacaacgtcgcggcgacagtagcccagcgcattcncggcctgcaggatgcggctccacacgcggtacctgcgagtgggctcggccttcagcagccccgtgccaaacagcagctggtggtgcttgctcaccttggacaccagcacctcggtctcctgcgggcagaagttgggcttcctcttcttggcccgggtagtgctgggccccgccatccggccatggggcccagcagccgagtccttcctcgggccaatggtgggtgatgaggtgggctccggcatccggctgccttcaggggcaaccccaggccctcgcttcctggcccttgggacaataggcgtgcctgctggccccagatcaccttccccgtccttccccacacagcggttctg

SEQ ID NO: 6658 - DNA, 2015 bp, Homo sapiens
  SIMILAR (1)..(1938): 931254mologous to Homo sapiens dJ202O8.1 (novel rat Espin LIKE protein containing Ank repeats),accession number AL031848,Smith-Waterman Score=3224.
gacaaagacaattctggtcccacagtcttgcatctgactgcccgctttggccaccccaaggtggtgaactggctcttgcatcatggcggtggggatcccaccgcggccacagacatgggcgccctgcctatccactacgctgcagccaaaggagacttcccctccctgaggcttctcgtcaggcactaccctgagggagtgaatgcccaaaccaagaacggtgccacgcccctgtacctggcgtgccaggagggccacctggaggtgacgcagtacctggtgcaggaatgcggcgcggacccgcacgcgcgcgcccacgacggcatgaccccactgcacgccgcggcgcagatgggccacagcccggtcatcgtgtggttggtgagctgcaccgacgtgagcctgtcggagcaggacaaagacggcgccaccgccacgcacttcgcggcgagccgcggccacagcaaggtgctcagctggctgctgctgcacggcggggagatctcggctgacctgtggggcgggaccgcgctgtacgacgccgccgagaacggggagctagagtgctgccagatcctggtagtgaacggcgcggagctggaagtccgcgaccgcgacgggtacgcggccgctgacctgtcggacttcaacggccacagccactgcacccactgcctgcgcacggtggagaacctgagcatggagcactgcgtgctctcccgggatccatccgtggagctggaggcgaagcagccggattcaggcatgtcctcacccaacaccacggtgtcggtccagcctctgaactttgacctcagctcgcccaccagcaccctctccaactacgactcctgctcctccagccactccagcatcaagggccagcaccctccacgtgggctttccagcactagagctgcagacatacagagctacatggacatgctgaacccagagctgggcctgccttggggcacgattgggaagcccatacccccaccacccccacccagcttccccccgccacccccgcccccaggcacccaactgcccccacccccacctagctacccatctcccaagcctcctgtgggaccacaggcagctgacatctacatgcagaccaagaacaaactccgccacgtggagacagaggccctcaagaaggagccgagctcctgcgacggccacgacgggctacggaggcaggactccagccgcaagccccgcgctttcagcaagcagcccagcacgggggactactaccggcagctgggccgctgccccggcgagacgctggtcgcacgcccgggcatggcgcaccgcgaggaggcggaactccctgggaaccacgtgcctaacggctgcgccgcggaccccaaggcgtccagggagcagcagctgccgccgccgccgccgccgccgcccctgcccgaggccgcgagttcgccgccgccggtcccgcctctgcccctcgagggcgctggccctggctgcgggcagcgccgctcctcctcgcccaccggcagcaccaagtctttcaacgtgatgttcccgatgggcgacaactcggagctactggctgagattaaggcaggcaagagcctgaagccgacgccacagagcaaggggctgaccacagtgttctcaggcagcaggcagccggccttccagcccgattggccgctgccgtctgtgtcacctgcactgttaccagtccggagccccacaccgccagctgcggggtttcagccgctgctcaacggaagcttggttccggtgccgcccactactcctgcgccgggggtgcagctggacgtggaggcgctcatccccacgcacgatgagcagggccgtcccaagcccgagtggaagcgccaggtgatggtgggcaagatgcagctgaagatggaggaggaggaggagcagaggtggaaagaggaggaggaggcccggctggccagcatgcccgcctggaggtgggacctcctgcggaagaagctggaagaagagag

SEQ ID NO: 6659 - DNA, 4758 bp, Homo sapiens
  SIMILAR (891)..(3335): 581254mologous to Homo sapiens dJ1182A14.1 (similar to rat Espin),accession number AL137798,Smith-Waterman Score=2197.
ctgtgcagaccatgacaactagtttagattttattgtcagctcattaaaaactcgttctcgttttgtgtttttaaaaaattccactgatacagccgttttctctaccgaaaaagactataaccgcattatttcaccagtggaagctacagacaaagggcccttgagaggcggcatcttcacctacgggaatttttcctgttgacagacattgccagacacacggaatccctcgcagaacaccgatgggcccacaaagcacgcggaggccgcggccgctgacgatgtgagcaaattcggttcacggtgtctggggtatcttattgcagtggtgaccgcattgccttcaaacctgaagtccgagtgcttccaccctggggaatatgcagaccgctgggtcactggaccactccttcaggcattccctgagcccctgggagtcagggctgtggccctgggcctggagccagtctcctgcctcctcccacaggacaaagacaattctggtcccacagtcttgcatctgactgcccgctttggccaccccaaggtggtgaactggctcttgcatcatggcggtggggatcccaccgcggccacagacatgggcgccctgcctatccactacgctgcagccaaaggagacttcccctccctgaggcttctcgtcaggtgtctccgcaggggagtgaatgcccaaaccaagaacggtgccacgcccctgtacctggcgtgccaggagggccacctggaggtgacgcagtacctggtgcaggaatgcggcgcggacccgcacgcgcgcgcccacgacggcatgaccccactgcacgccgcggcgcagatgggccacagcccggtcactcccgcccaggtgagctgcaccgacgtgagcctgtcggagcaggacaaagacggcgccaccgccacgcacttcgcggcgagccgcggccacagcaaggtgctcagctggctgctgctgcacggcggggagatctcggctgacctgtggggcgggaccgcgctgtacgacgccgccgagaacgtgcccccacagtgctgccagatcctggtagtgaacggcgcggagctggaagtccgcgaccgcgacgggtacgcggccgctgacctgtcggacttcaacggccacagccactgcacccactgcctgcgcacgggtccctgccagcacagggggatggtcctggctctgggggctgcagaacacagcaaggcccagaggccagaggctgcaggtgggcctgagggtgaacttccccccgagaaagagtctctggaagagaatgaagctgcctacaggggtcagggcttggtgccctcagcacccactgctccccttcagagcatggagcactgcgtgctctcccgggatccatccgtggagctggaggcgaagcagccggattcaggcatgtcctcacccaacaccacggtgtcggtccagcctctgaactttgacctcagctcgcccaccagcaccctctccaactacgactcctgctcctccagccactccagcatcaagggccagcatgcctccccagggctttccagcactagagctgcagacatacagagctacatggacatgctgaacccagagctgggcctgccttggggcacgattgggaagcccatacccccaccacccccacccagcttccccccgccacccccgcccccaggcacccaactgcccccacccccacctagctacccatctcccaagcctcctgtgggaccacaggcagctgacatctacatgcagaccaagaacaaactccgccacgtggagacagaggccctcttcccgcagccgagctcctgcgacggccacgacgggctacggaggcaggactccagccgcaagccccgcgctttcagcaagcagcccagcacgggggactactaccggcagctgggccgctgccccggcgagacgctggtcgcacgcccgggcatggcgccatccccgcaggcggaactccctgggaaccacgtgcctaacggctgcgccgcggaccccaaggcgtccagggagcagcagctgccgccgccgccgccgccgccgcccctgcccgaggccgcgagttcgccgccgccggtcccgcctctgcccctcgagggcgctggccctggctgcgggcagcgccgctcctcctccctctgcataggcaccaagtctttcaacgtgatgttcccgatgggcgacaactcggagctactggctgagattaaggcaggcaagagcctgaagccgacgccacagagcaaggggctgaccacagtgttctcaggcagcaggcagctctccctgcagcccgattggccgctgccgtctgtgtcacctgcactgttaccagtccggagccccacaccgccagctgcggggtttcagccgctgctcaacggaagcttggttccggtgccgcccactactcctgcgccgggggtgcagctggacgtggaggcgctcatccccacgcacgatgagcagggccgtcccaagcccgagtggaagcgccaggtgatggtgggcaagatgcagctgaagatggaggaggaggaggagcccccgccttagctgacggccgccagctcgtgctgctacccccgcgagggctggaggtacccccgcgagggctggaggtactcccgcgagcacaacgccatcctctggccctttggcgagctcatgaccgaggccgacatcctccgcatcgagcagcaatcgtctccgtgcagcatcaccgcgccacctacgagctgcgcgcactggacgcggcgcccccgcgctgtccgcgccgcaagcccccgcagtccgctggcgccccggtccgcgagcccatcctgtaggaggactacgtggcggccggctctggccagcccagcgccgccgccgcccacggcccgctggccgactgggagcccctggacaccctgggcccgcctgaggcacaggattgccaggcggcgctacttgagcccgagcagctggcgcgccggccgcccctctgcacggaactgcgcggcgtccaggactacctcgacctgcgcaaggagcgcatcgtttacctcttcctggagcactggcgcctctgggccttcctcggaccgggccttccgcggaccaggcgcgcctaggcagactgctccctggcgtgacggccgcccgtgctggccggagctggaggccacggacgccccccggctgccggtgagcaagggcgaggcccacagccccaacgaacggctgcggcagctgctgaggcagcggcaggcagtgggcaagctgctgcaccactggcggagcctgcggcggcacgtgccgccaagcccgggcctggcgcacggcgtgtactggccccagcacttcctgtcgcccctagacggcggcgcacccccgcgctacgaaagcctcacgctcgacctcttcatgctcggctacttccagctaccggagatgggcctgagccgcgaggatcgcaagttccgccacctactgtgctacgagatgttccaccggctggacagccacccgtgggagcgcatccgcctcttccaccgcgtggtgctggaggaggtggaggccggccggcgcggctggagcgacggcttcgaggacctcaggcacaggttcttcggaaacggcctggaggctgggccggcccccgaagaacaggcgaagaaaaaggaagagaaggggaaagaacaggagcggaccgaagaggccgctccggttcagaagggggacccgcccaaggggcagcgcgaggccctggcccctgtgccgcagccgccgccaccgcccgcccgcccgccggcccgccgcgcctccccgccgcgcctccccggatctcttgtgtttcaggaggaggaggaggcccggctggccagcatgcccgcctggaggtgggacctcctgcggaagaagctgtcagcgtttagcccaccagggtccacccagcacctgcgctcccagctgtcacaatgcaaacaacgctatcaagatctccaggagaagctgctgctatcagaagccactgtctttgctcaggcgaacgagctggagaaatacagttcccacgcaggtgaacccttgctgaagcaggacagtaaacaggtccaggtggacctccaggacctgggctatgagacttgtggccaaagcaagaatgaggctgaacaggaggaaacctggcctccagcacctacttggtcccgcgcgctccctcgtgtcgcccctcggagcagcagccgccgcggtcgccgctacccggaaagaagtcagagacgccgcgaggtcgccgccaccgccatgcccaagaataaaggtaaaggaggtaaaaatagacgcaggggtaagaatgagaatgaatctgaaaaaagagaactggtattcaaagaggatggtcaggagtatgctcaggtaatcaaaatgttgggaaatggacggctagaagcaatgtgtttcgatggtgtaaagaggttatgtcacatcagaggaaaattgagaaaaaaggtttggataaatacctcggacattattttggttggtctccgagactaccaggataacaaagctgatgtaattttaaaatacaatgcagacgaagctagaagtctgcaggcatacggcgagcttccagagcatgctaaaatcaatgaaactgatacatttggtcctggagatgatgatgaaattcagtttgatgacattggagatgatgatgaagatattg

SEQ ID NO: 6660 - DNA, 744 bp, Homo sapiens
  SIMILAR (310)..(741): 1001254mologous to Homo sapiens dJ163M9.1,accession number AL021920,Smith-Waterman Score=763.
atgtctgagggatgggagattgaggaagacaaggagaagggcaaggtggtggttgagactgtggttgccaaagagggtctgagtgaacccttgctgaagcaggacagtaaacaggtccaggtggacctccaggacctgggctatgagacttgtggccaaagcaagaatgaggctgaacaggaggaaaccaccagtcccgcacctacttggtcccgcgcgctccctcgtgtcgcccctcggagcagcagccgccgcggtcgccgctacccggaaagaagtcagagacgccgcgaggtcgccgccaccgccatgcccaagaataaaggtaaaggaggtaaaaatagacgcaggggtaagaatgagaatgaatctgaaaaaagagaactggtattcaaagaggatggtcaggagtatgctcaggtaatcaaaatgttgggaaatggacggctagaagcaatgtgtttcgatggtgtaaagaggttatgtcacatcagaggaaaattgagaaaaaaggtttggataaatacctcggacattattttggttggtctccgagactaccaggataacaaagctgatgtaattttaaaatacaatgcagacgaagctagaagtctgcaggcatacggcgagcttccagagcatgctaaaatcaatgaaactgatacatttggtcctggagatgatgatgaaattcagtttgatgacattggagatgatgatgaagatattgatgacatctaa

SEQ ID NO: 6661 - DNA, 540 bp, Homo sapiens
tggttcgtgcacgatggcctgcaggcccctgagtctcagtgagcgtgggcctgcggcctccgtgggaactgcaggtctgggtcctctgtgtgccccggggccaggccaaaaccaggctggaacccgccggcagggcccccgaggcgcctctgcctgctctctccgttcttgccggcggcagcgattcggactcccgctttcgacaaagtctcagctccgcagcagcacccggcgcggactcgctgggcgcgcggactgagctccgggtggaaccaggaccctcgcgccctcgccctcgccctcgccctcgcccgagttggaccaccgcgagcaccgccgacgccagccgcagagccgcgggtgcgcggggaagaggaaacgaaagcgcgggctccggagctgaggtgagaagtgagcagaaagtgaaaagagaatccatcggaaacagataaaaaaggaaaaacaaaacccactcgaaaagaaagaaaacgttacaacaaaaaggataaagtaacgctaaatgaaataaaaaggagccat

SEQ ID NO: 6662 - DNA, 5651 bp, Homo sapiens
  SIMILAR (3)..(2960): 1001254mologous to Homo sapiens Human phosphodiesterase interacting protein, myomegalin,accession number AAY71159,Smith- Waterman Score=4895.
tgttgcttgagaaacttcgccagcgaatacatgataaagctgttgctctggagcgggctatagatgaaaaattctctgctctagaagagaaagaaaaagaactgcgccagcttcgtcttgctgtgagagagcgagatcatgacttagagagactgcgcgatgtcctctcctccaatgaagctactatgcaaagtatggagagtctcctgagggccaaaggcctggaagtggaacagttatctactacctgtcaaaacctccagtggctgaaagaagaaatggaaaccaaatttagccgttggcagaaggaacaagagagtatcattcagcagttacagacgtctcttcatgataggaacaaagaagtggaggatcttagtgcaacactgctctgcaaacttggaccagggcagagtgagatagcagaggagctgtgccagcgtctacagcgaaaggaaaggatgctgcaggaccttctaagtgatcgaaataaacaagtgctggaacatgaaatggagattcaaggcctgcttcagtctgtgagcaccagggagcaggaaagccaagctgctgcagagaagttggtgcaagccttaatggaaagaaattcagaattacaggccctgcgccaatatttaggagggagagactccctgatgtcccaagcacccatctctaaccaacaagctgaagttacccccactggccgtcttggaaaacagactgatcaaggttcaatgcagataccttccagagatgatagcacttcattgactgccaaagaggatgtcagcatacccagatccacattaggagacttggacacagttgcagggctggaaaaagaactgagtaatgccaaagaggaacttgaactcatggctaaaaaagaaagagaaagtcagatggaactttctgctctacagtccatgatggctgtgcaggaagaagagctgcaggtgcaggctgctgatatggagtctctgaccaggaacatacagattaaagaagatctcataaaggacctgcaaatgcaactggttgatcctgaagacataccagctatggaacgcctgacccaggaagtcttacttcttcgggaaaaagttgcttcagtagaatcccagggtcaagaaatttcaggaaaccgaagacaacagttgctgctgatgctagaaggactagtagatgaacggagtcggctcaatgaggccttacaagcagagagacagctctatagcagtctggtgaagttccatgcccatccagagagctctgagagagaccgaactctgcaggtggaactggaaggggctcaggtgttacgcagtcggctagaagaagttcttggaagaagcttggagcgcttaaacaggctggagaccctggccgccattggaggtgcagctgcaggggatgacaccgaagatacaagcactgagttcactgacagtattgaggaggaggctgcacaccatagtcaccagcaacttgtcaaggtggctttggagaaaagtctggcaactgtggagacccagaacccatctttttcccctccttctccgatgggaggggacagtaacaggtgtcttcaggaagaaatgctccacctgagggctgagttccaccagcacttagaagagaagaggaaagctgaggaggaactgaaggagctaaaggctcaaattgaggaagcaggattctcctcagtgtcccacatcaggaacaccatgctgagcctttgccttgagaatgcggagctgaaagagcagatgggagaagcaatgtctgatggatgggagatcgaggaagacaaggagaagggcgaggtgatggttgagactgtggtaaccaaagagggtctgagtgagagtagccttcaggctgagttcagaaagctccagggaaaactgaagaatgcccacaatatcatcaacctcctcaaagaacaacttgtgctgagtagcaaggaagggaatagtaaacttactccagagctccttgtgcatctgaccagcaccattgaaagaataaacacagaactggttggttcccctgggaagcaccaacaccaagaggaggggaatgtgactgtgaggcctttccccagaccccagagccttgaccttggggctaccttcacagtggatgcccaccaattggataaccagtcccagcctcgtgaccctgggcctcagtcagcgtttagcctaccagggtccacccagcacctgcgctcccagctgtcacaatgcaaacaacgctatcaagatctccaggagaagctgctgctatcagaagccactgtctttgctcaggctaacgagctggagaaatacagagttatgcttacaggtgaatccttggtgaagcaggacagcaagcagatccaggtggacctccaggacctgggctatgagacttgtggccgaagcgagaatgaggctgaacgggaggaaaccaccagtcctgagtgtgaggagcacaacagcctcaaggaaatggtcctgatggaggggctgtgctctgagcagggacgccggggctcaacactggctagttcctctgagaggaagcccttggagaaccagctagggaagcaggaagagttccgggtatatggaaagtcagaaaacatcttggtcctacgaaaggacatcaaagatctgaaggcccagctgcagaatgccaacaaggtcattcaaaacctcaagagccgggtccggtccctctcagttacaagtgattattcgtctagtctggaaagaccccggaagctgagagctgttggcaccttggaggggtcttcacctcatagtgtccctgatgaggatgaggggtggctgtctgatggcactggggctttctactctccagggcttcaggccaaaaaggacctggagagtctcatccagagagtatcccagctggaggcccagctcccaaaaaatggactagaagagaagctggctgaggagctgagatcagcctcgtggcctgggaaatatgattccctgattcaggatcaggcccgggaactgtcttacctacggcaaaaaatacgagaagggagaggtatttgttatcttatcacccggcatgcaaaagatacagtaaaatcttttgaggatctcctaaggagcaatgacattgactactacctgggacagagcttccgggagcaactcgcccagggaagccagctgacagagaggctcaccagcaaactcagcaccaaggatcataaaagtgagaaagatcaagctggacttgagccactggccctcaggctcagcagggagctgcaggagaaggagaaagtgattgaagtcctgcaggccaagctggatgctcggtccctcacaccctccagcagccatgccttgtctgactcccaccgctctcccagcagcacctctttcctgtctgatgaactggaagcctgctctgacatggacatagtcagcgagtacacacactatgaagagaagaaagcttctcccagtcactcagattccatccatcattcgagtcattctgctgtgttgtcttctaaaccatcatcaaccagtgcatctcagggggctaaggccgaatccaacagcaaccccatcagcttgccaactccccagaatacccccaaggaggccaaccaggcccattcaggctttcattttcactccatacccaagctggctagccttcctcaggcaccattgccctcagctccatccagcttcctgcctttcagccccactggccctctcctccttggctgctgtgagacaccagtggtctccttggctgaggctcagcaggagctacagatgctgcagaagcagttgggagaaagtgccagcactgttcctcctgcttccacagctacattgctgagcaacgacttggaagccgactcttcctactacctcaactctgcccagcctcactctcctccaaggggcaccatagaactgggaagaatcctagagcctgggtacctgggcagcagtggcaagtgggatgtgatgaggcctcagaaagggagtgtatctggggacctatcctcaggctcctctgtgtaccagcttaactccaaacccacaggggctgacctgctggaagagcatcttggtgaaatccggaacctgcgccagcgcctggaggagtccatctgcatcaatgaccgcctacgggagcaactggaacaccggctgacctctactgctcgtggaaggggatccacttctaacttctacagtcagggcctggagtccatacctcagctctgcaatgagaacagagtcctcagggaagacaatcgaagacttcaggctcaactgagtcatgtttccagagagcactcccaggaaacagaaagcctgagggaggctctgctgtcctctcgatcccaccttcaagagctggaaaaggagctggagcaccagaaggtggaaaggcagcagcttttggaagacttgagggagaagcagcaagaggtcttgcatttcagggaggaacgtctttccctccaggaaaacgactccagtgggccttgcctctccctggtcagactgcagcacaagctggttctcctgcagcaacagtgtgaagagaaacagcagctctttgagtccctccagtcagagctacaaatctacgaggcactttatggcaattccaagaaggggctgaaagcttacagcctggatgcctgtcaccaaatccctttgagcagtgacctgagccacctggtggcagaggtacgagctctgagagggcagctggagcagagcattcaggggaacaattgtctgcgactgcagctgcaacagcagctggagagcggtgctggcaaagccagcctcagcccctcctccattaaccagaacttcccagccagcactgaccctggaaacaagcagctgctcctccaagattcagctgtgtcccctccagtccgggatgttggtatgaattccccagctctggtcttccccagctctgcttcctctactcctggctcagaaacgcccataatcaacagagcaaatggcttgggtttggatacttctccagtaatgaagacccctcccaagctagagggtgatgctactgatggctcctttgccaataagcatggccgccatgtcattggccacattgatgactacagtgccctaagacagcagattgcggagggcaagctgctggtcaaaaagatagtgtctcttgtgagatcagcgtgcagcttccctggccttgaagcccaaggcacagaggtgctaggcagcaaaggtattcatgagcttcggagcagcaccagtgccctgcaccatgccctagaggagtcggcttccctcctcaccatgttctggagagcagccctgccaagcacccacatccctgtgctgcctggcaaagtgggagaatcaacagaaagggaacttctggaactgagaaccaaagtatccaaacaggagcggctccttcagagcacaactgagcatctgaagaacgccaaccagcagaaggagagcatggagcagttcatcgtcagccagctaaccagaacacatgatgttttaaagaaggcaaggactaacttagaggtgaaatccctaagggctctgccatgtactccagccttgtga

SEQ ID NO: 6663 - DNA, 1134 bp, Homo sapiens
  SIMILAR (761)..(844): 421254mologous to Mus musculus espin,accession number AF239886,Smith-Waterman Score=58.
atgaaggtgacatttgcaaacaaacctgaaggaggtggaagactggccaagcagagacctccgggaagaggggctaggcccagacccaagcatgagggtggccagagtgttctgggaacacgaagaccagcgctgctgcaggtgagctgcaccgacgtgagcctgtcggagcaggacaaagacggcgccaccgccacgcacttcgcggcgagccgcggccacagcaaggtgctcagctggctgctgctgcacggcggggagatctcggctgacctgtggggcgggaccgcgctgtacgacgccgccgagaacggggagctagggtgctgccagatcctggtagtgaacggcgcggagctggaagtccgcgaccgcgacgggtacgcggccgctgacctgtcggacttcaacggccacagccactgcacccactgcctgcgcacggtggagaacctgcacagggggatggtcctggctctgggggctgcagaacacagcaaggcccagaggccagaggctgcaggcgggcctgagggtgaacttccccccgagaaagagtctctggaagagaatgaatggcccagcaggggtcagggcttggtgccctcagcacccactgctgttgcccagagcatggagcactgcgtgctctcccgggatccatccgtggagctggaggcgaagcagccggattcaggcatgtcctcacccaacaccacggtgtcggtccagcctctgaactttgacctcagctcgcccaccagcaccctctccaactacgactcctgctcctccagccactccagcatcaagggccagcaccctccacgtgctcccaatccccagattctccagtacaagaagaggttctcggagctggagcagctgttggagagatccggagagctggagcagcagcagctgagggacgcagagcacagccaagacctggagagtgccctcatctggctggaggaggagcagcagggagggccagggctcgcagcatggccccctgggcgagcgcctactgatcccctgtgccccattcaggagtgccagcctggcccaggtgaatgccatgctctgagaacagctggaccaggcaggtttggccagccaggctctgagtga

SEQ ID NO: 6664 - DNA, 945 bp, Homo sapiens
  SIMILAR (331)..(2): 361254mologous to Homo sapiens dJ202O8.1 (novel rat Espin LIKE protein containing Ank repeats),accession number AL031848,Smith-Waterman Score=155.
tgaccgggctgtggcccatctgcgccgcggcgtgcagtggggtcatgccgtcgtgggcgcgcgcgtgcgggtccgcgccgcattcctgcaccaggtactgcgtcacctccaggtggccctcctggcacgccaggtacaggggcgtggcaccgttcttggtttgggcattcactcccctgcggagacacctgacgagaagcctcagggaggggaagtctcctttggctgcagcgtagtggataggcagggcgcccatgtctgtggccgcggtgggatccccaccgccatgatgcaagagccagttcaccaccttggggtggccaaagcgggcagtcagatgcaagactgtgggaccagaattgtctttgtcctggttgtcatggcaggagactggctccaggcccagggccacagccctgactcccaggggctcagggaatgccgcggcctggcgtccagtgacccagcggtctgcatattccccagggtggaagcactcggacttcaggtttgaaggcaatgcggtcaccaccgaagaatcatcaggttcctgattcgcgtgctggaccttgggcttactgctgagccgctgtagagaggaccaagaaatgacgctcttggaaggagagaagcccagacaccgtgaaccgaatttgctcacatcgtcagcggccgcggcctccgcgtgctttgtgggcccatcggtgttctgcgagggattccgtgtgtctggcaatgtctgtcaacaggaaaaattcccgtaggtgaagatgccgcctctcaagggccctttgtctgtagcttccactggtgaaataatgcggttatagtctttttcggtagagaaaacggctgtatcagtggaattttttaaaaacacaaaacgagaacgagtttttaatgagctgacaataaaatctaaactagttgtcatggtctgcacag

SEQ ID NO: 6665 - DNA, 5290 bp, Homo sapiens
  SIMILAR (3021)..(3467): 261254mologous to Homo sapiens dJ1182A14.1 (similar to rat Espin),accession number AL137798,Smith-Waterman Score=79.
atggctgtgcgccaggcaccaggcctgtgctcagggctctgcaggcacttctcaggcactctgcacgaggtcaggatgacaactgttgcccccatttcatggatgggtttgggaacacaaagagacaagaagcaagactgtggcacagctcaaaggcacgggactcgagccaggtcctcctgcggggctgtgccccagcagctgtcaaagagtgttcctgagttcccagcagtgaggggagtgaatgcccaaaccaagaacggtgccacgcccctgtacctggcgtgccaggagggccacctggaggtgacgcagtacctggtgcaggaatgcggcgcggacccgcacgcgcgcgcccacgacggcatgaccccactgcacgccgcggcgcagatgggccacagcccggtcatcgtgtggttggtgagctgcaccgacgtgagcctgtcggagcaggacaaagacggcgccaccgccacgcacttcgcggcgagccgcggccacagcaaggtgctcagctggctgctgctgcacggcggggagatctcggctgacctgtggggcgggaccgcgctgtacgacgccgccgagaacggggagctagagtgctgccagatcctggtagtgaacggcgcggagctggaagtccgcgaccgcgacgggtacgcggccgctgacctgtcggacttcaacggccacagccactgcacccactgcctgcgcacggtggagaacctgcacagggggatggtcctggctctgggggctgcagaacacagcaaggcccagaggccagaggctgcaggtgggcctgagggtgaacttccccccgagaaagagtctctggaagagaatgaatggcccagcaggggtcagggcttggtgccctcagcacccactgctgttgcccagagcatggagcactgcgtgctctcccgggatccatccgtggagctggaggcgaagcagccggattcaggcatgtcctcacccaacaccacggtgtcggtccagcctctgaactttgacctcagctcgcccaccagcaccctctccaactacgactcctgctcctccagccactccagcatcaagggccagcaccctccacgtgggctttccagcactagagctgcagacatacagagctacatggacatgctgaacccagagctgggcctgccttggggcacgattgggaagcccatacccccaccacccccacccagcttccccccgccacccccgcccccaggcacccaactgcccccacccccacctagctacccatctcccaagcctcctgtgggaccacaggcagctgacatctacatgcagaccaagaacaaactccgccacgtggagacagaggccctcaagaaggagccgagctcctgcgacggccacgacgggctacggaggcaggactccagccgcaagccccgcgctttcagcaagcagcccagcacgggggactactaccggcagctgggccgctgccccggcgagacgctggtcgcacgcccgggcatggcgcaccgcgaggaggcggaactccctgggaaccacgtgcctaacggctgcgccgcggaccccaaggcgtccagggagcagcagctgccgccgccgccgccgccgccgcccctgcccgaggccgcgagttcgccgccgccggtcccgcctctgcccctcgagggcgctggccctggctgcgggcagcgccgctcctcctcgcccaccggcagcaccaagtctttcaacgtgatgttcccgatgggcgacaactcggagctactggctgagattaaggcaggcaagagcctgaagccgacgccacagagcaaggggctgaccacagtgttctcaggcagcaggcagccggccttccagcccgattggccgctgccgtctgtgtcacctgcactgttaccagtccggagccccacaccgccagctgcggggtttcagccgctgctcaacggaagcttggttccggtgccgcccactactcctgcgccgggggtgcagctggacgtggaggcgctcatccccacgcacgatgagcagggccgtcccaagcccgagtggaagcgccaggtgatggtgggcaagatgcagctgaagatggaggaggaggaggagcagaggtggaaactgacggccgccagctcgtgctgctacccccgcgagggctggaggtacccccgcgagggctggaggtactcccgcgagcacaacgccatcctctggccctttggcgagctcatgaccgaggccgacatcctccgcatcgagcagcaatcgagaacctgcagcatcaccgcgccacctacgagctgcgcgcactggacgcggcgcccccgcgctgtccgcgccgcaagcccccgcagtccgctggcgccccggtccgcgagcccatcctgtaggaggactacgtggcggccggctctggccagcccagcgccgccgccgcccacggcccgctggccgactgggagcccctggacaccctgggcccgcctgaggcacaggattgccaggcggcgctacttgagcccgagcagctggcgcgccggccgcccctctgcacggaactgcgcggcgtccaggactacctcgacctgcgcaaggagcgcatcgtttacctcttcctggagcactggcgcctctgggccttcctcggaccgggccttccgcggaccaggcgcgcctaggcagactgctccctggcgtgacggccgcccgtgctggccggagctggaggccacggacgccccccggctgccggtgagcaagggcgaggcccacagccccaacgaacggctgcggcagctgctgaggcagcggcaggcagtgggcaagctgctgcaccactggcggagcctgcggcggcacgtgccgccaagcccgggcctggcgcacggcgtgtactggccccagcacttcctgtcgcccctagacggcggcgcacccccgcgctacgaaagcctcacgctcgacctcttcatgctcggctacttccagctaccggagatgggcctgagccgcgaggatcgcaagttccgccacctactgtgctacgagatgttccaccggctggacagccacccgtgggagcgcatccgcctcttccaccgcgtggtgctggaggaggtggaggccggccggcgcggctggagcgacggcttcgaggacctcaggcacaggttcttcggaaacggcctggaggctgggccggcccccgaagaacaggcgaagaaaaaggaagagaaggggaaagaacaggagcggaccgaagaggccgctccggttcagaagggggacccgcccaaggggcagcgcgaggccctggcccctgtgccgcagccgccgccaccgcccgcccgcccgccggcccgccgcgcctccccgccgcgcctccccggatctcagactctccgggaggaggaggaggcccggctggccagcatgcccgcctggaggtgggacctcctgcggaagaagctggaagaagagaggggcaccccagggttagagcccttgaagataaggatggtcaaacaaaataatattatatctgcagaaagtcagatcttggtaagatttactagttgggaatccaatgttaatgccaagaagcagctgccagttgggatcaaatgtgagcctatggatcaagaatgcatccctggctcccgtgcgtgcacacttctagttaggtttagcaatggagggcccccgatggatcctggaagtgagaggaagggagccttggaaggagcccgaatcactgatggaattggacagtgcatggagatggttcagcaggacaaggtccctggctccacctcttctgccacaaacgtcagcatggtggtatcagctggcccttggtccagcgagaaggcagagacgaacattttagaaatcaacgagaaattgcgcccccagctggcagagaacaaacagcagttcagaaacctcaaagagaaatgttttgtaactcaactggccggcttcctggccaaccgacagaagaaatacaagtatgaagagtgtaaagacctcataaaatttatgctgaggaatgagcgacagttcaaggaggagaagcttgcagagcagctcaagcaagctgaggagctcaggcaatataaagtcctggttcactctcaggaacgagagctgacccagttaagggagaagttacgggaagggagagatgcctcccgctcattgaatcagcatctccaggccctcctcactccggataagccagacaagtcccaggggcaggacctccaagaacagctggctgaggggtgtagactggcacagcaacttttccagaagctcagcccagaaaatgacgaagatgaggatgaagatgttcaagttgaggaggctgagaaagtactggaatcatctgcccccagggaggtgcagaaggctgaagaaagcaaagtccctgaggactcactggaggaatgtgccatcacttgttcaaatagccacagcccttgtgactccaaccagcctcacaagaacatcaacatcacctttgaggaagacaaagtcaactcaactctggttgtagacagagaatcctctcatgatgaatgtcaggatgctgtaaacattctcccagtccctggccccacctcttctgccacaaacgtcagcatggtggtatcagccggccctttgtccagcgagaaggcagagatgaacattctagaaatcaacgagaaattgcatccccagctggcagagaagaaacagcagttcagaaacctcaaagagaaatgttttgtaactcaactggcctgcttcctggccaaccagcagaacaaatacaaatatgaagagtgcaaagacctcataaaatctatgctgaggaatgagcgacagttcaaggaggagaagcttgcagagcagctcaagcaagctgaggagctcagaatgggaagtgggaaatatctgaacgaacattttgtatttacagaaaatgacgaagatgaggatgaagatgttcaagttgaggaggctgagaaagtactggaatcatctgcccccagggaggtgcagaaggctgaagaaagcaaagtccctgaggactcactggaggaatgtgccatcacttgttcaaatagccacggcccttgtgactccaaccagcctcacaagaacatcaacatcacctttgaggaagacaaagtcaactcagctctggttgtagacagagaatcctctcatgatgaatgtcaggatgctgtaaacattctcccag

SEQ ID NO: 6666 - DNA, 1615 bp, Homo sapiens
  SIMILAR (172)..(444): 831254mologous to Homo sapiens Human phosphodiesterase interacting protein, myomegalin,accession number AAY71159,Smith- Waterman Score=375.
tgagtgcggcggaattcctggaagaagagaggtgagccggcggtcaggcagaggctggcctggcagcgggtcttgactgcgcccctgaggtggaggtaccaagtgacactgtttctccttctaggaagcagaagcgttggagaaccagtcccagccttgtgacactgggcccaatcagcatttagcccaccagggtccacccagcacccgcgctcccagctgtcacaatgcaaacaacgctatcaagatctccaggagaagctgctgctatcagaagccactgtctttgctcaggcgaacgagctggagaaatagagagttatacttagtgaacccttgctgaagcaggacagtaaacaggtccaggtggacctccaggacctgggccacgagacttgtggccaaagcaagaatgaggctgaacaggaggaaacctggcctccagcaccctacttggtcccgcgcgctccctcgtgtcgcccctcggagcagcagccgccgcggtcgccgctacccggaaagaagtcagagacgcccgcgaggtcgcccgccaccgccatgcccaagaataaaggtaaaggatggtaaaaacaagacgcaggggtaagaatgagaatgaatctgaaaaaagagaactggtattcaaagaaggatggtcaggagtatgctcaggtaatcaaaatcgttggggaaatggacggctagaagcaatgtagtttcgatggtgtaaagaggttatgtcacatcagaggaaaatttgagaaaaaaaggttttggataaataccctcggacattattttggttggtctccgagactaccaggataacaaagctgaatgtaattttaaaatacaatgcagaccgaagctagaagtctgaaggcatacggcgagcttccagagcatgctaaaatcaatgaaactgatacatttggtcctggggagatgatgatgaaattcagttttgatggacatttggagatgattgatggaaggtatttgatggacatcttaaattgaactcaacattttacattccatcttttctgaagattgtcctacaatttggattttgatcatgacaaagaagattaaaatttcattagcatgaatgcaatttgttaaagcagactgatttgtttctaagataatttggggtttttttaaacctaataataatgctgaattatcttaagtgagaatgttaagcccacttttgttctttaaatgtaatggagcttatggggtagaaagaccatgtctactaattacaaaaaaaaaaaaaaaaaaaaaccatgcattgctgcttttcctaccacttccagtaagaaaatgggtgttttgaagaaatcatttgccttgtcctcacggaatctgattaagccctggcctcttgattgtatagagtcattgtgtatattccagttacctagatattcccttgagattttgatacaatttgagggaggcagaagtctgcatttgaagaaaaaaaaataagtctgtttgtcatatttaagtagcctgtggctatttttatactgattttgatatcatgttcttttcatagtcgtattttgccaccgtaaacataaaaaaaaaaaaaaaaaagcat

SEQ ID NO: 6667 - DNA, 327 bp, Homo sapiens
  SIMILAR (186)..(317): 541254mologous to Homo sapiens putative p150,accession number U93567,Smith-Waterman Score=145.
gaacatttgaaatttattctcttgacaattttgaaagatccaatacactattattaactatagtcactatgctgtgcaatagatctcaaaagcttattcctcttaactgaaacctactaccctgtgacatgtggggaacatctctctattccccagccccagtccctaaatgttgaatacacaatggggaaaaaaaagtcttcaatgaatggtggtgggaaaattgtatatccacatgcagaagaataaaattggacccttacctcctaccatatataaaaaccaactgaaaatcgattaaagacttaaactgtaaaactactaaaa

SEQ ID NO: 6668 - DNA, 327 bp, Homo sapiens; identical to SEQ ID NO: 6667
  SIMILAR (186)..(317): 541254mologous to Homo sapiens putative p150,accession number U93567,Smith-Waterman Score=145.

SEQ ID NO: 6669 - DNA, 642 bp, Homo sapiens
  SIMILAR (3)..(494): 901254mologous to Homo sapiens unnamed protein product,accession number AK001686,Smith-Waterman Score=778.
gcggcaaggggctatttgatgatgaggacgaggagagtgacctcttcatggaagccccccaggatcggcaagctggagcctctgttaaggaggagtcttcatcatccaaacctggaaagaaaatcccagcaggagctgtttctgtatttttaggagacacggatgtgtttggtgctgcctccgttccatcactgaaggagccacagaagcctgagcagcccactccaaggaaaagcccctatggtccccctcccactggcctcttctttttctcggcaccccacagcaaaccttctaaaacacgcaaagtccaatccactgccgatatctttggtgacgaagaaggagatctgttcaaagaaaaagccgtagcatcgccagaagccactgtgagtcagacagatgaaaataaagcaagagcagaaaaaaaggttaccttatcttacagcaaaaatctcaagccctcatcagaaacaaaagactcaaaaaggcttattttcagatgaggaggactctgaggatttgttttcttctcaaagtgcgagtaacttaaaaggtgcatctctgctgcctggcaagctccccacgtcggtttcctggtttgatgatgaagatgaagaggataatcttttgggggtacag

SEQ ID NO: 6670 - DNA, 3099 bp, Homo sapiens
  SIMILAR (2074)..(3045): 441254mologous to Drosophila melanogaster Centaurin Gamma 1A,accession number AF254741,Smith-Waterman Score=660.
atggttacccatcagcagcctgcagctagaaagccaaacatgacatctaagaaacctaaacccatgggacctaaagcccatgggatcttttcaggaactagaaaaaacaatcttgaaatttatatggaccaaacaagaaccggcatagccaaaacaaaactaagcaaaaacaacaaatctggaggcatgacattacctgatttcaaactatactataaggccatagtcgccaaaatagcatgtggtggttctatgtataattcagatacagatgaggatgaagaaactgagccttcttcttctgggcaacagataattgaaaattcaataactatgaataagatgaagctgctgaaggctaagatgaagaacatgaatctcagcaaaaagcacatcacacaagtgagtgatgaggaagaggatgatgatggctgtgacctttttgctgactctgagaaggaggagaaagatattgaggacattgaagaaaatactagacctaaaagaagcagacctacatcgtttgcagatgagctggctgcccgcatcaagggggatgccgtgggccgagtggacgaggagccgacaactgtgagttatgaggatgacagacgtggaaagaaccaggatgcgtatactgagggaggacttagtactattaaaactgtgaactgttcttcaagccttaccctcaggagaagcaaaacttcggaagacactcaagagaagaaggaaaggagaactccttcggacgatgaagaggataacttattcgcaccccccaagctgaccgacgaggacttctcgccatttggctctggaggtggcctgttcagtgggggcaaggggctctttgatgatgaggacgaggaggacatagaagaatcctctaaccctctctggagtggttacagcctgcgatgggcacgggagcccccgcagcagccagaaactcacactgttgtctccacgaatgagaaaccagaacaatggctgaaaggagagaactgggggtctgtctccactcctttacagaaaagaagcagacctacatcgtttgcagatgagctggctgcccgcatcaagggggatgccatgggtcgagtggacgaggagccgacaaatgaagaggataacttattcgcaccccccaagctgaccgacgaggacttctcgccatttggctctggaggtggcctgttcagtggcggcaaggggctatttgatgatgaggacgaggagagtgacctcttcacggaagccccccaggatcggcaagctggagcctctgttaaggagggtaagctggggctgggcagctgcgtctccgtgtgcagagttccaaaactgtctttctcactaggagatggaaccctgaggagacacggatgtgctgcctccgttccatcactgaaggagccacagaagcctgagcagcccactccaaggaaaagcccctatggtccccctcccactggcctgtttgatgatgatgatggtgatgatgataacgactttttctcgacaccccacagcaaaccttccaaaacaggcactgagaagccttttaggaaaatcgggatggattgtgaccttggagatacctcatcatatcacacaaaggtttccaccgtgcacattacgaagaacagaaatggaggtgggagtttaaataactattcctcctccattccatcgactcccagcaccagccaggaggaccctcagttcagtgttcctcccactgccaacacacccacccccgtttgcaagcggtccatgcgctggtccaacctgtttacatctgagaaagggagtgacccagacaaagagaggaaagccccggagaatcatgctgacaccatcgggagcggcagagccatccccattaaacagggcatgctcttaaagcgaagtgggaaatggctgaagacatggaaaaagaaatacgtcaccctgtgttccaatggcgtgctcacctattattcaagcttaggtgattatatgaagaatattcataaaaaagagattgaccttcagacatctaccatcaaagtcccaggaaagtggccatccctagccacatcggcctgcgcacccatctccagctctaaaagcaatgacctatccaaggacatggacaccgggctgggtgactccatatgcttcagccccagtatctccagcaccaccggccccaagctcaacccgcccccctctcctcatgccaataaaaagaaacacctaaagaagaaaagcaccaacaactttatgattgtgtctgccactggccaaacgtggcactttgaagccacgacatatgaggagcgggatgcctgggtccaagccatccagagccagatcctggccagcctgcagtcatgcgagagcagtaaaagcaagtcccagctgaccagccagagcgaggccatggccctgcagtcgatccaaaacatgcgtgggaacgcccactgtgtggactgtgagacccagaatcctaagtgggccagtttgaacttgggagtcctcatgtgtattgaatgctcaggtatccaccgcagtcttggcacccgcctttcccgtgtgcgatctctggagctggatgactggccagttgagctcaggaaggttatgtcatctattggcaatgacctagccaacagcatctgggaagggagcagccagggacagacaaaaccctcagaaaagtccacgagggaagaaaaggaacggtggatcctttccaaatatgaggagaagctctttctggccccactaccctgcactgatctgtccctgggccagcagctgctgcgggccaccgctgatgaggacctgcagacagccatcctgctgctggcacatggctcccgtgaggaggtgaacgagacctgtggggagggagacggctgcacggcgctccatctggcctgccgcaaggggaatgtggtcctggcgcagctcctgatctggtacggggtggacgtcatggcccgagatgcccacgggaacacagcgctgacctacgcccggcaggcctccagccaggagtgcatcaacgtgcttctgcagtacggctgccccgacgagtgcgtgtag

SEQ ID NO: 6671 - DNA, 238 bp, Homo sapiens
  SIMILAR (37)..(237): 941254mologous to Homo sapiens unnamed protein product,accession number AK001686,Smith-Waterman Score=339.
agtgacctcttcacggaagcctcccaggatcggcaagctggagcctctgttaaggagggagacacggatgtgtttggtgctgcctccgttccatcactgaaggagccacagaagcctgagcagcccactccaaggaaaagcccctatggtccccctcccactggcctctttgatgatgatgatggtgatgatgatgacgactttttctcggcaccccacagcaaaccttctaaaacac

SEQ ID NO: 6672 - DNA, 349 bp, Homo sapiens
ccccgcctcctccattcagcagggagggcggagggcctgcttggaagtcacatggagctgcagcatctggaacccaacagccacaggaggcctggatcggggctccgtaaggcacagccgagagggaggtggggaggccccagtccgagtccagggcccaggggagatgattcctgcagtccccaaaagcagctggaccctacacaagatgcagctcccaggacacgtgtgttccactctcggcaggagaggagacgaaaaaggagaggccgggccagaggctcacgcctatgatcccagcactctgggaggccgaggccagcggatcacctgaggtcaggagttcaag

SEQ ID NO: 6673 - DNA, 1374 bp, Homo sapiens
  SIMILAR (440)..(619): 961254mologous to Homo sapiens unnamed protein product,accession number AK001686,Smith-Waterman Score=299.
gatgatatatttgctacggaagcaattaaaccctctcagaaaaccagagagaaggagaaaacattggaatctaatttatttgatgataacattgatatctttgctgacttaactgtaaaaccaaaagaaaagtccaaaaagaaagtggaagccaagtctatatttgatgatgatatggatgacatcttctccactggtatccaggctaagacaaccaaaccaaaaagccgatctgcacaggccgcacctgaaccaagatttgaacacaaggtgtccaacatctttgatgatcccctgaatgcctttggaggccagttgagatctccgagtcgctgttgtcaggcagactgctgtcctccagattcaggcctgtgggtctggggagccctggttggtcttggaggagcaagggctgcgcagcacatcacacaagtgagtgatgaggaagaggatgatgatggctgtgacctttttgctgactctgagaaggaggagaaagatattgaggacattgaagaaaatactagacctaaaagaagcagacctacatcgtttgcagatgagctggctgcccgcatcaagggggatgccgtgggccgagtggacgaggagccgacaactgtgagttatgaggatgacagacgtggaaagaaccaggatgcgtatactgagggaggacttagtactattaaaactgtgaactgttcttcaagccttaccctcaggagaagcaaaacttcggaagacactcaagagaagaaggaaaggagaactccttcggacgatgaagaggataacttattcgcaccccccaagctgaccgacgaggacttctcgccatttggctctggaggtggcctgttcagtgggggcaaggggctctttgatgatgaggacgaggagagtgacctcttcacggaagccccccaggatcggcaagctggagcctctgttaaggagggtaagctggggctgggcagctgcgtctccgtgtgcagagttccaaaactgtctttctcactaggagatggaaccctgaggagacacggatgtgctgcctccgttccatcactgaaggagccacagaagcctgagcagcccactccaaggaaaagcccctatggtccccctcccactggcctgtttgatgatgatgatggtgatgatgataacgactttttctcgacaccccacagcaaaccttccaaaacaggcaaagtccaatccactgccgatatctttggtgacgaagaaggagatctgttcaaagaaaaagccgtagcatcgccagaagccactgtgagtcagacagatgaaaataaagcaagagcagaaaagaaggttaccttatcttacagccaaaatgtcaagccg

SEQ ID NO: 6674 - DNA, 417 bp, Homo sapiens
  SIMILAR (1)..(126): 1001254mologous to Homo sapiens KIAA1137 protein,accession number AB032963,Smith-Waterman Score=205.
atggactcatcccgctccgtaggcaacggcttcacctatcaggacaagctttcttcttccaagctaacttctgtcctggaggccgttgctggggagtacgccctggtcataaatggtcacagcctggtaggcatcgctatccttagcttgggcagtatctttccagtgagcacttctgtccagggcttttatatcttgttctaatttcccctgatttcagagaagactggtctcaaaggggactgggaggagctgagactcccaggtgtctcctggaaagactggctctctcaggtttctctgtgctccaggcccacgcactggaggcagacatggagctggagtttctggagacagcgtgtgcctgcaaagctgtcatctgctgccgggtgacccccttgcagaaggcacaggtgg

SEQ ID NO: 6675 - DNA, 700 bp, Homo sapiens
  SIMILAR (3)..(209): 981254mologous to Homo sapiens Human secreted protein, SEQ ID NO: 8074,accession number AAG03993,Smith-Waterman Score=336.
ctttggtgaaatcctatttagcacagtttgcagctcgtgccatcatttcagagctggtgagcatttcagaactagctcaaccactagaaaggggcacccattttcctctcttcctactttgtcttcagcagttagctaaattacaagatcgagaatggttaacagaactttttcaacaaagcaaggtcaatatgcagaaaatgctcccaggtaagagaaagctgacttgcttgttttgtttttttaatattatatctagagatttcaggtaccttgagtggatttatgtaggtcagacagtctgattgtcctgctcagataatgataaacattaccacagatctcacctataaagagagatttataatttaactactttcatttgatcccgatgttgagtttttttcatttgctgggttggctctctattatgctacaaggatctaaaatacttgggggacatcatttgtgaagctctgctctctggacaggaccacttggtaaaatgaactattagatgatgcaggtggctttgtctcttcagagagtgatcagaataaggaccgcatgttggagattttggaaggaaagggactgagtttcttattcccaactcctcaattggagaaggacctgtttgagcaaagtaaagttggatccatcccctcaaaccatatataaatggattaaagataacatt

SEQ ID NO: 6676 - DNA, 3825 bp, Homo sapiens
  SIMILAR (308)..(2023): 991254mologous to Homo sapiens translation repressor NAT1,accession number U76111,Smith-Waterman Score=2974.
gagcagtgagtcggagctctatggaggtggcagcgggtaccgagtggcggctgcagcagcgactcctctgagctgagtttgaggccgtccccgactccttcctcccccttccctcccccttttttttgttttccgttcccctttcccctcccttccctatccccgacgaccggatcctgaggaggcagctgcggtggcagctgctgagtttctcggtgaaggtatttcatttctactgtcccctcccctccccaccccatctattaatattattcttttgaagattcttcgttgtcaagccgccaaagtggagagtgcgattgcagaagggggtgcttctcgtttcagtgcttcttcgggcggaggaggaagtaggggtgcacctcagcactatcccaagactgctggcaacagcgagttcctggggaaaaccccagggcaaaacgctcagaaatggattcctgcgcgaagcactagacgagatgacaactccgcagcaaacaactccgcaaacgaaaaagaacgacatgatgcaatcttcaggaaagtaagaggcatactaaataagcttactcctgaaaagtttgacaagctatgccttgagctcctcaatgtgggtgtagagtctaaactcatccttaaaggggtcatactgctgattgtggacaaagccctagaggagccaaagtatagctcactgtatgctcagctatgtctgcgattggcagaagatgcaccaaactttgatggcccagcagcagagggtcaaccaggacagaagcaaagcaccacattcagacgcctcctaattcccaaattacaagatgaatttgaaaaccgaactagaaatgttgatgtctatgataagcgtgaaaatcccctcctccccgaggaggaggaacagagagccattgctaagatcaagatgttgggaaacatcaaattcattggagagcttggcaagcttgatcttattcacgaatctatccttcataagtgcatccaaacacttttggaaaagaagaagagagtccaactccaagatatgggagaggatttggagtgcctctgtcagataatgaggacagtgggacctagattagaccatgaacgagccaagtccttaatggatcagtactttgcccgaatgtgctccttgatgttaagtaaggaattgccagcaaggattcgtttcctgctgcaggataccgtagagttgcgagaacaccattgggttcctcgcaaggcttttcttgacaatggaccaaagacgatcaatcaaattcgtcaagatgcagtaaaagatctaggggtgtttattcctgctcctatggctcaagggatgagaagtgacttccttctggagggaccgttcatgccacccaggatgaaaatggatagggacccacttggaggacttgctgatatgtttggacaaatgccaggtagcggaattggtactggtccaggagttatccaggatagattttcacccaccatgggacgtcatcgttcaaatcaactcttcaatggccatgggggacacatcatgcctcccacacaatcgcagtttggagagatgggaggcaagtttatgaaaagccaggggctaagccagctctaccataaccagagtcagggactcttatcccagctgcaaggacagtcgaaggatatgccacctcggttttctaagaaaggacagcttaatgcagatgagattagcctgaggcctgctcagtcgttcctaatgaataaaaatcaagtgccaaagcttcagccccagataactatgattcctcctagtgcacaaccaccacgcactcaaacaccacctctgggacagacacctcagcttggtctcaaaactaatccaccacttatccaggaaaagcctggcaagaccagcaaaaagccaccaccgtcaaaggaagaactccttaaactaactgaaactgttgtgactgaatatctaaatagtggaaatgcaaatgaggctgtcaatggtgtaagagaaatgaggggctcataaacactttcttcgtgagatgttaagcaaagtaatcatcctgtcactagatagaagcgatgaagataaagaaaaagcaagttctttggatcagtttactcaaacaggaagggatagccacaagtgacaacttcatgcaggctttcctgaatgtattggaccagtgtcccaaactggaggttgacatccctttgggtgaaatccctattttagcacagtttgcagctcgtgccatcatttcagagctggtgagcattttcagaacctagctcaaccacctagaaagtggcacccattttcctcctccttcctactttggtcttcagcagttagctaaatttccaagatcgagaatgggttaaccaggaacttttttcaacaaagccaaggtcaaatatgcagaaaatgctcccagaaattgatcagaataaggaccgcatgttggagattttgggaaggaaagggactgagtttcttattcccactcctcaaattggaggaaggaactgtttgaagcaaataaaagttgggatccatcccctcaaaccatatataaatggattaaagataacatctctcccaaacttcatgtagataaaggatttgtggaacatctttaaatgactagcttctttacagttacatttctagtggagttaaacccccccagccgatgaaacagattcatcctctgctcctttccaaaggaacagttaagagcaggaaaaacaactactactatctttcaagccagtaatgcagaaatttcttcatgatcacgttgatctacaagtcagtgccctgtatgctctccaggtgcactgctataacagcaacttcccaaaaggcatgttacttcgcttttttgtgcacttctatgacatggaaattattgaagaagaagctttcttggcttggaaagaagatataacccaagagtttccgggaaaaggcaaggctttgttccaggtgaatcagtggctaacctggttagaaactgctgaagaagaagaatcagaggaagaagctgactaaagaaccagccaaagccttaaattgtgcaaaacatactgttgctatgatgtaactgcatttgacctaaccactgcgaaaattcattccgctgtaatgttttcacaatatttaaagcagaagcacgtcagttaggatttccttctgcataaggtttttttgtagtgtaatgtcttaatcatagtctaccatcaaatattttaggagtatctttaatgtttagatagtatattagcagcatgcaataattacatcataagttctcaagcagaggcagtctattgcaaggaccttctttgctgccagttatcataggctgttttaagttagaaaactgaatagcaacactgaatactgtagaaatgcactttgctcagtaatacttgagttgttgcaatatttgattatccatttggttgttacagaaaaattcttaactgtaattgatggttgttgccgtaatagtatattgcctgtatttctacctctagtaatgggctttatgtgctagattttaatatccttgagcctgggcaagtgcacaagtctttttaaaagaaacatggtttacttgcacaaaactgatcagttttgagagatcgttaatgcccttgaagtggtttttgtgggtgtgaaacaaatggtgagaatttgaattggtccctcctattatagtattgaaattaagtctacttaatttatcaagtcatgttcatgccctgattttatatacttgtatctatcaataaacattgtgatacttg

SEQ ID NO: 6677 - DNA, 1157 bp, Homo sapiens
aaagaattgaaaaaaaaatcaaagcagcaccttaaacaatgagaatgaagcattcattggctgctcaataatctggtacattaaggttgcggtccagaagtccctttaattaacaatggttctgccaaaatgctaccctgagacacttgaccagactggctttccaaggcaagaagatctgaggcgaggagaaccgaaaacaaagcgggctcaaaaagagttaagctccttccttacttaatgccactgcttttctgagaggccaggtggcaggatgtgggacgactccagctgacaaagacagtctaaccgtggggtaggggctggagcaggggccagcgacccacgtctacatgcatacttctcttacactgctgctactggaaaagctgaaccccgcgccaggaccccagccccctgcaaggacccgtgagcgtctgggaagctgtctctgggactgaagccccccacctccgccgggctggcggccactgcggtaccctacgccccgtcgggctggtcctgcacaatttgggaaaaagccgcagcgcttctgcaaggtctacgtggccatgagcatgcaacgcttggctccaaaaaagacacgaaaggagcaaagcgccaacgaccacccgatcggagggcccgaggggcgcctcttcaccagtcagctgcagcttaagttccgtgcattatctgaaaggatcagctggctggaggtatccagggctgtcactccaacctctgcagcagtgacctcaactcccagcacttcaaaacccagacagaaacgtccaacaaactcccagtccaggagcgctgcaaaaccaacgccaggtagacggtgccagcccgggggtcgctgcccaacatgcacccgcagcccttgactgcggtgagcccgaggcagacggcacggggaggcgcggcggttacctctccgggaggcgcggcggttacctctccgggaggcgcggcggttacctctccgggccccgcgatcctttcgcaaagtcccaagtcctggtcaaggcaggagcgcgccgcaggcgggggtcggggcagggaccgggcggaggcgacgctccatggacgcctggggtcgggctcgctcgctggcagggtcggctgggggtgtgatctctcttggcggccgc

SEQ ID NO: 6678 - DNA, 432 bp, Homo sapiens
  SIMILAR (3)..(371): 531254mologous to Homo sapiens NAG13,accession number AF194537,Smith-Waterman Score=285.
accatattaagagggtaaagaagaatcacatgatcatatcagttggtacagaaaaggcatttgacaaaattcaacactcattcattattttttttaagttcagaaaaaaataggaatgggggcatttctttaacttgataaagagcttctcttgaaaagttagagctaatattacactcagtggtgatgctttctccctaattttggtaataagacaaggatgtctgctgttaccactcttatttgacaaagtgctgaaagttctagacagtgcagtaaagcaagaaaaggaaataagagacatataggttggaaaggaagaaatcaaactgtccttatttgaagatgacatgattgtctacatagggaataataagtaatttacagaaaactcccagaattcataaatgagttcagcaaggttgcagggta

SEQ ID NO: 6679 - DNA, 682 bp, Homo sapiens
cggccgcgtcgaccggaggtggttgggtttctgagtttgagtctgtcgctcctggctctcccgacacaacagcggcgcccacctgcccgcaacggactcccaggagcctcgagctcctcatttccaaagctgaactggcccgtgtctgaatccgatttctcctgagcgggtttcggagccgggccagaacagagggaagcccagaccacacccataccccggccccaaccagtggccagggccggctgcgggtgctggtccaagcctgggtccaccccggcactgagtgacgatcaagcaaatactcaagtggaccgaaatatttgcaagttgcaagtgaaggtgaaggggcataacccgcggagctatttccgaagaagatgaagaagagacttggggatttaggcccaggctttgaagggaagaatggtttgagcaccgaggacaagaatttaattccccaggcctgggttccagccttgtgcggctatcacgtgctttgaaacctgggctagttccgaagtgagatgcgcttttacgtgtaaaatacaggattccaaagacgtcgtataaaataatttgtatattgtttgcatgttaggtaacatttttaatgtattggattaaataaaatgcattaaaattatttttacattcaaaaaaaaaaaaaaaaaaaaaaatt

SEQ ID NO: 6680 - DNA, 423 bp, Homo sapiens
  SIMILAR (148)..(35): 521254mologous to Homo sapiens putative p150,accession number U93564,Smith-Waterman Score=92.
ttgagtttctcaccattacttatgatgttaactatatgttttgtttgtagatgttcctaagtttaggaagttttcttattttgtcaaattctttttctgcatttattgatatgatcatgtgatttttcttctttaggctatgggtgtgatgattacattaatttgttttctaatgttgaaccaaccccaataccttagctaaatctcacttggccatggtgtataattcttttcatacgttatcggattcaatttgctgatattttgttaaggatttctgcatgtctgtccatgagagattggtctatagggtttattttccttggaatgtctggtttgttttagtattagggtaattctagcctcattgaatgagttaggaagtattccctctgcttttatattctgaaagagatttcagag

SEQ ID NO: 6681 - DNA, 1463 bp, Homo sapiens
  SIMILAR (1463)..(354): 511254mologous to Homo sapiens Unknown (protein for IMAGE:3535476),accession number BC006153,Smith-Waterman Score=716.
caaaactttttttggtttttttgtttgttcattcaacaagtgtttattgagcatctactacatgccagacactattctagaaacctgggaaaggaggggttagggtagcttggagctgtcccagctgtagctctgtctcccagaagtgaggtctgcaggggaacagggtctgggggtcctcctgcctgggagagggaaggctgagtgtataaaaaggtggaagcctctagaaatgagaagggctgggtgtgtgggactcatgctggtgccttcccagacgaaggagagggcccagaggaggcagctttcctgggagcagagacggcagcaggagcgcccgtgcccgggatcaccctccttttaaccacggatatgcaggacttcttgaggggcccgatctgcaagtgggcagtccacactctccaggaagaaggcaggcttgagtctgtgggtgaagagccccgcaaagtgactgtccaggcggctctggaagggggtcaatgggggaggccgggatgccaccccggcggggccgggaggccttcagcctccgcaggagggatcagtctttgcagtcatgtacagcataggaggccaaggcgcggtcaggcgtattccagtcagaccccaaccgtgggcgagaaggggtggggcaggggagcctccagcccatgaaaccagacggagaagctgcgtccattccaactgcaggcagcaggagtgggcgttgcggcccagccggccgcggtcgtagggctcttgtggggagaagtcttcggccatgacccccatgctgacccagccctcgataatctccacctcccagtagtaggtgcctcgagtccagggcaccctcgcccagcacttgctcacaatgggtgaagcgggtgggcgacaaggggtagttgataggacacagcaccctcttgacaccttttggttccaaaacagcttgcaggaacttgtctgctgtgtcgctgtccaaaatccacataataggccaaacttgaggaaatagtccctgggagctttcactctccaagaggttcgtactctcgaggtcttggggctcagcatcagcttccgagtccagcttctgtggcccatcctcgttgccaaccggccccctcagctgcttcccactggttgacgcaggccacggccagcatgtctctcactgcacggacagcttgggatgatttggtgaagctgagctccctcgggggtccaggcccagggccacacccatcctccagggccagacattagtgccgagcgagctcctgcaggaagctgactgagtcagcttcagggacctggctgagattctggcgggctcggctcaggcggctgcgctgttcctcctgtcgccgcaggtcaccctgggagcggcctagcatggcagcttccccctcctcgatgaagcccagcacctgggtctggaagccctgcagggcggccgc

SEQ ID NO: 6682 - DNA, 680 bp, Homo sapiens
  SIMILAR (2)..(679): 931254mologous to Homo sapiens bK65A6.2 (novel Sushi domain (SCR repeat) containing protein similar to Mucins),accession number Z92546,Smith-Waterman Score=1083.
ggaggcagccctgaccgacttaagggttcaggcgcggtcccagcccgggacgatgtccatcggcacggagaaccgtggctctgggctgtccgcagtggccgtccaggaggtcatctcagatgtggtggaagtcaggctggccaacaggcccggaggtctggaggtgctgctgaaccaggaggtgctgagcttcaccgagcagagctggatggacctgaaaggaatgttcctgtcggtggctgccggggacagggtctgcatcatgctggcatcatgggccgttctgtttgtcagtttgcttggcccgttcctgagtgtgtccgtcctgctgcctgagaagttcctcacccacacccacggcctcctcgggacactcaacaacgaccccaccgacgacttcaccctgcacagcgggcgcgtcctgcccccaggcaccagtccccaggagctgttcctgtttggggccaactggaccgtgcacaatgcgtcctccctgctcacctacgattcctggttcctggtccacaacttcctgtaccaacccaagcacgaccccaccttcgagcccctcttccccagtgagaccaccctcaaccccagcctggcacaagaggcagccaaactatgtggggacgatcatttctgcaactttgatgtggcagccactgggagcctgagca

SEQ ID NO: 6683 - DNA, 1233 bp, Homo sapiens
  SIMILAR (825)..(1121): 451254mologous to Homo sapiens Neural thread protein,accession number AAR95913,Smith-Waterman Score=134.
cccacgcgtccgcccacgcgtccggcctaaaacccaaagaaaagcaccacaaaaacaagaccccgttcagagatgtgtcatataggtattgtccgtgtcgaagtcagaaatacatttgtggcatgtggaataggctttatggacacacagatatcaagtaacctgatctcttgctgagtttaaggcctgtcacgtaaatgcacactgcttacgttttctttttatttccacttttgaattggggataaaaggggaaactggtgaaggaaagacatgttcctagagagctgaacacctgtaatattgactaatagaagggaagagagtaggtaggaagtaagtgcaataggaaactggtaaacagagaagagaaaaaccgtgttttgagatggattggaggcattttttgtccacacacttgctttggggatttttattaggtagacggtaattagaggtgtcagtcatatgaaagtaaatcactagtctttcgtattactgttttctcagtggtccttatcagttttttttgttgctctgtaatcattcatatggtaagacttaacttttagtcatgtaaatttgtttagggacaatttaaactattttgtcaaattagtcgttttattccaagttgtacgtcttatgcatttatttagtatagtgaaagccttatatacacatttgaatatgaattagtctctgggatatttgggattattttttagtagtacttttttaggagtgtggggttttttcttttccttttctgtttttgagacagtgtctggttctgtcaccccaggctggagttcggtggccccagtcttggctcactgcaacctcaagactccccgggctcaagccgtccttcccacctcaccctcctgagtagctgggacctaacaggcacttgcccaccgtgtctggctaattttagaatattttttgtagagacagggtttcatgtttccccaggctggtcttgaactcctaaggctcaagtgatccacccactccccaaagtgttggggattgtagggcagggagccaccacaccctggcagttttttccttcttgttttgagatggggccttgctccatcacccgagctggagtgtaggtagcatgatcatagctcgctgcagccttgaaatcctgggctcaagcgatccccctgcctcagccttccaagtagtggggactattggtccatgccaccatgcttagca

SEQ ID NO: 6684 - DNA, 498 bp, Homo sapiens; identical to SEQ ID NO: 172
  SIMILAR (325)..(486): 621254mologous to Homo sapiens Human secreted protein, SEQ ID NO: 7003,accession number AAG02922,Smith-Waterman Score=153.

SEQ ID NO: 6685 - DNA, 2970 bp, Homo sapiens
  SIMILAR (71)..(1645): 631254mologous to Homo sapiens bK65A6.2 (novel Sushi domain (SCR repeat) containing protein similar to Mucins),accession number Z92546,Smith-Waterman Score=1612.
agggagtgagcttgtctggccgcctcgcctcggagccactgcactgctggctgcagacacaggctgcaccatgaaggacaggccctgcacatggggcagccagtccagtacccgccgggccaggccctcagcatcctctcctccagatgcccaagagagctgctccatgcgctgtggcgccctggacgggccatgttcctgccacccgacgtgctctggccttggcacctgctgcttggatttccgggacttctgcctggagatattgccctactcaggatccatgatgggggcccagaccatcgagaggctcagcctgcaatgacccagcccctcccaccaccaccacgcccacaggtttaaggacagcatccagaccctcggccatgtggactcctccgggcaagtgcactgtgtgtcacctctgctctatgagagcgaagcctcagggcctcctccctgcttccctgggcccaggccctcactcacccctcacctcccctgcccagtgcaccccaacaaagtgtcaatgatggagaagagcgagttggtgaacgagacgcgttggcaatactacggcaccgccaacacctcaggcaacctcagcctgtaggtggcaaggcctggggccaggcctcgaaggaaccccagggctaaccaggcatcctctccctcaggaatgccctactcacaggagtggactgcaaagtggtcgtacctgtaccccctggccacacacatccccaactccggctctttcactttcaccccaaaacctgctcggggtggggagagtggggcgaccatggggtggtgtgggctggcccagctccagcatcatcacctccacagggacgtgcaggcgctctggaccaacgaccacgcactggcctggcacctgagcgatgacttccgagaggaccctgtggcctgggcacgaactcagtgccaggcctgggaggagctggaggatcagctgcccaacagggttggcctcagggaggggatgacagaacccgaggccactgggtgacagccacctgctgctctgcagacggactacggctgtgccggtatggggattggggtcaggggtgggctcccaacagtggcctggccctgactcactggctcctgcagcctccggtacggctcaggtcagcagtgctgctacacagcggacgggacgcagctcctgacagctgactccagcggcggcagcactcccgaccgcggccatgactggggcgcacccccgttccgcacgccaccccgagtgcccagcatgtcccactggctctacgatgtcctcagcttctattactgctgcctctgggcagccccagaccctgggaaagatcgggctgggctggggtgcacccccacgtgaccctccactctcaccctagcctccgccttcggagacccacactttgtgaccttcgacggcaccaacttcacattcaatgggcgcggagagtacgttggcatggggtagaaccaaggtgggaggctggagccaagtggctcccgttctgctcccaccaccgcaggcacggagacccgtggcactgggctgaccgcagtggccgtccaggagggcaactcagatgtggtggaagtcaggctggccaacaggaccggacctgaaaggtgagcagtccagccacgcgaggctgcgggctgccctcacctcctccccattcctgcagggagactgaggggaagccctgggccttcatgcctctcccagtcctggctagaggcctgggtggtccgacctcaggccttcacacccaccgaggtgcccccgtcgtacccacctggtcaaaagccgaggcatggcaggggtggcggagggtcatggtcagcagaattggccccgggaacgccctcccttcccctgcaggtgccctcacccacagcccctgggtgccgaccaccctgtcctggggctgcgggaggggacaagatgctcacagcgggtgaccctaatgcatcccccttgagcccaggaatgttcctgtcggtggctgccggggacagggtctccatcatgctggcatcaggggccggcctggaggtcagcgtgcagggcccgttcctgagtgtgtccgtcctgctgcctgagaagttcctcacccacacccacggcctcctcgggacactcaacaacgaccccaccgacgacttccatggcacgggcagggcttggggaccaaagggagccatgcccagccaggccccggtcatgtatcttccagggaccgtgcacaatgcgtcctccctgctcacctacgattcctggttcctggtccacaacttcctgtaccaacccaagcacgaccccaccttcgagcccctcttccccagtgagaccaccctcaaccccagcctggcacaagaggcagccaaactatgtggggacgatcatttctgcaactttgatgtggcagccactgggagcccccgggcactgccagatgtgtgtatgcatggcagctcaggcctgttgtctgcactctgtccccatcccagtggtgtcctgtggctggctggccccacctcccaacggacaaaaggagggcaacaggtacctggcgggttccaccatctacttccactgtgacaacggctacagcctgacacctgcctgcacctgtccccactcaccaccccagagagccccctcactgacactcgctccctcaccaggacgcagctacgcggtgctgttgggcatcatctttgggggcctcgcggtggtggcggcggttgcgctcgtctatgtgctgctgcgccgcaggaagggcaacacgcacgtctggggtgcacagccctgatgggagcagcttggctgtgagcaccaggccaagactcctgagaacaggcagcccagtcctgcgactcccgcatccccaggaccagacacctgggacctgggatacttgatacctgggcatttaaccc

SEQ ID NO: 6686 - DNA, 422 bp, Homo sapiens
  SIMILAR (28)..(378): 511254mologous to Homo sapiens NAG13,accession number AF194537,Smith-Waterman Score=265.
aggccaaaacccaaaaattctttttaattggggggggagaaagctaataaaatcccccatcctctcatgataaaaaccctcacaaaactgggcatagaaaaaacatacgtcaacataataaaagtcatacccaacagacccatggcctgtatcataataaatggaacaaaagtgaaagcctttcctgtaagatttgaaagacaaagatgttcaccttccccattgctattcaacataggattgaaagtcccagctagagcaattgaaaaagagaaagaaatgaagggtatatgaattggaaagaaagaaatcaaattatgcttatctggaaatgataatgaccttatatttgaaacaacctaaaaactcccccaaaactattagaactgatacattcagtaaagttgcaggatacaaaaata

SEQ ID NO: 6687 - DNA, 660 bp, Homo sapiens
  SIMILAR (646)..(365): 711254mologous to Mus musculus putative,accession number AK017460,Smith-Waterman Score=316.
ttttttttttttcagggaggcatacacatctctttatttacaaaatgcggggaagagaaaatatctagatatttgggtgtaattattccaaacatagaaaacacacaatagaatcaagtgaagggaaagctactgtaacagcttaaatactttttaaggagaactgatagtaaatctgggaatgggaaaaaaaacacagagctagaatttgtttagcactccgtcaaagaaggcaaaagctgataaaactggagtggacggaggctccgaatgtggccctccgctgctctctctcctgcagtctcatccccggccttagccctgacctctcctccgaagcccctggtgaagggccgcgatgggaaaccacctgcaggacggcctccaggccgtgaagggccaggagcgtggcgctgagggcccagtccgcccacaacactagggcctgccaaagcaggaagtgggcagagaggagggcggtgccaaccgtgagggccaggctggcggccagcggcctctcagcctctgtcaggttgcccctggtgcccaggtataaccgaactgcttctagaatccccatcagaaacagcagagcaagatcgaggaccaggtagcggtgaggatagctgaacacctgacttttatacgcccacgcgtccg

SEQ ID NO: 6688 - DNA, 1048 bp, Homo sapiens
  SIMILAR (354)..(217): 931254mologous to Homo sapiens Amino acid sequence of a human secreted protein,accession number AAY19512,Smith-Waterman Score= 218.
  misc_feature (1)...(1048): n = a,t,c or g
acgcttttttttttcttgttttttcagggaggcatacgcgatctttttatttacaaaacgcggtgaagagaaaatatctagatatttgggtgtaattattccaaacatagaaaacacacagtagaatcaagtgaagggaaagctactgtaacagcttacatactttttaaggagaactgatagtaaatctgggaatgggaaaaaaacacagagctagaatttgtttagcactccgtgcaaaaggcaaaagctgataaaactggagtggacggaggctccgaatgtggccctccgctgctctctctcctgcagtctcatccccggccttagccctgacctctccctcaaaaancccctgaaagggaagaagtgtggcctaaagatggaaaattgctagccagcagagctggtgggcttgtttgcatttcattgctttaggaacccagagtccactcttgcaccgggcctggcctgcctgtgaaggcagagctggggttgctcagagcacaaggcctaccccatcctgcgtctccagcccgacttggaaacacaggtggggcctggccacggagtaaactgggatctcagaacacaaattaggaccattggggaactagggggtgatgggggatgcagtgagatgaggcctctgttctgaagggctctgtcctccctctcggccctgggggcccatgggggtctgtggaggcctggctgctaaagccagaccccactgacagggctgagtgtgcgctcctgggactcatcttgaaggcagttctgtctggtccctaccctccccgcagctgttcccaacaccagggcctccagcagtttgttctgccctggctcctgctcccactcctgccagaacagatggaaccatccaaaaccatctatggccagtcactaggaaaagtgcccttcctgtccaggaatggggaggtgacagctgggggactggtcaggcccaggaggagggccccagcgtggggtatcccgggtgtccgtagctacctggtgaaggccgaattccgccactctgaca

SEQ ID NO: 6689 - DNA, 873 bp, Homo sapiens
gcacggcactccggcctgggcaatagagccggactccatcttaaaaaaaaagaaaaaaaaggagggacaagaggcaccagaagctcctgtccaggtctgggcctcccttgggtcactcagttctcccccattcattcattcattcattcactcactcactcactcactcactcattcccacactctgcagccactgacttcagctagccatgctggatgctaagacatagagtcccggccatcaaggccagttccatctcagtgggcatctagacatggcacagagatgaccaggggagccccttaagggacagagaggcacaccctggcctcctggattcccatctggggggcttgcatggaagggaggggggcacaggtgtgggccttgaaggctgggtaaggggctgggagggctttaggggcattccagggggcaggcacagaacttggaggctctgccgggcacacccacaggagagcaatggctggaagggtgacatggactgcagggtgtggccgcggcagcccagctcttaaggggacagcctgggaaaacagacttagggacaatgatcttgagccatgaaatgatgtccaatgccccttgtgccacctgacatcagcctgattaatgaacaaacagaaaaggaagcaggggacctggtgtgtccctctctctgcttttctgtctttctctgtgcccccttttttatgtctctcacgctgtctcttggcccttgtttttaactctgacacgccgtgggaacttggctcacttcctagggggaagctgtctgggactggcccagagatgggcaccacccatttcccaataaacacaagataaaatcagaaaaaaaaaaaaaaaaa

SEQ ID NO: 6690 - DNA, 603 bp, Homo sapiens
  SIMILAR (31)..(318): 431254mologous to Homo sapiens Human myelin oligodendrocyte glycoprotein gene,accession number AAZ29204,Smith-Waterman Score= 167.
gagatggagtctcgctctgtcacctaggctggagtgcagtagcaggatctcagctcactgcaacccttccactgcatcctgggttcaagcaattctccctgcctccagtctccccaagtaagctggggattaccaggcacacggcctatctaaatttttttgtgtttttagtaggagacggggattttgccatgttggccaggctggtctcaaactcctcatctcaagtgatccacccagttctgcctcccaaagtgttgggattacaggcgtgagccactgcgcctgccttacttgttcactttgctgtcaaactatgtgcttcttggtggcttccaggtacttttaattctgggatggtaatcttttctgttataatttacaaataggtgatgtctacttcatctttattatctatttatttattgagaccgtcttactccatcacccaggctagaatgcaatggtgcgatcgttggctcactgccatctccacctcccaggttcaagtgattctcctgcctcagcctcccaagtagctgggattacactcagcatgcgccaccatgcctggctaatttttttgtatttttagcagagatg

SEQ ID NO: 6691 - DNA, 387 bp, Homo sapiens
  misc_feature (1)...(387): n = a,t,c or g
ttgaaatgtacatagcaaaagatcattttacagttcatttaaatgtattgctaatttttcaaggaaaagtggaactaactatagaggaattaaaggaattttacccgttaactgttggatttttaaaatcccaggactttcaggtggtgnnnnnnnnnnnnnnnnnnnaaaagggagtttctttttgccccccaccctggggggctttgacccaatttgggttaattgaaccctccccctcccgggttaaagaatttttcttgcttgggcctcccaagaagtgggaataaaaaggccaatgcttgcccccgggcccagtaaattttggatttttaacaaaactgggggttttcccttgtggcccaggttggttggaaatttataacc

SEQ ID NO: 6692 - DNA, 436 bp, Homo sapiens
  SIMILAR (3)..(44): 711254mologous to Homo sapiens dJ947L8.1.5 (novel CUB domain protein),accession number AL355178,Smith-Waterman Score=58.
  misc_feature (1)...(436): n = a,t,c or g
aactatctggtgtgatgctcagtcctgggtttcctggatactatcttttcagtacataatgcatcatggacaataaagcgacccataggtattgtgtgtacatctccagttcgtaaatttttctacagaaaccatacatgattatttggaagtacgaagaggatcctcagaaactagtactggtattggccggcttaatggacctcaaataccatgtttcttattgagcaccacccatgaaaccagcttatattttcacagcgactattcacaaaacaaacaagggtttcatattgaataccaaggtgagagaagtaataaaaaatgaaaatttatataaccccaaatcagctattagaaatatttaactgagtctaattattttctgtattctgttttagaaagnnnnnnnnnnnnnnnnggnnnnnnnnnnnnn

SEQ ID NO: 6693 - DNA, 553 bp, Homo sapiens
  SIMILAR (354)..(184): 591254mologous to Mus musculus putative,accession number AK007194,Smith-Waterman Score=169.
tcagacccacgaacagaaacagaaagtcacaaaatgctaactgattaaagaagttcatatctgagtttaactgctttgccttttctttacccaaatcagaagccataacaagaaaccgggcgtcgagggctgcttctctggttcggctcacgccatcaaagaaggacgttggcttcctccagaagcctcggttaaggagttgttcgccgagctcacgatgtcctcccggttctgccgcacgcagtacatgagctgccggtactgcctgcggatgctgcggcacttctcctcgtcagcggtgagctccaggagctttgggtctacgtcggcctccccagagctgaggtcgtcggagcagcccgcggccctcactgacacatccatcttcatcagcgctccctccgccgccgcctacttcgccgcgtactcgctaccggggatgatcacgagctgctcctctcctttctcttcgtctcccttccgggaagctttttcaaccaacatgccggccacgggtatctctgaggtaacggccctcccagcgtgtggaaag

SEQ ID NO: 6694 - DNA, 377 bp, Homo sapiens
  misc_feature (1)...(377): n = a,t,c or g
aaaaattgtcacctagcaaaccaattttagccagtacattaatgggccctatataccatagcaaagtgaaatttttcctggaatgaaaggacagttcaacatacaaaaatcaatcataatgacataccacattaacataacaaagaataaaaatgacatggtgatttccnnnnnnnnnnnnnnnnnnnnnnnnnnnnnnnnnnnnnnnnnnnnnnnnnnnnnnnnnnnnnnnnnnnnaatagaaggaaattactttccaataacaaaggaaatgaaaagtccatagctaatatcatactcgatagctaaaagctaaaagctttttctcaagatcaggtaaaaggcaaggatacctactgtccctacttttattcaac

SEQ ID NO: 6695 - DNA, 979 bp, Homo sapiens
  SIMILAR (184)..(38): 571254mologous to Homo sapiens HSPC093,accession number AF161356,Smith-Waterman Score=141.
ttttcaattggacacggggtctcgctctgcacccatgctgtagtgcagtggtgtgataatggctcactccatcgctaaaagcctccaaactcctgggctcatgggatccttcaacctcagtctcccaagtaggtgggactacaggcatataccaccatacctggctaattttcttatttttttcatagagatggggtcttgctacatcacccagggatcccactttcctactttaaatggcctgtctttatccagcttagccaataaaatccaaggaaacattgggtcagacctagtagaggacacagggtgaaaggacttctatgggaggggggcagtggggcagcatcttgagggctgaagctgggctgtgggattcatttggcggagggggctttgggagacagcactggacttaaaagtgcggaagcttgaggctgcttctgggacagggctggattctcactggtgagaaggccccatgaagccccctaaaggtccaccttctcctaaaagttcccatcagcccctccccaagaagttgaggacagatggcagaatcacaacacccagcacgcacagtgtgagccctgctgcctgcccctcttctcttcaggagcccaggatttattctgattgtacagaaccactgtgactattatccaaccccttcacactgggacccctcctccagatgtagttggagttgaagggcccaggcctgctgcatgtgcagtccagtcatgtactcaagacagggttctcacaaacagctttctgcagaaaggcaaacagaaaggcttacaggctcaactcgtgagcagaacaaaataaccctggattttccttcataaaggaaaagtcattaaaaggcaatgattgggaaagaggtcagcagaccaatttagggatttccccatattctgcaacactagttacgtgattttggactcatcatttaacccttgaaactgcttcc

SEQ ID NO: 6696 - DNA, 409 bp, Homo sapiens
aataaggtatttcataacaataaaaggtcaattcatcaagaaaacaaaactatcttaaatgtacatgtgcctaataacaaagatcccaaatagctgaagaattgacaaaactaacagaagacacagacagctcaataatcatagttaaagactttaacaaccctcttagcagttaacagaataagtactcaaaatatcagttaagatttagaaaatttgaaaaacactatgaaccaacttgaccaaattaacatttatagaacattatgccaagcaacaccaagatagagcatatgatgggtcataaaataagcttcattaagtttcaaaggatcaaaatcatacagaatacattctctgagaatggtgtgactaaatctaatagatatcttgaaaatcctaaattatc

SEQ ID NO: 6697 - DNA, 414 bp, Homo sapiens
  misc_feature (1)...(414): n = a,t,c or g
gaaaggggcaggacctttatggagaagtttagaaggtcttactgaaggttataaagcaagttctgaacaaatggaaagatatgtcgtgttctaacaattaacatactaatttcatttccaattagaattgcattaaagtttttttttaattggatgaaatctcagctttgtttagtagaataaatgctgaagaatagccaaagaagtattnnnnnnnnnncagtgatgcttgggagggcatttgcctcaccacatatcagaagatcctataacactacttttagccaatcaatatggtgttgctataggaccaaacaaatagattagtggaccagaacacagaatccagaaaaagatctcaggatataaggcgatttaatatatgacctcaggtgctgttccagttctcgtgcc

SEQ ID NO: 6698 - DNA, 440 bp, Homo sapiens
  SIMILAR (3)..(233): 1001254mologous to Homo sapiens FLJ00004 protein,accession number AK000004,Smith-Waterman Score=391.
  misc_feature (1)...(440): n = a,t,c or g
aactgatcaaggagggccaaatccagaaactgtcagccaagaacggcaccccccaggaccgccacctcttcctgttcaacagcatgatcctttactgtgtgcccaagctgcggctcatgggccagaagttcagcgtccgggagaagatggacatctcaggcctccaggtgcaggatatcgtcaagccaaacacagcacatacattcatcataacgggaagaaaaaggtccctgggagctgcagacgcgatcatccagggccaccatcgagaagcacaaacagaacagcgaaacctttcaaggcttttggtgggcgccttttagccagggattgagggaccccagcctcttttccagacattgcctattcacggaggcaccagccnttttgggagcntgttggttgaccaccgaaggcagtttcgggttncagcagggttt

SEQ ID NO: 6699 - DNA, 391 bp, Homo sapiens
  SIMILAR (3)..(299): 901254mologous to Homo sapiens FLJ00004 protein,accession number AK000004,Smith-Waterman Score=453.
gggaagaagacattgtcaacccggccaatgatctgatcaaggagggccaaatccagaaacggtcagccaagaacggaaccccccaggaccgccacctcttcctgttcaacagcatgatcctttactgtgggcccaagctgcggctcatgggccaaaaattcagcgtccgggagaacatggacatctcacgcctccaggggcaggatatcgtcaagccaaacacagtccatacattcatcataacgggaacaaaaaggtccctggagctgcaaacgcggacagaggaagagaagaaagactcggattcagatcatcccggccaccatcgggaagcacaatcagaactggggaaacctttaaggcttttgggggcccccttaaccagggatgg

SEQ ID NO: 6700 - DNA, 1868 bp, Homo sapiens
  SIMILAR (9)..(575): 771254mologous to Homo sapiens FLJ00004 protein,accession number AK000004,Smith-Waterman Score=691.
caagatacattgatgtcctaggccggcgatacactgcgcctggactgggataactatggaggcacccagcgcaatctgctgtgcccacagcccactgtggggaccctgtcagcctggctgcagcaggggacggctctccagacataggccccacgggagagctgagtggtagcttaaagatccccaaccgggacagcgggatcgacagtccatcctccagtgtggctggagagaactttccctgcgaggagggcttggaggctggcccaagccccactgtactgggggcgcacgcagagatggccctggacagccaggtcccgaaggtcaccccccaggaggaggcggacagcgacgtgggtgaggaacctgactctgagaacaccccccagaaggctgacaaggatgccggcctggcccagcactctggcccccagaagcttctccacattgcccaggggttccttgccccccgaggagacctattgtgaagcggctgcacctggctggaccagggttttctgcaccaggggctgacggatgcgggggatccctccagaaaggtcatcatggggccataattctctaaacatcttcctcccattccaaccggcttcccacgggcagttcctgctgccggagctgaagacgcggatcacggaggagtgggacacaaacccacggctcggggacatcctgcagaagctggccccattcctgaagatgtacggcgagtatgtcaagaactttgaccgagccgtagggctggtgagcacgtggacccagcgctccccactgtttaaagacgtcgtccacagcatccagaagcaggaggtatgcgggaacctgacgctgcagcaccacatgctggagcccgtgcagagggtcccccggtacgagctgctgctcaaggactatctgaagaggctcccgcaggacgccccagaccggaaggatgcggagaggtccttggagctcatctccacagccgccaaccactccaatgctgccattcggaaagtggagaaaatgcacaagctcttggaggtgtacgagcagctgggtggggaagaagacattgtcaacccggcccatgaactgatcaaggagggccaaatccagaaactgtcagccaagaacggcaccccccaggaccgccacctcttcctgttcaacagcatgatcctttactgtgtgcccaagctgcggctcatgggccagaagttcagcgtccgggagaagatggacatctcaggcctccaggtgcaggatatcgtcaagccaaacacagcacatacattcatcataacgggaagaaaaaggtccctggagctgcagacgcggacagaggaagagaagaaagaatggattcagatcatccaggccaccatcgagaagcacaaacagaacagcgaaaccttcaaggcttttggtggcgccttcagccaggatgaggaccccagcctctctccagacatgcctatcacgagcaccagccctgtggagcctgtggtgaccaccgaaggcagttcgggtgcagcagggctcgagcccagaaaactatcctctaagaccagacgtgacaaggagaagcagagctgtaagagctgtggtgagaccttcaactccatcaccaagaggaggcatcactgcaagctgtgtggggcggtgagtcccgggagagggggacagggacaggaggccaccctgtcctctgctctgacagagcagctgagtcctcaccagcagcacaccagccatgcacaccagccctgcacggaagggcttcctgatcctggctcatggatatagatacccttgagtgcaaaactgtcctgtccgaagtagaatcaaatcacttttctctg

SEQ ID NO: 6701 - DNA, 404 bp, Homo sapiens
  SIMILAR (178)..(345): 621254mologous to Homo sapiens Human secreted protein, SEQ ID NO: 7124,accession number AAG03043,Smith-Waterman Score=157.
  misc_feature (1)...(404): n = a,t,c or g
gatccctaatccaggagccccagtgcctcatgtgcaacagctttgaagtgtgaaggatcctaaaaaattttaggttgggtagggatgattaacagattattttcatcttccctctttacagattattttccatccttccctctttaaacttttgtatatttttcacattttctagaaggaagttttagaaacagaagtgggaaaaaaaacaacttaaaaaaagccccgggccaggcgcagcggctcacacctgtaatcccagcactttgggaggctgaggtgggcggatcacgaggtcaggaaatcgagactatcctgggccaacacagtgaaaccccgtctcttacttaaaatggcaaaaatttaggccggggcatggtgggcgggcgctngttagttcccag

SEQ ID NO: 6702 - DNA, 352 bp, Homo sapiens
ttcacatgctggttgcttaatccgtttctggaggaagagtatgacacccacacacagccttcccttgacgcctacatttctaggcacatgtgaggcatctttcctggagccccgagccagccctgtccctccccagtgcagcatggcactcaggagatacaggctggacatggggcagtcgttctggggaggcctgcctagcagccacccacctgatccctcccggccaggcttcgtgctggggtgggccatgtgccaggacaggagggtcccggcggaaagccagccccggactcatcgtgacattgagatcccactggagggtaggggtggtaataaacttctccaaacg

SEQ ID NO: 6703 - DNA, 1430 bp, Homo sapiens
  SIMILAR (741)..(1103): 351254mologous to Homo sapiens Human secreted protein HUSXE77, SEQ ID NO:180,accession number AAY86265,Smith-Waterman Score=134.
ctgtctaaaatgacaacgcatcgtttggagaagtttattaccacccctaccctccagtgggatctcaatgtcacgatgagtccggggctggctttccgccgggaccctcctgtcctggcacatggcccaccccagcactgaagcctggccgggagggctcaggtgggtggctgctaggtcaggcctccccagtaacgactgccccttgtccagcctgtatcttctgagtgccatgctgcactggggagggacagggctggctcggggctccagggaaagatgcctcacatgtgcctagaaaatgtaaggcgtcaagggaaggctgtgtgtgggggcacctgaaggggctgggcttcccagggcatctgaagtttctttacggagccctaataggcacatccccaaaatggtttgtatgaggatgagcacaaaaatagcagatggggtcaccctcaccctccactgacaatggaattgggatcggacttcatgatgcaacattccttctcggccgtaggttccacatccatgggttaggtgtgctggcctggagcccgccggccccggtccccaccgcacaaggaccccatcacaagtgggtgtcatactcttcctccagaaacggattaagcaaccagcatgtgaaccttacgctctgtttaccccgctgagtccccacagctcttccagcttcagccaggccagggtcaccttcagattgaatgtgcagggcccctgaggactcatgtcctgagatggcccttcttcctgggatgggacccccgggttcaggtgagaggtgttcccgggccccttcacctggggctcaggtgacaggaggtgttccgggccccttcacctggggctcaggtgagagcaggtgtttccgggccccttcacctggggcctcaggtgaagaagcaaagtgttcccggagccccttcaccgggggctcaggtgagagcaggtgttccggagccccttcacctggggctcaggtgagagcaggtgttccgcgccccatcacctggggttcaggtgagagcaggtgttcccggcccccttctcctggggctcaggtgagaacaggtgttaccgggccccttcacctggggctcaggtgagagcaggtgttctgggcccctgcatctaaggcctgggagttgaccctgtcttcctggccccagaaagaaaagggccaccacagagatcacaggagaagggacacaagcggggagggtcgcaggctgccccaaagcccagctccaggctcaggaaagcccctccccactcaccccttccggagggcctgggtctgcggaggaacggggcttagggggtctccgagggttagagtgctccaggctcgggtggggaggaggaagatgtgttcgggtgctgagggcctcctgcgttgggcccagagggcc

SEQ ID NO: 6704 - DNA, 389 bp, Homo sapiens
  SIMILAR (4)..(375): 751254mologous to Homo sapiens carboxypeptidase N precursor (AA -20 to 438),accession number X14329,Smith-Waterman Score=497.
catctgaccttttgccaccaccactatgatgatcgggtgcgggggctgtacaaagggcaaaaggaatgccccggcatcccgcgggtctacaggattaggcacatcggggaggggagacacctctacgtgctgcagttcaaggaccaccctggaatccaccaacccttggaaccacaggtcaagtatgtggggaacatgcacagcaacaaagcgtttggccgctagctgatgctgcagctgtcagagtttctgtgcgaggagatccggaacaagaaccagcgcatcgttcagctcatccaggacacgcgcattcacattctgccatccatgaaccccgactgctaccaagggggttgttgccaagggcccaaacaagccctggttatgta

SEQ ID NO: 6705 - DNA, 392 bp, Homo sapiens
  misc_feature (1)...(392): n = a,t,c or g
cacgagcaggttatcccttttttttaataaaaacacaacagggcaagcccccccccgtcataaaaaaaannnnnnnnnnnagtcacaacaaaagggcggtgatacaaaaacaccccacacggatgtcccacagggttagcagcccccatataaacagagggggggggcnnnnnnnnnnnnnnctttttctttcattttttcctattctattgtcttannnnnnnnnngccacccctcacccaggtcccacctctccaaggctccacccctcacccaggtcccacctctccgaggttccacccctcacccaggtcccacctctccaaggccccgtgcctcacccagatcccacctctccatggctctacctgtctcccagctcctacctctac

SEQ ID NO: 6706 - DNA, 576 bp, Homo sapiens
  SIMILAR (576)..(532): 801254mologous to Homo sapiens dJ875K15.1.1 (ets homologous factor (ets-domain transcription factor ESE-3A, isoform 1)),accession number AL157952,Smith-Waterman Score=68.
  misc_feature (1)...(576): n = a,t,c or g
ggtcgactttttttttttttttttgtaaccatgatggtctttttaacaagcaagtgactggactgtttgcaaaggaaagaaaacattttccaaggatagtaagtattctacgaattcctagccagcttttgtcttcttgaaaattatcaccataaggaaagaattaaattacactggcatttataagggattaggcacaccaggtaccctatgcttcaatcctgtcctttcatcttccttccatttctctgtcttgggacatggtaatttggaggtgagaccaccctttcttgtccctgacaaagaatcctgtcatctgcagaatctctattcttccagctggctcctagcagggtagggagagacacagaaagagagagtcaccgttccacttcagatgctgcaagttgctgtagaggagctgccccgccgtcccagccgcccgggtgaactcctgcaaactcatgctgcaaaggtgctcgccgttgatgtcgaactcttggaaagggatacaattggcatccagctggttgtgttccngaggtgctggagccactcccacacctgttacttggt

SEQ ID NO: 6707 - DNA, 704 bp, Homo sapiens
  SIMILAR (2)..(319): 401254mologous to Sus scrofa pol protein,accession number AF038600,Smith-Waterman Score=163.
cacggactccaagtgtccctttctagttcaccaagcccatgctgccatgtgaaaggaaaggcacttcctcaccgctaatgggtcttgcattaaattccatcaagacatcaacaggctattatcctcagtgttcctcccatgagaattagtggtcagacattgcagagggcatcagaagcgggtagatgaaatagccaaaggaaacaggctagcagaccaaagagctaagtcagcagtaagaaggccccaaggtcccaaaacacttgaggcccctctgatttgggagggctacataagggaaataaagcctcagtattcccctacagagatagaatgggccacctctcgaggtatacttttcaaccctcaggatggttacaatcagaagattgcaaagtacgcttgccagcctccagccaatggaagattcttaaaatcctccactgagcctttcacttaggaaagcataagacatcagtgcatccaaagattgttctcaggagaaaatctactaaaaatggtcaaataggttgttaatactcgtgaaaccctcttaaaaataatccctttaacagatgacttcttccccaccacaatcaaaggatgggaagttactcaggggaggactggcagatagacttcacccatatgcccaaaataaatggcattcaatgtcttttggagtgggtgcataccttcattaa

SEQ ID NO: 6708 - DNA, 705 bp, Homo sapiens
  SIMILAR (394)..(516): 801254mologous to Homo sapiens Human myelin oligodendrocyte glycoprotein gene,accession number AAZ29204,Smith-Waterman Score= 199.
ttttagtagagatgaggtttcaccatcttggccaggctggtctcaaactcctgacctcgtgatacacccgcctcggcctcccaaagtgctgagattacaggtgtgggccaccgcacctggctgagtccaagttttatttccctataatttaaaaattatatcattccatgctttgtctgtaggctgattctaaaagttgaaaaccaatgtcattatttttattatttttatttttattttttttgacacagaatttcgctcttgtggcccaggctggagtgcaatggcatggttttggctcactgcaacctctgcctcctgggttcaagcgattctcctgcctcagcctcctgagtagctgggattacaggtgcctgccaccacgcctagcctaatttttgtatttttagtacagatgggctttcaccatgttggtcaggctggtctcgaactcctgagctcaggtgatccacacgccttggcctcccaaagtgttgggactataggcataagccactgttcctggcccaatgtcattatttacattattacgacaatgtaaatatttttctctataccacctagtcctttgctaataaggcattcttttttttcttttttttttttttgagacagagtctcgctctgtcgcctaggctggagtgcagtggcacaatcttggctcactgcaacctccacgtctca

SEQ ID NO: 6709 - DNA, 775 bp, Homo sapiens
  SIMILAR (283)..(393): 971254mologous to Homo sapiens Human secreted protein, SEQ ID NO: 6300,accession number AAG02219,Smith-Waterman Score=167.
aatctgaagtgcgggagagtgctggaccctgagtgatggggccggcgccagctggagagcagcttcgcggagcgactggagagccagaggtgatggaaccagccctggaaggcacaggcaaagaggggaagaaagcatcctccaggaagcgtacattggctgaacctccagcgaagggcctcctgcagccagtgaagctcagcagggcagaactgtacaaggagcctaccaatgaggagcttaatcgccttcgggagactgagatcttgttccactccaggcttgcttcgtttacaggtagaggagctactaaaggaagtaaggctgtcagagaagaagaaggatcggattgatgccttcctacgggaggtcaaccagcgggttgtgagggtgccctcagtccctgagacagagctcactgaccaggcatggctcccagctggggttcgagtgcccctccaccaagtgccctatgccgtgaagggcgtgtttccgacttcctagcccccaagcccaggattactgtatgtgaggcaagctacctttctgggcaacctagcatccgaccagacatcaatgtggatgtggcactgaccatgcccagggaaatcctacaggacaaggacgggctgaaccagcgctacttccgcaagcgtgccctctacctggcccacttggctcaccacctggcccaggaccccctctttggcagtgtttgcttctcctacacaaatggctgccacctgaaaccctcactgttgctgcggccgcaagc

SEQ ID NO: 6710 - DNA, 576 bp, Homo sapiens
  SIMILAR (130)..(576): 631254mologous to Homo sapiens putative p150,accession number U93564,Smith-Waterman Score=501.
atgggagaaagaaggaagctagaagactcagcaagcaaggctatcccaccttcttctgcctgctttgttctagctatgctggcagccaattcgatggtggtcacccacattgagggcaaatggacaccaaaagtgaacggggtagctattcttatatcagacaaaacaaacttcaaagcaacagcagttgaaagagacaaagagggacattatataatgctaaaaggccttgtccaacaggaaaatatcacaatcctgaacatatatgcacctaacactggaactctcacatttataaaacgattgctaatagacctaagaaatgagatagacagcaacacaataatagtgggagacttcagtactccactgacagcactagacaggccaccaagacagaaagtcaacaaagaaacaatggatttaaactataccttggaacaaatggacttaatagatatatacagaacatttcatccaacaaccgcagaatacacattctattcaacagcgcatggaactttctccaagatagaccataggataggccacaaaatcagtctcaatacatttaag

SEQ ID NO: 6711 - DNA, 482 bp, Homo sapiens
  SIMILAR (1)..(342): 901254mologous to Homo sapiens Human hydrolase homologue HHH- 6,accession number AAY58170,Smith-Waterman Score=512.
ccggatttcatcgccgtccagatcaacggtggatttggtgttgacttctctcaagccacggaggacgtgggttcgggggttgccctcgtggcccgaaggatcctgtcgcacggtgtcacctccttctgccccaccctggtcacttcccccgccggaggtttatcacaaggtgaggttgttcctcagatccctgtgaagagtggtggtccccatggggcaggggtcctcgggctgcacctggagggccccttcatcagccgggagaagcggggcgcgcaccccgaggcccacctccgctccttcgaggccgatgccttccaggacttgctggccacccagggtcagggtgagagagagctgggccagggagctgctgcaggatgattttgaggtgtgggggaagcactcttggttggttttggtttgctttttaaaaattgtggtaaaatacataacaaaagtaactttcaacaaaaaaaaac

SEQ ID NO: 6712 - DNA, 1768 bp, Homo sapiens
  SIMILAR (1281)..(1766): 301254mologous to Mus musculus alpha 4 collagen IV,accession number AF169388,Smith-Waterman Score=99.
  misc_feature (1)...(1768): n = a,t,c or g
tttttttttgttacttttgttatgtattttaccacaatttttaaaaagcaaaccaaaaccaacctcaagagtgcttcccccacacctcaaaatcatcctgcagcagctccctggcccagctctctctcaccctgaccctgggcccctctcccacaacccagggctagccctgtgggaccaaccatctctgccagcccctccccgaccctccagccagggaggtggggcgctgtgcggtgaatgggggcaggccaggcccaaaggctggcccagggctcaccagttntgggattggggcgtcccgtctgaggtgggggatgaccaacatgccagctctgggttttagcttgaggatggggcacattcaagcactgacagccagcaagcttgggcacagggcgatgctcaacctctaacacatcggctgagaacctcacctgcctctccctgcctgggagccctggcaagacagctcctctcccaggcccagcacaggcaggcgctggacagccacttcctaaggggtgcgcggccgtcaaggcagaggtgggtatccctgcacctcacacctctcaggaggtcaggatccacatccgtcgcctgctttcctgggctgcccctggggcttgtgggctgagatcaaccccttgtgccctgccccaggccctccctcaggcgaggccctgcccaggcaggtggttcttcccctggctgttccccttccaaacaggtggggccccagaccatcctatctctttggaccctggagacatttcctttaactgggctttgcagcaagagggaaagagaacaagtgcaagagcccaggcgcgtacctcctgtgccccaggacagcacctgtaagcaagggggaagggagccacccaccccagaactcaaatggagagaaagtcaagacaatcacccctgacgtggggctgcaccaatccctgacgtctgaccccactgtggctgtcctcagagccaagagggctccagaagcccacccgcctcgaagctgttccagggggagtcacggcccgtgtttgccacatgggtgtgttccagggccaaggggacacagaagatggcaggatgacactaatggggtgagcaaggcacactggtgcctngccatactgccctccagcaccaggcagggtcaccacagccggcaagcactgggcctggggatgtgtgaagagatagggttattgagaagagaaaacagaacgctggtcatccgtggcactcagggctaggcagtccagggagcagaaaacaggggtcccgggcccagtctccctcctggaggtcagagcggagcccctggcaactgtgccctggcccaagaaccaggctgtgggttcaacgctgcacaccccaaactcaggagcagaaagcaaacccctgactgtccacactccctgtgactggtccccttcctgccggctcttcacccccagcccatggtggcttcaccccatgggcaccagccacttgactgcctgcccctccctcccattagtgacactttcctggggtctgcaggtctccggttccacttcatgcagacaggccctgtcccccactggggcccaaggcccaggctaaactacagcccagccatcccaccccaggccgtgaatgccttctccaggagggcaaccaaggatggtgccacatgtgagcacaagcaaaacccggagccaaggcgagtcctgctgggtgcacgtttatcccagccaccgcctccagggcggcgctc

SEQ ID NO: 6713 - DNA, 778 bp, Homo sapiens
  SIMILAR (66)..(302): 511254mologous to Homo sapiens zinc finger protein (ZFD25),accession number AB027251,Smith-Waterman Score=216.
cctagtccagcgtggtggaattccagtgcttttgacaacacctaaaacttttaaacataaaaaatcatactggtgagaaatcctagaaatgtaaagaatgtgacaaggcctttaaatggttgtcacacttcattataggtaagatagttcatactgaagaaaacttctacaagtgtgaacagtgtggcaaaacttttaatgaatgctcacaccttattgcacaggagagcatttatacttgaaaaaaaatgtacaaatataaagaccatgaaaaagccattaatatctattcacatcttaccactggagagttcatacttaataaaaggaatataagtgcaattactgtcaaaagatctttcagaaaatataaacctttaaagcgaagaaggtatttattttgaagatgaacactacaaatgtgaagagggttgtagtacctttatttgtatcacagattttattgtacacattttgtactagaagaaaactctgaagtagttgctcaaactttgttcaacatcagggaatttatattgaagaaaaactttgcaaatttaataaattttaaaaaacactttttcaaaaagtacagcttagaagacaccagagttcatactaaaatatatttttgcagatgcagtaaaaatgaaaatatttaatccaaaattaagtctatgtaaatatcagagaatttactgtagaaatatataaggcactgagacttcagatattatactaaatcagagtgctgagtatagaaaataaaactgaagtt

SEQ ID NO: 6714 - DNA, 317 bp, Homo sapiens
  SIMILAR (3)..(149): 421254mologous to Homo sapiens line-1 reverse transcriptase,accession number U83303,Smith-Waterman Score=87.
gtccaaaaaaatcaacagaaaaacttctggaagtaataagcaataacagcaagtttacaagacagaaggctaatgtacaaaagtcaatcactttcttacaatataacagcaatgaacaagtaaaatttaaaatgtaaaacacattaccataaaaatgaaatacttaggtataagtgtaacaaaacatatgcaagatccgtatgaggaaaagtacaaaactctaatgaaagataacaaagaagaacaaaacaaatgaagagatattccatgtttatgattaagaagactcgccgggcgcagtggcgaattccacgcac

SEQ ID NO: 6715 - DNA, 456 bp, Homo sapiens
  SIMILAR (140)..(298): 881254mologous to Homo sapiens deoxyhypusine synthase,accession number L39068,Smith-Waterman Score=236.
ccccccaacaattgacatgggccccgttttgggaagaagtgtctgtcaaaggcttctttcatgtggaacacacttctcagcctgtttggctacggtgtcctccctctgtgtctgtctcctgtgactggctgattgggcccaccgtgcccccgcctccccacagcggaacggggccgactacgctgtttacatcaacacagcccaggagtttgatggctctgactcaggtgcccgaccagacgaggctgtctcctggggcaagatccgggtggatgcacagcccgtcaaggtaagcgctggctgggtggggcatagggtctctgggacgatgagtgtgggtcccatggcttacccaggttcccccctacccaggtatatgctgccgcctccctggtcttccccctgcttgaggctgaaacctttgcccagaagatggatgccttcacgcatgagaag

SEQ ID NO: 6716 - DNA, 710 bp, Homo sapiens
  SIMILAR (504)..(569): 631254mologous to Homo sapiens deoxyhypusine synthase,accession number L39068,Smith-Waterman Score=72.
  misc_feature (1)...(710): n = a,t,c or g
ctcagtgggaaggaggtccgggagaacgggatccatagggatcggaaacctgttgggtgcccaattgagaattactgcaagtttgaggactggctgatgcccattctggaccagatggtgatggagcagaacaagaggggggggtttgggttaaaaaaagtggacgccttctaagatgatcgcccggctgggcaaggagatcaacaacccagagtccgtgtattactgggcccagaagaaccacatccctgtgtttagtcccgcacttacagacggctcgctgggcgacatgatcttcttccattcctacaagaacccgggcctggtcctggacatcgttgaggcggaacggggcccgactacgctgtttacatcaacacagcccaggagtttgatggctctgactcaaggtgcccgaccagacgaggcttgtcnccctggggcaagatccgggtggatgcacagcccgtcaaggtctatgctaacgcctccctggtttttccccctgcttgtggctgaaacctttgcccaagaagatggatgccttcatgcatgagaagaacgaggactgagcggctgcgggtcccaggaaggtctttaccccctcttcttatttattaatttgcagacccagcccctcccctactttttggtcagctacggtcttctagaataagatggtatctgaagtccaaaaaaaaaaaaaaaaa

SEQ ID NO: 6717 - DNA, 863 bp, Homo sapiens
  SIMILAR (57)..(401): 731254mologous to Homo sapiens dJ875K15.1.1 (ets homologous factor (ets-domain transcription factor ESE-3A, isoform 1)),accession number AL157952,Smith-Waterman Score=449.
ccaggaacgagcgtcacgcttatgataaaggaacctggaaaacccgaagagctatcatgactgtgcaatgaagtggcgaaacgaatgttgaccgcgcctacaacctgctttaccagacgctggactggacagacagctacgtcacttgctaagaaaacaaggagattgctgcaggccagcggaatgaaagtcattctaatgactggaccaagtaccaggtgtgggagtggctccagcacctcctggacaccaaccagctggatgccaattgtatccctttccaagagttcgacatcaacggcgagcacctttgcagcatgagtttgcaggagttcacccgggcggcagggacggcggggcagctcctctacagcaacttgcagcatctgaagtggaacggtgggcacactggcatctcaaaatcatgcaaggagacccgacatctgtttccattcttctacctggggccaggccatacgttagccacatgcagagctgtctccaagagactccagcccaagctccagtgtgccgtgcatagctttgtgactcccggcattccctatctggatgaaattggttatagagcaagagatttaagagaacctgggcaaggtgtggctgccctcctgcctctgtcttcagatggcaatccccgccgcagacccggcttacccaagctgaaagcacagcgccgcgttcggtttcccagtaacaaaggcaggggtggaccttcttctccacccttccactcagcttttctgaactggcaacacaagaatgtctggatggtcaagaaggaattatcaagttatttgggacctctccagtattaccctggctccttcggtggggctatctga

SEQ ID NO: 6718 - DNA, 390 bp, Homo sapiens
  misc_feature (1)...(390): n = a,t,c or g
aggagagtgagttctgagtcccggtggcgcagcttggagagccgggggcgcagcttggagatccaggggcgcatggagaggccacggtgccagaggttcagggagaacagctgcgttgctcccaggcactgcaaaggcccgggggggaagggtctccaggctttattcctcccaggcactgcagaggcaccggtgaggaagggtctccaggcttcactcagggtagagaaacaagcaaagcccagcagcgcacagggtgcttgttatcctgcagagggtgcctctgcctctctgtgtcaggggacagctnnnnnnnnnnnnnnnnnnnnnnnnnnnnnnnnnnnnnnnnnnnnnnnnnnnnnnnnncccgagctccttagacactcctcg

SEQ ID NO: 6719 - DNA, 503 bp, Homo sapiens
  SIMILAR (260)..(502): 551254mologous to Homo sapiens chaperone protein HSP90 beta,accession number AF275719,Smith-Waterman Score=217.
  misc_feature (1)...(503): n = a,t,c or g
agagctgggaaattgagcctctgggactgagcnccctagtanccggcncgacccacgcgtccgcggacgcgtggnnnnnnnnnnnnnnnnnnnnnnnnnnnnnnnnnnnnnnnnnnnnnnnnnnnnnnnnnnnnnnnnnnnnnnnnnnnnnnnnnnnnnnnnnnnnnnnnnnnnnnnnnnnnnnnnnnnnnnnnnnnnnnnnnnnnnnnnnnnnnnnnnnnnnnnnnnnnnnnnnnnnnnnnnnnnnnngatgatgagaaaaagtccaagattgaagaagatgtgggtgggttcagatgaagaggaggacaatggtaaggataagaaaaagaaaaccaacaagatcaaggagaaatcattgattgggaagaactaaacaagatcaagaacatttggatcagaaactctgatgacattcacccaggaggagtatagagaattctacaagagcttcaccagtgactaggaagaccatttggcagtcaagcacttctctgtagaag

SEQ ID NO: 6720 - DNA, 540 bp, Homo sapiens
  SIMILAR (180)..(392): 901254mologous to Homo sapiens Human secreted protein, SEQ ID NO: 7330,accession number AAG03249,Smith-Waterman Score=315.
aaaagcggcgcggctcgttcaagatggcggagctttaccagttgcctgacgagagctcttcagcaaaagcccttgtcagtttaaaagaaggaagcttatctaacacgtggaatgaaaagtacagttctttacagaaaacacctgtttggaaaggcaggaatacaagctctgctgtggaaatgcctttcagaaattcaaaacgaagtcgacttttttctgatgaagatgataggcaaataaatacaaggtcacctaaaagaaaccagagggttgcaatggttccacagaaatttacagcaacaatgtcaacaccagataagaaagcttcacagaagattggttttcgattacgtaatctgctcaagctttcttaaagacattaatgggggattttacgaagtggttctattcaaatatagaataaaccactttttgaaggtgataatgacttttgtgtatgtctaaaggaatcttttcctaatttgaaaacaagaaagttaacaagagtagaatggggaaaaattcggcggcttatgggaa

SEQ ID NO: 6721 - DNA, 403 bp, Homo sapiens
  SIMILAR (1)..(171): 591254mologous to Homo sapiens Human secreted protein sequence encoded by gene 112 SEQ ID NO:282,accession number AAB56188,Smith-Waterman Score=163.
ttttttttttgagatggactcttgcactgtcacccggggtggaatacaatggtgcaatctcggctcaccgcaacctccactcccaggttcaagcgattctcctgcctgagcctctcaagtagctgggattacaggcgcccaccaccatgcccagctaattttttgtatttttagtagagacggggtttcactatgctggccaggctggtcttgaacccctgacctcgtgatccgcccgcctcggcctcccaaagtgctgggattacaggtgtgggtcaccgtgcctggccaatgccgatttttgaaaacagatttgatctttagggtaaatgcctgagtcagctgacaaactccatatacatgaatatgtccaagtgaaattacctaaagaataatttttttt

SEQ ID NO: 6722 - DNA, 475 bp, Homo sapiens
  misc_feature (1)...(475): n = a,t,c or g
naatagatnacccctgcggnaccgcgcatgatttcgtgtagacccacgcgtccgcccacgcgtccgtgatcccactctgctccattcagacactttctgcttgtccacccagttaaggctaaatactttctctcagcagttatgaccactcatcatctggcctcagcctcccacttcccaccctttgcagcctaatctgctactttcccagctgcgccccagccaatgtggactagtgacttgcctcaacccccctccacttgtctgcccctgggcacttcccctctgcccagcaggcctctccttccagtctccagctgctcgtttttccagacccaactcaaatgccacctcttccaagcactgttccctggcctgccatttctctgaccccacagctcagctttgtcgctgcctctcttgtgactgcctcatgggttcgctctatcaccatcctctgtgccttttcccacca

SEQ ID NO: 6723 - DNA, 453 bp, Homo sapiens
  SIMILAR (52)..(306): 321254mologous to Homo sapiens putative p150,accession number U93563,Smith-Waterman Score=114.
taacagtagatgacttttttatcagacttttagtaatgtaaattaaaaaacaaacataagatgaataagtaaacagaggatttcaacaacacaatagaacaattagacctaacagtcacatttatatctctccactcaacagtagaatatgcaatacttttaatcacacatgccacaatattccagatagaccacctgttaagttaaaaaacacatcttagcaaatttcagcagatggaattacacaaattattcctaactatgatacaataaaacaagaagttaaaaacactaacatgtcaaagaataagtaaaaattaaacaacaaattctcaaacacactcttgttcaagaggttatagacttaatattgttaaaatgtcactactaccaaaagtggtctacggattcaatgttctttcttttcttttctttctttttcttttgagacgg

SEQ ID NO: 6724 - DNA, 440 bp, Homo sapiens
  misc_feature (1)...(440): n = a,t,c or g
tccccctttccccctaaaaatttttatttttcccttagacctttaatttttttaaggggggttggcccaaaattgccccccccaaaaaaaagggttttttccaaaaatcccccagaagtttttaaatcgccccccctaaagaaaaaaaatttttctttcccccccccggtaaatttgggcccccccaaggatcttttaaaagggccccccccnnnnnnnnnnnnnnnnnnnnnnnnnngnnnnnnnnnnnnnnnnnnnnnnnnnnnnnnnnnnnnnnnnnnnnnnnnnnnnnnnnnnnnnnnnnnnnnnnnnnnnnnnnnnnnnnnnnnnnnnnnnnnnnnnnnnnnnnnnnnnnnnnnnnnnnnnnnnnnnnnnnnnnnnnnnnnnnnnnnnnagatcgcgagcgaccgcccacgatctagaactagcccacgcgtccg

SEQ ID NO: 6725 - DNA, 487 bp, Homo sapiens
  SIMILAR (156)..(320): 541254mologous to Homo sapiens Human secreted protein, SEQ ID NO: 7867,accession number AAG03786,Smith-Waterman Score=118.
attttgagacgaagtttcgcttgtcgcccaggctggagtgcaatggcacaatctcggctcactgcaacctctacttcctgggttcaagcgatcctcctacctcagcctcctgagtagctgggattacaggtgcccaccaccatgcctggctaattttttgtattttcagcagagatggcggtttcaccatgttgggccaggctggttttgaactcctgaccccagttgatctgcccgcctcagcctcccaaagtgttgtgattacaggcgtgagccactgtgcccggccgggccccttccttttaaatgtcagcctctggagtgaccatctgtgttggctgggagctcttcggaatgtcccatccagttgctgaggctaatgatcacctctcaggtgcgctggtcccattctctgcgctgtttatgtcactttatgcctggactcctcccaacaatgttctgtcctccacttagagggtgctcagag

SEQ ID NO: 6726 - DNA, 445 bp, Homo sapiens
attgattgttggcacaagtgccaagataattctatgggaaaggacaatcttttcaactaatcatactgggactattggatatccatatagaagaaaagaacctcaaaccttatttcacctatacacaagattgaatccaatggatcataaacctaaatgtaaacagtaaagctttgtttagaagaaaacaaagaaaaactcttcatgactgtgggttaggcaacagttttgtagaggagacacagaaagcactaaccaactggatattatcaaacttcaaatttttgctcctcaaaatacaccactaagaaactaaaaaggtaagccacagactggggaaaaatacctacactatttgcaaaaaataataatgacaaaatatgtgaacatacacataataaaagaagatacatgtttggccaaatgcatgtgaaatggtgggcaa

SEQ ID NO: 6727 - DNA, 875 bp, Homo sapiens
ttttgccggttatggggcgggaactttttatttgaagcaagtttaatcatagcattgccccccagtaccctggtatcctgctacaaggagcatcacaccatgctggcacatggtgtgccctctccactagcctggcatctcagcagacagcagagggcagcagaagctcagctagtggggcccctcccaccagcccccacccggtccactgaaaggcagtgctcctggggggcctctgtggactggtggggccaggggctgcaaaacacgccctcaggccaagcttccactctggggcaccctcggcaggtaacttagggtgctttgcagcttgggccagctctctaaattccaaccaagggagcccgcccagctcaaagggccacatccccaaagacaggggtgaacccagggggacagttccaagcctgaggaaagcgacagctacaggaaggaaggcagaaaggctttcagatgaggggaggtcttctgtccatgggtgagctgggattcccggccatgaaggaaacgccaaggagaacagagacagacacccctggcagctccccgggattgcttctgctgctgttgttattgcttcgggcagaggggctttgcccccaggaggccaagcaggccctcagaagctggcaccaccattctcatccttatcagttccggggggggcccgctgggggtgagcagagggggccccctccaagcagagaggcaaggtaacaggagagcctggtaggcagtgctgaatctgcttgtatggcgcggtgccccgacatgtttatagatggacaccgggtgcagcggacgcgtggttcggccgggtttttcatgggctcaatgatggtcccattggccac

SEQ ID NO: 6728 - DNA, 442 bp, Homo sapiens
  SIMILAR (331)..(438): 1001254mologous to Homo sapiens unnamed protein product,accession number AK002179,Smith-Waterman Score=197.
  misc_feature (1)...(442): n = a,t,c or g
ctgcggtnnnnncccggaatttccgggtcgacgatctcgtctcgccacggtgctgtggaattctctggtttttcacgcaaggtcaggcgtcctgctggcgccctctcgccaccctgccctcccgtcagaagcccggctcctcgccggggaaggccggatgctggcccgccgggacctgggacttgtgccacatggagtgtcgggagtctccattgccgcgagttctacaccacagggccaggctgtttgctccccatcggtcgctgcccccagcaccctgttgttattaaggactcatttgcttggagcggcatcattacaagggtgtgggcaccagatactgctacaccatctcatcggcatggacctatatgtggcagcaagtccatctcatcgcttttggtgaaagtcagtccagtttgtaaagattctcattgtcact

SEQ ID NO: 6729 - DNA, 402 bp, Homo sapiens
aatctttttttttttttttttttcaaagccaaagggtttattataggtacatacagtgtgcgcccgccacaccgccccacacccccgggccccagcggcttctccaggcggccatggggactgcccacaacccaatcccccgactccccagggaggtgctccagccagaagcatgcaggggtgggcttcccctcgcccctcccctcatgaagtggcatttacaactggaggggggaggagagaggaaaacagttttgagctttgacgcccctcccattaaaagccttcgcggatgcggggcgggggaggaggagatcgacgttttgcaaaaaaaaaaaaagtcaggaattaaccgcatggctctgaggcggcggagtgcagggggctagggccccttcactc

SEQ ID NO: 6730 - DNA, 375 bp, Homo sapiens
caccaccacctggccccgttctcatcacttccattcaacattgtactggagaggttctagccaggccaattaacaaagaagcgaaataaaaggccccctgattagaaagaaaagaagtaaaactacctctatttgcagaagaaatacaagaaatgatctggtatatagacaattcaaaggaatccactaaagaaattattagagctaataaacaagttcatcaaggcaacaagatacaggttccatatacaataattagtttttctttacacttgcaacaatctgaaataaaaattaataaaatacctaagtataaatttaacaaaagtgtaaaacttgtgcactgaaaaccggacgcgtgggcggacgcgtggg

SEQ ID NO: 6731 - DNA, 423 bp, Homo sapiens
  SIMILAR (3)..(86): 321254mologous to Homo sapiens putative p150,accession number U93564,Smith-Waterman Score=50.
ctaataacgctcttctaaataacccctgggtcaaaggagcaatcccaaaggaggtcagaccgtatcttgacaaagagaaaataaagtcacagcatagcaaaatttgtgggatgccctaaaaaagtagttagtggaaaattgatagcgctaaaagaatgatgtcaaatcaacaacctgagcttcccccttaagataccagaaaaataagagcaaataaaatcccctgtaaacattaaaaaaaatgtaatttttaaaaagttaaaaataaaaaaaggtttaaaagtttaaaaaaaatagagaaaaatcagtgaaaccaaaagttggttccttgagaaagtcattaaaatttactaatctcaaggccggcatgccaggaaaaaaaatgagaaaagtggtatcactagagattctcggacgcgtggg

SEQ ID NO: 6732 - DNA, 790 bp, Homo sapiens
tacatctacatctatagctatatcaacatccaatttgttctttttctctgagaacacctactgataaataagtttctaagttttgtctatcagttgatgctaaaacattaaaaaaagagaacaactaatactctttttacactaattagaacaatgtaagcctttttgttttattaccaaataatttgtatttcctatgtaattgctgcagttttattttgcatatagattttttttccgtaacatctttgtctgttagtggttttatttatgtatttttttaatatccttagattcatcccacttctgaggtcagacatcacatcttttcactacatgcctctctttgggaggtttctttcttgctaatccaaacaagaacatctgcacaattgtcaacctggaatttactttattaatctcctggtttggaaacactttttcttggatgttatatttactttagtttactattttgttggcttgcactaattttatatgatttcttaataatgagtgtatgttagacattttacttgagtcttttcatatcacgggatgccttttattttaccctcatatataattaattttcatctgggcatatatttccagattagaaatcatttcttttcatacattttaaggaatttatacatttgcatctgaaattgtattcattatcttctagaaaccaagagtggacttggtatccgtctgattatattttctttgttggtaaagagcctcttttttccctttttatgttcatcttctctttctctagagc

SEQ ID NO: 6733 - DNA, 728 bp, Homo sapiens
ctacgatgcttttattcacacttcaaaacaggtgctggacatcttcccattgccccatgccagcccctgctctgtgccccgggaagctgactgtaggtacaggatccatggggcctcgttgctccctggcctccacctagttcagccaatgcgtagccggtagacaagccaagcggtcaggaggggtgaggtcagtgtacagcagcagctcctccctgccgggtcgctgtgtccctctccaaggtcagggctcctggagacggcctctcctgtggctccagctgccctccaggtctcaggggagaggggtcccctgccctgctgcaggggagaggagagagggcagggaggacttaaaaccacgagaataaataggttcgtgtatcaagaacaagctagggatttcaccagctaaataggactgaaaaaattctcaagacaagagcaaaaagaatcccattggtgacctggacgtcgctggccgtggggactgtcccgcagagcacacgcccccgcgtgccactcggctaccattactgttattaataattattattactttaatgattccacttccccttttataaataaattaggcataaccatgtctcggcaaaacttaaagaaacaaagagaccatcgtcgttcctttaacttgcaagccggataaagtaacagaaatatacacggatgtccttacagggcagcgaggagaatgaatagttaaa

SEQ ID NO: 6734 - DNA, 780 bp, Homo sapiens
tttttttttaagattctgaacttttattttctggcatgaaaagtacaaataattaaacaattccatgtaaaagtctgttaccgcggccaggcctgtgatcccggtaataaatagtctaaacgcaacgcgaagtgttcttgttgggttttttttttttttttgtcttttgttttggcttttttttttttttttttttttacagttttttatcacctccaacatggactcttgtcgggatttgaaaccttccgaataaataacaggatgaagggaggggtggaggggctgagccccctcccccctggcctggcccctgccccccagggacgtggaagccccaagtccccctcgcctgggagccccggcctggccccctgcggggaggggctggcctcccagggagggggcctggctgggctgagttttgtgttttagaaaaagaagtcccctcccagtcttgggggtggcaggggcctaggcctcggtggggggggggtgtgtggggaggtgccccctctctggagcctggccccccccaggggtgggggacaaacccagcccttattgctcggaacgccctgctgcaagcttcccacgcggacgtgcgtgttcccgaatgcagagggcggaggggagagagccccaagagacagcaggggagaggggtccctgccctgctgcaggggagaggagagagggcagggaggacttaaaaccacgagaataaataggttcgtgtatcaagaacaagctagggatttcaccagctaaataggactg

SEQ ID NO: 6735 - DNA, 2721 bp, Homo sapiens
  SIMILAR (629)..(1033): 991254mologous to Homo sapiens unnamed protein product,accession number AK000625,Smith-Waterman Score=714.
  misc_feature (1)...(2721): n = a,t,c or g
agatttggaagtgattcaaaggctaaactttttccttggccctccttgtgttctaattgcttgcaagtgtaatactaggatgtccaagatgccagtttttgcttctttgttagttgtcagctgcttttatcaaatttcaggccattatccaacaaaccactataaaaatgtttgaacaattggatttcaaacattttcgttttgtggagtggtgctcaccaagtggtacagccctaagcaagtgaacacaaacacatttaagtgtattttgtctgattagatgttagccagttatgctatttcattcaaatgtctgaaaaaatcaattgactattcccttttcctaaagggcagagacagataatctcacttccagagaaatgacttggagaaaaaaaagtgttggtctttttgctctttcgtaattaaatccggatgtacctcaaaagacttaagactgtggtgataagatgctttcctcagcagaaaggagggaaaaaaaacaactggaactcaaagcttgaaattctgtggcaaaacatgagatgtccaggattggaggttgaaaagatttcactacagtgttctgcaatagttggagcagataactttcagtgtagccacagccatggactccagatttccagattttcaagacctggacctggaacccgaaagagcttgtcacgatgcggcaggaacactggaggtagatttttttttatttttgaattttgggactgttgaccttgctgggagaaaagagacaacgactgagcaagcactaccaccagcactgttactgggaattagaagacctgagtttctgtccagaccctcagtgcaaactgaggatgctccatccaaagtgaattatgtcctgtgcctcctgattgctgagtgttcacctggaccttctgactaccttccctgtgctattccatcagcctacagacctggtacctggatttttgcccgagatgattcctaccaccttactactgacgaagacacccattccagtggaccactgtgacccaggaggcattcagccatcatgatgtggcctttacctccactcctgtcttgttctacccagattcagcacagccctttatagtgaagtcagagtcctcaagccaaatagctaaagctgctttatcacagcaaaggcctagtttgatctatgagcgtgcattacatttcttcagttagagccttcagagacacacaatagatttggaccaggggattttttagatattaatgctctctgaagaaaggcagcatctttttgagagcagcattggaccacaccccacaatatcaaaggattgaaattcatgaacatctaggatcccatgaaggtcactggaccactgttttttctacttcaaatcctgtaggtagccctactgaaatgaggaaaccatattctgaccccattgggatccaaatccaaaggcacagtgaacctcctcatagcatcttctttggaattactcaggaaccagaactttttacacaaatgtaaggaaattctaccaaggagtccccttacctaacaggcatctcacaagggtggcaccagattcccagaaaagggcttctcttgatacatcaaggtagaacctctatgcattttgtgaccgacttattcttagatcattggttttccaaaggctttgtggccatgaagccctttgagtgaaaactgggcagaagcccagagtaaaagtgaagctgctctggatgaaataatggaaccagaagtaggggcctgaatcctgctacaactatcttcctttaccaccgtggtgacacctaaggggacttccttacaacaccttgaactcttccgaacacagtttgaaaaccactgccccagacagcaatatgtttgacctgaatggcattccaatcttttctgtacctccactcagcacagttcatgttcagtagatgctgaacattcttagaaataactgtgtgtgaacttagaaaagtgcaagaagacaggcatgtctttgaccccaggaatgatcatttgctgaagatggtgtcaagtgaacctagattaacagccctccactccaggatggatatccagtgattcctagaatgggatatagcccagagaacaattctatgcaccctacactgacagactcccttaagcaacaccagatgctctactggtacttgaagtacatgactttgaagtcttgaccctccaatngattacctgaattatcagcaagcgggttttgaagctggtgcctcattgaggccatattagagcaacttgtacatttgacctcttgttatcagcccatggtactcctacttccgtgtgcaagagataactatgaaaagccaaattcgaaatactggcaacatttcctaaaggggctcaatatcttatcattcgtcttcttttccaaactacacatcactgtatgactcaaccagtagcagttatattgccccttggtttttattcagtttaactactgtttccaagataaatgagctaataagctttaaaaaaaaaaaaaaaaaggctgaattcttttttcttcatcactgcatatctgcctattctccagaattattatgactattcagctcactttaacagttgaacttcaagcgacaatctttgaacacccctgctccccactgccgctgctgcctcaataaatctgctgatttgctgcc

SEQ ID NO: 6736 - DNA, 450 bp, Homo sapiens
  misc_feature (1)...(450): n = a,t,c or g
nnnnnnnnnnnnnnnnnnnnnnnnnnnnnnnnnnnnnnnnnnnnnnnnnnnnnnnnnnnnnnnnnnnnnnnnnnnnnnnnnnnnnnnnnnnnnnnnnnnnnnnnnnnnnnnnnnnnnnnnnnnnnnnnnnnnnnnnnnnnnnnnnnnnnnnnnnnnnnnnnnnnnnnnnnnnnnnnnnnnnnnnnnnnnnnnnnnngggaaaggtccttttcaaaaaaaatgccctaaaacccacccggggggggagagcccccataacctacccttggaatatnnnnnnnnnnccccccacatttgttagggcctaaatttttggaaaagatttttggccttcctggcttaccgggggggaaaatttttcctcagatttgcttttgggccaaacttggggtccggcggtgaaattccaggggggattaacccccgttccctgcccttaggggaaagggg

SEQ ID NO: 6737 - DNA, 695 bp, Homo sapiens
  misc_feature (1)...(695): n = a,t,c or g
aaaaaggtcctttcccaaaatcccccggtgggttttaaaaaccccccccaaaaagaaaaaaaatttattttcccccccccggtaaaatttggcccccccagggatttttttaaagggcccccccccnnnnnnnnnnnnnnnnnnnnnnnnnnnggactactcagcaatttattaatctccatttttttcatcccacccaagaaatccgcccccaaatatcaacataaaatgcatagccaatcttttcatttttattgctttaacacacattttaattttcagttgaacaaattcttaatgagctacagagtgacatgagttgaaattagaataaagtaaaataatactatataaccaaaacaaacccagtgttacatatcgtgaaataatgcaattaagagcacaactaaaaaaaatcattgattcagttaaacacaaaaggacatggcagggtctcaaacaaggagtatttggggcttctatgtcaatgtcatagggaagagctttttctatttctgggataaatatttcatttttattgattgggccaaaaatactttaaggataaatatgggaccagaaaggcctacagtatttttgccaaattttatctatagccaaagcacaaaactggctttgaactgggtcattaatataatggggcagttcattccatcatattctgtctctgcaga

SEQ ID NO: 6738 - DNA, 484 bp, Homo sapiens
  misc_feature (1)...(484): n = a,t,c or g
aaattgagaccaatcgaggaatctggcacggaaccccgggncgacccacgcgtccgatttatttttattttatttttgtatataatgataggcaggtgtctagtctcattcttctgcatgtggatatctaatttttctagcaccatttattgacaatactgtctttccccaatgtgtgttcttgggacctttgacaaaaaatcagttggctgactttgggctggaataagatggcagaatagaaggctctaccagtcaccctcccctctaccaaccctgcaaggataccaatttaactatctgcacacacaaaaaccacctttataagcactaaaaatcaggtaagcactcacaataactggttttaacttcttattgctgaaagaggcattgaagaggtaggaaaaacagttttgaattgcagacaccatccctcccctgtctccaagcagcaagtgcattgcattgaatagctgttttgtgg

SEQ ID NO: 6739 - DNA, 1626 bp, Homo sapiens
  SIMILAR (660)..(556): 1001254mologous to Homo sapiens unnamed protein product,accession number AK002179,Smith-Waterman Score=188.
tcaagtcatcagttcccagcggttcagccagcgtgtcttgtgaattctcccagggctctctggttttagcagggtctccatgtgcaaaccttgcctttgcacaagagccaccatggcaggaggttgaccaagctgttctggggaggtgaaaggtgctgagaagttgatgcttcctcctaagtgctgtatggagcaggcttggcccagatccaacatgggcacccagcaaagactggttgtctcctggtgtccctgcagccctcccagccatcccctcacttcccactgtggcatgctgcttacagctctctccctccacatgcctgagggcctttctgcaaagaggggttcagagatatccatgaccagccagtctaaccttttcagggtgggagggcagagcagaagttttacagtggatacgaggcatctcagtgcaaagcggctgccagcatacccggacagcccggcacatgcggaggcacttgccgctgctgccactgcgctatgacaaggagttttgtgccttcggaggagcgccaaatccaatgacgaatgagaatctttacaaactggactgactttcaccaaaagcgatgagatggacttgctgccacatataggtccatgccgatgagatggtgtagcagtatctggtgctgccccagtgttacaccgtttatccccagcggcacagccacatcctgaatccttcttcaagagtcctgggagaagaaaataagccccgttaccctctcctcctttctgtcttggagagaagaggcaaaaggcaacttctggggaagaaaaagaaactccttgttctccgctcactttcagaactgatgccctggcagacatgaagcgtgctttcggcacgaaggaggaagaagaggaacgcgcagggcttgattcccggttctccagaattcggaagtggaagaagccgtgcaagcgcactgtgcatcgcgcctgcagcctttcgaaaatagaaaaatagggagtatatgtagtaccccacacccttgtaatgatgccgctccaagcaaatgagtccttaataacaacagggtgcttgcgtgaaaaaccagagaattccacagcaccgtggcgagtgctccccggctgcgaccgcgcctcgggccgcgaggatgttcctatggcgccacctagtgtcggaggtgcagacaacgctctggcgagggctgcaaggacggcctgcgaccagccctggaacctcagacttaggctgggaccttgggatgggtcatcccaggggctccagctgtggacgagtgatgcccttccaccaggcaaaaagccccccagacgtctctctcttcctgctgcaaccaaagctccatcctccaactcctttccaacgtcagtagctggctccaccaggctggccccagttgagctgtattctgcagaaagaacttccaaacgaaaggaataaggcattgttttaccaagagccttttctccctcaagaaacacaatgtaaactaggaaacttgcactttcttttccctttgggtagatgagcagaagggaagagttactacccagggtgaggtcattcctccatggtggtagaatatctggttctttcagtttccccat

SEQ ID NO: 6740 - DNA, 509 bp, Homo sapiens
  SIMILAR (304)..(227): 611254mologous to Homo sapiens Human myelin oligodendrocyte glycoprotein gene,accession number AAZ29204,Smith-Waterman Score= 66.
  misc_feature (1)...(509): n = a,t,c or g
ttgatgacagactctcgctctctcgcctgggcttggagtgcagtggcgcgatctcggctcaccgcaagctctgcctcccgggttcatgccatttctcctgccttaagcttcccaaattagccgggactacaggcgcccggccaaccaatgcccggccntaatttttttatatttcaagcagagacggggttttccaccgtgttagcccnaggatggtgtcgatctccctgacctcgtgatccattccgcctcagcctccccaagtgctgggattacaggcgtgagccaccggtgcccagccaggacattttgaatgttttaaaccaatttgcctgacaggtcaaaaggtaattttttgagatttcgagactgacagatgcaacagagattttaaattttgcataggcttgttaagaacccagactgggtgcagcgactcatgcctgtaatcccagcacttcaggaaggctgaggtgggaggatcacttgaggccaagagttcaacacca

SEQ ID NO: 6741 - DNA, 2616 bp, Homo sapiens
  SIMILAR (1)..(369): 961254mologous to Homo sapiens PDGF receptor beta-like tumor suppressor,accession number D37965,Smith-Waterman Score=615.
atgaaggtctggctgctgcttggtcttctgctggtgcacgaagcgctggaggatgttactggccaacaccttcccaagaacaagcgtccaaaagaaccaggagagaatagaatcaaacctaccaacaagaaggtgaagcccaaaattcctaaaatgaaggacagggactcagccaattcagcaccaaagacgcagtctatcatgatgcaagtgctggataaaggtcgcttccagaaacccgccgctaccctgagtctgctggcggggcaaactgtagagcttcgatgtaaagggagtagaattgggtggagctaccctgcgtatctggacacctttaaggattctcgcctcagcctgtacaactcgaggggccttttgagggaggggcaggcaggcccaatgggtagtcaacccaaggtgaacccacccaccatggccagggttcctcaggttgagcctccagtgggtgaaacctgggagtcctcaaccttactggcagatggggccgttgacaagaggagttcctttgctctctgttcttccttcatttccacttggaaacttgcgaccctaaatgaccctgttcatctactttctcttgtctgcacatggaccctgaggactgctggaaggagccgtacagctcgccacgtggccgtggctgccagtagatgtggccacctcacgtttgcttggcaaaatcaatacatttctctagaaaggttgagcgtgtatatgtgcaggtttgttacgtgggtaaattgcatgtcacgagggtttggtgtagattatttcattatccaggtgctgaaattgattcaggttttacctccagactcagtccatcccagatcccataaacatctcctgtctttgagatcggaaatagcaaagaccacatcctactgtccaaagcactcctctctctccatcccactgcctagaaaccagatgagatctggtgtctcagttacattggagcagaggtcagaaagcaccagctcaccctttcctgtaacagcactgttgtttgtgaacttgacttcatggctgggaaaagggccgattcttcccaagtatgtggctgtgagcgttcagctgagcagagctggggcatgtttttctgatgttacccacagagaagtgctgatgagcttctgctacatggtggttggaggggattttctgttgggaggatcgctggtgtgtcaggtatggttttggtttgtggtgtcaaggggatatacgcttctcattttctcagagtctagagaatatctgaaggaggaagaggagcttttcctttgtaaaggacctggatatgctggacagagggtcaaaaagaatgatgaccccagcagcgtcaagcagaatgagcgctacggccagttgactctggtcaactccacctcggcagacacaggtgaattcagctgctgggtgcagctctgcagcggctacatctgcaggaaggacgaggccaaaacgggctccacctacatcttttttacagagtcaggaggaaggatctccgtgttagtgaacttggtacttacagcccaagaactcttggctcatgaaccatttgatgatgtgtccaggaattctgcccccaacctaaaacaccatctaactgtgacacaaagaaggcaagtggggaagaaagccaagaaaaattatttatttcaggaacactgtggggaaaacacaagaaagcatgtaatacgtattggggtatcactagctctgaagatttctctttgcaaatactgtaatattccctcacagaatgatccagaaaaacaaaggattcaatgtaccatgccaaaaaagaaaagccaccagcaccaacaaaaatacccccaaaagcccagtccagagtttcttgcctgtcctaaggacagaattgagaaaggagaactctttgtaccttctcccagctacttcgatgttgtctacttgaacccggacagacaggctgtggttccttgtcgggtgaccgtgctgtcggccaaagtcacgctccacagggaattcccagccaaggagatcccagccaatggaacggacattgtttatgacatgaagcggggctttgtgtatctgcaacctcattccgagcaccagggtgtggtttactgcagggcggaggccgggggcagatctcagatctccgtcaagtaccagctgctctacgtggcggtcccaacaattcatccaagcctgctttctgctcttcctgtcacatgcaggctccatggtgagtgcagcagctctgagtcggaggccacagttccctccgctcccctcccctcccctcccctctctgctggggcaccaggttacgggaattcccagtggccctccctcaacaaccatcttggcttcttcaaacaaagtgaaaagtggggacgacatcagtgtgctctgcactgtcctgggggagcccgatgtggaggtggagttcacctggatcttcccagggcagaagccacccagcagagttactgggctctgggctggtacttggtggtgcctgtacagagtcctttgatgtctcaggtctctcagccatggatgccggcagctgctctgatggaggtggcaggggagtga

SEQ ID NO: 6742 - DNA, 2586 bp, Homo sapiens
  SIMILAR (1)..(369): 951254mologous to Homo sapiens PDGF receptor beta-like tumor suppressor,accession number D37965,Smith-Waterman Score=607.
atgaaggtctggctgctgcttggtcttctgctggtgcacgaagcgctggaggatgttactggccaacaccttcccaagaacaagcgtccaaaagaaccaggagagaatagaatcaaacctaccaacaagaaggtgaagcccaaaattcctaaaatgaaggacagggactcagccaattcagcaccaaagacgcagtctatcatgatgcaagtgctggataaaggttggttccagaaacccgccgctaccctgagtttgctggcggggcaaactgtagagcttcgatgtaaagggagtagaattgggtggagctaccctgcgtatctggacacctttaaggattctcgcctcagcctgtacaactcgaggggccttttgagggaggggcaggcaggcccaatgggtagtcaacccaaggtgaacccacccaccatggccagggttcctcaggttgagcctccagtgggtgaaacctgggagtcctcaaccttactggcagatggggccgttgacaagaggagttcctttgctctctgttcttccttcatttccacttggaaacttgcgaccctaaatgaccctgttcatctactttctcttgtctgcacatggaccctgaggactgctggaaggagccgtacagctcgccacgtggccgtggctgccagtagatgtggccacctcacgtttgcttggcaaaatcaatacatttctctagaaaggttgagcgtgtatatgtgcaggtttgttacgtgggtaaattgcatgtcacgagggtttggtgtagattatttcattatccaggtgctgaaattgattcaggttttacctccagactcagtccatcccagatcccataaacatctcctgtctttgagatcggaaatagcaaagaccacatcctactgtccaaagcactcctctctctccatcccactgcctagaaaccagatgagatctggtgtctcagttacattggagcagaggtcagaaagcaccagctcaccctttcctgtaacagcactgttgtttgtgaacttgacttcatggctgggaaaagagtctagagaatatctgaaggaggaagaggagcttttcctttgtaaaggacctggatatgctggacagagggtcaaaaagaatgatgaccccagcagcgtcaagcagaatgagcgctacggccagttgactctggtcaactccacctcggcagacacaggtgaattcagctgctgggtgcagctctgcagcggctacatctgcaggaaggacgaggccaaaacgggctccacctacatcttttttacagagtcaggaggaaggatctccgtgttagtgaacttggtacttacagcccaagaactcttggctcatgaaccatttgatgatgtgtccaggaattttgcccccaacctaaaacaccatctaactgtgacacaaagaaggcaagtggggaagaaagccaagaaaaattatttatttcaggaacactgtggggaaaacacaagaaagcatgtaatacgtattggggtatcactagctctgaagatttctctttgcaaatactgtaatattccctcacagaatgatccagaaaaacaaaggattcaatgtaccatgccaaaaaagaaaagccaccagcaccaacaaaaatacccccaaaagcccagtccagagtttcttgcctgtcctaaggacagaattgagaaaggagaactctttgtaccttctcccagctacttcgatgttgtctacttgaacccggacagacaggctgtggttccttgtcgggtgaccgtgctgtcggccaaagtcacgctccacagggaattcccagccaaggagatcccagccaatggaacggacattgtttatgacatgaagcggggctttgtgtatttgcaacctcattccgagcaccagggtgtggtttactgcagggcggaggccgggggcagatctcagatctccgtcaagtaccagctgctttacgtggcgggatggatgttctccttccttgttatgaccctgaccgaaaacccctcttctccattccagccaaatccttccatcgttcactctggtgctgcctctgtgttggatcagcagtcccaacaattcatccaagcctgctttctgctcttcctgtcacatgcaggctccatggtgagtgcagcagctctgagtcggaggccacagttccctccgctcccctcccctcccctcccctccctgctggggcaccaggttaggggaattcccagtggccctccctcaacaaccatcttggcttcttcaaacaaagtgaaaagtggggacgacatcagtgtgctttgcactgtcctgggggagcccgatgtggaggtggagttcacctggatcttcccagggcagaaggatgaaaggcctgtgacgatccaagacacttggaggttgatccacagaggactgggacacaccacgagaatctcccagagtgtcattacagtggaagacttcgagacgattgatgcaggatattacatttgcactgctcagaatcttcaaggacagaccacagtagctaccactgttgagttttcctga

SEQ ID NO: 6743 - DNA, 667 bp, Homo sapiens
  SIMILAR (665)..(354): 961254mologous to Homo sapiens PDGF receptor beta-like tumor suppressor,accession number D37965,Smith-Waterman Score=520.
ctttctagagaaatgtattgattttgccaagcaaacgtgaggtggccacatctactggcagccacggccacgtggcgagctgtacggctccttccagcagtcctcagggtccatgtgcagacaagagaaagtagatgaacagggtcatttagggtcgcaagtttccaagtggaaatgaaggaagaacagagagcaaaggaactcctcttgtcaacggccccatctgccagtaaggttgaggactcccaggtttcacccactggaggctcaacctgaggaaccctggccatggtgggtgggttcaccttgggttgactacccattgggcctgcctgcccctccctcaaaaggcccctcgagttgtacaggctgaggcgagaatccttaaaggtgtccagatacgcagggtagctccacccaattctactccctttacatcgaagctctacagtttgccccgccagcagactcagggtagcggcgggtttctggaagcgacctttatccagcacttgcatcatgatagactgcgtctttggtgctgaattggctgagtccctgtccttcattttaggaattttgggcttcaccttcttgttggtaggtttgattctattctctcctggttcttttggacgcttgttcttgggaaggtgttggccagtaa

SEQ ID NO: 6744 - DNA, 787 bp, Homo sapiens
ctttctgtctgccctggaggtttctcagcctcatgagagctctgctgggccccggtctgggcagaacttgggcctaaacaaacaagagccagggcagccagggtctctgcgtggctgggcccagggcttgccctcagagctcacctgtccaacaaaagaggaatgttcctccactttccattctgtccgcccctttttcagggtcttagggcctctagccctgtggtggggtcctgggtgccacaggtggagctgaactcatgggtctgttgaggagttggtgtccacctggagtctgtacagtgagtttaggtcaacaggtgggcagtctgtccttggagtctgagccacctgccagcagcctgaacaactccaggggccttttgagggaggggcaggcagcctcagtgggtggtcagcccaaggtgacctcacccaccatggccagggttctgtaggttgagcctccagtgtgtgaaacctgggagtcctcacccttcctggcagatggggccattgccaagaggaggtgggcggggcctccccagactccgccctgtggtgtcacacagctggcagccaatggaaagcagccagtcaggaagcccgggagctacccttgatgggtacccttgctgggggacctgggccatcccagtttgtgtagagcggccggaggcagttaggagtccacgttcagtccaaggccgtcctttgagcaccgtgtgactctgacagagctgggggtgtacatgtcctctctggacctcagttcctgtaaaaaggc

SEQ ID NO: 6745 - DNA, 453 bp, Homo sapiens
  misc_feature (1)...(453): n = a,t,c or g
aaatttcccaacccccgaaaaatttgggcccccccaaggaaacttataaaaggccccccccnnnnnnnnnnnnnaaaaaggaattccctttttttttcccgggtgaaagcaaagggggggttttaagtccccgcaaaagnnnnnnnnnnagggtaaaaccattttccgcccccacccccccaaaaaaggggggccccaggggnnnnnnnnnnngggggggaaaannnnnnnnnnnnnggaattttaaaaaaaaagggggtttccccggttaacccagaaggtttttttttcccggccctgggaaacccccgccccggccccccaaaaaggcggggatacagggggaaaccccccggcccgggccctaaaacnnnnnnnnnnnnnnnnnnnnnnnnnnnnnnnnnnnnnnnnnnnnnnnnnnnnnnnnnnnnnnnnnnnnnnnnnnnnnnnnnn

SEQ ID NO: 6746 - DNA, 648 bp, Homo sapiens
ccaaaccctccctttcaagggaagactgccccaggaggatgggcttgggatcagaaggccatccaaaaggccagccctcccctggctctgccagggccctgctgcctgtcccctccccgcctctctccaagttgttcctggacaccaaatggaccccatccaacttgtccctccttttctttcccctgcccgccccctgctggagttgtaagagggcaggcagaaagggaggtgggggaggcccagccaggctgggggacaggagaagcagcctcagttctagctcagcttcccccacagcagagcgtgccaggcccccgagggccgggacctatgggtgatgcctggcactcccttaagtcacaggtggagttgggcctatggccagtactctccctcgtgaccactgggatgggacaagacagtaggggcaacaggtaggaaggtccaggtgtaaggtgagctgggggtgcagccctagagagaggtaggaaggagggacaggggttgctctggaggagagagggttgctccagaggcagagggaaaagacatctggagtgggagtcagtgagccaggttttgtgttccaaaggccagcattgcctggaccttgggtatgtcctcgcctgcataagaggctggcag

SEQ ID NO: 6747 - DNA, 376 bp, Homo sapiens
  misc_feature (1)...(376): n = a,t,c or g
tggttgtagaacttcatacaaatggaaccagccaatatacactcttcattgtctgacttttcacttagtatgtttctgaaatgaatccatgttttgtgtttcagaagttcagaaattatnnnnnnnnnnnnnnnnnnnnnnnnnnnnnnnnnnnnnnnnnnnnnnnnnnnnnnnnnnnnnnnnnnnnnncttcagtttgannnnnnnnnnnnnnnnnnnnnnnnnnnnnnnnnnnnnnnnnnnnnnnnnnnnnnnnnnnnnnnnnnnnnnnnnnnnnnnnnnatcatcagtagtagcaaggctctccctaggagtaagttctgagtttgatgctatccaagtaccagagtttactgactttacattttctcctttt

SEQ ID NO: 6748 - DNA, 864 bp, Homo sapiens
  SIMILAR (3)..(863): 881254mologous to Homo sapiens pericentriol material 1,accession number L27841,Smith-Waterman Score=1254.
gtatgaatttcagccctttatttccttctaattttggagatttttctcagaatatctctacacccagtgaacagcagcaacccttagcccagaattcttcaggaaaaacagaatatatggcttttccaaaaccttttgaaagcagttcctctattggagcagagaaaccaaggaataaaaaactgcctgaagaggaggtggaaagcagtaggacaccatggttatatgaacaagaaggtgaagtagagaaaccatttatcaagactggattttcagtgtctgtagaaaaatctacaagtagtaaccgcaaaaatcaattagatacaaacggaagaagacgccagtttgatgaagaatcactggaaagctttagcagtatgcctgatccagtagatccaacaacagtgactaaaacattcaagacaagaaaagcgtctgcacaggccagcctggcatcctaaagataaaactcccaagtcaaaaagtaagaagaggaattcttactccagctggaaaagcagagtttaaaaacatcaggtatgaaagtgccagtatggtctagcacatgtgaaccttgcaaaagtaggaacagacattcagcccagactgaagagcctgttcaagcaaaagtattcagcagaaagaatcatgagcaactggaaaaaataataaaatgtaataggtctacagaaatatcttcagaaactgggagtgatttttccatgtttgaagctttgcgagatactatttattctgaagtagctacattaatttctcaaaatgaatctcgtccacattttcttattgaactcttccatcagctgcagctactaaacacagactacttgagacagagggctttat

SEQ ID NO: 6749 - DNA, 1145 bp, Homo sapiens
  SIMILAR (2)..(268): 981254mologous to Homo sapiens pericentriol material 1,accession number L27841,Smith-Waterman Score=441.
aaaagcgtctgcacaggccagcctggcatctaaagataaaactcccaagtcaaaaagtaagaagaggaattctactcagctgaaaagcagagttaaaaacatcaggtatgaaagtgccagtatgtctagcacatgtgaaccttgcaaaagtaggaacagacattcagcccagactgaagagcctgttcaagcaaaagtattcagcagaaagaatcatgagcaactggaaaaaataataaaatgtaataggtctacagaaatatcttcagcacatgctaggagaatactacagcagtctaacagaaatgcatgcaatgaagcgccagaaactgggagtgatttttccatgtttgaagctttgcgagatactatttattctgaagtagctacattaatttctcaaaatgaatctcgtccacattttcttatggaactccttccatgagctgcagcttcctaaacacagactacttgagacagagggctttatatgcattgcaggacatagtatccagacatatttctgagagccatgaaaaaggagaaaatgtaaagtcagtaaactctggtacttggatagcatcaaactcagaacttactcctagtgagagccttgctactactgatgatgtattcatccaagagaaatgaaaatatgcatcacaaaaacacttgcacattaatgttcatagcatctttagtcatgatagcctcaaactgaagcatcaagagataaatggataaacaaactgtggtataacctatacagtggaatactgtgcagcccattaaaaaaataatttctgaacttcctgaaacacaaaacatggattcatttcagaaacatactaagtgaaaagtcagacaatgaagagtgtatattggctggttccatttgtatgaagttctacaaccagcagaactgatctacagtgatagaaatcatgagtagggtgtggtggagattgactgtagagggttgtgaagaaacgtcctgggccagtggaaatggtctttatctttagggaatctggttacatgagtgtatacatttgtcaaaactcatcaaactgtacatttaaagtgagtgcattgtatattaattatatttcaataaagtttattttttaaaaatgcaaaaaaaa

SEQ ID NO: 6750 - DNA, 357 bp, Homo sapiens
  SIMILAR (126)..(230): 1001254mologous to Homo sapiens unnamed protein product,accession number AK002179,Smith-Waterman Score=188.
gcctcttctctccaagacagaaaggaggagagggtaacggggcttattttcttctcccaggactcttgaagaaggattcaggatgtggctgtgccgctggggataaacggtgtaacactggggcagcaccagatactgctacaccatctcatcggcatggacctatatgtggcagcaagtccatctcatcgcttttggtgaaagtcagtccagtttgtaaagattctcattcgtcattggatttggcgctcctccgaaggcacaaaactccttgtcatagcgcagtggcagcagcggcaagtgcctccgcatgtgccgggctgtccgggtatgctggcagccgctttgcactgagat

SEQ ID NO: 6751 - DNA, 415 bp, Homo sapiens
  misc_feature (1)...(415): n = a,t,c or g
atatatttcccaaccccggaaaaatttgggccccccaaagaaactttaaaaaagggcgcccccnnnnnnnnnnnnnnnaaacaaaaattccctttttttggcccaggtggaaagcaaaaggggggttttgggtccctgcaaaccttgccccccggnnnnnnnnnnntttcccgccccaacccccccaggaaaaggggtttcaaggatgnnnnnnnnnnnnngggtaaatttgtatttttaaaaaaaaagggggttttcccgggtgggcagggggggttcaaaaccccaaccccaagggatttggcccccccggcccccttaaaccctggggcccnnnnnnnnnnnnnnnnnnnnnnnnnnnnnnnnnnnnnnnnnnnnnnnnnnnnnnnnnnnnnnnnnnnnnnnnnnncgtccg

SEQ ID NO: 6752 - DNA, 3353 bp, Homo sapiens
  SIMILAR (1)..(1605): 1001254mologous to Homo sapiens paraneoplastic antigen,accession number L02867,Smith-Waterman Score=2807.
tatcgaattccgggtggagggacctggcaaagcgccaggccccgcgtgggctcccggcgagcggttgatggcgagggggcgcggcgcgggctctgtagcccgagttcccgacgctggaggcccggcccgcctcagccgcattgtcccgggccgcgcgcaccggccctgagctgcgccgccgcagcacccgcccgccgcccgcggggccatgcggagagccgccgggatggaggacttggctccgcggaggaagaggagtcctggtacgaccagcaggacctggagcaggacttgcacctagctgcggagctggggaagactctgctggagaggaacaaggagctggaggggtccctgcagcagatgtactccaccaatgaggaacaggtgcaggagatcgagtacctaaccaagcagctggacacgctgcggcacgtgaacgagcagcacgccaaagtctatgagcagctggacctgacagcccgggacctggagctgaccaaccacaggctggtgctggagagtaaggctgcccagcagaagatccatgggctgacggagaccattgagcgcctccaggctcaggtggaggagctgcaggcccaggtggagcaactgagaggcctggaacagctgcgagtgctccgggagaagcgggaacgcaggcgtaccatccacaccttcccctgcctcaaggagctgtgcaccagcccccggtgcaaggatgctttccgcctacacagttcctccctggagctgcccgcggcccctggagcaggagaacgagcggctgcagaccctggtgggggcgctgcgctcccaggtgagccaggagcggcagcgcaaggagcgggcggagcgcgagtacaccgcggtgctgcaggagtactcggagctggagcgccagctgtgcgagatggaggcctgtcgcctgcgtgtgcaggagctggaggccgagctgctggagctgcagcagatgaagcaggccaagacctacctactgggtccggtacgaccacctggccgaggccctgctcgcacccctcacgcaggcccctgaggccgacgatccccagcccggccgcggggacgacttgggcgcccaggacggggtctcctcaccggcagcctctccaggccacgtggtgcgcaagagctgcagcgacactgcgctcaacgccatcgtggccaaagacccagccagccggcacgcgggcaacctcacactgcacgccaacagcgctgcgcaagcggggcatgtccatcctgcgggaggtggacgagcagtaccacgcgctgctggagaagtacgaggagctgctgagcaagtgccggcagcacggggccggagtgcgcgacgccggcgtgcagacctcgcgccccatctcccgggacagctcgtggagggacctgcgcgggggtgaggagggccagggtgaggtcaaggcaggagagaagagcctgagccagcacgtggaggccgtggacaagcggctggaacagagccagcccgagtacaaggcgctcttcaaagagatcttctccaggatccagaagaccaaggctgacatcaacgccaccaaagtcaagacgcacagcagcaagtgacccttctccggcctgcagcctcccccagggtggaagccgtggggtccctcaggcctgggcggtgcagcttccagagagcgagcgccctttagcggcctgccaccacagcacgcggcctcctgatccggaagcacgcagcatgttccctgctgagcggaggcagcccacctgtcctgcctcccaggagcccttggccacctcgcgccagcccaaaggcgcagctctgagttcaaagccaaatgtccccactaccccagggatcccccagctcccccagcccctggcttcctgaccctgcgcctcaccctcagactcctgaccaggcttctgaaagccattctggatcagttggctttttttttttttttggttaagtttgttttttctaagagatttgcaatgcaaggtctccttgaccccttgccacaactggaaacacttgaaaggggaccccagggccagctgtttcaggggtttcctggaccacccactgcttctccccaaccctgatgcgctgacattcccttagcaccagctgtcccacctccaggagtcctgaccaggtcagagatgtcccctgccatgcagagcaggaaagcctcagctgggcctggagtgtccctgctccagccctgccagggacaggtttctccctggatactcttggcccaccgcagatctgtagccagtcagaggaggaggagaaggagcccctcagcagagtggtgcagtttcgctcagagcttgtctccttggcttccaaccccagaaatgacctgctgggccttaagctttccaggggccggggcagtggggagcccccattcccttcacaccgccaccaactaaaccaaagcttggcctctgactcccgtctctgtgcttgcccccatctcagggaccatgatgtctcagtcactccacgctccccacaggccaaccctggcacaggtcatgtctgcagcccccagaatcttctggacatgcaccaccagccggtggtcccaatgtccacccctgcctccccttcactggggactggggttttcgccccatgctgcatcgtcgttgtattgggatggggctgaggaacatgctccctccctccctcccataaaatgcctgctcttcacctcccacctttgtggggggcttttgaggacccagctgcgtcaggagttttgcttcaagatgtcagaaagtcaagttcagctaagagacacccaggtccccagcttgccctgagcagcccttcagggcttctggttccttctgccgcccttcctgagaccttagaaaccagaagagccatacagtcagtggaaggcgggggggcccctggcctcctgcaccgggatcccaagtgggaacctttcatgccttatttatttcttaatgggtaaaggggttttcttaccaagcatccctgacctccctggagacaccacctgctttccgggcggccacctgtgaatgggagcctggtggccgacctgagtcccttctgtacgtgcaactgggaaacttttgtccctttgaggctaggcagctccctgccctccgtgtgtgtctgttatctgggggagaaggagtgtggaagggttgggggaagagctccagcctgtctgctccccagctctgtagtggcagaccatgcgtcacctttgaagtatacgtgagagaaatatatttacaaatgctttattttttttctttaataaaaaatgccccagtattctaaaagc

SEQ ID NO: 6753 - DNA, 190 bp, Homo sapiens
aagtagtaataaaaaaaaacctcccaacaaaaatcacccagaaccagatagcttcaaaactgaattctaccaaacattcaaaacacaccatgaataccaattcttaaactcttccaaaaaacagaattacaggaaatacttccaaactctttttgtgaggtaagcatcacgaattccagcacacggagaa

SEQ ID NO: 6754 - DNA, 1106 bp, Homo sapiens
  misc_feature (1)...(1106): n = a,t,c or g
gcccccgctttcttcttaaaaaccctgcagcttggctgacagtgggacctgcctccctactcccgcctgcaggagctcagaagcctcagctcaagaggagcccttgccagagacgtgggaccaggaatgggccccacagagccctgccgtgtgttttccataccagccttgatttcaggtgcccccaccacagatgtagccgggttgcaataaacagcaagaaacggacccatgggacaggagagacgcaggagccccaggggacaagagagacgcagaagccccaggtgcctttggtggccagtgctgaatttcgcaagcaacattagtaaactttttatttctgcttttctcttaacccaagggtgaaaatggaaacctgtggtgtggggccagtctgctgaacgctaggatgagggccgggaacaagagcccacccctcccccgcttgccacctggggccacaaagagccttccccagggggctctccagtttcagcccctccttgccgagccagacagcgctgctggccttggaacgggaggtacacccaggctgactgaagtggggggagcactttttaataaagatcaggatcagggtttcctgaaaaccaaaaaggccccccagatcctgcgagcggctatttagacttgatgcacactccaccattttcacaggtatcccatttccccagcgtcacacatgcccatccccagctggagcacactcttcagtgtggaggacagaaggagcaggcagaagacgaccccggggcgctgggggagcaggtgcgggctcccacacacctgctctattctggttggaggtgtcacaagggaaggcgtggagatgctgccaatggggacatgcggcaaatgcgcccccttcgccccacacctgtcagcagctagcagcaactcagtcctgactgctggagacccagccccaggggcaggcaggttgggatccgctgctcaggaggcagctctgggccagggtggaggccggagaagccaggcacctccccgcagagctctgcagaggccgcacgcgtgggtcgagacgacatctcagtggcgatccgcaggcngtcagttcaaac

SEQ ID NO: 6755 - DNA, 488 bp, Homo sapiens
  misc_feature (1)...(488): n = a,t,c or g
ncttgatcgccatncgttggggcaattcagagggctcctccggcgccgccgagctgcgcccgctgccttcacaccccggacatccgcgccacactgacccagaccccaggaggcctcaccccacagcaagagaaagaccacgagcatggacatgatggtcgcgctcactccggtgcagtgagtgtctgggtgttggatcctggaacctgttctagaaggagacgctgagttctccccactctacctggagctgctgaggtcaagtggagagtgccggggctgaagcccagcgagcccctccctgtcacaccacactgcacatgtgacaccaaaggcatttattgagcatctactgtgtgccagatgcaaagaagacagtgggataactgggcaaggagcattctaggcagagggaacagccagtgcaaacatgggagatgcgggtgcagtgagaagcagcagaggagaccaggagttgaggcgactgc

SEQ ID NO: 6756 - DNA, 331 bp, Homo sapiens
  SIMILAR (143)..(331): 921254mologous to Homo sapiens Human secreted protein encoded by gene 6,accession number AAY76129,Smith-Waterman Score=283.
actgcaccggagtgagcgcgaccatcatgtccatgctcgtggtctttctcttgctgtggggtgtcacctggggcccagtgacagaagcagccatattttatgagacgcagcccagcctgtgggcagagtccgaatcactgctgaaacccttggccaaattaatgacatatttcaaaaactcaacatatttgatcaggctttttatgatctatcgctgcaaaccagtgaaatcaaagaagaagaaaaggaactgagaagaactacatataaactaccagtcaaaaatgaagaggtaaagaatatgtcacttgaactcaactcataacttgag

SEQ ID NO: 6757 - DNA, 1026 bp, Homo sapiens
  SIMILAR (319)..(987): 941254mologous to Homo sapiens zinc finger protein,accession number L11672,Smith-Waterman Score=1177.
atgagggctaggcggttgccctgggccctcacactcgtagcggagctaggctgggacacccagggtggggaccagacctccccgggtgggaatgacaggatgtccatggaggctgagtgtgaaagcaccacggtctcacccctgtcctgttccatcccaacaggctgtggacaaacacgggaagaggtcagtgcccgagccaccccaccgccctcccttggggcctcattgctgcagacgctcaccccagacactcactgcaccggagtgagcgcgaccatcatgtccatgctcgtggtctttctcttgctgtggccttttagccattcttcaacccttgctaaacataagaggatacacactggagagaagccctacaaatgtgaagaatgtggcaaagcttttagccgttcttcaacccttgctaaacataagagaattcatactggagagaaaccctacaaatgtaaagaatgtggcaaagcttttagacaatcctcaacccttactaaacataagataattcatactgaagagaaaccctacaaatgtaaagaatgtgacaaagcttttaagcgactctcaacccttgctaaacataaaataatacatgctggagagaaactctacaaatgtgaagaatgtggcaaagcttttaatcgatcttcaaatcttactatacataagtttattcatactggagagaaaccttacaagtgtgaagaatgtggcaaagcatttaactggtcctcaagccttactaaacataaaagaattcatactagagagaaacccttcaaatgtaaagaatgtggcaaagcatttatatggtcttcaaccctaactagacataagaggatacacactggagagaagccctacaaatgtgaagaatgtggcaaagcttttagccgttcctcaacccttactaagcataagacaattcatactggagagaaaccctacaaatgtaaagaatgtggcaagcttttaagcactcctcagcccttgctaaacataaaataa

SEQ ID NO: 6758 - DNA, 2711 bp, Homo sapiens
  SIMILAR (2037)..(2501): 461254mologous to Rattus norvegicus putative alpha 1B- glycoprotein,accession number AJ302031,Smith-Waterman Score=352.
tttttttttttttttcaggaaataaaaaccacactaggtatttcaaacagaggggatataagttagggactgattgtgcaggttttgcaaggctcaaagagcaaaagtggatgttgcaaaatctcaaagttggatacttgcaggaagctgctaccacccttagggctggagaacccagggaagctaaaaggagggtgcaacgaggctggtgttgggactgccaaaggaaacacagaatgacagctccatctctgcagacctcaaatttgaccagggcctctggctgcctgggcagcctcattgccaatgggctggaaaggttctgtcactgttcagtggttctgacttctgagttctgtgcacaacccctgagctctgctcctctgggcctgggccaccagtccttgtctgagtgccccaggtctggttatgacttcaggcctcaagcacctggttgtctcttctgcaaagaatgcattctcccccagtccacccagaacacacagccttccattccaggtacttggctctgagcaggacagagagcatgcagcaggtgctcagcaatatgggaaatggggaccaaacagagggagtctccacagctccccgtccctcacagcagaagccagagccgctgcagtgcccagctagtttttcatcacgtctatgagctctgcaatcgctctgcagtcgcctcaactcctggtctcctctgctgcttctcactgcacccgcatctcccatgtttgcactggctgtttccctctgcctggaatgctccttgcccagttatcccactgtcttctttgcatctggcacacagtagatgctcaataaatgcctttggtgtcacatgtgcagtgtggtgtgacagggaggggctcgctgggcttcagccccggcactctccacttgacctcagcagctccaggtagaggggggagaactcagcgtctccttctagaacaggttccaggatccaacactgaaatgagggtgaggtggttttagcatcattttatcactcttgatttagtttattaatcatacatgattattgattataattgttgctgggcatcctgaggcctcagaagttcaccctttgccctgaccccatgggggccctgcccccgccttccgggaaggacaaacacgggaagaggtcagtgcccgagccacccccaccgccctccctcggggcctcattgctgcagacgctcaccccagacactcactgcaccggagtgagcgcgaccatcatgtccatgctcgtggtctttctcttgctgtggggtgtcacctggggcccagtgacagaagcagccatattttatgaaacgcagcccagcctgtgggcagagtccgaatcactgctgaaacccttggccaatgtgacgctgacgtgccaggcccgcctggagactccagacttccagctgctcaagaatggggtggcccaggagcctgtgcaccttgactcacctgccatcaagcaccagttcctgctgacgggtgacacccaggggccgctaccgctgccgctcgggcttgtccacaggatggacccagctgagcaagctccttggagttgacaagggccaaaagcactcttcaactccaccccacccacagagtccttgcctgctccctggctctcgatggcgccagtgtcctggatcacccccgggccggaaaccaccagcagtgtgccgaggtgtgctgcggggtgtgacttttctgctgaggcgggagggcgaccatgagtttctggaggtgcctgaggcccaggaggatgtggaggccacctttccagtccatcagcctggcaactacagctgcagctaccggaccgatggggaaggcgccctctctgagcccagcgctactgtgaccattgaggagctcgctgcaccaccaccgcctgtgctgatgcaccatggagagtcctcccaggtcctgcaccctgggcaacaaggtgaccctcacctggcgtggctcccctgagtgggagtgggatttccagcttacggcgcgggggagaaagagctgctggtaacccaggaggcagcaccagcccagatcgcatcttctttcacctgaacgcggtggccctgggggatggaggtcactacacctgccgctaccggctgcatgacaaccaaaacggctggtccggggacagcgcgccggtcgagctgattctgagcgatgagacgctgcccgcgccggagttctccccggagccggagtccggcagggccttgcggctgcggtgcctggcgcccctggagggcgcgcgcttcgccctggtgcgcgaggacaggggcgggcgccgcgtgcaccgtttccagagccccgctgggaccgaggcgctcttcgagctgcacaacatttccgtggctgactccgccaactacagctgcgtctacgtggacctgaagccgcctttcgggggctccgcgcccagcgagcgcttggagctgcacgtggacggtgagctggcggggcaccagcgagggcgggcgcgggttcagtgcccctcggggcctcctgtctttcccctctttccttgggcgtccgacggcggcgctctgggccttggttcagcccccatcgcctaccccggcggggagcaggcgatcggtggtcgagggtctggggacgcctggaatttcggcttatttcccacggacgcaagcccgtag

SEQ ID NO: 6759 - DNA, 1334 bp, Homo sapiens
  SIMILAR (3)..(1301): 291254mologous to Nephila madagascariensis major ampullate spidroin 2-like protein,accession number AF350276,Smith-Waterman Score=266.
atggggaagccgggcgtggaggcagcaccgggctcggagctggccagggttgtgctacgagccaaggactggctgccaggagctcctgggggcaccgcagtgtgggccaccagcttggaagcagaggtcccaccagatctagcgctcaataaggagcagcagctgcagatctccaaggagctggtcgacattcagatcacaacccaccacctacatgagcagcatgaggctgaaatcttccagctgaagagtgaggtggcccgcgggcaggtgcacctgctcatgccagttgtcccacagatccttcggctggagagccgggtactggagctggagctgcgaggagatggcaccagccagggctgtgcagtcccagtggagtctgaccccaggcatccccgggcagcagcccaagagctcagacacaaagcccaggtgcagcccaagaacaccatgaaccccgagaatgagcagcacaggctggggagcggcctgcagggggaagtgaagtgggcgctggagcatcaggaggcccggcagcaggcactggtgacgcgtgtggcaaccctgggccggcagctgcagggagcccgagaggaggccagggcagccgggcagcgactggccacacaggctgtggtgctgtgcagctgccaaggccagctccgtcaggcagaggctgaaaatgcccggctgcagctgcagctcaagaaactgaaggatgagtacgtcctacggctgcaacactgcgcctggcaggcagtggagcacgcagatggtgcaggccaagcgccagccaccacggccctccggacattcctggaggcgactctggaggacatccgggcagcgcaccgcagccgtgagcagcagctggcccgggctgcccgcagctaccacaagaggctggtggatctgagccgcaggcatgaagagctactggttgcctacaggggcctggacgctgcatcctgggcccagatccaccagaagctccgggacttctcccgcagcacccaggcagagctggaacgggagcgggcacagctgctggtccgggccacgatggctgaagagcaactttctgagctacaggagtacgtggaccagcacctgggcaggtacaagcacgaaatcctgaggctgaggaagctggcaggtgcaggggacccctggaaagtgggggctgtgcctccagccaagccccagcatccaaggaccggcagccactaggccgtctcccaaggagcagagcagagcagagctcctcagccagcacagaaccctcccacccagccccccgtaaaacatgagtcaggatagaacccaaaaaa

SEQ ID NO: 6760 - DNA, 791 bp, Homo sapiens
  SIMILAR (627)..(791): 1001254mologous to Homo sapiens Unknown (protein for IMAGE:3454279),accession number BC000825,Smith-Waterman Score=285.
aaaggaaaaggagtgggagaagaaagaatccgcctgagtggacctgactccattccattcatggctccctatttgttccactcctggatcaagtttttaatttaacaagactgcattttgaggggagttttcaaccccatctgtttggggccagagtgtgccccacctggtggtgcaattgatttctgaattaaccgggctttatttcagtacaatagagcgattgtttagttgcttttaagcactaggattcttggaatctgatgggcaaaaaaataaatcagactgcaacgtgtggttctctgggctgctaattgcatctgacccattatcctccacagtcctggttcaaactttgacacggctgacttggagtttgaaatgtaaatggaagggctgccttttgcaggtcatcatacctgcagaaagtccattcctggaacactttccaaggcaatgagaatctttacaaactggactgactttcaccaaaagcgatgagatggacttgctgccacatataggtccatgccgatgagatggtgtagcagtatctggtgctccatcctccaactcctttccaacgtcagtagctggctccaccaggctggctaaggagcgaggagaccatcacctcagaaagcagccccgctgggaggtccacggagcagttcgccgagctgtgcacaggccctttattttccatctgtcaagaaaggaagctgcctgttgcttatttcctcctcccactcttctcccttcccgccagcagactcttccactttcaaaat

SEQ ID NO: 6761 - DNA, 1987 bp, Homo sapiens
  SIMILAR (49)..(492): 801254mologous to Mus musculus putative,accession number AK013173,Smith-Waterman Score=594.
atgtgggagccctgtggatctcaaggtgacactgtgtctttggatgcagagatcgttaaggaggctgaggtgccgcaggctgcgctgggcgtcccagcccaggggacaggggacaatggccacacgcctgtggaggaggaggtcgggggcatcccagtaccagcaccggggctcctgcaggtcacggagaggaggcagcctctgagcagcgtctcctctctggaggtccacttcgacctcctggacctcactgagctcaccgacatgtcggaccaggagctggccgaggtctttgctgactcggacgacgagaacctcaacaccgagtccccagcaggtctgcacccgctgccccgggccggctacctgcgctccccttcctggacgaggacaagggctgagcagagccacgagaagcagcccctaggcgaccccgagcggcaggccacagtcctggacacgtttctcactgtggagaggccccaggaggactagaccatctccacctgccccagctcctgcagggatggggtccgaacacgatggcagatctgggcagtgctgacccagcagacacacttcacccgcccacgaggctccagccgtcacctcctgacacacaccctgggggcagctctctgccagccccgagaccggccttgtcttgctgggcacgggtcttcgcctcacttggagaccagccggctttcctggggggacacacggggcccccggatgcctctggggagccccagcacaagcattagcccagtggcctttaagttccagttcgtttcctggggccccgattcagggaagacagcgtcacggagtcactgccaggaacgtgctgaggaatggagtggcccacggcggccttggggtgaaggggacccaggcctgtgacagccactccaggaactcctgggggtgctccaacctccgcgttttcctgtgctgccaagctcagaagccagaggcgggtttggtagtggctaatgggacaatgtgctgtccagcaaagcacacatggagaagcggccccaaaattcccaccttgatttccatcctgccccttcttctactccacggaggcgctgtctcactagggtcccctccccaaggctcagctctaagacctgcacctgcttctcttggcccctgcgtgacagacaagtccattccctccttagctcagaacaccaaatattcaccagacttgccttaagagacttgatgacacctcccggaatgctctcgggggtggggttcacctctccttgtcctgcacccactgctaggccacattctcgtttctgctcacatcccattgcccggctacaaggcctgcccacggcccttaaacttgctgggcaggtttggagcccatgggaccccgtgggtctctgtccaggagcagcagaggaggctgacaggccctgctccctctgctctgggggtgtctgggagccccagctcacaccctcccaatgcttatatgctgaagctcacagaatgggcttcttgcctgacagcaagtcaaagaatgagtttaatatcaaagtgtaagcttactttccatccacaaaccagcaagccccctgcccccatttccccatgaagcaaaacttctgggggaaggaaaaacaggctccctggccttcactctcagcagagctttggaagaatgcccccaggcatgccctgagctccttctgtgtacctgctcccacttctgagccacccgctgccccttcgcactgctggcaaacccagttccctgcctcagcccaggtctccttccctggtttccagtcacacaagagcccagcagctttctctttcagtcccataagggcagccttgtgtccctggccacacttccacccgccagggtcttcctccccatctttccatccttcctgctgagcttccacagagctcgtttgcaaacagggggattaaagcatccctgcgcattcgaaaa

SEQ ID NO: 6762 - DNA, 371 bp, Homo sapiens
  SIMILAR (72)..(368): 471254mologous to Mus musculus Similar to KIAA0554 protein,accession number BC003867,Smith-Waterman Score=169.
  misc_feature (1)...(371): n = a,t,c or g
ggaccggaaggaggagcggctgaggagcccaaggagcggggcggcggccactaggagctcaggaggcaagggcgtggccgagtgggacccacttccctgcctggacccagaactctgggatcagtttgacaacttaaaaaatcgatagtcttgagaaattcatcatatctgccaaggaaaggactgagattgaactcagctatacaaaacaactcaggaatcttttaaagacatgccaacctaaaaggaactggaaggagaaagaatacattacgtaaaactctccttccctccctgtgaacaaaatgagtgatcacgctaggcagcattaagttatcttctttgaggtcttgaactttcagatcaccgng

SEQ ID NO: 6763 - DNA, 393 bp, Homo sapiens
  SIMILAR (43)..(387): 421254mologous to Homo sapiens 190kD protein,accession number X69090,Smith-Waterman Score=251.
  misc_feature (1)...(393): n = a,t,c or g
cccactggacccccagagggtcaagatcgaggataaagttaacaagtccaggtcatcctgaaagaacccggcctcgaggatttgggcacctactcagtcatagtcactgatgccgatgaagacatctccgcaagccacacgctaaccgaggaagagctggagaagctgaagaagctgagtcatgagatcaaaaacccagtgatcaaactgatctccggctggaacattgacatcctggagcgaggggaggtgcggctttggctggaagtanaaaagttatctccagccgctgagctacatctaatcttcaacaacaaggagatcttcagctcgccgaaccgcaaaatcaattttgaccgagagaagggcctggtggaagtgatcatccacaan

SEQ ID NO: 6764 - DNA, 378 bp, Homo sapiens
  SIMILAR (118)..(216): 601254mologous to Homo sapiens Human secreted protein, SEQ ID NO: 6688,accession number AAG02607,Smith-Waterman Score=96.
  misc_feature (1)...(378): n = a,t,c or g
cggacgcgtgggtgacttcaacaaatgctgataaagaatttgaaaaaattcaacatcccttaatgataaaactgtcatcaaaatgagtatacatatatgtcatatatatacccattattcaaaataataaagggtatatatgacaaatccttggttaatatcatattgaatgtggaaaaattgaaggcctttttttctaaggacgggtacaagagaaagacannnnnnnnnnnnnnnnnnnnnnnnnnnnnnnnnnnnnnnnnnnnnnnnnnnnnnnnnnnnnnnnnnnnnnnnnnnnnnnnnnnnnnnnnnnnnnnnnnnnnnnnnnnnatacttttccaaagacaatataatgttatacctagaaaaacctagact

SEQ ID NO: 6765 - DNA, 1033 bp, Homo sapiens
  SIMILAR (659)..(507): 961254mologous to Mus musculus putative,accession number AK007329,Smith-Waterman Score=284.
cttgcccccttccttttagcctgtgatattccacttgcggggaaaagcaaccccagatgagctggagagcaagtgctgcctccccaggccaatctgcccccagcagcagcgccgtgggatgctggaaggcatcgtgcaaacaatacgtctggggaacgccaagttacagctacaccaatcgctttccccgcaggactcctcacagtccaggtgtgtggaaagcctgcataagccgagctggctgaccagccagaaagaattctttgatttgtggacttgctggcaagactggggctctgaaagatactctctggaaaggctcctgttttccccttgtgtcacaggcacagtgatcctgggggtgggtttcactgtgcagagctgggaacaggaaacagcccccttggacgcaggctgctcaagggacttccatgacctgcagctgtcccatgtccgccgggagccccacatcctaccccagcgtcggccggcagggaggcccacctgattcccaccagctcaaagcagtcctcctcaaagtgtttggagcagaagtagatgtactcggatgccgggtcccacaggccctggccgctggggtccagccgctggcagttggccagccacaagcctcgcctcgggttgtccttcttgggaagtctgtggagccacaaacccgtgagctccacggctgtccacagccctgggctcatgctgcccaagccccccagaggggaagcgcagacccaacacgcgccgccacgagacctccatgtgtccccgccgggtaagcacccccgcccgggcacagcagaggcaacggaggcctcgagaagaaaagcagtttcctcagcgtcatgtggcaggtaacagagtggggcgggtccaagccggctagacttcccgtcctccccttcccgattgcattcagtcccgccggggccgttccgcttcacctcccacccacaggttcaagcctcctcagtatctgagaaaggcgagaagcctctacgcagttacgaccccaggcgag

SEQ ID NO: 6766 - DNA, 389 bp, Homo sapiens
  SIMILAR (69)..(137): 651254mologous to Homo sapiens NAG13,accession number AF194537,Smith-Waterman Score=69.
  misc_feature (1)...(389): n = a,t,c or g
gggaggcctcaggaggctttcaaccatggcaaaaggaaagggggagtagacatgtcacatgaaaaaatcaggagcaagaaagtgaggagacacttccaaacttattctacaaggccagtattacactgataccaaaactggacacannnnnnnnnnnnnnnnnnnnnnnnnnnnnnnnnnnnnnnnnnnnnnnnnnnctagaagccaataacacatagaaatatttnnnnnnnnnnnnnnnnnnnnnnnnnnnnncaccaaattcaacaatacattggaaagatcattcatcatgaccaagtaggatgtatcccagagcatttgataaaattcaatatcgctgcatgataagaaccttcaaaaaatggggatagaaggaacacacctca

SEQ ID NO: 6767 - DNA, 378 bp, Homo sapiens
  misc_feature (1)...(378): n = a,t,c or g
cccacgcgtccgggaaagacagacacacagatcaacggaatagaataaagaacccagaaacagacacataaatatactcaactttttgacaaaagtgccactcatttaatggaggaaggatagtcttgtcaataaatggtgctaaagtaattgggcattcaccaatgaaaaaaataaaacttgatttaagtnnnnnnnnnnnnnnnnnnnnnnnnnnnnnnnnnnnnnnnnnnnnngtgtaaaatgtaaaacttttgggaaataatgtaggaggaaatcttcagtatcgagggctaagagttcatacagtagatgtcaaagcacaacacatannannnnnnnnnnnnnnnnnnnnnnnnnnnnnnnnnnnnncctttg

SEQ ID NO: 6768 - DNA, 378 bp, Homo sapiens
  SIMILAR (56)..(376): 721254mologous to Homo sapiens CGI-41 protein,accession number AF151800,Smith-Waterman Score=363.
ggacgcgtgggttgcaaactgctgcactcaaatgtgacggaactattgactggaggcctgggctgggctatctcaggttcagaccccctcaaaattcctggagaaccccagccagagctaccgactaacagttccattgcggaaacatgtgaggcccaagaagcaacatgagatccggaggctggcataggtggggaataacctgagcgacttcacaggctgaacccagggtgtatacgtgggcttaggccagggccatctttcccgcttaatggatcttggcctggggttgatggtgaagagcatggaacgggatcaaagactggtggagagagcccagcgcctggaccaggagcttctgcaggctctggagaaaga

SEQ ID NO: 6769 - DNA, 389 bp, Homo sapiens
  misc_feature (1)...(389): n = a,t,c or g
cccacgcgtccgcccacgcgtncggttagatcgcgaggcggcggcccnnnnnnnnnnnnnnaaaagagacccccggaaaacttttatcaccccgccccctgtttcgggggaaaggcaaatccggaggggacctacttgtaagtgggggtttttgggcctggtggggcggggcggcccacctgagggagaaaaatcgaatttgttgttatggaacccgggcccccccttggggccaaatataaaaaaagggccccggttaacaacctnnnnnnnnnnnnnnnnnaacttccaaagggaaaaatttcacccgggagggggggctcccccctgaaaccccaccttttggggaggccgggggggccaaataaattggggtggggagttccccc

SEQ ID NO: 6770 - DNA, 373 bp, Homo sapiens
  misc_feature (1)...(373): n = a,t,c or g
ccaaaggcgggggttaaaggggggagccccccagcccggccccaattggtatttttaaatcccccaaaagggggtttcccgggcccaaaactttccctgggggatttttaccaaaggggaaaaaaaaaccaggccccatttttccccccgggtttttagaaaccaaagagggggggacccctcccaacccctttaaaaaagaagggtttttttggtttttaaacccaaggccgggccnnnnnnnnnnnnnnnnnnnncaaactataaaccaatatacctcaataacacagatacaaaattctttaacaatatgttagcaaatagaatttagcaatgtataaaagaagttatgcaatatgaccggacgcgtggg

SEQ ID NO: 6771 - DNA, 321 bp, Homo sapiens
acagaaacgagggaaaacactccctgatttttaatctgacttcgggtaacagctcaatgggcgtcacacacacttccagaccctgtggtgggaaaccctgggagcgggtggaaggagaaggacagagactcagaatgggggtggagggacctgaaatccaagacctgggttgaggtggaggcggaagggggcctgtcaggggatacattccaatggctcccacaggggagcagccagaggcctgggctccctctggtgaaccagggggcaggggtgcaggagactaaaggggcaggccctctttgttaccctcccagccac

SEQ ID NO: 6772 - DNA, 1288 bp, Homo sapiens
  SIMILAR (432)..(391): 921254mologous to Homo sapiens Human 5' EST related polypeptide SEQ ID NO:1291,accession number AAY65130,Smith-Waterman Score=69.
tttttttttttttttttcctgttacgccgtcaatgcagcaggcaatgaggggaatgacacagccctctcattcccggaacgtagtcaatctcggctctgcggattttcacagaacacactttgcctattgccggctccaacaagaagtaactttccaggaagctgccggccccggcagccgccaggatcgctgcctgcgcttgcgctggccgccggggattcacccggggaggcggggccgcctggggaaggctcgcggggaatacagcacactttcccctaaatccctcgtccgcgccgagtgcagggctctcagagttcacctagtcccacctctcacccacaacagtttataaatggggaaggtcagacaagttagtagcagaacttgggtctaagaacccaggagttcgaatgcaatccgaggctcatatcgagactttaagttgtccgattccgaagtttatttgcttttttccctctttttgccttccattctccctcacccccgttcttttaggggaatgtttgagcgagacttcaaggtcaaaagatggagtccctaggggctgagggtctccatcataggcgccccaggcaaggttggagaaaaactaaacagaaagccccttccgcctacgttggcaagaacgggaacccagctccacttggtttccgcccaaagtctttagaacaggagctgccaagccgtaaggatttccgaatccgatttccccgaaaccgtagagacacagcttggacttggcaaaaggccggggccccgacccctgcgcgcgcactggcactctccaaagttgcctcgccttcctgtggccctcccgggaattaataacccccgggtgccatgtcctaattggtctcggtagcaggctccggggtgcgcttttcgggggctaggggacagcgaaaagactcagccacaaaggccggcagtctggtccttaaaactagccagtggcgtcacactgcgccgctcatcccttctgcggcaagcggaagggtcagagtcggtctgcaaagaaacgaacctttggcctcaaaatcctacattgaggctttcctcaccccttctgcccggtgggataaaggtgaaagagacggttgggatttaataaggggtagggatgagaatctgggaagttaaaatgaagtaagtgcatttattggaaattaggagtcccgtggttccgggagctcaaaccgaatggtgtttttaccgctgcctaacgctagagagagccctccatcaaggtttgaaaccgtcaac

SEQ ID NO: 6773 - DNA, 439 bp, Homo sapiens
  misc_feature (1)...(439): n = a,t,c or g
cgcaattttcaatagagtaaaagaagcgtaaaatctttccaactcaagcgtaagataagcaacgcctcaatgttcaaaaatataaaatcctattggtaacccgtaaagaaggcccaaatggaaagagaggtaaaccatgttcatgaatcagaaaactcaatattgtaaagacgtcaattttcccaaaactgattgatagctataataaattccccaactatcaagtgcatcattgttgttggaattgacaagctgtattttaaaacttatatgggagaaaaccctttcatgaaaatgcaaagagccagaacagtcaagacactctcaaagaagaaaaataaggtggaaaagncgtnccagnaccaagctgtcttcataattgataataatcgaacgcgtgcgtctctcngacgatccatcggtcctgcatgcgctcatc

SEQ ID NO: 6774 - DNA, 388 bp, Homo sapiens
  SIMILAR (181)..(243): 581254mologous to Canis familiaris ORF2,accession number AB012223,Smith-Waterman Score=55.
  misc_feature (1)...(388): n = a,t,c or g
atccatgaagaaagtagaaagatctaaaatcagtattctaagcttccacataagaaaattagaaaataattaaatccaaagtaagcagaagaagagaaataaaaattggagcagaaatcaatgaaattgaaaacaggaaataaatagagaaaatcaatgaaaccaagagttatttttgagaagatcagtaagcctctagccaagctaataaaagagaagacccaaattactaataccagaaacagggcatatnnnnnnnnnnnnnnnnnnnnnnnnnnnnnnnnnnnnnnnnnnnnnnnnnnnnnnnnnnnnnnnnnnnnnnnnnnnnnnnnnnnnnnnnnnnnnnnnnnnnnnnnnnnnnnnnnnnnnnnnnnnnnnnnnnnnnnnn

SEQ ID NO: 6775 - DNA, 1735 bp, Homo sapiens
  SIMILAR (1715)..(1458): 701254mologous to Homo sapiens Human secreted protein, SEQ ID NO: 7870,accession number AAG03789,Smith-Waterman Score=293.
atggagccacagggactggatttgccctgccagtggttttcagatgttgaatgtaggcagtgtaggacagattcttcggaaaaaactaatgacatacgccctgtgattgctgcagcttactgtctggagagattcaagactgctgtgcagagagggagcacccaaatagagcctggcagtcttcctgagtcacggagacagagttcagaatttgagaaggccaagacctgccagctttttataaatgctgcagttgactctcctgcaattgattaccacatatctttagcccagagtgctttgcaaatctgcctgacacatcctgagctgcagaatgaaatttgctgtcagcttattaaacagacaagacgaagacagccacagaatcaaccaggaccattgcagggctggcagctcttggcactctgcgttgggctcttccttccccatcatcctttcctgtggctcctcaggcttcacctaaagaggaatgcagattccaggacagaatttggaaaatatgccatttactgccagcgttgtgtagaaagaacgcaacaaaatggtgacagagaagcaagaccctcaaggatggaaattctttcaactcttctccgaaacccttatcaccattctttgccctttagtatacctgtgcacttcatgaatgggatataccaggtagttggttttgacgcatctaccacagtggaagaatttttgaatactttgaaccaggacacaggaatgaggaaaccagcgcagtctggatttgcgttgttcactgacgatccttctggcagagatttagagcattgtcttcaaggaaacatcaaggtgaaaccaagtccttttcaggagccaagcccaacgaacagcaaagaagctactctttacaagaagagtaaactttgcaagaagtttaattcaggagttttccaaaactttaaccaatctaatctccacgataagaaaaaaaaaatgcaggactttgttaaacccatagaattcttaatacacaatctctacatatacacattccatattaaagagaggaaaggtgttagtaatggaaatgatactctaagtattaggataataagggtagatatgtaaaagggctaataaaagggctttccatttttttccatttattcagcaatacttactaagctattttattgtatcccaggggctggctggactctgtggggaatacaaaaggaccagaaatagtccctgcccacagtgaacttaaaatttgcttacggaagagcagctttatacacagataaccttgaactagggttgaaagtgatgaaagttttgagagtgctgtgaactttggcacagaaagagagagtttaagttcagcattgggaagtttagggaaaggccctgagctggaaatgaaaaatggtttaggaaacagaccctgtgtcccgggtgcagtggcttacgcctgtaatccaagcactttgggaggccgggtcaggtggatcatttgaggccaggagtttgagaccagcctgggcagcatggcaaaaacccatctctactaaaaatacaaaaattagccaggcatggtgccacacacctgtagtcccagctactctggaagctgaggcactagaatctcttgagcccatgaggtcgaggctgcagtgagccgtgatcacgccactgcactccagcctgggtgacagagcaagactgtctcacaaaaaaaaaaaaa

SEQ ID NO: 6776 - DNA, 252 bp, Homo sapiens
  SIMILAR (105)..(251): 671254mologous to Homo sapiens Secreted protein encoded by gene 18 clone HNHFO29,accession number AAY01400,Smith-Waterman Score=160.
tgaggtgatgtggaatacatttcaaagttgttccatccagggggtgaacatattgaagcatttatagcctggctcccatccgtcactggctgaggaatggtcccagggcatcaactctctggcttttttttttctttttctttttcttttttagacacagtcttgctctgtcacccaggctggattgcaatggcatgatctctgctcactgtcacctccgcctcccgggttcaagcgattgtcctgcctcag

SEQ ID NO: 6777 - DNA, 670 bp, Homo sapiens
  misc_feature (1)...(670): n = a,t,c or g
ctttccgttaagcaaaatttccaaccggcaaggtattgcggttggttttcccccttttccccttaaaannnnnnnnnncccctaaaggctttaatttttggagggaggttgggcccattttttcccccccccaaaaaaaggttcctttccaaaaattcccaaggagggttttaaaacgccccccaaaaggaaaaaaatttttccttcccatcccccgttaaatttgggccccccaagggatcttttaaaagggcccccccnnnnnnnnnnnnnnnnnnnnnnnnggaggtaattaacatttattgttcccctttcagggaaggtcatgggcgtagatgatcaaaggtcagttcctggtcaacagaagtaaacaagcctgtttaagataaattcccccacactccctcgtacctactccttgccctctgcctcagggttatagaacagctgtctttagctattctcctccaaagctatgcagagccttccaacctttcagaaggcctgctcctttccctatagcttctcccaccactctgaccaatctcctacacttgtggccccctttttcttcccttgcctcatgaggagctctgacaagttgatgaatgatgtccctgctcctgtgtttctacccagcttcaagggaaaccatgcttgctcttctaga

SEQ ID NO: 6778 - DNA, 338 bp, Homo sapiens
  SIMILAR (240)..(332): 481254mologous to Homo sapiens reverse transcriptase,accession number L27428,Smith-Waterman Score=78.
ggaaaatggatggtgctggatagctacatatggaagaacgaaaactggattcctatctctcactacatgcaagagttaactcaagagggacttggatctaggaactgaaaccatggaaattctggaggaaaacctgggggaggttcttctggacattggcctaggtaagaatttatgactaagacccccaaagcagattcaacggaaataaaaataaatagataagacctaattaagctaaagagctagtgcacagcaaagaaatcctgaacatagtaaacagacaatccacagaatggaagaaaatatttggcaactatgcctctgacaggactagt

SEQ ID NO: 6779 - DNA, 345 bp, Homo sapiens
  SIMILAR (218)..(316): 481254mologous to Mus musculus endonuclease/reverse transcriptase,accession number AF016099,Smith-Waterman Score=89.
  misc_feature (1)...(345): n = a,t,c or g
tnnnnnnnnnnnnnnnnnnnnnnnnnnnnnnnnnnnnnnnnnnnnnnnnnnnnnnnnnnnnnnnnnnnnnnnnnnnnnnnnnnnnnnnnnnnnnnnnnnnnnnnnnnnnnngataactctatgcccacaaatttaataatttagatgaaatggaccaattccttcaaagacataatacgccaaaactcatacaagaagaaacagacttactgttattaaataaattaaatcaatagttattaaccttccaaaacagaaagcatgaggtccagatggattcagtggtgaaatgtaccaactattaaaggaagaaattatctataatgtattttagaggacagatgt

SEQ ID NO: 6780 - DNA, 353 bp, Homo sapiens
  SIMILAR (117)..(212): 591254mologous to Mus musculus endonuclease/reverse transcriptase,accession number AF016099,Smith-Waterman Score=101.
  misc_feature (1)...(353): n = a,t,c or g
tnnnnnnnnnnnnnnnnnnnnnnnnnnnnnnnnnnnnnnnnnnnnnnnnnnnnnnnnnnnnnnnnnnnnnnnnnnnnnnnnnnnnnnnnnnnnnnnnnnnnnnnnnnnnnngataactctatgcccacaaatttaataatttagatgaaatggaccaattccttcaaagacataatacgccaaaactcatacaagaagaaacagacttactgttattaaataaattaaatcaatagttattaaccttccaaaacagaaagcatgaggtccagatggattcagtggtgaaatgtaccaactattaaaggaagaaattatctataatgtattttaaaggacagatgtagagggaa

SEQ ID NO: 6781 - DNA, 458 bp, Homo sapiens
  SIMILAR (3)..(98): 431254mologous to Homo sapiens G9a,accession number X69838,Smith-Waterman Score=69.
cgaagagtcgagagatcaccacactggccaacaaccagtgcatggctacagagagcgtggaccatgaattgggccggtgcacaaacagcgtggttcaagtatgagctgatgcgcccctccaacaaggccccgctcctcgtgctgtgtgaagaccaccggggccgcatggtgaagcaccagtgctgtcctggctgtggctacttctgcacagcgggtaattttatggagtgtcagcccgagagcagcatctctcaccgtttccacaaagactgtgcctctcgagttcaataaacgccagctattgtccccactgtggggagggagagctccaaggccaaagaggtgacgattagcttaaagcagacaccacctcgaccgtggacaccagtccccgggcaagaataaggctcgtccctggtaggcagggccgacaccacaccgggcagtggtgcccggcg

SEQ ID NO: 6782 - DNA, 333 bp, Homo sapiens
acagaaacgagggaaaactctccctgatttttaatctgacttcgggtaacagctcaatgggcgtcacacacacttccagaccctgtggtgggaaaccctgggagcgggtggaaggagaaggagactaaaggggcaggccctctttgttaccctcccagccactctaaggtgtggggaaggggagccacctcctctgtgtcagagggaggctcacagagggcaggtcacttgcccaaagtcctgcagcacagcagggactagaatgcaggaacactagactgcccaaggtcagggcggttgctgtgaggctgtgctaccccccacttggtggac

SEQ ID NO: 6783 - DNA, 476 bp, Homo sapiens
  SIMILAR (49)..(474): 1001254mologous to Homo sapiens Human secreted protein sequence encoded by gene 9 SEQ ID NO:179,accession number AAB56085,Smith-Waterman Score=781.
agagtgtccccctgtagacctgttagagtgctggaattcctgcagtaaatgcacaacccggacggaagtgcctctccgacagcagatccaggctcggagctccagacgctgggacaggccgcccgcagaccacccccgccgcgcgcgggacacgacgccccccgcaggacacgcccatcagcccggaaacccctgagctgcttctcccggaggccgatgcccacccgggagcccccaaagactcgcggctcccgggggcacctgcatactcacccgcctgggcctgggcccccgctgcagggactggcgccccgaggcctcaaaaccagcgccccccgccctccgtgccagccccagccgggaccccacaaggcaaagaccaagaagattgtgtttgaggatgagttgctctcccaggccctcctgggcgccaagaagcctattggagccatccctaaggggcataagcctaggcc

SEQ ID NO: 6784 - DNA, 819 bp, Homo sapiens
  SIMILAR (121)..(816): 781254mologous to Homo sapiens Human secreted protein sequence encoded by gene 9 SEQ ID NO:179,accession number AAB56085,Smith-Waterman Score=902.
atggacgaggcccagccccaggaggccctaggagcctccgactggcagacttgtagccgaacacagtgccttcagcgatgtaaggccaggtcacagtctgatcacttcaaaggagaactgggcgtgtcctctccgcgtgtccacccacaggccgcccgcagaccacccccgccgcgcgcgggacacgacgccccccgcaggacccgcccatcagcccggaaacccctgagctgcttctcccggaggccgatgcccacccgggagcccccaaagactcgcggctcccgggggcacctgcatactcacccgcctgggcctgggcccccgccccagccgggaccccacaaggcaaagaccaagaagattgtgtttgaggatgagttgctctcccaggccctcctgggcgccaagaagcctattggagccatccctaaggggcataagcctaggccccacccagtgcccgactatgagcttaagtacccgccagtgagcagtgagagggaacggagccgctatgtcgcagtgttccaggaccagtacggagagttcttggagctccagcacgaggtggggtgtgcacaggcaaagctcaggcagctggaggccctgctgagctccctgcccccaccccaaagccagaaggaggcccaagttgcagcccgggtttggagggagtttgagatgaagcgaatggatcctggcttcctggacaagcaggctcgctgccactacctgaagggtaaactgaggcatctcaagactcagatccagaaattcgatgaccaaggagacagcgagggctccgtgtacttctaa

SEQ ID NO: 6785 - DNA, 445 bp, Homo sapiens
  SIMILAR (27)..(305): 881254mologous to Homo sapiens Human secreted protein sequence encoded by gene 9 SEQ ID NO:179,accession number AAB56085,Smith-Waterman Score=465.
ccgggtcgacccacgcgtccgagtaaatgcacaacccggacggaagtgcctctccgacagcagatccaggctcggagctccagacgctgggacaggccgcccgcagaccacccccgccgcgcgcgggacacgacgccccccgcaggacccgcccatcagcccggaaacccctgagctgcttctcccggaggccgatgcccacccgggagcccccaaagactcgcggctcccgggggcacctgcatactcacccgcctgggcctgggcccccggtgagccttgaccgggagggggtccccaggccgggcctctaggcaaaagatttagcccctgcagtttgagggactccggttttcccgacaccccgatttaactccagaccacgatttcctgtggcagctgcagggactggcgccccgaggcctcaaaaccagcgccccccgcc

SEQ ID NO: 6786 - DNA, 380 bp, Homo sapiens
  SIMILAR (114)..(137): 1001254mologous to Homo sapiens Human secreted protein, SEQ ID NO: 4438,accession number AAG00357,Smith-Waterman Score=40.
tttcaacagaatctcacactgatctcggctcactgcaacctctgcctcaggttcaagtgattctcctgcctcagctgggatgacaggcatgtgccaacatgcctggataattttttgtatttttggtagagatggggggggttttaccatgttgaccaggctggtctcaaactcctggactcaagcactccatctgcctcatgttcccaaagtgctggggattacaggcatgagccatgcacctggccctaaaaatattcttttcttactgaacattagctgcttccagtgtactagaagtagattgccaaaccttttggcccaaagcaaattgtaaagacatttagctagggatgcaaaaacatctaagactcaaggtc

SEQ ID NO: 6787 - DNA, 504 bp, Homo sapiens
  SIMILAR (76)..(417): 591254mologous to Homo sapiens Clone HFKCD20,accession number AAB49535,Smith-Waterman Score=314.
cttgattgagaaggggacaaaggaacaccagtgttaagaggattttccagtgtttctggcagttggtccagaaggatgcctccattcctgcttctcacctgcctcttcatcacaggcacctccgtgtcacccgtggccctagatccttgttctgcttacatcagcctgaatgagccctgggagggaacaattgaccaccagttggatgagtctcaaggtcctcctctatgtgacaaccatgtgaatgggggagtggtaccactttcacgggcatgggcggggagatgccatgccttacctttctttctttaccagaaaaccactgtgggaacccacggcacctgtctggctcaatggcagccaccccctataaggcgacggcattgtgcaacgccaggcttgtgccagcttcaatgggaactgctgtctctggaacaccacggtggaagtcaaggcttgccctggaggctactatgtgtatcgtctgaccaagcccagcgtttg

SEQ ID NO: 6788 - DNA, 375 bp, Homo sapiens
  misc_feature (1)...(375): n = a,t,c or g
gggtcatgcccaccagccccagtaggtttaaattccagatgaataatttttccaacgttcagtcaaattnnnnnnnnnnnntcaatagaatcgagaacccagaaataaagcttaacactgacagtcaactaattctgccaagataattcaactgggaaagaatagtcttttcaacaaatgttggtggaactggatattcaaatgcaaaacaatgaagttggaccctttccccataccagacaaaaattaactcattaagaannnnnnnnnnnnnnnnnnnnnnnnnnnnnnnnnnnnnnnnnnnnnnnnnnnnnnnnnnnnnnnnnnnnnnnnnnnnnnnnnnnnnnnnnnnnnnnnnnnnnnnnnnnnnnnnnn

SEQ ID NO: 6789 - DNA, 1094 bp, Homo sapiens
  SIMILAR (67)..(423): 511254mologous to Homo sapiens hypothetical protein,accession number AL136837,Smith-Waterman Score=249.
gctcctgcctctaatggcctggttaggctcatctcatccctcaaggtggccaccccagatgaagctcctgccttttggcagcctttagaggcccagctcatgcatctcattgcctcttgaagcccagctcattcctcaaaacggcctatccacgcccagcttttccctttggtggcttctccaggcccagaaattcctcagttcggcttcgcaaggtgaagttgctgcctccctgtgccttctccaggcccagttcttcctcccagctgggtctacagtcccatctcctgactcaaaacaacctattttggctcggctcctgcccagcacctggcggcctttgtaggcctaaagcttcctcaagtcaagcgttccaggcccagatcatgctgcccaggggccttcacaggcccagctactgcctgacgatggcttccccaggcccaggtcttgccttcccccagcctcccgaggcccagcccttgcctcacagttgctttcccagtccacgttacagcctgttacccgacggccttgacagaccaaactcttccttcacactggacagtttaggacaagctcatacgtcttccagcctctccaggtcaaagctcctgcctaacacttgcctctataggcccaggtgctgaatcggcaatggtctgtttaggtccatctcatgcctttctcaagactctccaagcgacgatctggcctgacacttgcttctgtgggcccatgtgatcactcacactggcctctttaggaatcaaggggatgcctctccacaaggccgaagatcctgcctgttgtaggcccccttcaggatgcgccgctgcctgacaagtggacccttccaggcctagatgttacgtgatcatggcctctgcaggtcaagaatttaaattttcgcagcctctataggccgagctactgcctcctgataatggcttctgcaggcccaaatcgtcctgaaataagcctcgccaggaacagcgcatgtgtgttggatgcccgaacaaccatagcttctcccgcacagtggcccatgggggccgggctcttgcctcgagcctggccacctcaggcccagt

SEQ ID NO: 6790 - DNA, 412 bp, Homo sapiens
  SIMILAR (157)..(62): 1001254mologous to Rattus norvegicus cytoplasmic dynein heavy chain,accession number AB041881,Smith-Waterman Score=158.
  misc_feature (1)...(412): n = a,t,c or g
attaagaattaaacacttcacatgtaaaatctaattataatanaattaaaagcccatttaccttaattatctgttcaaatgctaaggcagattgtaacatcattggcctctgactttgaatcatttgttgatcaatagaattataaaaatgtgccacctacaaagtaaaagtccaattagtaataattaataacnnnnnnnnnnnnnnnnnnnnnnnnnnnnnnngaatgaaaatgttaacttttctcaatcctaaaatttaaacagaaaattggtttttcatctccaatagggcatttgttcatgtattaatacacacaatcaacaagtaagtgttgagttcctacaatttgccaagtcatgtcctgaggtctgattaaacatagactagaaaacgttgtccggaatcaag

SEQ ID NO: 6791 - DNA, 826 bp, Homo sapiens
  SIMILAR (4)..(825): 401254mologous to Homo sapiens Human nucleic acid-binding protein, NuABP-10,accession number AAB21006,Smith-Waterman Score= 492.
cctcgtgaagaagacctgcgaagtccctctccaggctggaagattatatctggatcaccaccagagcaagccctttctgaagcttcattccaagacccatgtgtagagatgccccctggggattcagaccacgggaccagtgaccttgagaagagcttcaatctgagaccagtcctctctccgcaacagagagtgcccgtggaagcgagacctcgcaaatgtgagacacacaccgagagcttcaagaactcggaaatcctgaaacctcacagagcaaaaccatatgcatgtaatgaatgtggcaaagccttcagttactgttcttccctttctcagcatcagaagagccacactcggagagaagccctatgagtgcagtgaatgtgggaaggccttcagccaggagctcatctctcattcagcaccagaggattcacactggagagaagccttacaagtgcagtgaatgtgggaagagcctttcagccaggaatgccaacctcaccaaacaccaggcgaacccacaccgggaggaggaagcccttacaggttgcagcgagtgtgagaaagccttcagttgactgctcagctcttgttcagcatcagagaattcataccggagagaagccctacgaatgcagcgactgtgggaaggccttccgtcacagtgcaaacctcacgaaccatcagaggactcacaccggggagaagccctacaagtgcagcgagtgtgggaaggccttcagttactgcgcagcgttcattcagcaccagaggattcacaccggggagaagccctacagatgtgccgcgtgtgggaaggcct

SEQ ID NO: 6792 - DNA, 391 bp, Homo sapiens
taaaagtgaggaggtgtgtatgaagagaactcgattaagaggaatcataaagtgactatatgaaagttaagttttttccatcgtgaaagcgtaaatgaaattaagaaaaaaacaatagattgggaaaatatttgtaacacatacgaatgaaagcctgtaacatataaatagtttctacaaattaattagaaagaaattaatgacaaatagaaaaatggacaaaggctacaaataggcaaattgcagaagaggaaattcaaatagttaataaacatataaaaagatactgctcagcctcattcaggaaaaagcaaattaaaacaaaaaagagatgccacttttcaataactggcaaaaattataaagagtaaccatatctgcgccaggcacg

SEQ ID NO: 6793 - DNA, 298 bp, Homo sapiens
  SIMILAR (78)..(296): 1001254mologous to Homo sapiens spermatid perinuclear RNA- binding protein,accession number AF333337,Smith-Waterman Score=382.
gtgtgttccagagaacaagccttcagacatttgctatattgacgctgagctgtcaggggactcaggcttatgaggagagatctattcgatcttttgctaatgatgatcgccatgttatggtgaaacattcaacaatctatccatctccggaggaacttgaagctgttcagaatatggtatctactgttgaatgtgctcttaaacatgtctcagattggttggatgaaacaaataaaggcacaaaaacagagggtgagacagaagtgaagaaagatgaggccggagaaaactattccaa

SEQ ID NO: 6794 - DNA, 999 bp, Homo sapiens
tgcctggccgggtttctacctctcgtcaccggagctgatcactgtcagttttgtaccgatttagaaataacaataataatgaagattctaggaatggcatgagggattgatgggggacttggagggagggacaagtggtgccctgtcccctgctcccctggccaaagaaagctgtccttgaggctgagccctcagccctggcctggtggggggacagcaaggtcccttgttataagaggggcagagaggacaactccgctttggccaacctagccaaggctgcagcatatagaccaggaaatcaggtagcccagactggtgatggagcaaagtctgggggaagggtcgtgggtggggaatttatcaccaacatccattgtagggggaatctatgattctgcttccccagcggattcccactctgtccaccaagtggggcgtagcacagcctcacagcaaccgccctgaccttgggcagtctagtgttcctgcattctagtccctgctgtgctgcaggactttgggcaagtgacctgccctctgtgagcctccctctgacacagaggaggtggctccccttccccaaaccttaaaagtggctgggagggtaacaaagagggcctgcccctttagtctcctgcacccctgccccctggttcacccagagggagcggatgaaggatggcagcatctcacatgccccatcaccaactctgaggcaccctggggtgggggggcggagcccgaggcctctggcctggtcccctgtgggagccattggaatgtatcccctgacaggcccccttccgcctccacctcaacccaggtcttggatttcaggtccctccacccccattctgagtctctgtccttctccttccacccgctcccagggtttcccaccacagggtctggaagtgtgtgtgacgcccattgagctgttacccgaagtcagattaaaaatcaaggagtgtctttccctcgtttctgtaaaaaaaa

SEQ ID NO: 6795 - DNA, 414 bp, Homo sapiens
  SIMILAR (14)..(49): 581254mologous to Homo sapiens neuronal thread protein AD7c- NTP,accession number AF010144,Smith-Waterman Score=37.
gagacagggtcttgttctgttactcaagctagagtgcagtggagtgatcaagctcactgcagcctcgatctcctgggcttgagcgatcctcccacctcagcctcctaagtagctggtaatttgaaatttctttcaggactttgcagcagcttgtgatcactggaaatatcttaggacaccaaaaaatcacaggtacaaatcacagatgatttatgctatacagtagttctttgtttgttttttgagatggagtctcactctgttgtccaggctggagtgcaatggcatgatctcagctcactgcaacctccacctcttgggttcaagcgattctcctgcctcagcctatggagtagctgggattataggcacccatcatcatgcctggcttacttttgtatttttgggtcgacg

SEQ ID NO: 6796 - DNA, 361 bp, Homo sapiens
gcaaaactggtgcctgaagctatcctggggctgcagtcagcccagccccctggagccccggggcctccccactgaggtccagtccagaactccaccttcgcctcagctcctccgcttcttccttggctctggctaaaaatgccctgtccagagcctcgcccagcccagcagcacaagactgccctctccttcacccctgctctggcccctcacctcttccccagggaggcaagcaagcccagtggctccaccatctgccagcaatgggacctgatgggggacatgctaacctctttgcgcttcagtttccccatcttgaaaatgaggaccacaacagtgcctcctcacgggatggatccgg

SEQ ID NO: 6797 - DNA, 363 bp, Homo sapiens
  SIMILAR (309)..(362): 831254mologous to Fowlpox virus protease/polymerase,accession number AF006065,Smith-Waterman Score=79.
caaaaactgcatctccagtacaagtcaagttttgtgcaggagtggcgctgccaaatctaaagcagcgtcctttgagagaaaaggcacagcaatgcatttagcctctgctaatggccttcctgcaatacaggaagaattccttgtttctcatgtaacatacctgtcttgccaggacaaaaacatggaactgaggattattggtttgtacaggatttgagggctactaggcaaattttcaaagccatttatctggtgatacctgatgcttatacattattcatgactttaaccagtgagttgtactggtgtcagtcttgaatctgaaggatgccttcatctgtattcccctgagtccagagtccc

SEQ ID NO: 6798 - DNA, 368 bp, Homo sapiens
  SIMILAR (105)..(1): 1001254mologous to Homo sapiens TEX14,accession number AF285601,Smith-Waterman Score=190.
gatcctgcttgtttccaaactgtccttggctccttgagtgcactgaaattgttcatctgtgttctgttttccagggtcacaaagagtcggcagcattcttgggaaatcttggtagggttgggtagttgccactggtgtctggcttctgaaccccctgaaagctgtaggacaggaggaatatagtttaaagatggagggcccacggccagaggtaacttgtaggcatttgtaaactctcttgaagtggcccataaagacatgcgctcttcctgttccttctgtttcatctcgacttcatctaatatctgctcgatattcctcagcctatcatcattctcgtgcattattgtctgcataatctttagatc

SEQ ID NO: 6799 - DNA, 3102 bp, Homo sapiens
  SIMILAR (151)..(1278): 761254mologous to Homo sapiens TEX14,accession number AF285601,Smith-Waterman Score=1402.
  misc_feature (1)...(3102): n = a,t,c or g
atggggtcttgtagtggaggagaaagactgggcacaagtccaaagtacagcatgggcaaatgggaatttgtagccaaggagcagtgtggagtcccctgtcctgttcaacttggtaccttaagaaatgactccctggaagctcagcttcatgagtatgtcaaacaagggaactatgtgaaagtgaagaaaattcttaagaaaggcagtcaacctcattcaccaagggttcactctttattcactgaggggacactagatcctcaggccccagatccatgtctgatggccagggagactcagaatcaagatgctccttgccctgctccatttatggcagaagaggccagcagccccagcacaggtcagccaagcctctgcagtttcgaaatcaacgagatctactcaggctgcttgattttggaagatgacatagaagagcctccaggagctgcttcatctttggaggcagacggacctaaccaggtagatgaactgaaatccatggaagaagagctggataagatggagagagaggcgtgttgttttggcagtgaggatgagagctcttcaaaagctgagacagagtactcttttgatgactgggactggcaaaacggttcactcagttcactcagccttcctgagtcaaccagagaagccaagagcaatttgaacaacatgtccacgactgaggagtatctcatcagtaagtgtgtgctggatctaaagattatgcagacaataatgcacgagaatgatgataggctgaggaatatcgagcagatattagatgaagtcgagatgaaacagaaggaacaggaagagcgcatgtctttatgggccacttcaagagagtttacaaatgcctacaagttacctctggccgtgggccctccatctttaaactatattcctcctgtcctacagctttcagggggtcagaagccagacaccagtggcaactacccaaccctaccaagatttccaagaatggtaagagactttcaagggggacattttggcaaaagatccaggaaaagaaatggttgtggctggaaacctttcacccaagtctccaaagtaaacactggggatcagtcagagataagccatcagctgccgactctttgtgaccctggaaaacagaacacagatgaacaatttcagtgcactcaaggagccaaggacagtttggaaacaagcaggatccaaaataccagtagatcattgacggatattcaagacctgtctagtatctcctatgaaccagacagctcttttaaggaagcttcatgcaaaacacccaaaataaaccatgcacctaccagtgtcagcactccactcagcccagagctcttgaaacagcagcagggctcatccacggtgttgcatgagaacacagcaagtgatggaggaggcactgcaaatgatcaaaggcacttagaagaacaagaaactgacagtaaaaaagaagatagtagtatgcttttgtccaaagaaactgaagatcttggagaggacacagagagagctcactctactctggatgaggacctggaaagatggctgcagccacctgaggagagcgtggagctacaagaccttcccaagggctctgaaagttgctgtcagggcagcagttccagttcttcaggacctggacactatgcagtacccactcctcggggacccgagactggaccaagaacagaatcatcccgccattcctctccccatctaaagagccagaagactcagacactggcttcccatgcttcaagcagacaatggaaagttagtccacccagagaggaaagcagcaccgaagaggcagtgagagcaagtcagggcgccgaggtcgggccntcatgcttcatcaatcccagatgccaaatctactcatcagttgagttttcaagaccagaagaataacttacaatcacaaatcttagaagatgacccaccatccaaggtccagaacccccaaggagtcagagttccccgtaggattttgtcttacccaaaggatgaagcagtacaaactgagcccatccaaagaattacgactactagtgagatcagatctccaaggagtccctctctcctagagcacggaagcagctgtgtctcctgcagactatcagacagccccagagaagggtccctgtagaagaatcagaaacaggtccttacggtccaattccttcaaaacccaaggccttgtataggaatatgaacttggactcattgctcaaactctctgtccttaaagattctgatggtgtacaccgagtttctgcacgggtagaccctgagtctcttcataagtattctgcctatcctgaaaccaagccctccgcaaaggtcttagtatcatcacaggtggagtccaacgtgaggaccccaatccgaggaaacagcgaggttggccgcagggtcaccatctccccaggggtacagtcagtagagccaactcaccatgtgacagttccatcagtgtctgagggctcccacaagtcatccatgtttgttactccagagcccatctataaacagcaaacccaaaaacccccagaaattacttacatgtcccaaggacctacacccaggtatccagaactctcgcaaaagccctccatccatgcagaactggaactgacccctaggcccttgcctcctcggtccttacctaggtacggacctgactcctcatggtggcccttgctgaatcctgaagttgaaacaccccaaagccagctgacaacaccggattttgagcctaagtgctctccttccctagatcttttattgtccggttttaaaatagactctagccctttctgtgaggatctgaagttccagagagagaaggcaagcctatcaccaccatcaccaccaaaggagtttccaagttgggcaccactgagtgaagtgccacagacccccaagcacacctgcaaacaacccattcaaaggtttactgctttcttcctggcctggggcattccagaaaggggtcgcttttttgggttacacactatttgggtcctcaacttggaaaaactcaaggtggactctgctgtcagcagtcccgtgtcctga

SEQ ID NO: 6800 - DNA, 707 bp, Homo sapiens
  SIMILAR (2)..(694): 531254mologous to Homo sapiens ZNF43,accession number X59244,Smith-Waterman Score=596.
cctcactacacattagataattcatgctggagagaaaccctacaaatgtgaaaaatgtggcaaagcttttaaccaattttcaaaccttactaaacataagataactcatactggagaaaaatcttacaaatgtgaagaatgtggcaaagcctttatccagtcctcaactcctagtaaacataattaatgatggagagaaaccatacaactgtgaagaatgtggcaaagcttttaaccaggcctcaaacttatattgaacaaaataattcatacaggagagaaaccctacaaatgtgaagaatgtgacaaagcctttaaccagtcctcaatttttactaaacataagaaaattcatactggagagaaaccctatgattgtgaaaaatatggcaaaggctttaactagtcctcagttcttaacacacatacgataattcttactgcagagaaactctacaaaccagtaagatgtgacagtgcttctgacaacatctcaaacttttctaatcataaaagaaatcatattggtgagaaatcctagaaatgtggagaatgtaacaaagtatttaaatggttgtcacacttgattataggtaatattcatattggaaaaatttcctacaagtaagaacaatgtggcaaagtttttaactaatacaccttattgcacagaaaatcatttatatttgagaaaaattgtagaaata

SEQ ID NO: 6801 - DNA, 681 bp, Homo sapiens
  SIMILAR (4)..(354): 381254mologous to Homo sapiens gag 2 protein,accession number M14123,Smith-Waterman Score=183.
  misc_feature (1)...(681): n = a,t,c or g
attgttacagccgaccaattactgggaatgggccagtgggctgcaattcgaaaccaaactatgctaaatgatgaggttattgaacaactgtggaaatgctgcttagatgcttgggacaagattcaagatgatgacaaactatgcccatgtttttaacagccgtcagacggggnacaaacatgaaaccgtatcccacactttaattgccccatcttcaaagacgcagcagaaaaaagctatccctgaatagccagggccaatgacttgttatagaacttaatggcttatgaacaagtaaatcccagactgttcaggtggctatttgccccattaaaggcaaaattccaccagggggtgatgtactcacctcatacattaaagtctgtgaaggcgtgaggggaactctgcgtacagcaatggtcatggcacaagccatggtctctattcgaatgcctggacaattccctggcaaatgcttcctatgcagccaatcgggacattctaaaagaaattgtccttggcatacagaccgctgttcttttcaacaccaacaaccaaaattttttcaacaacaagccccactttctactatatgcccacgatgccaaaaaggaaatcactgggtggctcaatgccattcaaaatttgatattgatggcaatcccttacggtcacttccag

SEQ ID NO: 6802 - DNA, 352 bp, Homo sapiens
cagtactgtaaaaggaccatgcagcatgtgtaggacaatacatcatgtgccacacatcatgggattcatctttggggtgcaaggatggcatgacatgtgaatcaattaatgtgaaccattccgttaacagaatgaagaataaaaatcacatgatcattttaatgatgcagaaaaagcgtttgacaaaacgtaatagtctgtcagtataaaaactcaaaaaactagaggtaaaaggaatgtacctgtacataataaaggtcgcatatgataggctcccagctcgcattatagcagatgattaaagagctgaaagttttcctctaagattaggaaaaagatgaagagtctcccc

SEQ ID NO: 6803 - DNA, 358 bp, Homo sapiens
  SIMILAR (251)..(334): 501254mologous to Homo sapiens envelope protein,accession number M12140,Smith-Waterman Score=60.
gtctttcagtcattctttaaacatagaaaccagaaggtaccagaacctcctcctttatcaaaaacagaaaaaacctatttgctcagctggctgaaaacattgctagctgcctagatgattcttcatgttatggttataaaaaggctaacataagagaccaatggccttgagaagcaaaagagctaatgcctcaagataactttaactagctctttccccaaacagatgccacaaggtcaagcatctggctcttaaaacttctatcattaaaaaataccatgttactcactatgaaaaagctctgaagacacatgaaaaagaactaacctgcttaaggcatgacagagttggtacatgt

SEQ ID NO: 6804 - DNA, 812 bp, Homo sapiens
  SIMILAR (299)..(811): 921254mologous to Homo sapiens p30 DBC,accession number AF293335,Smith-Waterman Score=784.
gtgggaggccctgtgccagcagaaagctgcagaggcagctcccccaacccaggaggcacaaggggaaacggagcctactgaacaggcacctgatgccttggagcaagcagcagacacttctagacggaacgcagaaactccagaggccaccacacagcaggaaacggacactgatctcccagaggcccctccaccccccctagaacctgctgtcatcgcacgccctggctgtgtaaacctgtccctccatgggattgtggaggatcggaggccaaaggaaaggatctcttttgaggtgatggtgctggccgagctgtttctggagatgctccagagggattttggctatagagtttataagatgctactgagccttcctgaaaaggtcgtgtccccacctgaacctgagaaggaggaggcggccaaggaagaagccaccaaggaggaagaagccatcaaagaggaggtggtcaaggagcccaaggatgaggcacagaatgagggcccggctacagagtcaaaggccccgctgaaggaggatgggcttttgcccaaaccactctcttctgggggagaggaagaagaaaaaccccggggcgaggcttctgaggacctgtgtgagatggccctggacccagaactgttgcttctgagggatgatggagaggaggagtttgcatgagcaaagctggaggattcggaggtccggtccgttgcctcaaaccagtcagagatggagttctcttcacttcaggacatgcccaaggagctggatccctctgctgtgctccccttagactgtctgcttgctt

SEQ ID NO: 6805 - DNA, 431 bp, Homo sapiens
gaaagcttcagatttagaaccacagggctttatttttttccccttttctcttctgttccatcctttccctcatgggcggggggggtgtcataaaagtctgggaaaggaaagcaagcatcctcttgggctgagtcacagaaagagcatggagagacggagggtatggagtaaattgggaggcccaccaaacagggcttggggcagtggacagcagtgtgggagaggatggagaggaccaataagtcaagggcatggccaaacgcctgtgagggtcctggagcagtgggcaactacatcgcctgggccagcggccttccctagatgctcaagaccagagctgccagaacctgggttcaagctggggtcagagagtcagcccaaggctttctgaataaaaacagaaggatcttggaaatggggctttccagaat

SEQ ID NO: 6806 - DNA, 1826 bp, Homo sapiens
  SIMILAR (1467)..(1697): 941254mologous to Homo sapiens p30 DBC,accession number AF293335,Smith-Waterman Score=367.
cgccacgtttataaacgaatgtcatctatagtgggggctagtgttagcacctactcagtattcattgaatggatgcacatgatttatttacccagttctccatctgcactctatcctaaattttcttggaatgaacatccttctacctacacctgtgtgtttgttgcgatcaatttctagaaatggagcagctggctcaaaggctttgctttaagcttccatagctattgccagttctcctgaagaggctgtgcccgttctgctataaccagtggggtgtggagaccttatttcgccgtgccgttgccaacactgttagccgactttttcatctttgtctgtctagttggtgacacatgataatgtgggtttgcaatttctttaattgtaagtgaggattgagcatattttcctggcctctaattcttatgtatttctcttaagaacctattgatgtcaattttccgttttaggcttttgaactttttgttactgatttgtgagttcctttatattaaggcaatgacccatttctctgtcatgtgttataagtgttttcttttttccctttcccagtttgacttttgccatctagagtttgtaaattaagtggtcagatctgatctagcttccttgagaggtgccttacttcaaaagttctcagactgaaaaaaaattcgcccattttttcaaatctttgatggtttcatttcgaatgttttagtctttgctcagtctggattcccttgctgtcttcctgtagccccatctgtgacttcctagtaactcaaggcggcggttaccgcaggcctcgaggtcccctcagatgtttcagaccgggcatttgagtaggctatcagccttccccctgagacagcccttattccatccatcatccaaggcggatccaggtctcttctgaaaagggagggcagctccagacgctgggtgctggagcccatcactgcagacagtgaccccgcttatagttcaaaggtactgctgctctcttccccggggttggaggaattgtatcgttgttgcatgctctttgtggatgacatggctgagccaagggagacgccagagcatcctctgaagcagattaagtttttgctgggcaggaaagaagaggaggcagtgctggttgggggtgaatggtctccttccctggatggcctcgacccccaggctgaccccgcaggtgctgggtgcgtaccgccatccggctgtgcgcaggcccagaactgggcattgatttgagcggctgttaccaagtggtggcgctttgccgaagtttcagtacctgcagccggggacccccccggcgggcttcagacagtggtggtgtacctgccgggatgtctggaccatcatgcctactttgggaggaagtgggaaggccctggtgccaagcagaaagctgcaagaggcagctcccccaacccagggaggcacaaggggtgatggtgctggccgagctgtttctggagatgctccagagggattttggctatagagtttataagatgctactgagccttcctgaaaaggtcgtgtccccacctgaacctgagaaggaggaggcggccaaggaagaagccaccaaggaggaagaagccatcaaagaggaggtggtcaaggagcccaaggatgaggcacagaatgagggcccggctacagagtcagaggccccgctggtgagtaccctgccacctcgggctgtcatagtgcttaccgtgaccgcgcacctttaccccgggctctgttccgagcgcttcctgtgccttagctcattccctgcacccttgctcggcatggactga

SEQ ID NO: 6807 - DNA, 359 bp, Homo sapiens
  misc_feature (1)...(359): n = a,t,c or g
ggaaatggaaaaaccggtccttatattcatatgaagctacaggagaccctaaatagccatacaatcttgannnnnnnnnnnnnnnnnnnnnnnnnnnnnnnnnnnnnnnnnnnnnnnnnnnnnnnnnnnnnnnnnnnnnnnnnnnnnnnnnnncgttaacagtagccatagagaccaatggaatagaattgggggtccaaaacaaatgcatacatctatggccagttggtttttggcaaggaggccaagtttatttaatggagaaagaatagtctcttcaataaatgttgctgggaaacaggatttccttacaaaaaagaatggagttggattcctacctcacagcatatgtaaaaatt

SEQ ID NO: 6808 - DNA, 495 bp, Homo sapiens
  SIMILAR (5)..(196): 471254mologous to Rattus sp. reverse transcriptase homolog,accession number S80119,Smith-Waterman Score=126.
  misc_feature (1)...(495): n = a,t,c or g
aagaaaagatattctgtattcatgggcaagaagatttaatattgttaagatgttaatgctactacccaaagcaatctacagattcactgtaattcctatatttcttttgcagaatgattaaacagcattttttgcagaaatggaaaaacctgtccttaaattcatatgaagctacaggagaccctaaatagccaaacaatcttgannnnnnnnnnnnnnnnnnnnnnnnnnnnnnnnnnnnnnnnnnnnnnnnnnnnnnnnnnnnnnnnnnnnnnnnnnnnnnnnnnncgttaacagtagccatagagaccaatggaatagaattgggggtccaaaacaaatgcatacatctatggccagttggtttttgacaaggaggccaagtttatttaatggagaaagaatagtctcttcaataaatgttgctgggaaacaggatttccttacaaaaaagaatgaagtgtggattcctacctcacagcatatgtaaaaatt

SEQ ID NO: 6809 - DNA, 359 bp, Homo sapiens; identical to SEQ ID NO: 6807
  misc_feature (1)...(359): n = a,t,c or g

SEQ ID NO: 6810 - DNA, 495 bp, Homo sapiens; identical to SEQ ID NO: 6808
  SIMILAR (5)..(196): 471254mologous to Rattus sp. reverse transcriptase homolog,accession number S80119,Smith-Waterman Score=126.
  misc_feature (1)...(495): n = a,t,c or g

SEQ ID NO: 6811 - DNA, 399 bp, Homo sapiens
  SIMILAR (4)..(126): 451254mologous to Human endogenous retrovirus K env protein,accession number Y18890,Smith-Waterman Score=118.
aatgtactcatttgggaagattgcattgcaggacaggcagaggtgctgcatgattcctatggaatcattattgattggtcccctaaggggatgtttagcatgaattgcacctctcagtctgtgtccatggccacactatgttcagcttgtctgaacagaacgatcagatagcagaaatgataagaagtacggcaagagttcctattatctggaaacatggcagtatagtggcacctcaacctcaaatgatatggcctgctgtaggagctaaacataaggatttgtggaaactattaatagcttttgataagatcaagatttgggaaggaaaatatactatgccatcacaatataatcctaattacattttagaacttgttgaaaacaatacaatttgga

SEQ ID NO: 6812 - DNA, 358 bp, Homo sapiens
  SIMILAR (84)..(158): 601254mologous to Homo sapiens PRO0956,accession number AF130052,Smith-Waterman Score=77.
  misc_feature (1)...(358): n = a,t,c or g
cattattagtattgcaatacaataatagtaggggacttcaacaccccactctcaggaatggacagatcatccagatagaaaaccataaagaaacatcagagttaaactacacagtagaccaaagaagcctaactgacatttacagaacatttcacccaaataatctaatgatacacctcaaggaactagaaaagcaaggacagaccaaatccaacattaatannnnnnnnnnnnnnnnnnnnnnnnnnnnnnnnnnnnnnnnnnnnnnnnnnnnnnnnnnnnnnnnnnnnnnnnnnnnnnnnnnnnnnnnnnnnnnnnnnnnnnnnnnnnnnnnnnnnnnnnnnnnnnnnnnnnnnnn

SEQ ID NO: 6813 - DNA, 348 bp, Homo sapiens
  misc_feature (1)...(348): n = a,t,c or g
caattttggttttattaattggccactttaatgtaatggaaaatgggccaattgcctggaagaccccaacttccccagctttcacaagaaaaaatacttagcctaaatagccctaatgttttcnnnnnnnnnnngttgaaatagtagtaaaatatcttgccaaagaaaaaaagaccagattgcttcactcataaattctaccaaacatttaaggaagaaataatcccatttctcaaaactcacctaggaatttgaaaagaaagaaattctacttaagtcattcttatgagggcagtgttgtctaggcagcaaaactaaatgcagacattaacaagaaaactacacacc

SEQ ID NO: 6814 - DNA, 358 bp, Homo sapiens
ggtgcaggctgggaggtctcaaaggcaggtctcgtgagcagggggctgtgatcagggagggagaggacacactaggattgagactgaggcagggaggccagcggggagtctaagacagcaacagaggagaggacgtccgtggctgaatccggtccctggaaagcatggggtgccgactggggaggagcactgggctggagagccagcagggtgggggggctctgtgtcagggcaggctggctgagcagagtccaggctgagcagctctgggcacagtgggcagaaaggaggggcagtcatgcttctggctgcagacagaagaaggggacagagaaggagaggagggagcgggtaggag

SEQ ID NO: 6815 - DNA, 380 bp, Homo sapiens
  SIMILAR (60)..(107): 561254mologous to Homo sapiens reverse transcriptase,accession number L27428,Smith-Waterman Score=46.
  misc_feature (1)...(380): n = a,t,c or g
ctgtctcaaaacaaacccaacccaaccnnnnnnnnnnccaaaaaaaggcctaaaaccataaaactccagaagaaaacataggagaaaagctttatgacattggtttgacaatgattttctggatatgacaccaaaagcacaggcaatgaaagcaaaagtagacagatggtatggcatcaaactttaaaacttgtgcacatcaaaggaaacaattaacagaataaaaataggcaacctatggaattaaagaaactaatggcaaatcatatatctgataagcggtgnnnnnnnnnnnnnnnnnnnnnnnnnnnnnnnnnnnnnnnnnnnnnnnnnnnnnnnnnnnnnnnnnnnnnnnnnnnnnnnnnnnnnnnnnnnnnnnn

SEQ ID NO: 6816 - DNA, 428 bp, Homo sapiens
  misc_feature (1)...(428): n = a,t,c or g
nnnnnnnnnnnnnnnnnnnnnnnnnnnnnnnnnnnnnnnnnnnnnnnnnnngaagcctttgggggttacctaagggagcactttaccaccccacagctggcacggagatctgcagtgcatttcacaataaaagctctgcgcatgctgagcacagagccaggacttaagggggggagggtttagggaagcaaggaagaccagcacataacaacctggatttggacttttattttgccttctgtattcagctaacaagcttcaggagtcagtgaccttcaaggatgcggccatagatttctcttgggaagaggggattcaagcagaatctgctcaaaggatgaccgtgtatggggaggtgatggttgaaaactaccaggaacccggtttcctggggaaataccttttccaaacgcgagggggcctcccac

SEQ ID NO: 6817 - DNA, 355 bp, Homo sapiens
  SIMILAR (35)..(82): 561254mologous to Homo sapiens reverse transcriptase,accession number L27428,Smith-Waterman Score=46.
  misc_feature (1)...(355): n = a,t,c or g
ccnnnnnnnnnnncaaaaaaaggcctagaaccataaaactccagaagaaaacataggagaaaagctttatgacattggtttgacaatgattttctggatatgacaccaaaagcacaggcaatgaaagcaaaagtagacagatggtatggcatcaaactttaaaacttgtgcacatcaaaggaaacaattaacagaataaaaataggcaacctatggaattaaagaaactaatggcaaatcatatatctgataagcggtgnnnnnnnnnnnnnnnnnnnnnnnnnnnnnnnnnnnnnnnnnnnnnnnnnnnnnnnnnnnnnnnnnnnnnnnnnnnnnnnnnnnnnnnnnnnnnnnn

SEQ ID NO: 6818 - DNA, 2088 bp, Homo sapiens
  SIMILAR (1176)..(535): 391254mologous to Homo sapiens Human peptidase, HPEP-11 protein sequence,accession number AAY90294,Smith-Waterman Score= 425.
ctaactctcttccccatcccagggacggggggccgactctgctctggcgagttttcgggcactcagcttcctcctcagggaggagaacttgtcccccagcaccttgcgcagccccacgctgtccctgctgctgggtgggtcctgcctggtggccgggagctggcccgtgaacatctcccagcggtcgagggcgtccacggctctgtccacctgcaccaggtcctcctctgccacttcccgctgcagggcctggatgcacatggccagccaccgttcatgctccttgatggcctccgcagggcccccaggtggcagcggagcctctgaggctgccaggtagctcagcccttcctctggccccgaggcgaaggtgtgactcccggcatcaggggtgaggggctccgacacactggtgccgggctccgagtcactctcacagcacatgcccgagtcggcgctggcaggcggggtgtcctcccacactgacggctcccccgcctcctggctgggccacgtccccaccaccgcctgagtccaggtgtagagtctctggtacctctcgatgagcctgaaacccaggacatgctgcagcttcctcaggcagatgggacagaggtccaggggccgccgcagggcctcgtccaggctgagcgcaccctgcatgaggcagcggagccagcggcagttccccaggcccagaaggtggcagagctcgtggcacgtgaccttgcagcactgaaccatccccagggcactgaagcacagggcccagcccctgtcctgcaggggggcctcggggccgtctgctgctgcctctaccagggccagatcaggggcgctgggccccgacttcgggaattcccctgagaaccgggcgaagctgcagacgcccacttcgtgccctggaaggaacttgctgaaggtgaagctccaggcctcatgggggtacaggtcagacagtgtgaggcccagcacacacagcgcgtcccctggcttgttgttcttcaagaaggacaggatgccgtctgtgtggagctggagcctgtcagagtcccggctgggccgcgaggagcagcggatggacgcggctgccaccgacggcaggcacttgacgcgcaggcccaggaagaaggcctctgtgcagctgcacagctggtgcagcagggagcttcccaccggctcctcgctcaggtcagggacagggacttctagggttagcgccaggcactgcagctgagcaggcagcacacagagccgagccacctcgctgcaaaatgccagcctgaccggcccctgtgtttcaacaacatgcccatgtgtcagtgcgtcagagcttgggacaccaggctctgagccattagcagggaggtggagggaagcgggtagctcccaagctgttggattggctgctgtggggtggtggatgctgagaccaacggacacccgcaggatttgggtcctgaggggcaggaaaggggctgcgtggaccaccagggctggtgacaagcctatcggctgtaggtagatgtgcttccgagccaggcggggcttccggtgctgcagggaggcgtggaaggtctggaagtcctcgggagcctcgggtcggctcaggagccagtcgaagcccgtgcggatgagcagggtgcagaagagcgtcctctgcgggttgtaggcctcggccaggaagagccgctcggcaggggagaaggcggacacatacagctgctgcagggctgcgtcagtggagaccagagcgtccttcaaggcccggggcccgaagctgaactcctgtgcgggtctacactgcagcatggtgggcgggcagggcctggccactcctgggagcccctgctgctgtccatgggccacccgggggacggccacggtctcgtccagaatcttccctcgggctgatccgagtggctaccgggggctccctgcagacagacactggtccaagggcccttaaggcccagctctgcctggtcctggacgctctcaggcatgggcgcttctgggcccacagcaccctcgcagtcccgcgcccgccggagccggcagaggccgcgccgggcaccgagcacgaaa

SEQ ID NO: 6819 - DNA, 301 bp, Homo sapiens
gatatggctggcatctcggaggagcttcctttgccctgttatgagcaggccatcaccactggagaaaaggcccagaagcaccaaggcatgagatgtgcccagggagcagtaagaatcaggggctggtgcagggcctggcaggaggctggggcacaaaggggaagattctgaagggctctgagcaccagtcctggggagccggggtcagggcagatccacctgaagaaagctggcacatgctgtggtgggagctcaaaagacagaggggtaagaaactactcagggaggctcctacgaaggc

SEQ ID NO: 6820 - DNA, 1146 bp, Homo sapiens
  SIMILAR (517)..(1017): 1001254mologous to Plasmid F Protein A,accession number M12987,Smith-Waterman Score=886.
atgcaaagcccgattgcaagaaagaattttgctgaaaatatttctgcgctggctgatgcggaaaatatttcacgtaagattattacccgctgtatcaacaccgccaaattgcctaaatcagttgttgctcttttttctcaccccggtgaactatctgcccggtcaggtgatgcacttcaaaaagcctttacagataaagaggaattacttaagcagcaggcatctaaccttcatgagcagaaaaaagctggggtgatatttgaagctgaagaagttatcactcttttaacttctgtgcttaaaacgtcatctgcatcaagaactagtttaagctcacgacatcagtttgctcctggagcgacagtattgtataagggcgataaaatggggctacaggataactatgaagatatggctggcatctcggaggagcttcctttgccctgttatgagcaggccatcaccactggagaaaaggcccagaagcaccaaggcatgagatgtgcccagggagcagatctggctctgaaggggctacgtgttttgctcgtggaaggtaacgacccccagggaacagcctcaatgtatcacggatgggtaccagatcttcatattcatgcagaagacactctcctgcctttctatcttggggaaaaggacgatgtcacttatgcaataaagcccacttgctggccggggcttgacattattccttcctgtctggctctgcaccgtattgaaactgagttaatgggcaaatttgatgaaggtaaactgcccaccgatccacacctgatgctccgactggccattgaaactgttgctcatgactatgatgtcatagttattgacagcgcgcctaacctgggtatcggcacgattaatgtcgtatgtgctgctgatgtgctgattgttcccacgcctgctgagttgtttgactacacctccgcactgcagtttttcgatatgcttcgtgatctgctcaagaacgttgatcttaaagggttcgagcctgatagtgccctcaccaagtcttggcccttgtgtgaattcctgcctttcccagaaatgagtccagggtgtctgaccgcagcttcagatcccatgaaggattcttctaacatctgcgatctaaccttccagtga

SEQ ID NO: 6821 - DNA, 786 bp, Homo sapiens
tcacatgctgcattcaggctgctggcacagggggttctggagctccaggcctggcaagcgtggtgggaggagcagcacctttgtggtcttctttttgaaactctctgccttgacaaataagatttgccctggttccccttcctggctgcagagccccaggaacttttccagcttcctctctattcgcagtggcccttcccggggccgcagcgctgggctcgcagcctggccaggggagaagagggcgtcggcgtcctcgccccacacccccagccgcccacctggccggggcgccacggggaacagagcccccgccggcaccatggagtaggtcatcatcatcagcatgtcatggctctcggcgcggatatgcggcgcgggctcgccgctgtggctgcgcttgttgcgagctgagctggccgggtcttggggtggtgcggacgccccgcgcggcgcgcggctcaactcggccaggaaggagcgcagggcactgtcctcgcgctgaatggcctttttttcttcccttccaggcgtcatggttgctaaatcaaaacattgtcctaatccctgtaagacgtctacatatccatcaggattatctaataattttcctaggtccggtttgatctgttttaagtaatgcccctggttatgatttttggtgtggagtttggctgtgacagttgagatagacagatatgcagatatacactgattcgtctttttcagggattccataaatgcatactcggttaggacaacaggcttcataatgggagggaccat

SEQ ID NO: 6822 - DNA, 1482 bp, Homo sapiens
  SIMILAR (1000)..(1479): 961254mologous to Escherichia coli Membrane protein MosC,accession number D90722,Smith-Waterman Score=764.
atggcccgaggcgctgagggaggccgtggggacgcgggttggggcctgcgtggcgccctggcggccgtggcgctgctctcggcgctcaacgctgcgggcacggtgttcgcgctgtgccagtggcgcgggctgagctcggcgctgcgggctttggaggcgcagcggggccgggagcagcgcgaggacagtgccctgcgctccttcctggccgagttgagccgcgcgccgcgcggggcgtccgcaccaccccaagacccggccagctcagctcgcaacaagcgcagccacagcggcgagcccgcgccgcatatccgcgccgagagccatgacatgctgatgatgatgacctactccatggtgccgacaggtcatcgaggtttggagaggttgaacatcctgtgcaaggtcacacagccaatccgagtgatggtggacctgtgcaacagcaccaagggcatctgcctcacagataccatctacacctcctggtttgacattcaagaccttctggaccaccaggggctacaggataactatgaagatatggctggcatctcggaggagcttcctttgccctgttatgagcaggccatcaccactggagaaaaggcccagaagcaccaaggcacgagatgtgcccagggagcaatgcatgctcgagcggccgccagtgtgatggatatctgcagaattcgcccttcaggacagagtggggtggaacaagattacatcacactacttagagcaacatgcaaattaaatcttatgaatcatttctggaagtttccactcatatcaaatgcctatgtcattcactcacttcgtctcatcacacaggcattttatcaactcacatcatcacaagaagggcattttatcaactcacatcatcacaagaagggtgttctccgatttgtccccatgggctgttttgaggaacggctctattgttcgaaacaccatggcatgtgccacggtacttgcgaccatcgatgtgctcatggaccaaggatgatcggccctacttccggctcgctgatttatgccggttttaccctggggatgacggttggacgcttcaccggcggttggttcatcgaccgttacagtcgcgttgccgtggttcgggccagtgcactaatgggggcgttgggtattgggctgattatttttgtcgatagcgcgtgggtcgctggggtgtctgttgtactctggggactgggtgcctcgctgggcttcccgctgaccatttctgccgccagcgataccggccccgatgcaccaacccgcgtcagtgtggtagcaacgaccggttatctggctttcctcgtcgggccgccgctgctgggctatctcggcgaacattatggattacgtagtgcaatgctggttgtactggcgctggttattctcgcggctattgtcgcgaaagccgtcgccaaacccgataccaaaacgcagacggcgatggagaatagttga

SEQ ID NO: 6823 - DNA, 1431 bp, Homo sapiens
  SIMILAR (585)..(848): 431254mologous to Alvinella pompejana fibrillar collagen chain FAp1 alpha,accession number AF053538,Smith-Waterman Score= 167.
atggcccgaggcgctgagggaggccgtggggacgcgggttggggcctgcgtggcgccctggcggccgtggcgctgctctcggcgctcaacgctgcgggcacggtgttcgcgctgtgccagtggcgcgggctgagctcggcgctgcgggctttggaggcgcagcggggccgggagcagcgcgaggacagtgccctgcgctccttcctggccgagttgagccgcgcgccgcgcggggcgtccgcaccaccccaagacccggccagctcagctcgcaacaagcgcagccacagcggcgagcccgcgccgcatatccgcgccgagagccatgacatgctgatgatgatgacctactccatggtgccggcggggtctctgttccccgtggcgccccggccaggtgggcggctgggggtgtggggcgaggacgccgacgccctcttctcccctggccaggctgcgagagatctttcagtagcagcctatgaatttagcacagtcagatttgttttttctgaagctcgctggagcagtgtggagaatgggaaggggtatacggtggatccgagtgatggtggacctgtgcaacagcaccaagggcatctgcctcacagcccctaccagagtggaaggtggcagaagttactgatggggcaaggagtacagaggacacatcatggggcaagggagcaggtggcagttcctaggaaggtggaccttctggaccaccaggacctccgggagccggcgggttgccaggacacaacggattggatggacagcctggtcctcagggcccaaaaggagaaaaaggagcaaatggaaaaagaggaaaaatgggggctacaggataactatgaagatatggctggcatctcggaggagcttcctttgccctgttatgagcaggccatcaccactggagaaaaggcccagaagcaccaaggcacgagatgtgcccagggagcaagggcagcttcagagaaaacgggcacacaccgtccaagccagctcaatcctcagaaggccagtaattaccattggaattacacagcagcaatggatcgttcatataggataataattataattatacatgagcatcgctgtagaataatgatgcctattggcttatcctgggaagtactccaaaaatgtgattcagtcctgaggcctcggcaatgggcatgatgagggcaggctcaggggcaggagggcaccctgctagagctgggtgtggggcacgtaggaaaggggtggttttcaaaaaggcttgagacagatccctggccttgaggacgtgcttcgcatgcagcctgcaacccagggagtgcagaaaagaaaaagtgcatttgtttatggagcacatatttgtgtggcaggtaccattctagatgctggagattcagaaataagcccccctcctccaccttc

SEQ ID NO: 6824 - DNA, 440 bp, Homo sapiens
  misc_feature (1)...(440): n = a,t,c or g
ctcggcaagtaccaggacgggtcttggcagccgaatgnacgattcgagaggccgctntccgggggcccgcacgtaccgggagagccccggcccctcnacncgcatgtngggacggagccgggagatcgcgcgctggccgcgccgaagacccctcgctcctctcctccatcggctcttaccgagtccccgccccggaatctgtggaggggccgcttagccttgggagaggaagcagcccggggntcgccggttctccagcccggactgctgccagacttccctggaggtggcagctttcttcaaaggcaccatcccggagcgcaacccctgatggcgcagaaaattcgggacagaccacgtagaggtgggctcccaaagcaaggtgcggaacggcacaaggcnccccaaaggaatcgcttgccacctgagctccaagccgt

SEQ ID NO: 6825 - DNA, 397 bp, Homo sapiens
tcgcgcgctgccgccgccgaaggacccctcgctcctctcctccatcggctcttaccgagtccccgccccggaatctgtggaggggccgcttagccttgggagaggaagcagcccggtgaacggccactttcctgcatgagtggctgccccaactgcgtgtgggtggagtacgtggctgatgagaacctcaaggccttcctcaggatggagatccggctcacaccaggtgcggagctgagccatccctgctggactccctaccgcaggacggagtccaggacgcagccgcagcctccttccttcacaccccctcacagactccttgtgtccaacgggaataggaagaattagttactgacttcacctgagaaaaaaataaattctctatggtggtttc

SEQ ID NO: 6826 - DNA, 440 bp, Homo sapiens
cccacgcgtccgcccacgcgtccgacagagcagccatcttagctggaggtgtcgagtgcctcccccaccccccaccatgtgcttgagtgcacacccggcgccaggccctgatcctggcacttcttgtgaatcacaccgtgtcatacccatgacttccattgcacagtggggaaactgagtctagagaggtgaaataacatgtctaaagtcacaggaagtgaaaaagctgaggacatggagccagttgcccaatgacaggagagctgaaatgtcctcactgctgggggtagaccgggcctcaccagcttcctgggagagtcacatgtttgtctgcatcctcagggggctcgccggttctccagcccggactgctgccagaggcttcctggaggtggcagctttcttcaaaggcaccatcccggagcgcaagcccctgatgg

SEQ ID NO: 6827 - DNA, 1504 bp, Homo sapiens
  misc_feature (1)...(1504): n = a,t,c or g
ggtgcccagccantgaccctacatcantggaccttttaaagttcctgaagggttccgccagaaaagttaacaccttcctgaagtttgggttgcccccatcagagctggtccacatttccttgatccattgaaaaaatgaatatccttaatttttgtcctttgcctgactggtatttataaaatacaaatgccttttagtgggttgagctgttgtgataatctcttcccatcctaccttagagaagaagctgtactatttagacagttttggccaacactagaagcaaaagaattcaaaggctgggtggatatttaagaacttattctaacctgtcaggtttcaatttggggggcctgggtttaacagaggaaaaaaatataaattgattttctgatgtctcacaaatatcacatacctggaaaaaaattaaaacaaaaaatgaattttgtaaaaggttatgtatgacttccatttgctctgtaaaaaaatgaacaaagattgtgaaaggatcctcttccaccacatcatttaatgggttagcggaacagatagggagctatgacactagcaccaaagagagattttttttctgggttgggtggggctggtgccatgcccctttctgggatttgacaagtctttcccactcacctatacaatatgccaaatcaactggagttgtcattctaatgttttaaagaatgattgggttcccccaaactgtaggaggtcgatggtaacaataaagtgatacaaaatgcttatgtcattataatttatgtaagggagaccattaggcttgaaaatcaatatgattgaggttatctattctcctgaaaagtgaattggagaataaagaatgaatatttgaaaggatgttgtgtactacgcactatactaccatgtattagaaaatacggtaaactgtgggttagaaaagcgaaagcagctggtatgatagaacactgcactgagtaacgaagagattctagtcatggctcttgtggtcatttcatttttgagcctcacattcttccaattaatggagggtaccagattaaataaactctggggattcatcccaattcgaactctgtaattctctgaatgaactctctcttcaattaaagccaaattattaaccattttaaccccaagtttaaaatttaatagagaagtcaaaaatgaggtatgccactttgtggaatgtttttggtcttatcacaataacctgattaaaatggtgccctttatttccatgtttactcctttaaataagatgaaagctttcagaacatttatttgcaaaatgactgtcaatatcaacaatatgcatcaaagtaccatatatgctaagggagaggagcacttgatgggctgctatgttaactgtaaattgagaactgcttgttttatggcttttgctgttaaaaaaaaactgctggcttttaatatgtactttaaaatatactcatgtctgggagagaacttttaaaaaaaaaa

SEQ ID NO: 6828 - DNA, 471 bp, Homo sapiens
atcgcgcgctggccgccgccgaaagacccctcgctcctctcctccatcggctcttaccgagtccccgccccggaatctgtggaggggccgcttagccttgggagaggaagcagcccggtgaacggccactttcctgtttctcagtatctgccgagcgcctgtgtgcgagccctcctgggctctggggactggccgtggacatggagcggatgatgcccctcgcaggactagttaaataagtgaagttggtagcgtgtcagtccgtgatcctgggtagatagagcagggcagcgacggaagactgcctataggacattcacgctgggatgagaggggcctgagaggcctgggctttgtgacagggaaacttggataaagggtggtgcgattcttccggttggtccctcaaaggtggtggggcttggttatactggtagaggtgctgggctggccaggagcttacagggttac

SEQ ID NO: 6829 - DNA, 1021 bp, Homo sapiens
tttttttttttttttttcctgtgaaaccaccatagagaatttaatttttttctcaggtgaagtcagtaacctaattcttcctattcccgtgggacacaaggagtctgtgagggggtgtaaaggaagaaggctgcggttgcgtcctgggactccgtcctgcggtagggagtccagcagggatggctcagccgtccgcacctggtgtgcaagccggatcttccatccttgaggaaggccttgaggttctcagtcagccacgtgctccttccaggggcagccaggggcccgtttccccaccgtcctggaaagtgctgcagcagcctgtccgccgtactcccaccccacacgcaagttggggcaagccaactcatgcaagcagttttgtgggcgggctgggagctcaaggtggcaagcgaatgcctttgggcgggcctgggtgccgtcccgcacctggcttgggagcccacctctacgtggtctgtcccgaattttctgcgcccatcaggggcttgcgctccgggatggtgcctttgaagaaagctgccacctcctaggacacctctggcagcagtccggggcttggagaaccggcgagcccccaacttcacttatttaactagtccttgcgaggggcatcatccgttccattgtccacggccagtcgccccagagccaggagggcttcgcacacaggcgctcggcagatactgagaaacaggaaagtggccgttcaccgggctgcttcctctcccaaggctaagcggcccctccacagattccggggcggggactcggtaagagccgatggaggagaggagcgaggggtctctcggcggcggccagcgcgcgatcctcccggctccgtccccacatgcgggtggaggggccggggctctcccggtacgtgcgggcccccggacagcggcctctcggacgtgcccttcgcgctgccaagacccgtcctggtacttgccgagccacggaccgcggcgtaccgcccggcctcccgcgcctgtgccga

SEQ ID NO: 6830 - DNA, 403 bp, Homo sapiens
  SIMILAR (240)..(175): 1001254mologous to Homo sapiens Human secreted protein clone yd73_1 protein sequence SEQ ID NO:92,accession number AAY73435,Smith-Waterman Score=105.
ggcaagtgcttctgcaaggggctttgcttctcctcataacagtggcacaggctggccgcgtgctcaaacttggcgtcagccgtgagtttcaggatcttcttatactatggggaaaggagaccttcaggcggtgccaggcccatgctcaccagcccttcacttacagcctggatcatcaatcccctgtcccagcagctcctttagtacctggctgcagagcagccgcaacttcacagaggaccgccccgtacccccgcccctgtctcgggagcggagtagcggtggacttttctcacgcccgcacacactgtttgcggagaggccagggcagacaacctccacccgtttccggagccactggcgccccctcattcccgctccagcagcccatgcctcgacgaaa

SEQ ID NO: 6831 - DNA, 290 bp, Homo sapiens
  misc_feature (1)...(290): n = a,t,c or g
ccccactgtgggtcttgcctgccctccatcaactagaaggcgacgtagcattgagttaatccaccattactttaaatggcatggataccactcatatagtattgagaaaagnnnnnnnnnnnnnnnnnnnnnnnnnnnnnnnnnnnnnnnnnnnnnnnnnnnnnnnnnnnnnnnngttagtatgagggctagaagagtggtgattttaaacctccgggcctttgtacacgctgttccatctaccaagggtgccctttcctcgcaccatgtaaacgcaaacgtatggatca

SEQ ID NO: 6832 - DNA, 459 bp, Homo sapiens
  misc_feature (1)...(459): n = a,t,c or g
gacctaacgtttgtcgttacatggagcgaggaaagggcacccttggtagatggaacagctgtgtacaaaggttcggaggtttaaaatcaccactcttctagccctcatactaacnnnnnnnnnnnnnnnnnnnnnnnnnnnnnnnnnnnnnnnnnnnnnnnnnnnnnnnnnnnnnnnncttttctcaatactatatgagtggtatccatgccatttaaagtaatggtggattaactcaatgctacgtcgccttctagttgatggagggcaggcaagacccacagtggggctgagcccctcgagggttcctggctttgcccaggaaacaattcaagggcaagctggaagtgaaagtaaacaggccaggcatggtgggagatactacccctttccatggcaatgaccccacgacccaaaagttactaccccttccctagaaacttttgcctgggctgcccc

SEQ ID NO: 6833 - DNA, 398 bp, Homo sapiens
  SIMILAR (179)..(114): 1001254mologous to Mus musculus putative,accession number AK004174,Smith-Waterman Score=105.
gctcaaacttggcgtcagccgtgagtttcaggatcttcttatactatggggaaaggagaccttcaggcggtgccaggcccctgctcaccagcccctcacctacagcctggatcatcaatcccctgtcccagcagctcctttagtacctggctgcagagcagccgcaacttcacagaggaccgccccgtacccccgcccctgtctcgggagcggagtagcggtggacttttctcacgcccacacacactgtttgcggagaggccagggcagacaacctccacccgtttccggagccactggcgccccctcattcccgctccagcagcccatgcctcgcttcacccctggtgcctcatcatcgcaccaggaagccacgaaatcgtcgacccgggaattcc

SEQ ID NO: 6834 - DNA, 573 bp, Homo sapiens
  SIMILAR (213)..(392): 981254mologous to unidentified MCSP,accession number A61971,Smith-Waterman Score=301.
agaggagacggggagtcacatttcagaagcacctatgctttaaataccatatatcttttcttcctcacaactcctcggagccagaacttatggtccccattttctaccaatggaaaatgaagccctaaaagagtcagtctcctcctgcacccaaaggcagggcatgaagggtgctgctggggcctgactgccagccctgggcctgcccctaggtggaagagcagctgatccgctacgtgcatgacgggagcgagacactgacagacagttttgtcctgatggctaatgcctccgagatggatcgccagagccatcctgtggccttcactgtcactgtcctgcctgtcaatgaccaaccccccatcctcactacaaacacaggcctgcaggtgagagcatccctgggaacacccccatgtctgcttcgagaaagaggccagcgtcccctacttcgcggctcagagctcccccagctctgatcctcagtttcctcctctgcaaaatggggacgctgccacatgcctcacggggttgttggaaggagagaagtgagattgtgctgaaatagaaaaa

SEQ ID NO: 6835 - DNA, 1266 bp, Homo sapiens
  SIMILAR (710)..(510): 881254mologous to Homo sapiens Human secreted protein clone yd73_1 protein sequence SEQ ID NO:92,accession number AAY73435,Smith-Waterman Score=284.
  misc_feature (1)...(1266): n = a,t,c or g
tattcaaactggaagnnnnnnnnnnnnnnnnnnnnnnnnnnnnnnnnnacaaaccagcttgaagcggcagggttacagctctgcgacggcccctgcaggcggggtgtgctgggcagagtgtgctgagagcagcagctcaggacagttctgcagccacatttacacccacttttaatttcatgtagattaaggggcagcccaggcaaaagtttctagggaaggggtagtaacttttgggtcgtggggtcattgccatggaaaggggtagtaactcccaccatgcctggcctgtttactttcacttccagcttgcccttgaattgtttcctgggcaaagccaggaaccctcgaggggctcagccccactgtgggtcttgcctgccctccatcaactagaaggcgacgtagcattgagttaatccaccattactttaaatggcatggataccactcatatagtatcgagaaaagttagtcacattcaaaagagtgcatgcaatcttgtcccctgtggctatagcatcgcataactcaagctaggcgtcagccgtgagcttcaggatcttctcataatcaatcccctgtcccagcagctcctttagtacctggctgcagagcagccgcaacttcacagaggacatcttggccagcgtgctgatctctgccagcacccagtcggcacagtccagatcaccacagaaccagaacctctgcaagggagggagtcaggctgcgccccctgcatcctcccatcccatctctagccatggatggggcctgtgcctggacgaccctcctgccaaggacatcatcgacttccccttggtgctgcctggcatcccctatgctgtgagccaccagtgccgcctccagtacggggcctactctgccttctgcgaggacatggatggtgattccagcctcatttctccatgggccaaatatcctaaacaaaggcctggacagggggtctttatccgagtgcccaaaaagcacatgcagaaaggctctgcatgccccctgtggcctgtcagaggtaagagcctgcccgtcaaaatgcacaatcctggttcttgcagggaggtggaagagcagctgatccacatggaccaccagagccatcctgtggccttcactgtcactgtcctgcctgtcaatgaccaacccccggtcctcaccacaaacacaggcctgcaggtgagagtattcctgggaccacccccaatttctgcttcgagaaagaggcctgcgtcccctacttcatga

SEQ ID NO: 6836 - DNA, 785 bp, Homo sapiens
  SIMILAR (4)..(783): 931254mologous to Homo sapiens scavenger receptor cysteine- rich type 1 protein M160 precursor,accession number AF264014,Smith- Waterman Score=1325.
aacagacagctcagttgtgggactgctctctcaaccacaggaggaatttatattggagaaagaagtgttcgtgtgtggggacacaggtttcattgcttagggaatgagtcacttctggataactgtcaaatgacagttcttggagcacctccctgtatccatggaaatactgtctctgtgatctgcacaggaagcctgacccagccactgtttccatgcctcgcaaatgtatctgacccatatttgtctgcagttccagagggcagtgctttgatctgcttagaggacaaacggctccgcctagtggatggggacagccgctgtgccgggagagtagagatctatcacgacggcttctggggcaccatctgtgatgacggctgggacctgagcgatgcccacgtggtgtgtcaaaagctgggctgtggagtggccttcaatgccacggtctctgctcactttggggaggggtcagggcccatctggctggatgacctgaactgcacaggaatggagtcccacttgtggcagtgcccttcccgcggctgggggcagcacgactgcaggcacaaggaggacgcaggggtcatctgctcaaaattcacagcctttaggctttacagtgaaactgaaacagagagctgtgctgggagaattgaagtcttttataacgggacctggggcagcgtcggcaggaggaacattaccacagccatagcaaggattgtgttgcaggccaccttggctgtgggggaagaaatggatgctaacccttcccccctttg

SEQ ID NO: 6837 - DNA, 1116 bp, Homo sapiens
  SIMILAR (1)..(1113): 1001254mologous to Homo sapiens similar to golgi antigen; similar to U50078 (PID:g1477565),accession number AC004460,Smith- Waterman Score=2027.
ggtttggtattttcctggggtgatggtgactttggaaaattgggccggggcggaagtgaaggctgcaacattccccagaacattgagagactaaatggacagggggtgtgccagattgagtgtggagctcagttcctactggcgctcaccaagtctggagtggtgtggacatggggaaagggggattacttcaggttgggccaccgctctgacgtgcacgttcggaagccgcaggtggtggaagggctgagagggaagaagatcgtgcatgtggctgtcggggcccagcattgcctggcggtcatggactcagggcaggtgtatgcttggggtgacaatgaccacggccagcagggcaatggcacgaccacggttaacaggaagcccatgctcgtgcaaggcttagaaggccagaagatcatgtgtgtggcttgcgggtcgtcccacagtgtggcgtggacaactatggatgtggccacgccctctgtccacgagcccgtcctcttccagactgcaagggaccctttaggtgcttcctatttaggtggccgcgtttattctcacaaattcagcccgatgactcagtccttccaggaatggtggtacgtgaatctcaacagcctaatggaccaggctttgaccccacagtgtggcagtggggaagacctatatatcctcacaggcacagtgccctcagactacaaagttaaagacaaaagttttacaggtagtgctcttgctgctttggtgaaaggtcttccagaagctttgcaaaggcagtttgaatatgaagatcctattgtgaggggtggcaaacagctgctccacagcccattctttaaggtactggtagctcttgcttgtgacctggagctggacactctgccttgctgtgccgagacgcacaagtgggcctggttccggaggcgaccagatgattggaatctgtctgctggtggcagtggaacaatttatggttggggacatgatcataggggccagctcgggggcattgaaggtgcaaaagtcaaaattccctctccctgtgaagccctcacaactctcagacccatgcagttaatcggaggggaacagaccctctgctgtgacagctga

SEQ ID NO: 6838 - DNA, 612 bp, Homo sapiens
  SIMILAR (150)..(236): 581254mologous to Homo sapiens PRO1902,accession number AF118082,Smith-Waterman Score=94.
tggagagagagtccacactccgctcgcccgaggctggagccgcagtgctacgatctcagctcactgcaacctcctgggctcaagtgatgctcccacattagccttccgagtagccgggactatagttgctgtgctaccatgccaagctaaattttttgtgtgttttttggggtagagatgaggtttcaccatgttgccaaggctggtctcaaattcccaggctcaagcaatccacctgcttcaggcatcccaaagtgctgggactataggtgcatccttggccaattctcttcttttgaagccaaacctcgtatgctgattttcacactgttcataatatgttctgggcatgtcatgatgtcttagaattcaagttttgggatggccaagcatcaactgctttaagtatactcctcagagcatctagcacattttgggatctcaataaatttgttggttcccacagccaccaaacatcatggccccaagacactcaccatcagctggtctgtcatctccactgccttctccacagtgtgtagctcactgagggcttgctgagcacggctgctgctcccgacggctgaagcttgctggaagttggtctgaatg

SEQ ID NO: 6839 - DNA, 214 bp, Homo sapiens
  SIMILAR (1)..(192): 921254mologous to Homo sapiens similar to golgi antigen; similar to Q08379 (PID:g2498401),accession number AC004460,Smith- Waterman Score=298.
gtggcatttttcaagtccgctggagctagtgtccaggagaagcaggcacagttacaagagcaggtgaaagagcagagggtgtgctgccagcgcctggctcacccggtggcctcggcccagaaggagccagaggcagccagaggccctggagccccagggcctgggggcgagtctagcagctttatggaccacctgaaggagaaggcagacctga

SEQ ID NO: 6840 - DNA, 141 bp, Homo sapiens
cagggggaggcagagatggcacagcaagagacatgcccccagaatgccaccaatgccccaggacaggcccacccatgggaccaggttatcaggggccgttacttcttccagctgatgttccacttgtttcttctgttgttt

SEQ ID NO: 6841 - DNA, 210 bp, Homo sapiens
  SIMILAR (210)..(91): 1001254mologous to Homo sapiens similar to golgi antigen; similar to Q08379 (PID:g2498401),accession number AC004460,Smith- Waterman Score=204.
catggcctccctgctctccaggtcctgtgggatgctaggaatgggccgaggtgcctcctccccctcactgtccagatgtcctcctccataggtcagctgctgataggcggccacctgctgctgataggtggccacgtactgctgcaggtgacccaggtaatggtctggctgctgctgcagactctgagcctcttggctcttcagctccac

SEQ ID NO: 6842 - DNA, 1125 bp, Homo sapiens
  SIMILAR (1)..(1122): 991254mologous to Homo sapiens Amino acid sequence of a human HRPCa 10 polypeptide,accession number AAY84626,Smith-Waterman Score=1915.
aagcaagccttgaatacagattaccttgattctgattaccaaagaggacagctttacccattctcccttagcagcgatgtccaggtggccacatttactctcacaaattcagccccaatgactcagtccttccaggaacggtggtatgtgaatctccacagcctaatggaccgggctttgaccccacagtgtggcagtggggaagacctatatatcctcacaggcacagtgccctcagactacagagttaaagacaaagtggcagtccctgagtttgtttggctggcagcctgttgtgctgtccctggaggaggctgggccatgggctttgtcaagcacacccgggacagtgacatcatagaagatgtgatggtaaaagatcttcagaaactgcttccatttaaccctcagctgtttcagaacaactgtggtgaaactgagcaagacacagagaaaatgaaaaaaatcctggaagtggttaaccaaatccaggatgaagaacgaatggtacaatctcaaaagagttctagtcccctttctagcaccaggagcaagaggtctactctgttgcctccagaggcatctgagggaagtagtagctttttgggaaaactcatgggcttcattgctaccccattcatcaagctttttcaattaatttattaccttgtggtagcaatcctgaagaacattgtctatttcctgtggtgtgttaccaagcaggtgattaatggcatagaaagttgcctttaccgcctgggctcagccaccatctcatacttcatggccattggggaagagttggtgagcattccctggaaggtgctcaaggtcgtggccaaagtcatcagggctctcctccggatcctttgttgtctgctgaaggccatttgccgagttctgagcatccctgtccgtgtccttgtggatgtggccactttccctgtgtacaccatgggcgctattccaattgtttgcaaggacattgcactgggccttggtggcactgtctcactgctctttgacactgcttttggtaccctgggtggcctatttcaggtggtttttagtgtctgcaagcggattggctacaaggttacttttgacaattctggggagttataa

SEQ ID NO: 6843 - DNA, 726 bp, Homo sapiens
  SIMILAR (153)..(722): 991254mologous to Homo sapiens HERC2,accession number AF071172,Smith-Waterman Score=983.
gtgagctgccatcctctatagcggccgcctctcttctcagcctgtggtggtggagagtatccacccttacacctacgacacctccaccagtggcacagtgaagataccaggtgcagaaggactcagggtggaatttgaccggcagtgcatacacagagaggcgccacgaccctctcacagtcatggacggcgtcaacaggatcgtctccgtgcggtcaggccgagagtggtccgactggtccagcgagctgcgcatcccaggggatgagttaaagtggaagttcatcagcgatgggtctgtgaatggctggggctggcgcttcaccgtctatcccatcatgccagctgctggccctaaagaactcctctctgaccgctgcgtcctctcctgtccatccatggacttggtgacgtgtctgttagacttccgactcaaccttgcctctaacagaagcatcgtccctcgccttgcggcctcgctggcagcttgtgcacagctgagtgccctagctgccagtcacagaatgtgggcccttcagagactgaggaagctgcttacaactgaatttgggcagtcaattaacataaataggctgcttggagaaaatgatggggaaacaagagctttgagttttacaggtagtgctcttgctgctttggtgaaaggtcttccagaagctttgcaaaggcagtttgaatatgaagatcctattgtgaagggggcaa

SEQ ID NO: 6844 - DNA, 1191 bp, Homo sapiens
  SIMILAR (264)..(40): 641254mologous to Homo sapiens 88-kDa Golgi protein,accession number AF204231,Smith-Waterman Score=237.
ctattgctctggcagtattgtggaggactgcatgtggaatttgcaagtagggctagtcccatccggcttcttcttctgtgtggcggcgacagcacagagagaccactctaactctcctatacgctgcgatgaacgttgcaggcggccggccagatccttggactcttctgtaatgacagagttgacatggggctcaaaggactccgccttacagacctctagctccctttcagctttctgtttctcattgtttgctttcttttccagggggaggcagagaaggcacagcaagagatatgcccccagaatgccaccaatgccccaggacaggcccacccatgggaccaggttatcagggaccctttgatactcactacctcctctggaaacacgagcccaaaaaggagaggtggcttgtccagaatcaaagagcaaattagggactgagtcatggcagaaatacggggcccctgacaaccagtcaggccagcacttccccaagaggcaacaaccccagggcgtgtgtagcaaggactcgagtaggggtgccagccactgagttactatggatggaggagatgagatgtgtgcaactgttctgctacagtaaagcacgcagtcagtgcagtcaccagggttaggatgtgtgagtgttttaccaacctgcctgctgggtttcagacacctggcactacctccagcctctaactgattctggctagtacgcgtgaaagctgtcagctgagtgatgagtgggccgattttggccacaggtccctgcacttcccacctggcctgactgctagattctgagcccctggagaggagcgtgtcatcgttttgcaagtgggatgtgcggttgttggggaagacgtctttgtgctgtgttgggttggaagctctctccagctctgaaatctttaactgtctactgggtgtatttgtctggaaccttgcctcctgtctctgtggttctgcatgttgccgggtgtttctcagggacacctgactttcctgagggtccccagccgcatttgcagtgacacctccatcctcactgcagtgacccgtgagtgcaggcctgtgcccgtgacctggctggaccctggggttttcctgcgccgctggccctgagctgcttgtgagtgttgtgcagccatcaccaccatccatctccagaactttcttcat

SEQ ID NO: 6845 - DNA, 557 bp, Homo sapiens
  SIMILAR (495)..(97): 741254mologous to Homo sapiens 88-kDa Golgi protein,accession number AF204231,Smith-Waterman Score=537.
caaaggaagtaaatgaattgtgtaggagattaaccccataacttggtttcttatttaaaaatttcttgagcagctgtttgatgatggtgatgtttatctccttcttcttggcagccaagcccaacaaaataatggcacacagcagttgctgcccaagcctgggtgctcctggtggtcctgcacgatcggctgtgcagtaggcttgtcaaggagaggatcctccctggcctcttcttgggcagaggaggtgaggctcacctcacgaagatcaccatgcttgtctgcagccccaagctcctggggggctggggctcctggaccgggctcatcagcagggttgtgggcagcggccaggaattttctgtgcccattgttgtagttgctgtaagccgcaataccatctgctgcagctccagcagcttcaccttcatctcctccctgagctccagcctgatggtgtcctcctcccagtgctgcatctttggcacggcccccctggttctgataaaaggtgatggattttctgatggcatctctcttgccagtattgaatgaag

SEQ ID NO: 6846 - DNA, 985 bp, Homo sapiens
  SIMILAR (241)..(399): 661254mologous to Homo sapiens 88-kDa Golgi protein,accession number AF204231,Smith-Waterman Score=176.
agaacagtcacttggcacaggagtcactgaaagggccgcagggtgctgtggtggggagataagaaccatgagagaagttggcacaaaggagttatgggacaaagggtccaagataggcagaaaagaaaattgtgccagttgatggggaagaaaagaagtcagagggcttagatactgagtgggacagaacatcttcatgtgcactctcatctcttgtagtcagcaacaggtatccacggggagagccctacatcatctgctaccctgaaggatctggagagcccgtgccaagaacgagcagtagtcctggattcaaggtccgtagaaatcagtcaactgaagaacaccatcaaatctctgaaacaacagaagaaacaagtggaacatcagctggaagaagtaacatgatttctttgtttgctcgcgacatgactgctcggttttggggacactcagatgtagaggccccgagtctcgtctcacccactcccagcctggggaagaaggctcaccccccagagtccaccccatcccccacagggtccctgataacccggtcccatgggtgggcctgtcctgggcaggggcagtggtggcattctggggacatgtctcttgcagtaccatctctgcctccccctggtaagagctctgtcttcctcttccttttcagtgcctctttcagcgacatgaagttaaacccaggtactgtgagtcctcgcctaatttttggttcttatgatgatggttttctggtggaaacagttgttaaatttgattttcaattatggcagaagacacctcttcacagggcagcaggagagagaaggagagccgagcaaaggggaaagctgtctttcgtaatgccttaaatccgtcctcagttaaaccggcggttggcgctggttttttccagggcaggattctgggagacggaggagcagacgccagcatttcgccccggcacctccagcgggctgcggtc

SEQ ID NO: 6847 - DNA, 1731 bp, Homo sapiens
  SIMILAR (420)..(1211): 971254mologous to Homo sapiens HERC2,accession number AF071172,Smith-Waterman Score=1350.
cgggtcgacgatttcgtggtgaagctgctggagctgcagcagatggtgtttcggcttatagcaactacaacaatgggcacagaaaattcctggccactgcccagaaccctgctgatgagcccggtccaggagccccagccccccaggagcttggggctgcaggcaagcatggtgctatgaaacccacgtagtcggacaccctgatgcttctcctgcagggcgtgtgatgaggaggtgagcttggctttggagtgctgggaacctgaggaattgccaaggacccagagcccagccctgaccacccagagagcccaaaacacaatgaacaaattgaatttccacaacagagtcatgcaagaccgccgcagcgtgtgcattttccttcccaatgatgaatctctgaacatcatcataaatgtttggtattttcctggggtgatggtgactttggaaaattgggccggggcggaagtgaaggctgcaacattccccagaacattgagagactaaatggacagggggtgtgccagattgagtgtggagctcagttctccctggcgctcaccaagtctggagtggtgtggacatggggaaagggggattacttcagattgggccacggctctgacgtgcacgtgcggaaaccacaggtggtggaagggctgagagggaagaagatcgtgcatgtggctgtcggggccctgcactgcctggcggtcacggactcggggcaggtgtatgcttggggtgacaacgaccacggccagcagggcaatggcacgaccacggttaacaggaagcccacactcgtgcaaggcttataaggccagaagatcacacgcgtggcttgtgggtcgtcccacagtgtggcgtggacaactgtggatgtggccacgccctctgtccacgagcccgtcctcttccagactgcaagagaccctttaggtgcttcctatttaggcgtgccttcagatgctgattcttctgctgccagcaataaaataagtggtgcaagtaattctaagccaaatcgcccttctcttgccaagattctcttgtcattggatggaaatctggccaaacagcaggccttatcgcatattcttacagcattgcaaatcatgtatgccacagatgctgctgtcggggccctgatgccggccgccatgatcgccccggtggagtgcccctcgttctccctcgggggccccttccgacgcatcttgcgatgggctagtccccatgaatgggagaaaaatggcctgctggcctgttgatattccgaaaacagactggagtccaaatccatggcaagaaaagagagagattgtttcctctgaggacgcagtgaccccctctgcagtgactccgtcggccccctcagcctccgctcggccttttatcccagtgacggatgacctgggagccgcaagcatcattgcagaaaccatgaccaaaaccaaagaggatgttgaaagccaaaataaagcagcaggtccggagcctcaggccttggatgagttcaccagtctgctgattgcggatgacactcgtgtggtggtagacctgctcaagctgtcagtgtgcagccgggccggggacaggggcagggatgtgctctccgcggtgctttccggcatggggaccgcctacccacaggtggcagatatgctgttggagctctgtgtcaccgagttggaggatgtggccacagactcgcagagcggccgc

SEQ ID NO: 6848 - DNA, 5399 bp, Homo sapiens
  SIMILAR (4722)..(5210): 931254mologous to Homo sapiens HERC2,accession number AF071172,Smith-Waterman Score=792.
atggtgccagcatctgcttctggtgagggcttcaggctgcttccactcatggcagaagcagaagaaactcgacagagcaaattggctgtagccaatacaaaggtcgacctccctgggctctttgcgctggcgtctccaaggagctgggtcccaaccctgtgtttccctcccccatcatggagcagcaactcagacatcgtgctgatgtccctccccatgaccagaagggtggaatgtagtgatgtcacaatccacctgggaactgtcattactgcaagaccagcctttgatcttatgacccagtcccctaagcgttgtcaccccatttctgattcctctggtcacagcacaaatttccagctgcaaagggaatggagattatgggacctaggagcaagaggtttcaggctgccttactcccttaacatagacactgacagtgggaaaagcctacacttcccccatgagctcaaaacgttaacagtgtctctgggtggcaatgggagaattggtttgttaaaagaatattggcagaaaaacagccctagagttccagaaggagccaagaggaacaggaaaacaaatggcagtatccctgagacagccacttctggtggttgccagtcacctggggatgtgagtcttggctggccaggcttctggggacagggggcccaaggggcaatagaagtcagcaacaggtatccacggggagggccctacatcatctgctaccctgaaggatctggagagcccgtgccaagagccagcagtagtcctgaacccaaggtccgtaaaaatcagtcaactgaagaacaccatcaaatctttgaaacaacagaagaaacaagtggaacatcagctggaagaagtaacgtgatttctttatttgctcgcgacacgactgctggggtccctgataacctggtcccatgggtgggcctgtcctggggcattggtggcattctgggggcatgtctcttgctgtgccgtctctgcgtctccctggtaagagctctgtcttcctcttcctataggaaaagcaaacgagaaacaaaaagccaaaagggagctagagttctcgagccgcagcagagcacatacggagtgggagttagagcagtccctacaggagaaggcacggctgaaggcatagctaacacaggtgaggttttgcagagggagggatgtggaaggaagatgaccccaggtggccaggagcagttgaaggagtcgtttcaacaagtccaattacagagagataactatgctcaacaaataaaaggagagagggcccggtggcagcagaggatgagaaaaatgtcgcaggaggtttacacactgaagacagagaaggagcattatacacatcgggtagaggggctggagaggagcttgtccaaactcaaaaaccagatggctgaacccctgcctccagagcccccagcagtgccctctgaggtggagccgcagcacctgaggaaggaactagatagagtggcaggagagctccaggtccaggtcaaaaacaatcagcgcataagtctcctgaactggggacaagacgagaggattcgagagcaggaagagaggcttcggaagcaggaggagagggtcttcctgcaggtggagctgaagagccaagaggctcagagtctgcagcagcagccagaccattacctgggtcacctgcagcagtacgtggccacctatcagcagcaggtggccgcctatcagcagctgacctgtgagaaggaggcgctgtacaggcagtgcctgcaacagacccagctaatgaaacagctgcagcagcaggaagagcacctggaagcggccagccagcagaaccagcagctaacggcccagctgagcctcatggctctccctggggaaggacacggaggagaacatctggacagtgacggggaggaggcacctcggcccatgccgagtgtcccagaggacctggagagcagggaggccatggtggcatttttcaagtccgctggagctagtgcccaggagaagcaggcacagttacaagagcaggtgaaagagcagagggtgtgctgccagcgcctggctcacccggtggcctcggcccagaaggagccagaggcagccagaggccctggagccccagggcctgggggcgagtctgtgagtggggagacccactgggccctgcaggaagtcacggagaagctggcccatgccaggactcacctccgccttctccatgacttgaaaatgccacctgagggcaggtcgctgccgagatgtgactgcaatattttggctccagagcagctttatggaccaactggaggagaaggcagacctgagaaaatccatcaccttttatcagaaccaggggggccgtgccaaagatgcagcactgggaggaggacaccatcaggctggagctcagggaggagatgaaggtgaagctgctggagctgcagcagatggtgttgcggcttatagcaactacaacaatgggcacagaaaattcctggccactgcccagaaccctgctgatgagcccggtccaggagccccagccccccaggagcttggggctgcaggcaagcatggtggactgcccaatttaagattaagttttaaactggcgcttattagagatatggccattttgccatttcagtggaaccttttaatcagctttaatgctgtcttaggtttggtattttcctggggtgatggtgactttggaaaattgggccggggcggaagtgaaggctgcaacattccccagaacattgagagactaaatggacagggggtgtgccagattgagtgtggagctcagttcctactggcgctcaccaagtctggagtggtgtggacatggggaaagggggattacttcaggttgggccaccgctctgacgtgcacgttcggaagccgcaggtggtggaagggctgagagggaagaagatcgtgcatgtggctgtcggggcccagcattgcctggcggtcatggactcagggcaggtgtatgcttggggtgacaatgaccacggccagcagggcaatggcacgaccacggttaacaggaagcccatgctcgtgcaaggcttagaaggccagaagatcatgtgtgtggcttgcgggtcgtcccacagtgtggcgtggacaactatggatgtggccacgccctctgtccacgagcccgtcctcttccagactgcaagggaccctttaggtgcttcctatttaggcgtgccttcagatgtcaattcttctgctgccagtaataaaataagtggtgcaagtaattctaagccatatcacccttctcttgccaagattctcttgtcattggatggaaacctggccaaacagcaggccttatcgcatattcttacagcattgcaaatcatgtatgccagagatgccgtagtgggggccctgatgccggccgccatgatcgccccggtggagtgcccctctgcggctgcttcggacgcatttgcgatggctagtcccatgaatggagaagaatgcatgctggctgttgatatcgaagacagactgagtccaaatccgtggcaagaaaagagagagattgttttcctctgaggacgtggtgaccccctctgcagtgactccatcggccctctcagcctccgctgggccatttatcacagtgacggatgacccgggagctgcaagcatctttgcagaaaccatgaccaaaactgaagaggtaaagaggcattcttttttcgctttgtattgtgaaattaccaaatggcaggtggagccgcagatcgatgaccccaacagcaaccttgaggaggtgattaatgaggcagaggccatcacctctgagaacagcctgggattgatctccaggtggccgcgtttattctcacaaattcagcccgatgactcagtccttccaggaatggtggtacgtgaatctcaacagcctaatggaccaggctttgaccccacagtgtggcagtggcagatatgctgttggagctctgtgtcaccgagttggaggatgtggccacaagacttgcagagcggccgcctctcttctcagcctgtggtggtggagagtagccacccttacaccgacgacacctccaccagtggcacagtgaagataccagtgccatcctctgctagatcttccagcctgaaggaaaactcttgtgcctctgctcgcacacctctcacaccagatgtgcgggttctccacaccaagcggttctccagttctctggacacgccagaagttgaggtgctcctcacctccaatgccgctcactccccaggtgcagaaggactcagggtggaatttgaccggcagtgctcctcagagtggcaccacgaccctctcacaatcatggatggcgtcaacaggatcgtctccgtgtggtcaggccccgttgaggcgtggaacagaacacagagaactgtcccagccgtccaactatcaggctcacactcctcctcacctggtgtggaaggagttgttgctggtgtcattcttaggcttttggtttacagtggaagtgtgagtgtgaagagcaaggctcaccgactcgcagtggcatgcgtgggcacaccagctgttgccttctggtgggtggggctgggtggagccacccttgtttgttggcttcttatgggttggtccctagcttgtgaaacacaggggtgtttacagtgctcattcacaggccctaaagaactcctctctgactgctgcgtcctctcttgtccatccacggacttggtgacgtgtctgttagacttccgactcaaccttgcctctaacagaagtgtcgtcccttgccttgtggccttgctggcagcttgtgcacagctgagtggcctagccaccagtcacagaatgtgggcccttcagaaattgaggaagctgcttacaactgaatttgggcaatcaattaacataaataggctgcttggagaaaatgatggggaagcaagagctttgagttttacaggtagtgctcttgctgctttggtgaaaggtcttccagaagctttgcaaaggcagtttgaatatgaagatcctattgtgaggggtggcaaacagctgctccacagcccattctttaaggtactggtagctcttgcttgtgacctggagctggacactctgccttgctgtgccgagacgcacaagtgggcctggttccggaggcgaccagatgattggaatctgtctgctggtggcagtggaacaatttatggttggggacatgatcataggggccagctcgggggcattgaaggtgcaaaagtcaaaattccctctccctgtgaagccctcacaactctcagacccatgcagttaatcggaggggaacagaccctctgctgtgacagctga

SEQ ID NO: 6849 - DNA, 433 bp, Homo sapiens
  SIMILAR (317)..(418): 701254mologous to Homo sapiens Human secreted protein, SEQ ID NO: 6613,accession number AAG02532,Smith-Waterman Score=141.
ttttttaaaaatttttatcgtataaatagggacagttactacaaagctgccaaattcttccctgtcctatgcatctcttccttccattcctactgctctaccctgcctcaggccccactgcctcaggcctggctgaatctgaggaggtcctctggggtcttcctgcttctcatctcaatagtcagagctgatgttccgaccccattccaaatacttggcctgatattggaggccccaccctctcagtcttatttcctaccattctcctccatggacggcctgatgctccacccaaataggaaagtgggacaattaacattctctaggcccggggaggtggctcacacctgtaatcccagtactttgggaggccgaggtgggcggatagcctgaggtcaggaattcgagaccagcctgggcagcttaatttctc

SEQ ID NO: 6850 - DNA, 767 bp, Homo sapiens
gcggccgctactactactactaaattggcggccgctcgacaaccgctccctggaggaggaggagagtcagctgtaggggcgggggcgggcagggaggtatttatttatttattcgcaacagccagcgctaaaagagggggaggccgagccaagaggaccccaggagcccagagcagcgggagagggtccttcctagcctcggcccgccgggtcggttcctggctggtgtctgctgagggagtggggggcccagccccttctcttctcccccgcctaaccacagtgggagctggggcagggggagagccaggcaatcgggggcccaagatgggggtgctcgcctacagtctgcatctgtaagtgccttgtggggtatccaggaacaccctcccagcaggggatgggaaccctgtcccatgaagccctttcctcagctttacttggtcccccgcccttagccttggggagaaatggcccgtggtgggctgaccccccaccctccacacacacagttccatgacccagcgggcccccaggggcatcaggtgctggtcctcctccctcctggcctcgacccgctaagggcttcgcccctcccaggggcctgtaactaagtcgggtcctgccaggcagggggcctgtgttctgtgccccttgggagacaggaactggcgagttcaggtggggtggggacagcacagactgttccaccgttgtgcatattgttgcttctgaaccacaaactgtataaatggatggttttttgc

SEQ ID NO: 6851 - DNA, 395 bp, Homo sapiens
  SIMILAR (369)..(1): 771254mologous to Homo sapiens Human transport protein TPPT- 28,accession number AAB60108,Smith-Waterman Score=453.
  misc_feature (1)...(395): n = a,t,c or g
agcttccgccttctccttgcccttcttcttcagnnnnnnnnnnnnnnnnnnnnnnnnnctcctcttgtccngggacttcccccgcttcttccggccatcactggannnnnnnnnnnnnnnnnnnnnnnnnnnnnnggagctagaagaactgcaagaagaggaggaggagctggatcttgttctcctccgggccttctgcttgcttctctcctccgccccaggggccgtgctggccttgcgaccttgggatgtggaggccgagcagttcctcgaggtgtctttcctgctcttcttctttctcttttccgacccccgtccccgggaccggctgcgactcctcgagcgcttgcgggagccgacgtgagccatggcgccgcgggctcgaccgccctgcg

SEQ ID NO: 6852 - DNA, 601 bp, Homo sapiens
  SIMILAR (195)..(575): 731254mologous to Homo sapiens Human transport protein TPPT- 28,accession number AAB60108,Smith-Waterman Score=402.
agagacacctcgaggaactgctcggcctccacatcccaatgtcgcaaggccagcacggcccctggggcggagggtgaggaccacaggcatcggggagaggaggcgcagttactacccggggaagtcgggcgagcagtggtcggggacgctcagtcatgcctctgtgcagccgggcctgagatgtgagggccaggcgccgcaggagccaggcaaggggctcctctgggaagctccatctctgttctggaaagcccctcaggaagcgctcaccctgtagccggtctgtgcctgccccaggccagagcaggggacgaaggtttacctcttcccctcctggctttccagcctcaccttctccctgcatcacagagagaagcaggcagaaggcccggaggagaacaagatccagctcctcctcctcttcttccagttcttctagctcctcttcttcctcctcgtcctcctcctcttcctccagtgatggccggaagaagcgggggaagtacaaggacaagaggaggaagaagaagaagaagaggaagaagctgaagaagaagggcaaggagaaggcggaacacagcaggcagagcatcatccgcaa

SEQ ID NO: 6853 - DNA, 523 bp, Homo sapiens
  SIMILAR (302)..(255): 871254mologous to Mus musculus SRp25 nuclear protein,accession number AB035383,Smith-Waterman Score=69.
  misc_feature (1)...(523): n = a,t,c or g
tttttttttttttttttgactatccagggggcctttaatagctgaaaagtgctgctctttcacatgggggtgccaagcaggccggtgaccccaacctccaccccctgcccctgagaagagactgggctgggccagagaccaatccacgggggaaaggccaccagcacccatcaggcttcccactggcaccctgaaacctgcccaggctgggccgccagcggtcgtccacaggccttggccagcgggggccctcagggaagcaacccagctcgcatctggaaggccaggcagtcccctcgggtaggcttgctggggaagaaagcacacaggatggacggggtacatcacaaacagatgctgggggctggatggcaggcatganggggccacacccaccttgttgatctctctgtgtcgttctttggttacgatttcctcctaggacctcgccatctcccttaataagcctggtgcgccccgtctcagggtccaccaccttgcggatgatgctctgccgggcatc

SEQ ID NO: 6854 - DNA, 895 bp, Homo sapiens
  SIMILAR (34)..(453): 911254mologous to Homo sapiens Human transport protein TPPT- 28,accession number AAB60108,Smith-Waterman Score=605.
gcgaagggcgcggggctggaggcccgcggcgccatggctcacgtcggctcccgcaagcgctcgaggagtcgcagccggtcccggggacgggggtcggaaaagagaaagaagaagagcaggaaagacacctcgaggaactgctcggcctccacatcccaaggtcgcaaggccagcacggcccctggggcggaggcctcaccttctccctgcatcacagagagaagcaagcagaaggcccggaggagaacaagatccagctcctcctcctcttcttccagttcttctagctcctcttcttcctcctcgtcctcctcctcttcctccagtgatggccggaagaagcgggggaagtacaaggacaagaggaggaagaagaagaagaaagaggaagaaagcttgaaagaagaagggcaaaggaagaaggcggaagcacagcaggcagagcatcatccgcaagtgtggtggacccctgagacggggcgcaccaggcttattaaagggagatggcgaaggtcctaagaggaaatcgtaaccaaagaacgacacagagagatcaacaagtcaagccacccagagggggactgccgatggccattgccagatgcagagcgatgggtatgcttcccgtgaggggcccccgcatggccaagggcctgatggacgacagctggcggcccagcctgggcaggtttcagggtgccagtgggaagcctgatgggtgctggtggcctttcccccgtggattggtctctggcccagcccagtctcttctcaggggcagggggtggaggttggggtcaccggcctgcttggcacccccaatctgaaagagcagcacttctcagctattaaaggccccctgggatagacaaaaaaaaaaaaaaaaaaaagcatt

SEQ ID NO: 6855 - DNA, 642 bp, Homo sapiens
  SIMILAR (60)..(566): 331254mologous to Homo sapiens putative p150,accession number U93572,Smith-Waterman Score=244.
gcatgctctcactactgctttcaacattgtactcgaagtcctagttagtgcagtaagacaagaaaaggaaataaagagccatagtgattgggaagaaagaaataaaactgtctttgttcacagatgacatgattgtcctatgtagaatatccaaaaattgacaaaaatgctccctggaaataataagcaattttacccagggtggtaggatataaggttaatacacaaaattcagttacttttcgtgtatatcatcagtgagcaagtggtatttgaaattaaaaaaaatactatttgcattagaacccccaaaagtggaatacttgggtagtaatctaacaaaacatgcacaagatttatatgagaaaaattgtaaaactttaattaaagaaatcaaagaactaaataaatggagagagattttatgtggatagaaatattctgttttcaagatgtccgttcttctgaacttcgtctatagattcaatgcagtcccaatccaaatcccagtaagttgttttgtgggtattgacaaacattttaaagtttatatggagaggcaaaaagacccagaatagccaactcaatattgattgagaacaacaaagtcacaggattgacactacctttcttcaaggcata

SEQ ID NO: 6856 - DNA, 577 bp, Homo sapiens
  SIMILAR (9)..(242): 601254mologous to Homo sapiens HPF1 protein,accession number M27877,Smith-Waterman Score=240.
gcacgagtaatgagtgtggcaaaaccttccgtcacaattcagtccttgtaattcataagacaattcatactggagagaaaccttacaagtgtaatgaatgtggcaaggtttttaatcgaaaagcaaaacttgcacgtcatcatagaattcatactggaaagaaacattagaaatatgaagaatgtgacaaagtttacagttgtaaatcaagtcttgaaagacaggagaattcatactggagagaaagcttacaaatgtaagagtttgtgacaagaatcttgggcgtgattcacacctggcccaacaaactagaagtcacactggagagaaaccttacaagtgtactgagtgtggcaaagcctttagtgggcagtcaacacttattcaccatcaggcaatccatggtatagggaaactttactaatgtaatgattatcacaaagtcttcagtaacactacaaccgtttcaaatcattggagaatccataatgagagattttgaaagtgtaataaatgtggcaaatttttcagacattgttcataccttgcagttcatcggtgaactcatgctggagag

SEQ ID NO: 6857 - DNA, 338 bp, Homo sapiens
  SIMILAR (311)..(3): 811254mologous to Homo sapiens inositol polyphosphate 4- phosphatase type II-alpha,accession number U96922,Smith-Waterman Score=444.
ttgacgcactccttcagggtaaggatgaagggatacaactgttcataccaatcctctcttgggagagagggaatggcatctgttaatgaacgttccttttctccatcattgatgccgccactggcttcactgccaccatctctttcaatcaatttgtccaccatagcaatactgcagctaaggctctttcccacattggcccacaccctgttccactcttcctcatcataatctgaatgatagaggacggagtcctgccctctcatcactgggggtttggcctagggactgatatactctgtgctgatcttagagaggtagtgttttatcatagacct

SEQ ID NO: 6858 - DNA, 246 bp, Homo sapiens
  SIMILAR (94)..(237): 681254mologous to Homo sapiens cyclin I,accession number D50310,Smith-Waterman Score=172.
ccgtcccctcaagcacaccctggtgacctgtgacaaaggagggttgtaatttgaaccctcctttgtctcaggtcaccaaggtgtgcttgaggtgacggtaccaagccagaagtgccattcataggtacagcaaccttttaccattatctcccaactgcctatgggtgcatgcttacctctacttaacgcaaagtagaggaaacggaattggatgacttctatgatggaaacagtcgacgcggccga

SEQ ID NO: 6859 - DNA, 348 bp, Homo sapiens
  SIMILAR (14)..(346): 651254mologous to Homo sapiens unnamed protein product,accession number AK024186,Smith-Waterman Score=345.
ccggctggcggttggtgaggccactgttcatgggccacagacagcccgtcatcagtgggctccagcctgagcagcctctgcatctgaaactttagtttctgtgctctggagtctctgactgtgcatccttccctgtccatccccagagcccaaggtggtgtttgctaaggagcagctggcacgcaggaagctgcaggcagaggcaggagccagtgccacactgagctgcgaggtggcccaggcccagacggaggtgacgtggtacaaggatgggaagaagctgagctccagctcgaaagtgtgcatggaggccacaggctgcacgcgcaggctggttgtgcagcaggc

SEQ ID NO: 6860 - DNA, 698 bp, Homo sapiens
  SIMILAR (643)..(371): 431254mologous to Homo sapiens Human secreted protein, SEQ ID NO: 7253,accession number AAG03172,Smith-Waterman Score=156.
gagccttcgtcccgacccctgcattcatctgtgttctgttttatgttttttcccagtcacctgagctgcaggccttgggcaccccagactcctccctcctgtcacccttatcctcaccccagcacctttacgtctgccccaggctccatttccccctcttctgcctggatcaaaccacccttgacttttcctgggtcttcgtgcaacagcctagctccggccgctgcctcactgcacctgcaaatccacttgcacccacacccaggccagggttttttaaacagaaagcctcagcagatccctctctctggccagctccctgttgaaccaggaagcaggtccctgttgaacctcagcatgacccgcccccacccctggtacctgggattacaggcacaagtcaccgtgcttagctaatttcttgtatttttattagagacaggggtttcaccatattggcctggctggtcttgaactcctggcctcaaggtgatccacccatcttggcttaccaaagtgctgggattacaggtgtgagcaacatgtccagccagaaaatattttttaagtggagaaccattaagattagatatagcttagaaaatccactatagtagcacaatgaggaaaaaatggactgaaatggaggagggcaagattaattaggaagcctctgaaaatatacaaggtagggggaa

SEQ ID NO: 6861 - DNA, 220 bp, Homo sapiens
ctcttgagcacctaacacagggaaatgaaaactggaaatgatctaaagatccttcaaaaggtaaacaaactctggcacctctatactacagcatactaaaaaagagcaataaaaaagagcaaactattggttcacacaaaaaacttgggtgaatctcaagggagttgtgctgagtgaataaagccagtctcaaagggttaaatattggtcgacgcggccg

SEQ ID NO: 6862 - DNA, 868 bp, Homo sapiens
  SIMILAR (489)..(866): 841254mologous to Homo sapiens unnamed protein product,accession number AK022576,Smith-Waterman Score=525.
ttgcatcttcttgctgtcctagaaaaaatgatttcacagggtaacaataacaaaaatggaaagaatgagactggtaataacaacaacaaagatggatctaatcataaagctgaaagtggagctctaatagaagctgcaaaatcaaagatacatcagtacaaagtacgagcttatatccaaatgaagtctctgaaagcatgtaaaagggaaatcaagtcagtcatgaatacagctggaaattccgcaccctctctctttcttagaagcaattttgagtacttaagaggtaattatcgaagagccgtgaagctagtaaatatgtcaaacattgctgagcatccaggattcatgaaaacaggtgaatgcttgagatgcatgttctggaataaccttggttgcatccattttgccatgagcaagcacaatttgggaatattctactttaaaaaggctctgcaagaggaatgacaatgtctgtgcacagctccagtgcaggtagcactgatccaggtaaaaaattttcagggaagacccatgtgtacgttacttaacccaataagaggttatgagtttgctgtataactgtgggatttcagcttcttcacattggaaggcctcttgctgccttcgaatgtctgattgaagctgttcacgtttatcatgcaaatcctcgcctctggctacggctggctgaatgctgcattgctgccaataaggggacttctgaacaagaaactaaaggccttcccagcaaaaaaggaattgtacagtctattgttggtcaaggctatcatcgtaaaatagttttggcatcacagtctatacagaatactgtttataatgatgggcagtcttcggccattcctgt

SEQ ID NO: 6863 - DNA, 1050 bp, Homo sapiens; identical to SEQ ID NO: 1658
  SIMILAR (514)..(1047): 1001254mologous to Homo sapiens hexokinase IR,accession number AF016365,Smith-Waterman Score=887.

SEQ ID NO: 6864 - DNA, 2248 bp, Homo sapiens
  SIMILAR (935)..(1582): 1001254mologous to Homo sapiens Human NIP2b protein,accession number AAY70847,Smith-Waterman Score=1147.
ccctgagcagcctaactggaaggcattctcccagtaggggcagactgacacttcacacggccgggtactcctctgagacaaaacttccagaggaacgatcagacagcagcattcacggttcacgaaaatccgctgttctgcagccactgctgcggatacccaggcaaacagggtctggagtggacctctagcaaactccaacagacctgcagctgagggtcctcgtgatccgcctgcctcggcctcccaaagtgctgggattacaggcgtgagccatcgtctgcgcttctatttcgatcaccaagatgtggctccggaatgcggggcttacttcttccatgaattggccaaggagaagcgcaagggtgttgagcgtctcctgaagatgcaaaaccagcgtggtggccctgctgtcttccaggacatcctgaagccaggtcaagatgagtggggtaaaaccctggaagccatggaagccgccatggccccggggaaaaatctcaaccagagtcttttggatcttcatgcactgggttccgcccctacagacccccatctctgtgacttcctggagagtcacttccgagatgaggaagttacctttatgcctcggaagagtgcagacctccatgcagcgggtgaggctgccagcctaggtggggtgtcattgaatgtcatgaagggagccagccttcatgcactctgcctgcgtctcctgaacagctttggaccaggagttgctaccttgtgcggagaacgtgtggtgcataagaacaaccgagcctctgctcttcgaaaatgtatattctggccagtctccttgaattcctccagggcgaggccacgccagcgcacaactgcagggggcgccgttcccacagcagccctgcaaagggtcatccctgcttcaagccagtgcctcttcccagctcccatggggaccaccgaagccacgctccggatggaaaacgtggacgtgaaggaggaatggcaggacgaagatcttcccaggccactcccagaagagacgggggtggaactgcttggcagcccggtggaagacacatcctctcctcccaacacgctaaatttcaacggagcgcatcgtaagaggaagacgctggtggccccagagatcaacatttctctggatcagagtgaggggtccctgctgtccgatgacttcttggatacccctgatgacctggatattaacgtggatgacatcgagacccccgatgagaccgactcgctggagttcctggggaatggcaacgaactggagtgggaagacgacacccccgtggccaccgccaagaacatgcccggggacagcgcggatctatttggggacggcacgacggaggacggcagcgccgccaacgggcgcctgtggcggacagtgatcatcggggagcaagagcaccgtatagacctgcacatgatccggccttacatgaaagtggtcacccacggagggtactacggcgaaggcctcaacgccatcatcgtcttcgcagcctgcttccttccagacagcagcctccccgactaccactacatcatggagaacctcttccttccgccaggacagcagacaacacctggaccagtggggctgacccagccagcggcaggagtggaggcaggcagggtcggcaccgcaggtgtcctgaccctggacccctccatgttgggtccctgccttctgtgccccgtgagcaggtacgtcatcagcagcttagagctcctggtggctgaggactacatgatcgtgtacctgaacggtgccacgccccggcggaggatgcctggaatcggctggctgaagaagtgctaccagatgatcgaccggaggttgcggaaaaacctgaagtccttgatcatcgtccacccctcgtggttcattcggactgtgctggccatctctcgccctttcatcagcgtcaagttcatcaacaagatccagtacgtgcacagcttggaagacctggagcaactcatccctatggaacacgtccagatcccagactgcgtcctgcatgaccggcagatcatccttaccacactctgtgcttatggggaaggagaagccttggcaagccacctcttccacgtcatcctcccattccatatccactcctgcttcccctccagcacggagacctcagaccctccctgtggccctggactcgacctggcatacaccacaccgttcagcacacattttgcacagaggggcaaatag

SEQ ID NO: 6865 - DNA, 512 bp, Homo sapiens
  SIMILAR (166)..(41): 541254mologous to Homo sapiens Human secreted protein, SEQ ID NO: 7879,accession number AAG03798,Smith-Waterman Score=124.
catattaaaaatatgacttttatttacttcagttctttcatcttttgtttccccccgagatggagtctcgctctgtcgcccaggctggagtgcagtggcgggatctcggctcactgcaagctccgcctcccgggttcacgccattctcctgcctcagccttcccaaagtagctgggacttacaggcgccccgccaccgcgcccggctaatttttttgtatttttttttagtagagatggggtttcaccacattagccaggatggtctcgatctcctgacctcgtgatccgcccgccttggcctcccaaagtgctgggattacaggcgtgagccaccgcgcccggcctgaaacatataatttttgttcctttattattatttcttctttacctgtggagccagaggcaaggaagatgaccaagaattcagacataggagagatctggataaacttaggaacctgtctaatagtttagaccctggaagatactgtagaggaaagttgtttattg

SEQ ID NO: 6866 - DNA, 362 bp, Homo sapiens
  SIMILAR (237)..(308): 331254mologous to Homo sapiens putative p150,accession number U93568,Smith-Waterman Score=40.
attcagcaatcatagtttgagatataaatacttccaataatgggtggaacaaccaggcagatgattaataaggaaatagaagatgtgaacagtgctataaaccaagaagacttactagttatctatagaacacttcatacagcagcagcagaattcacattcttctcgagtttacatgaagtatcctccagcatagagtatgatgttaggccattaaacaagcctcaataaattttaaagtattgaaatcatacaaaatattttctgaccataaggggataaaatttgaaatcaataacaaggaaatctgaaaaattcacaaatatgtagaaattagcagtacacttcttagtaaacaaggg

SEQ ID NO: 6867 - DNA, 1055 bp, Homo sapiens
  misc_feature (1)...(1055): n = a,t,c or g
ggcttggcaggagcctccccgctgtgtagagccagctttgcttgtggggggtcggtggtgccatgtgggcatctggcttcctccacggctcagcccctgagcacctcgggctgtgcacagagggcctggccggcttcttcctgcttccagagaacatgtttagccatcaacgcttctgtgtgaataggttatcaaagcggctgagggtgacagtgggtctgcctgggtcttggatgaggccgaccctactgggggtcctgggctgggatgtaggggtaccaagtacttactgaggtccggggcaggaggcctgagtgatgaggaccttgtgggcctggcactgatttggccctttctcctaagcccccaggtcttcatggacctcctagtgggccagccctggctgggtaggatttcaagcagactgctacccagagcccacagtgagaattggcctggggctgctggagggggctcanatagggcatgagtagggtctgtgaccaggctgacaatgacacagagggaaataacaaagacccaggtaggccccaggcacagcccagctgcaggggcagcctcggcccagccactggcaggagtggatggccatacggctccccgtgacccacctggggccaggggcctgtcagcactcccagagaaggccctgcgggtgtcaggattgaagcaaagggcaagtcgaagttggagggactggtgggatggccccaagtccctctagaacttgtaacttgttgtcactcccaaaactttctggggttgtttgagaagcctggaatcctggaagggctgatgtgcacatcatgcatgcagtgggactcatcaaaaccagccacgaatggttagatccacctgcggactcacaggctggctcctgtggtgcctctgggcaggagcctcagccagcagcatcagggagtgctgcctggaggaggtgttctcaaggtgggcttggcaggctgaggcaccaacagcaggaggaggggccgtcttcccagcacgttggagtgggatgcgtgccctgtgggggg

SEQ ID NO: 6868 - DNA, 401 bp, Homo sapiens
  SIMILAR (21)..(173): 421254mologous to Rattus norvegicus open reading frame 2,accession number X61296,Smith-Waterman Score=109.
  misc_feature (1)...(401): n = a,t,c or g
ggcacgaggcacgttagttattctccagggtaaaccatatggtaggtcacaaattaagtctcaatagattttaaaagatagatattatacaaagtatattctacgaccacaacagtatgaagttagaaaataataataaaaggaaaactggaaaatttataaatttgtggaaataatttaaataatatacctttaaacaacccataagtaaaagaaaaaaatcacaagggaaattgaaaaatacttagagatgactgaaaacagaaacaaaacatacagaaacttatgggatgcagcaaaagttgtgccaaaaggggatatttatagctataggtgcttaccctttaaaaaggaggaaaatctccaatccaggtatcctaaccttacctccttagggnccc

SEQ ID NO: 6869 - DNA, 370 bp, Homo sapiens
ggcacgagcgcttggccccaatacaaactcgacaatgattccaaatagccagaaaacggcactttcgagttctccatcctacaagttctagataattcttgtcataaaatgggcaaatggtctgaggtgcctgacgtccaggcattcttttacacattggtccctccctagtctctgctcccaatgtgactcatcccaaatctttcttctttctctcctttctggtccttcgggctccaccccaagttccgagtcctctgaatccttcttttctatggactcatctgacctccccccttctccccaggctgctcctcgccaggctgagccaggtcccaattctcacttagcctctgctcccccaccctat

SEQ ID NO: 6870 - DNA, 374 bp, Homo sapiens
ggcacgaggttaaaactatgaagattctagaagaaaacctaggagaatatcttttagacctggtaggcaaagatttcataaataggacacagaaacaatatcataaaataagatttacaaattcaacttcatcaaaattaaaaacttttgctcattgaaagacatccttaaggaaataaatacgcatagattgggagaaaatagtcacaaagcattctgacaagggactggtatccaggattaagaaattccacgattcagtaataaaatgagaacccagttttttccccccaaggataaagatttgggcaggtacttcacaaataaggaaacatgaatggtggccagtggacacctgaaaatgtgctaacacc

SEQ ID NO: 6871 - DNA, 389 bp, Homo sapiens
  SIMILAR (207)..(296): 961254mologous to Mus musculus putative,accession number AK015745,Smith-Waterman Score=158.
tcgacctgattgtgacatcacattcatcccctgggctttggagcttgtcactgggaaggaagactcattgggagaatacccaacaagatgggttactgggagaatctcttcaatggcactgactggaggcctcaaggggttggagccttgtgaacagggaaccttacccccaacacttgaatggacctgggtttcagagatgagacatggggtatgatgtaacccgtttccagggggatgttgacgaagatcttatctgccctatttgcaggggagtcttggaggagccagtacagccttgccagaccaaagtcatttgtatcattctggggcaagtatgaggagaagctcacgattaccacgcaccttattgtgaacatgctttctgc

SEQ ID NO: 6872 - DNA, 3243 bp, Homo sapiens
  SIMILAR (79)..(1080): 991254mologous to Homo sapiens 150 kDa oxygen-regulated protein ORP150,accession number U65785,Smith-Waterman Score=1698.
atggggtcggcggtgccgagccaggcctgcctggaggctctgctcctgatcgttccctggggcgcctgtggtgtttcccaggaggaagaggagagccctgcagaggggagcaaggacgagcctggggagcaggtggagctcaaggaggaagctgaggccccagtggaggatggctctcagcccccaccccctgaacctaagggagatgcaacccctgagggagaaaaggccacagaaaaagaaaatggggacaagtctgaggcccagaaaccaagtgagaaggcagaggcagggcctgagggcgtcgctccagccccagagggagagaagaagcagaagcccgccaggaagcggcgaatggtagaggagatcggggtggagctggttgttctggacctgcctgacttgccagaggataagctggctcagtcggtgcagaaacttcaggacttgacactccgagacctggagaagcaggaacgggaaaaagctgccaacagcttggaagcattcatatttgagacccaggacaagctgtaccagcccgagtaccaggaagtgtccacagaggagcagcgtgaggagatctctgggaagctcagcgccgcatccacctggctggaggatgagggtgttggagccaccacagtgatgttgaaggagaagctggctgagctgaggaagctgtgccaagggctgttttttcgggtagaggagcgcaagaagtggcccgaacggctgtctgccctcgataatctcctcaaccattccagcatgttcctcaagggggcccggctcatcccagagatggaccagatcttcactgaggtggagatgacaacgttagagaaagtcatcaatgagacctgggcctggaagaatgcaactctggccgagcaggctaagctgcccgccacagagaagcctgtgttgctctcaaaagacattgaagctaagatgatggccctggaccgagaggtgcagtatctgctcaataaggccaagtttaccaagccccggccccggcctaaggacaagaatgggacccgggcagagccacccctcaatgccagtgccaacagagcctttccctcacccctgaccccctgggctgaccaaaatgtgctttctactgtgagtccctatcccaagatcctggggaaaggagagaccatggtggttccacgagtgtttgggcgcatggtgggtaaaagccgggaggcggtggctcaggccatggtgctggagatgtttcgagaggaggactactacaacgatgatgttctggaccagatgggcgccagtatcctgggcgtggagggcccccggcgccacccagatgagccccctgaggatgaagtcttcgagctcttccccatgttcatgggggggcttctctctgcccacaaccgagctgtgctagctcagcttggctgccccatcaagaacctggatgccctggagaatgcccaggccatcaagaagaagctgggcaagctgggccggcaggtgctgcccccatcagagctccttgaccacctcttcttccactatgagttccagaaccagcgcttctccgctgaggtgctcagctccctgcgtcagctcaacctggcaggtgtgcgcatgacaccagtcaagtgcacagtggtggcagctgtgctgggcagcggaaggcatgccctggatgaggtgaacttggcctcctgccagctagatcctgctgggctgcgcacactcctgcctgtcttcctgcgtgcccggaagctgggcttgcaactcaacagcctgggccctgaggcctgcaaggacctccgagacctgttgctgcatgaccagtgccaaattaccacactgcggctgtccaacaacccgctgacggcggcaggtgttgccgtgctaatggaggggctggcaggaaacacctcagtgacgcacctgtccctgctgcacacgggccttggggacgaaggcctggagctgctggctgcccagctggaccgcaaccggcagctgcaggagctgaacgtggcgtacaacggtgctggtgacacagcggccctggccctggccagagctgcccgggagcacccttccctggaactgctacatgaagtccagcggaacctcaatagctgggatcgggcccgggttcagcgacaccttgagctcctactgcgggatctggaagatagccggggtgccacccttaatccttggcgcaaggcccagctgctgcgagtggagggcgagagctccatccaaatcgcctttgaggaggtgccccaactcccacccagagccagcatcagtcatgtgacctgcgtagaccaatctgagcataccatggtgctgcgttgccagctctctgctgaggaggtgcggttcccagtctctgtgacccagcagtcccccgctgccgtctccatggagacctaccacgtcactctgacactgccaccaacacagagaggtgaagaacaagtggagctctccacaattgaggaactgatcaaggatgccatagtcagcacccagccagccatgatggtcaacctcagggcttgctctgccccaggaggcctggtacccagtgagaagccacccatgatgccccaggctcagccagccatccccagacctaaccggttattcctacggcagcttcgggcatctcacttgggaaatgagctggaaggcaccgaggaactgtgctgtgtagctgaactcgacaaccccatgcagcagaagtggaccaagcccgcgagggctggatccgaggtggagtggacagaagacctggcactcatcacacctaccaagaagattgagcttgaccggaccatcatgcccgatggcaccattgtcaccacagtcaccactgtccagtcccggccccgtatagacggcaaattagcaggggacagccacctttccaacggcttggaccctgtagcagagacagcgattcgccagctgacagagcccagtgggcgggtggccaagaagacacccaccaagcgcagcactctcatcatctctgacccaccagccatgtctccaggaccgctagatgccctctctagtcccacaagtgtccaggaagcagacgagacaacccgttcggatatttctgagaggccatctgtggatgatattgagtcggaaacggggtccactggtgccctggagacccgcagcctcaaggatcacaaagataaggaatctgaggcacagaactaa

SEQ ID NO: 6873 - DNA, 394 bp, Homo sapiens
  SIMILAR (2)..(307): 871254mologous to Homo sapiens unnamed protein product,accession number AK025131,Smith-Waterman Score=414.
gctgtccaacaacccgctgacggcggcaggtgttgccgtgctaatggaggggctggcaggaaacacctcagtgacgcacctgtccctgctgcacacgggccttggggacgaaggcctggagctgctggctgcccagctggaccgcaaccggcagctgcaggagctgaacgtggcgtacaacggtgctggtgacacagcggccctggccctggccagagctgcccgggagcacccttccctggaactgctacatgaagtccagcggaacctcaatagctgggatcgggcccgggttcagcgacaccttgagctcctactgcgggatctggaagatagccggggtgccacccttaatccttggcgcaaggcccagctgctgcgagtggagggcgag

SEQ ID NO: 6874 - DNA, 3664 bp, Homo sapiens
  SIMILAR (2)..(418): 1001254mologous to Homo sapiens Similar to RIKEN cDNA 1300006O23 gene,accession number BC003598,Smith-Waterman Score=691.
tgacagccacctttccaacggcttggaccctgtagcagagacagcgattcgccagctgacagagcccagtgggcgggtggccaagaagacacccaccaagcgcagcactctcatcatctctggtgtttccaaggtgcccattgctcaggacgagttggcgctatccctgggctatgcggcatccctggaagcctcagtgcaggatgatgcagggaccagcggaggcccctcttcacctccctcagacccaccagccatgtctccaggaccgctagatgccctctctagtcccacaagtgtccaggaagcagacgagacaacccgttcggatatttctgagaggccatctgtggatgatattgagtcggaaacggggtccactggtgccctggagacccgcagcctcaaggatcacaaagccaagaaatccaagctatttagcatggtggttccacgagtgtttgggcgcatggtgggtaaaagccgggaggcggtggctcaggccatggtgctggagatgtttcgagaggaggactactacaacgatgatgttctggaccagatgggcgccagtatcctgggcgtggagggcccccggcgccacccagatgagccccctgaggatgaacttggctgccccatcaagaacctggatgccctggagaatgcccaggccatcaagaagaagctgggcaagctgggccggcaggtgctgcccccatcagagctccttgaccacctcttcttccactatgagttccagaaccagcgcttctccgctgaggtgctcagctccctgcgtcagctcaacctggcaggtgtgcgcatgacaccagtcaagtgcacagtggtggcagctgtgctgggcagcggaaggcatgccctggatgaggtgaacttggcctcctgccagctagatcctgctgggctgcgcacactcctgcctgtcttcctgcgtgcccggaagctgggcttgcaactcaacagcctgggccctgaggcctgcaaggacctccgagacctgttgctgcatgaccagtgccaaattaccacactgcgggcccgcgccgcccggcagcccgcggggggcgaggacggcaaaggagagagcagcgcttgcggcgcgggggccggaggaggtgcaggggtgaactcaggactgggggttgatggcaaagggccgacttggaggcagctgtccaacaacccgctgacggcggcaggtgttgccgtgctaatggaggggctggcaggaaacacctcagtgacgcacctgtccctgctgcacacgggccttggggacgaaggcctggagctgctggctgcccagctggaccgcaaccggcagctgcaggagctgaacgtggcgtacaacggtgctgctctactgaatggcatcgactttctctctcctgccagcctctacttcaatgagctgagctcagagggccgccaggtcttgcgagacttggggggtgctgctgaaggtggtgcccgggtggtggtgtcactgacagaggggacggcggtgtcagaatactggtcagtgatcctcagtgaagtccagcggaacctcaatagctgggatcgggcccgggttcagcgacaccttgagctcctactgcgggatctggaagatagccggggtgccacccttaatccttggcgcaaggcccagctgctgcgagtggagggcgagagctccatccaaatcgcctttgaggaggtgccccaactcccacccagagccagcatcagtcatgtgacctgcgtagaccaatctgagcataccatggtgctgcgttgccagctctctgctgaggaggtgcggttcccagtctctgtgacccagcagtcccccgctgccgtctccatggagacctaccacgtcactctgacactgccaccaacacagagaggtgaagaacaagtggagctctccacaattgaggaactgatcaaggatgccatagtcagcacccagccagccatgatggtcaacctcagggcttgctctgccccaggaggcctggtacccagtgagaagccacccatgatgccccaggctcagccagccatccccagacctaaccggttattcctacggcagcttcgggcatctcacttgggaaatgagctggaaggcaccgaggaactgtgctgtgtagctgaactcgacaaccccatgcagcagaagtggaccaagcccgcgagggctggatccgaggtggagtggacagaagacctggcacttgctgggatcacaggcgtgagccacgacacccggcccactgatggagttataaagctctttaacccggatgcctgtgggcgccgggtgcagacagtggtgctgtatgggacagtgggcacaggcaagagcacgctggtgcgcaagatggttctggactggtgttatgggcggctgccggccttcgagctgctcatccccttctcctcctccctgtgccaacttgtggcccagcgctacacgcccctgaaggaggttctgcccctgatggctgctgctgggtcccacctcctctttgtgctccatggcttagagcatctcaacctcgacttccggctggcaggcacgggactttgtagtgacccggaggaaccgcaggaaccagctgctatcatcgtcaacctgctgcgcaaatacatgctgcctcaggccagcattctggtgaccactcggccctctgccattggccgtatccccagcaagtacgtgggccgctatggtgagatctgcggtttctctgataccaacctgcagaagctctacttccagctccgcctcaaccagccgtactgcgggtatgccgttggcggttcaggtgtctctgccacaccagctcagcgtgaccacctggtgcagatgctctcccggaacctggaggggcaccaccagatagccgctgcctgcttcctgccgtcctattgctggctcgtttgtgccaccttgcacttcctgcatgcccccacgcctgctgggcagacccttacaagcatctataccagcttcctgcgcctcaacttcagcggggaaaccctggacagcactgacccctccaatttgtccctgatggcctatgcagcccgaaccatgggcaagttggcctatgagggggtgtcctcccgcaagacctacttctctgaagaggatgtctgtggctgcctgggaggctgggcatcaggacggaggaggagtttcagctggctgcacatcttccgttcgggatggccctgaggtttttcctgggccccatgtgtgggagccagggcttgcaggcacctttcgtgtttcaacgtgcccgccatgcaggaatacctggctgccctctacattgtgctgggtttgcgcaagacgaccctgcaaaaggtgggcaaggaagtggctgagctcgtgggccgtgttggggaggacgtcagcctggtactgggcatcatggccaagctgctgcctctgcgggctctgcctctgctcttcaacctgatcaagcaccccaagccgcccacgcccccacatggttccctgttcaccccttgctcctctcccagcaggaaactgctgcttcctgcaaaggaggcaggcctatcctctgctttgcaggtccagaaactcgattgtgtctgctcctccagaggtgattag

SEQ ID NO: 6875 - DNA, 3511 bp, Homo sapiens
  SIMILAR (296)..(832): 301254mologous to Homo sapiens NAC-gamma splice variant,accession number AF229061,Smith-Waterman Score=206.
atgtcccagcctgacctcaccaccgccctgattggccctaagctacatctccaggcccctttccctgacacatttcccttatcttcccactcagaagctatacagcggcaccgccggaacctggctgagtggttcagccggctgcccagggaggagcgccagtttggcccaacctttgccctagacacgggccacgttgaccctgtgatccgcgagagtacccctgatgagctacttcgcccacccggaggagctggccctggagcatcagccaccccaggccgggctccccccactggccttgtctcagctctttaacccggatgcctgtgggcgccgggtgcagacagtggtgctgtatgggacagtgggcacaggcaagagcacgctggtgcgcaagatggttctggactggtgttatgggcggctgccggcattcgagctgctcatccccttctcctgtgaggacgtgtcatccgtgggccgtgccccagcctccatgtgccaacttgtggcccagcgctacacgcccctgaaggaggttctgcccctgatggctgctgctgggtcccacctcctctttgtgctccatggcttagagcatctcaacctcgacttccggctggcaggcacgggactttgtagtgacccggaggaaccgcaggaaccagctgctatcatcgtcaacctgctgcgcaaatacatgctgcctcaggccagcattctggtgaccactcggccctctgccattggccgtatccccagcaagtacgtgggccgctatggtgagatctgcggtttctctgataccaacctgcagaagctctacttccagctccgcctcaaccagccgtactgcgggtatgccgttggcggttcacgtgtctctgccacaccagctcagcgtgaccacctggtgcagatgctctcccggaacctggaggggcaccaccagatagccgctgcctgcttcctgccgtcctattgctggctcgtttgtgccaccttgcacttcctgcatgcccccacgcctgctgggcagacccttacaagcatctataccagcttcctgcgcctcaacttcagcggggaaaccctggacagcactgacccctccaatttgtccctgatggcctatgcagcccgaaccatgggcaagttggcctatgagggggtgtcctcccgcaagacctacttctctgaagaggatgtctgtggctgcctggaggctggcatcaggacggaggaggagtttcagctgctgcacatcttccgtcgggatgccctgaggtttttcctggccccatgtgtggagccagggcgtgcaggcaccttcgtgtttcaccgtgcccgccatgcaggaatacctcgctgccctctacattgtgctgggtttgcgcaagacgaccctgcaaaaggtgggcaaggaagtggctgagctcgtgggccttgttggggaggacgtcagcctggtactgggcatcatggccaagctgctgccactgccggctctgcctctgctcttcaacctgatcaagcaccccaagccgcccacgcccccacatggttccctgttcaccccttgctcctctcccagcaggaaactgctgcttcctgcaaaggtggttccacgagtgtttgggcgcatggtgggtaaaagccgggaggcggtggctcaggccatggtgctggagatgtttcgagaggaggactactacaacgatgatgttctggaccagatgggcgccagtatcctgggcgtggagggcccccggcgccacccagatgagccccctgaggatgaagtcttcgagctcttccccatgttcatgggggggcttctctctgcccacaaccgagctgtgctagctcagcttggctgccccatcaagaacctggatgccctggagaatgcccaggccatcaagaagaagctgggcaagctgggccggcaggtgctgcccccatcagagctccttgaccacctcttcttccactatgagttccagaaccagcgcttctccgctgaggtgctcagctccctgcgtcagctcaacctggcaggtgtgcgcatgacaccagtcaagtgcacagtggtggcagctgtgctgggcagcggaaggcatgccctggatgaggtgaacttggcctcctgccagctagatcctgctgggctgcgcacactcctgcctgtcttcctgcgtgcccggaagctgggcttgcaactcaacagcctgggccctgaggcctgcaaggacctccgagacctgttgctgcatgaccagtgccaaattaccacactgcggctgtccaacaacccgctgacggcggcaggtgttgccgtgctaatggaggggctggcaggaaacacctcagtgacgcacctgtccctgctgcacacgggccttggggacgaaggcctggagctgctggctgcccagctggaccgcaaccggcagctgcaggagctgaacgtggcgtacaacggtgctggtgacacagcggccctggccctggccagagctgcccgggagcacccttccctggaactgctacaagctctactgaatggcatcgactttctctctcctgccagcctctacttcaatgagctgagctcagagggccgccaggtcttgcgagacttggggggtgctgctgaaggtggtgcccgggtggtggtgtcactgacagaggggacggcggtgtcagaatactggtcagtgatcctcagtgaagtccagcggaacctcaatagctgggatcgggcccgggttcagcgacaccttgagctcctactgcgggatctggaagatagccggggtgccacccttaatccttggcgcaaggcccagctgctgcgagtggagggcgaggtcagggccctcctggagcagctgggaagctcctggaagctgagaccactggcgggcagggcaccttagcttattgtgaccacttggcccttaaaccttttccctctgtggcctcctggctttgcactgctccctctagaaagattcctttcaggtctggaggcagaggaatgggcatagctgagccagttgccctcctatttcatgtttgaccaggactgagtctggaatctccaagttaaagatggtgaatcaatgcttcgggcttggagatggaacatgcctcctatccaattgcagctagaaggaccaaagcatgtggcatttggatggccagagtgccctgaagcaccactaccaaccttgcctccccctcctctcaaagagcctctgattgtgtcaccaaggggctcacatcttatgtctgccatgccaggggtgtcgccatccagatgtgttggaagcttcccctcctgccttatgctcacctgtggacaccgaggatgccctcacattggtgctttctcctcatcctcatgccccctttgccacaatggtatgatggcttggtagcccctcgaggcagatgcacctgacttgctgctattaaaaagccgtgtgccttcaaaaaaaaa

SEQ ID NO: 6876 - DNA, 376 bp, Homo sapiens
  misc_feature (1)...(376): n = a,t,c or g
ccgttcctccccccatatatgaaaatcaactcaagatgatctaaagacataaatgtaaatttcaaatctagnnnnnnnnnnnnnnnnnnnnnnnnnnnnnnnnnnnnnnnnnnnnnnnnnnnnnnnnnnnnnnnnnnnnnnnnnnnnnnnnnnnnnnnnnnnnnnnnnnnnnnnnnnnnnnnnnnnnnnnnnnnnnnnnnnnnnnnnnnnnnnnnnnnnnnnnnnnnnnnnnnnnnnnnnnnnnnnnnnnnnnnnnnnnnnnnnnnnnnnnnnnnnnnnnnnnnnnnnnnnnnnnnnnnnnnnnnnnnnnnnnnntttataaaagaaaaacacccccattaaaaagtgggtaaaagacatggacagacctcgtgcc

SEQ ID NO: 6877 - DNA, 468 bp, Homo sapiens
  SIMILAR (461)..(330): 481254mologous to Homo sapiens PRO2550,accession number AF130089,Smith-Waterman Score=79.
ggcacgaggggaaatactttgctatgtgttgtgaacactacaaccctttcccacatcctcctatgcttcgtaattttgataatttcacatttgtcatttgagccaagtttatttttctctaaaacagcttaaaatttctgttaaaaaacagatccccatctattctagcttatagaggttggaaaaatgtttaaaatctaaacgtgattaaaggtttgtagaaatcacaaaataaagattttggctgggcacagtggctcacacccaaagtaatcccagcactttagaaggctgaggcaggtgggtggcttgagcccaggagttccagaccagcctggagaagggaggctggggcgggacagtcacctgggcctgggaggccgaggctgcagtgagctgtgattgtgccattgcgctccagcctggacaacagagtgagatcttgcatcaaaaaaaaaaaaacaaaaa

SEQ ID NO: 6878 - DNA, 378 bp, Homo sapiens
  SIMILAR (241)..(360): 471254mologous to Homo sapiens NAG13,accession number AF194537,Smith-Waterman Score=79.
tatagaaaaccaaagctgacaacattattaatggtgaaagactagatgcttttcccctaagaccaggaacaagacaaggtatccattcttgctacttctattcaacattgtaccagaggttctagtcagggcaattaagcaagatctcgatgacaataataatagttatctaaattaggaaggaagaaggaaaactatctctatgtacagatgatatgattttctatgtagaaaatcctaaggaattcattaaaatactattggaacaaataagttcagcaggttgcagagtacaagatcaatatacaaaaatcagttgtatttctatatacttggaatgaacaatccaaatatgaaattaagataatttctcgtgcc

SEQ ID NO: 6879 - DNA, 1101 bp, Homo sapiens
  SIMILAR (1008)..(4): 1001254mologous to Homo sapiens dJ146H21.2 (similar to CYTOCHROME B-245 HEAVY CHAIN),accession number Z83819,Smith- Waterman Score=1798.
tcaaaaattttctttgttgaagtagaattgaacctttctaggatccagactggaatatcggtgacagcatttgcgcaggctctttgccaaagtccgagggccacataagaaaactcccactacagacttggggtgggaggtagctattgtagaaaactcattgtcccacattggtctcccaaaggaggttttctgtttcagacctgtcacgatgtcagtggccttgtcaaagtttaatgctgcatgaccaacaatattgctgtcccatccggtgaggaagagacggtagtttagaaaacccactttgcctaattcctccatctcctgttccagggaagtcaacaggttgttgaaccaggaaaaggcacctgtctccctgcagatccagtagaaatagatcttttttgttttgaggttgtggtctgcacactggaatttgtaccagatggatttcaagatagaagcaaagggggtgaccccaattcctgctccaaccagcacagccacttcatactggaaaacatcctcactggctgtgccaaagggaccatccacttcaatcctgggaattggtgaatattgttgttcgaaagcccttatgagattttctgtccagtcccctgctgctcggatatgaatggagaagaaatcttcctctggagcagaggtcaaagtaaaaggatgccattccaggagagagattgaggggcaattaacaaagatatactgccccacttccatgctgaagccacgcttgttcatctgcaattccaaaactttggatgggtgcataacaaccacccactgtgcccagtttccaagttcctctttcagggtgacaacataaaaatttagttctgtagtccggtagaagataactcttatcacagcaagaggaaagtgcatattctttaccttggtaatcacaaccttctgctgggagcggtaaaaccggaggatcctttcacagatataaagaatgaccggtgcaaggatccacttccaagagcctgtaatcccagcaccttgggaagccaaggcgggtggatcacttgagatcaggagttcaagaccagcctggccaacatggtgaaaccccat

SEQ ID NO: 6880 - DNA, 3104 bp, Homo sapiens
  SIMILAR (3025)..(1955): 1001254mologous to Homo sapiens glucose-6- phosphatase,accession number U01120,Smith-Waterman Score=1899.
gatcacattgcatctaaaatatagtaattaacaagactttattcttaaataaaatgttgctttaataaaatactgcacatatatatttttcttttcaaagatgttatgagcaggatggttgttttgaatgataatgtatggtatactatataattagtagcaaaaacaaggactttcaaataaataggcttcagcttttttttggggggtaggtgggtggggcagaaatactctgcatatcagatgagattgaaaaacaggcaaggagggcccggtgcggtggctcatgcctgtaatcctagcaccttgggaggccaaggcaggtggatcacttgaggtcaggagttcgagaccagcctggccaacatgatgaaatcccatctcttctaaaattctaaaaatataaaaattagcctggcatggtggtgcacgccggtagtcctagctactgaggaggctgagacatgagaatcgcttgaaccaggaggaagaggttgcagtgagccaagatcgtgccactccactccagcctgggtgataggtgcgccgtctcaaaaaaagaaaaaaaaagaaaagcaggcaaggaggagttggctagctggacatagtggcttgcacctgtatgccagctacgcgggacgctgtggtagggtgggaggactgcttgagcccaggaattcaagagcagcctgggcaacatagtgagaccctgtctcaaaaaaaaaaaaaaagagagaagatgttgacttttcctttaagaatgtgctcttggttggcttgggatagagaaaggagtcatatttaccctctaggaattaaaagtaacactggagtgacctgagagaggaatcctggccctccccttgtcattttgcccaagatttcagagcctaattgaaacatacaaaagcaccaccagagtcgccctctagccttctgaagatccagtggggtggatgtggagccagtggaagaatctggaaaaagcagagctgggcttataaggaggatgatgtaatgtgatagaggagatgtcagctatacctgaatgttttgacctagtgcaatatctgggtcactgcagccattcagaaatccaaggaaatacgatgaacatgtatgcacagtaaaaaaaatactagaagcagaattaccccactaaccatctattaattatacttaagctggtcccccattactgagagtgcattactatataattaaagccatttagacatggcttggcatagcacttgcatgatacgccacatactaaaaactcctccttagggcagccttcttttcctatcagattcagagctcctttctccttttctcggtaagaatgaacacagggagggaaaattctcagttaggatctccagcctgggggggcttgtgagctgggccctacctggaagtcttgcttttgtatatgtgacggaagaataagtaagtcttcaggggaaaatccagaacaacccaacttctagcaacaggtctttctcaatagcttcattagcttttcaaaaacattacccaatatgattaggattgtaaaagaggaccacctgagctgacagcacctctggcctcaaaatgggctggcagaagaccattcaaagataaaatgggctgttccagtgggagtgagctccctacttgtgagagtattcaagtagagagaggaggacctcctggcgggaaacttgcatatggtgtacgtgatatggcacctccatctgaaagagtctgtgctgagggcaggctggagtcacacatgggaataagccaggcgaccctccaatctgccatccgtgatttaattccacgacggcagaatggatggcatgtcacttgctccaaataccagtgcccattgcttcaaatagtagtcctcctcaatccctggcatggttgttgactttaaacaccgaagactccacatctcttacaacgacttcttgtgcggctggcccaggacctgggcgaggcagtaggggatgacactgacggatgccaggggcactaccgcactcttgcagaaggacaagacgtagaagaccagctcgacttgggatgggggtttcaaggagtcaaagacgtgcaggaggacgagggaggctacaatagagctgaggcggaatgggagccacttgctgagtttccccttgcagctctccctgtacatgctggagttgagagccagccccaggccaaagagcgtgcccaggttcttgaggaggctggcaaagggtgtggtgtcaatgtggacccattctggctgctcgcaccacctctgggctttctccagagtccacaggaggtctacacccagtcccttgagcagcagataaaatccgatggcgaagctgaacaggaagaaggtaatgagaaaatatttcttgaggctggcattatagatgctgtggatgtggctgaaagtttctgtaacagcaatgcctgacaggactccagcaacaacttgatgaggaaaatgagcagcaaggtagattcgtgacagacagacattcagctgcacagcccagaatcccaaccacaaaatgacattcaagcaccgaaatctgtaggtcggctttatctttccctgaaagatggaaagagtagatgtgaccatcacgtagtatacacctgctgtgcccatggcatggccagaggggctccctggtccagtctcacaggttacagggaactgctttatcaggggcacggaagtgttgctgtagtagtcagtatccaaaacccaccagtatggacgctgtccaaagagaatccacttaaagacgaggttgagccagtctccaatcacagctacccaaaggagtttaatgcccacagcttcctgaagatggaaccagatggggaagaggacgtagaaggcattcctgaggtctgcgatcacggacaccaagatgaaccagtcctgggagtcttggtaattcacctggaggtaatgtgttgactggatcccaaagtcatggagaacattcattccttcctccatcctcatttccttggcacctcaggaagatgtcagcagagcccttgcagttattccaggcttggtggtgattgctctgcta

SEQ ID NO: 6881 - DNA, 427 bp, Homo sapiens
caagtcactgatgtttgtgtatgtctacgtgtatgtgtgcttgtgtgtgtgtttctgtatgtatgcatatttgtgtctgtgattgtgtgtgtttgtatgtgtgtgtgcgtgcgcatatatttagcttttcctcataaatctttattattaaaatgagctcacaacagaagaggatgagaactcttgggctatgtaggaaatgcagggccagagggtgtattaggatcaagaagaggccagacccccaggtcgtggacctcctcctgccatgggcccacagcccatgtggttttgtgaggtagcttgaaaacctggttaacctggaatgtaatttttaaacatgattgtactttgaggaaagaggctgttatttcttgttagagggatctgggcatcttttctgctctgttggctttggttatgctct

SEQ ID NO: 6882 - DNA, 1338 bp, Homo sapiens
  SIMILAR (553)..(1335): 1001254mologous to Mus musculus fetal liver ring finger protein,accession number AF305730,Smith-Waterman Score=1363.
gcaaaggatccgtctgaggcggcgacgagtggtaggagtcttctttcccctccttcccctttcccttcccttcccgggagaggctgggacccggcaccagggcagtactgtggccgctgcggcctcagctccgactgggtcaggttgcggagactccaggccgcttccagggcgagtactcctgattgtgacatcacattcatcccctgggcgatggagcttgtcactgggaaggaatactcagtcggagaatagccaacaagatgggttactgggagaatctcttcagtggcactgagtggaggcatcagggggtatggagccttgtgaacagggatcctgccccccaacacttggaaggacctgggtttcagtgatgagacatggggtatgatgtaacccgtgtccagggggatgttgactaagatcttatctgccctatttgcagcggagtcttggaggagccagtacaggcacctcattgtgaacatgctttctgcaacgcctgcatcacccaatggttctctcagcaacagacatgtccagtggacccgtagtgttgtgacggtcgcccatctgcgcccagtacctcggatcatgcggaacatgttgtcaaagctgcagattgcctgtgacaacgctgtgttcggctgtagtgccgttgtccggcttgacaacctcatgtctcacctcagcgactgtgagcacaacccgaagcggcctgtgacctgtgaacagggctgtggcctggagatgcccaaagatgagctgcccaaccataactgcattaagcacctgcgctcagtggtacagcagcagcagacacgcatcgcagagctggagaagacgtcagctgaacacaaacaccagctggcggagcagaagcgagacatccagctgctaaaggcatacatgcgtgcaatccgcagtgtcaaccccaaccttcagaacctggaggagacaattgaatacaacgagatcctagagtgggtgaactcccttcagccagcaagagtgacccgctggggagggatgatctcgactcctgatgctgtgctccaggctgtaatcaagcgctccctggtggagagtggctgtcctgcttctattgtcaacgagctgattgaaaatgcccacgagcgtagctggccccagggtctggccacactagagactagacagatgaaccgacgctactatgagaactacgtggccaagcgcatccctggcaagcaggctgttgtcgtgatggcctgtgagaaccagcacatgggggatgacatggtgcaagagccaggccttgtcatgatatttgcgcatggcgtggaagagatataa

SEQ ID NO: 6883 - DNA, 350 bp, Homo sapiens
  misc_feature (1)...(350): n = a,t,c or g
nnnnnnnnnnnnnnnnnnnnnnnnnnnnnnnnnnnnnnnnnnnnnnnnnnnnnnnnnnnnnnnnnnnnnnnnnnnnnnnnnnnnnnnnnnnnnnnnnnnnnnnnnnnnnnnnnnnnnnnnnnnnnnnnnnnnnnnnaagcaataatggccccaaactttccaagttaggtgaagacataaagtcaagaagatgggcaaacccccaataggataaagctaaagaaatccacatccagacacataatcaaattgctgaaaactaacggcaaaataaaatatcttgaaagcagtgagagaaaaatggctcattacctgtaggagaacagtgatttcaatgactatggatttct

SEQ ID NO: 6884 - DNA, 330 bp, Homo sapiens
ggactgcttgagctagggaggttgaggctgcagctgcagtgagctatgatcgtgtcactgctctccagcctgggtgacagagcaagactttgactcaaaaaaaaaacccgcaattctagcaagttgtttaaaacatttgaatcccttgtcttctcattgatttctcagaatttggtttattcttaccaaaaagttattgttatcaatgcaaagtcacacttcagtgttccaaaagtctactttaaaagtaaatacatactctaagttgtctcctgaaaagtaatgtcatactttcatatcactttttggccccttaagacacactcaatg

SEQ ID NO: 6885 - DNA, 373 bp, Homo sapiens
tagatcaggtgggatttgggtagatggagaagagaaggagggagagccgggatgtgagaacctaagctcagaggtaggagcatgttgggtatatttgaaggactccaaatcaaccagcttgtagagacagggctgaaaagatggttgcgtcttagaaacagtttcctcaaaagattttgttaccttcttaaaagcctcagtagaagcagtagaaccaccaccaccacagctttcgtttgtgatgggcgatggattatgcaaatacctggaagtgtcctaccttttccacagtgctggtaacctcccaaccccttttggctgccagttttttgagggcctccacattgctgtcactcagggatgcctgctagct

SEQ ID NO: 6886 - DNA, 796 bp, Homo sapiens
  SIMILAR (1)..(792): 521254mologous to Mus musculus putative,accession number AK004905,Smith-Waterman Score=551.
  misc_feature (1)...(796): n = a,t,c or g
aaggaaaatctcatcacgtttcccagaatccaacccatttcaaaggatgatttcagacgctatcggggagctattgcacgcaagcgaattcgcctaggcagaaaatatgttatttcccacaaagaagaggttccactttgcatacactgggatatcagcaagcaggcatccctgagtgacagcaatgtggaggccctcaaaaaactggcagccaaaaggggttgggaggttaccagcactgtggaaaagataaaaatatatactctggaagagcatgatgttttatctgtttgggttgaaaagcacgtggggaagtccagcacatttgacttatccgtctcttgtctgactttacaaagcgacctttgtggggacccccattttgtgtccctgtgaagtcatagactggggtgagtgaaggatgaccagctgtatccacatcacctgtcctatactgaatgatgacaaacccaaagacttggtagtacttcgtattcacgaaggaaaacccctcaaagatggtaacacttaccacagtgggcagtgaagtcggtcattttgccatcggtccccccgtctccacagtacatcagaagtgaaatcatatgtgccggatttctcatccatgctatttgacagcaattcatgcattcgtatcttactttaaccatatgtctgctaggcatccttccttactttggctgggaaatcttgggtgggctgggtccaaaatccattggaaggaaacagcagcctcttgtatacagttcttaggggatcctccctgatggngggg

SEQ ID NO: 6887 - DNA, 432 bp, Homo sapiens
  SIMILAR (233)..(301): 431254mologous to Homo sapiens kruppel-like zinc finger factor X31,accession number AF226996,Smith-Waterman Score=54.
cacgtttcactgagcatcatcgaacgctcactggggagaaaccttatgaatgtaaagagtgtggaaaacgattaagctccaacacagccttgactcagcatcagcgaattcacactggggagaacccctttgaatgtaaagagtgagggaaggcattcaatcagaaaataaccctgattcagcaccagcgagttcacactggcgagaaaccttatgagtgtaaagcgagtggaaaaccttcagctggtgtggaagattcattctgcatcagatactacacactcagaagacacctgtccaagcatagggctatccatagttaggcccactgagcctctccttttttctctttattttcatgctttttatcagtgtcctcgctgtccttcctggatagacacttggctttcatcatgaactcttctttaagtt

SEQ ID NO: 6888 - DNA, 374 bp, Homo sapiens
  SIMILAR (64)..(303): 771254mologous to Homo sapiens lifeguard,accession number AF190461,Smith-Waterman Score=333.
actggagttaccccagcggccacccaggcctcatggacccctcccccgatagacgggcccacgacccaggaaaagctttcctaggctaacacggcccctgggaccgagggggagcagcaggtgcatggcgagaaaaaggaggatccagcagtgccctcagccccaccctgatatgaggaatccacctctggggaggggaggaaggcatgggccttcccaccagcccccacaggggagcctttccaccctaactgggcctatgtggaccccaacagcaactcccgctatgacaacggagtcccgcaccggagaccatgagctctgaaccactttcagctgggatgaccagaaagttcgtcgagtctttgtcagat

SEQ ID NO: 6889 - DNA, 512 bp, Homo sapiens
  SIMILAR (133)..(510): 1001254mologous to Homo sapiens Similar to lifeguard,accession number BC000051,Smith-Waterman Score=659.
gccgccccggagtccgcgccgcgactaccgggtcgacgatttcgccgcggaggagggaagagacgcaggcaggctgcggttacccaagcggccacccgggcctcagggaccccttccccgagagacggcaccatgacccagggaaagctctccgtggctaacaaggcccctgggaccgaggggcagcagcaggtgcatggcgagaagaaggaggctccagcagtgccctcagccccaccctcctatgaggaagccacctctggggaggggatgaaggcaggggccttccccccagcccccacagcggtgcctctccaccctagctgggcctatgtggaccccagcagcagctccagctatgacaacggtttccccaccggagaccatgagctcttcaccactttcagctgggatgaccagaaagttcgtcgagtctttgtcagaaaggtctacaccatcctgctgattcagctgctggtgaccttggctgtcgtggctctctttactttctg

SEQ ID NO: 6890 - DNA, 399 bp, Homo sapiens
  SIMILAR (397)..(167): 931254mologous to Homo sapiens bB329D4.1.3 (novel protein, isoform 3),accession number AL391119,Smith-Waterman Score=381.
ttttttttttttaattatatcacaagatataataaacattatagatattataagatgtcaaaaaaaagatgccataaaatctttcagatgattgacatgttaaatgcggcctcctgtgccgccctggggcgccactctcgctgggttcttggcggagctcaccctactccacctgctcagcccaggctcctgcaccctggagtcacgccatgggagcaaggaccttgccgccgcggcccttccgaagtttgtggacactcttctgccacaccaaaagtttcaccatcagctgcgatgccgactgaggcgcagagacccctccgggatgtggaccaggcagtgactttgctgggcatccgcagtgctgaccaccccaagtgcagatccccacttcgtgtt

SEQ ID NO: 6891 - DNA, 430 bp, Homo sapiens
  SIMILAR (352)..(128): 971254mologous to Homo sapiens bB329D4.1.2 (novel protein, isoform 2),accession number AL391119,Smith-Waterman Score=403.
tttatataagggtaggatagtataattgtgcagtaacgttttttgtgaaagtggtggaaagtggattgcgttggcgacatgctggaatgtgcttccattggcagaagtgaggctttcaaaactagtagttttcagttttctctagcaacttccgaagtttgtggacactcttctgccacaccaaaagtttcaccatcagctgcgatgccgactgaggcgcagagacccctccgggatgtggaccaggcagtgactttgctgggcatccgcagtgctgaccaccccaagtgcagatccccacttcgtgttcctcctcctccacgttccacatccaaagttctcgcaccatttcttgcatccagtgaccacctggagcacacctgcagttcgcaagttaggcttcctgctgcagtgaggggagcaagcactg

SEQ ID NO: 6892 - DNA, 1935 bp, Homo sapiens
  SIMILAR (509)..(712): 981254mologous to Homo sapiens bB329D4.1.3 (novel protein, isoform 3),accession number AL391119,Smith-Waterman Score=374.
  misc_feature (1)...(1935): n = a,t,c or g
gggcgaggcctcaggaggacagcagccactgctggcaagacgttggtgttctcctgttgaactgcacaggctgtcagcatcagacaaggtcgctctgtgaccatgatgggtcaagacaaagcaaggtcacttggtagctatcatggctcagctcatgcaaaacatggacaaaaatgacctcacaccccctcccctgtgtctatgtcatgaccactacctctgtcaattgcagcgttagctttggtcttgtcttccttccttctaggtaagattggggaagatgccaggtgatagaatccaccctgcctctgacagcatccaatctggagcaaaggcttctttcaaccttcccccaagctcccaatacaagcccaaattctggaacaagtcctttccaacacctccttcagagaagctccctggctccaggcagtgcttgctcccctcactgcagcaggaagcctaacttgcgaactgcaggtgtgttccaggtggtcactggatgcaagaaatggtgcgagaactttggatgtggaacgtggaggaggaggaacacgaagtggggatctgcacttggggtggtcagcactgcggatgcccagcaaagtcactgcctggtccacatcccggaggggtctctgcgcctcagtcggcatcgcagctgatggtgaaacttttggtgtggcagaagagtgtccacaaacttcggaaggtatccgctacatcctccatagccgtgtatccctgcccagggcaatcttctgggggagcggaaagtcctgctcccgggccagggctggctggctggagccacttgtgcggcgcagccctggcggaggttcaggcggccccggtgtcgcaagcggctgtgagtgatgcctccctggggccggagtggtcccaggaaggctgcagaccagggctgaccagcgggcagcatggtggccgcgatggaaggtgacggggttcgcagcgccagggggacccagcagagcccgagcccgggaattcccgcatcttcagcagcattgtaagtaggcctggtgctggtgaagtggcggccagtgcacaaggcctacgacccagtcccagaggccagcccattgtcagctaacttcaggaaccccgggccagctgaggccccgggccccatgggcaagacaaagggcagagggtccgcaggcggggccgagtgcaggcagtgcaggcctggctccaccgccgcggagctcgcagggcgcagcaggcatcgggcagtgaccagggcttccagaggaggctgtgcacccctgcaaaggctcctgccctgcgtccagcctatccgcggggactccacgtgcaccccctcctcattgtccttgtctagggccgcggcggcaaggtccttgctcccatggcgtgactccagggtgcaggagcctgggctgagcaggtggagtagggtgagctccgccaagaacccagcgagagtggcgccccagggcggcacaggaggccgcatttaacatgtcaatcatctgaaagattttatggcatcttttttttgacatcttataatatctataatgtttattatatcttgtgatataattattaacaccacttcagtgtgattattatgattatttttataccaacacatcttcaattattaatattcccagttgctagagaaaactgaaaactactagttttgaaagcctcacttctgccaatggaagcacattccagcatgtcgccaacgcaatccactttccaccactttcacaaaaaacgttactgcacaattatactatcctacccttatatactttttgtgtgtgtgtgtgtacttgtatgcatgtatgttacacatgnnnnnnnnnnnnnnnnnnnnnnnnnnngggtgccagagatgaacaagtattataaaattaaatgcacacgagtcgtgtc

SEQ ID NO: 6893 - DNA, 1239 bp, Homo sapiens
  SIMILAR (307)..(1107): 921254mologous to Mus musculus putative,accession number AK003493,Smith-Waterman Score=1262.
atgaataaacaaattcaggggagaactggggcctgctcccagagagatacagctacgttgatcaaaactgaatcttcggatgtgatccaccttatcatgcagtacttgaaggagaacggtttacatcgggcattagccaccttgcaggaggagactactgtgtctctgaatgctgtggacagcattgagagttttgtggctgacattaacagtggccattgggatactgtgttgcaggctatacagtctctgaaattgccagacaaaaccctcattgacctctatgaacagattgttctggaattgatagagctccgtgaattggcagctgtcaaagatgtggaagaagaaaagtttcctacacaactgagcaggcatattaagtttggtcagaaatcacaagtggagtgtgctcgattttctccagatggtcactatttggtcactgggtctgttgatggactcactgaagtatggaactttactactggaaaaatcagaaaggatcttaagtaccaggcccaggataactttatgatgatggatgatgctgtcctctgcatgtgtttcagcagagatacagaaatgttagcaactggggcccaagatggaaaaatcaaggtatggaagattcagagtagacaatatttaaggagatatgagagggcacacagtaagggtgtcacgtgtctaagcttttctaaggatagcagtcagatccttagtgcttcttttgaccagacaattagaattcatggtttaaaatctgggaaaaccctgaaggaattttgtagccattcctcctttgttaacaaagcaacatttacacaagatggacattatattattagtgcatcctctgatggcactgtaaagatctggaatatgaagaccacagaatgttcagatacctttaaatccctgggcagcactgcagggacagatattaccgtcaacagtgtgattctacttcctaaaaatcctgagcactttgtggtgtgcaacagatcaaacacagtggtcatcatgaacatgcaggggcagattgtcagaaacttcagttctggtaaaagagaaggggaggactttgtgctctactgtttcagtacagccactggcaaactggaaagaactttgacagtgcacgagaaggatgtgattggtattgcacatcaccctcatcagaacctgattgctacctacagtgaagatggactcctaaagctctggaaaccataa

SEQ ID NO: 6894 - DNA, 429 bp, Homo sapiens
  misc_feature (1)...(429): n = a,t,c or g
aaataaaatnnnnnnnnnnnnnnnnnnnnnnnnnnnnnnnnnnnnnnnnnnnnnnnnnnnnnnnnnnnnnnnnnnnnnnnnnnnnnnnnnnnnnnnnnnnnnnnnnnnnnnnnnnnnnnnnnnnnnnnnnnnnnnnnnnnnnnnnnnnnnnnnnnnnnnnnnnnnnnnnnnnnnnnnnnnnnnnnnnnnnnnnnnnnnnnnnnnnnnnnnnnnnnnnnnnnnnnnnnnnnnnnnnnnnnnnnnnnnnnnnnnnnnnnnnnnnnnnnnnnnnnnnnnnnnnnnnnnnnnnnnnnnaatggtaatttaaaagttacatacaaaaaaagtcaaggactaggcacattcacagatgaattctatcagatactcaaagaagaattgatatcaatcttattgacattattccaaaagatacagaaagagtgaatn

SEQ ID NO: 6895 - DNA, 167 bp, Homo sapiens
ccgtctataccaaaattctaagggctgaccgagatatgctaactggatacccttgctgctccacaggcttgcttactgcggacgactaatgataagataataccctggaggtaaagctcttcgcaggggtcctttctacttggagggcctggacctcagccccaaag

SEQ ID NO: 6896 - DNA, 406 bp, Homo sapiens
gccaagatttcctgctgacccctgcaggagctgggagggcagagcctcagcctccactatgttgggggaagggctcccgggcccccggcacctggacacccacctgtccagagcctacagagaccctgcgtccccacacagcagctcctcacaccagagttctggtgcccagcactcctcagcagcagtgaggccacaggcagggcacaggcctctgtccctacgccaggtcctcccctaaaagggcagtggcagcaggggccgccgcagaaggaatggcagatgagacccaaagcctttggtcatcaccccggaggtctatgccaaagcctgggtggggctcccaggagatggaacagggacacataccaggcaggtccacgccaggggtgcggtgccctgatgt

SEQ ID NO: 6897 - DNA, 4221 bp, Homo sapiens
  SIMILAR (110)..(3529): 1001254mologous to Homo sapiens UV-damaged DNA binding factor,accession number U32986,Smith-Waterman Score=5879.
cagcggcagtggagttcgctgcgcgctgttgggggccacctgtcttttcgcttgtgtccctctttctagtgtcgcgctcgagtcccgacgggccgctccaagcctcgacatgtcgtacaactacgtggtaacggcccagaagcccaccgccgtgaacggctgcgtgaccggacactttacttcggccgaagacttaaacctgttgattgccaaaaacacgagattagagatctatgtggtcaccgccgaggggcttcggcccgtcaaagaggtgggcatgtatgggaagattgcggtcatggagcttttcaggcccaagggggagagcaaggacctgctgtttatcttgacagcgaagtacaatgcctgcatcctggagtataaacagagtggcgagagcattgacatcattacgcgagcccatggcaatgtccaggaccgcattggccgcccctcagagaccggcattattggcatcattgaccctgagtgccggatgattggcctgcgtctctatgatggccttttcaaggttattccactagatcgcgataataaagaactcaaggccttcaacatccgcctggaggagctgcatgtcattgatgtcaagttcctatatggttgccaagcacctactatttgctttgtctaccaggaccctcaggggcggcacgtaaaaacctatgaggtgtctctccgagaaaaggaattcaataagggcccttggaaacaggaaaatgtcgaagctgaagcttccatggtgatcgcagtcccagagccctttgggggggccatcatcattggacaggagtcaatcacctatcacaatggtgacaaatacctggctattgcccctcctatcatcaagcaaagcacgattgtgtgccacaatcgagtggaccctaatggctcaagatacctgctgggagacatggaaggccggctcttcatgctgcttttggagaaggaggaacagatggatggcaccgtcactctcaaggatctccgtgtagaactccttggagagacctctattgctgagtgcttgacataccttgataatggtgttgtgtttgtcgggtctcgcctgggtgactcccagcttgtgaagctcaacgttgacagtaatgaacaaggctcctatgtagtggccatggaaacctttaccaacttaggacccattgtcgatatgtgcgtggtggacctggagaggcaggggcaggggcagctggtcacttgctctggggctttcaaggaaggttctttgcggatcatccggaatggaattggaatccacgagcatgccagcattgacttaccaggcatcaaaggattatggccactgcggtctgaccctaatcgtgagacttatgacactttggtgctctcttttgtgggccagacaagagttctcatgttaaatggagaggaggtagaagaaaccgaactgatgggtttcgtggatgatcagcagactttcttctgtggcaacgtggctcatcagcagcttatccagatcacttcagcatcggtgaggttggtctctcaagaacccaaagctctggtcagtgaatggaaggagcctcaggccaagaacatcagtgtggcctcctgcaatagcagccaggtggtggtggctgtaggcagggccctctactatctgcagatccatcctcaggagctccggcagatcagccacacagagatggaacatgaagtggcttgcttggacatcaccccattaggagacagcaatggactgtcccctctttgtgccattggcctctggacggacatctcggctcgtatcttgaagttgccctcttttgaactactgcacaaggagatgctgggtggagagatcattcctcgctccatcctgatgaccacctttgagagtagccattacctcctttgtgccttgggagatggagcgcttttctactttgggctcaacattgagacaggtctgttgagcgaccgtaagaaggtgactttgggcacccagcccaccgtattgaggacttttcgttctctttctaccaccaacgtctttgcttgttctgaccgccccactgtcatctatagcagcaaccacaaattggtcttctcaaatgtcaacctcaaggaagtgaactacatgtgtcccctcaattcagatggctatcctgacagcctggcgctggccaacaatagcaccctcaccattggcaccatcgatgagatccagaagctgcacattcgcacagttcccctctatgagtctccaaggaagatctgctaccaggaagtgtcccagtgtttcggggtcctctccagccgcattgaagtccaagacacgagtgggggcacgacagccttgaggcccagcgctagcacccaggctctgtccagcagtgtaagctccagcaagctgttctccagcagcactgctcctcatgagacctcctttggagaagaggtggaggtgcataacctacttatcattgaccaacacacctttgaagtgcttcatgcccaccagtttctgcagaatgaatatgccctcagtctggtttcctgcaagctgggcaaagaccccaacacttacttcattgtgggcacagcaatggtgtatcctgaagaggcagagcccaagcagggtcgcattgtggtctttcagtattcggatggaaaactacagactgtggctgaaaaggaagtgaaaggggccgtgtactctatggtggaatttaacgggaagctgttagccagcatcaatagcacggtgcggctctatgagtggacaacagagaaggacgtgcgcactgagtgcaaccactacaacaacatcatggccctctacctgaagaccaagggcgacttcatcctggtgggcgaccttatgcgctcagtgctgctgcttgcctacaagcccatggaaggaaactttgaagagattgctcgagactttaatcccaactggatgagtgctgtggaaatcttggatgatgacaattttctgggggctgaaaatgcctttaacttgtttgtgtgtcaaaaggatagcgctgccaccactgacgaggagcggcagcacctccaggaggttggtcttttccacctgggcgagtttgtcaatgtcttttgccacggctctctggtaatgcagaatctgggtgagacttccacccccacacaaggctcggtgctcttcggcacggtcaacggcatgatagggctggtgacctcactgtcagagagctggtacaacctcctgctggacatgcagaatcgactcaataaagtcatcaaaagtgtggggaagatcgagcactccttctggagatcctttcacaccgagcggaagacagaaccagccacaggtttcatcgacggtgacttgattgagagtttcctggatattagccgccccaagatgcaggaggtggtggcaaacctacagtatgacgatggcagcggtatgaagcgagaggccactgcagacgacctcatcaaggttgtggaggagctaactcggatccattagccaagggcagggggcccctttgctgaccctccccaaaggctttgccctgctgccctccccctcctctccaccatcgtcttcttggccatgggaggcctttccctaagccagctgcccccagagccacagttcccctatgtggaagtggggcgggcttcatagagacttgggaatgagctgaaggtgaaacattttctccctggatttttaccagtctcacatgattccagccatcaccttagaccaccaagccttgattggtgttgccagttgtcctccttccggggaaggattttgcagttctttggctgaaaggaagctgtgcgtgtgtgtgtgtgtatgtgtgtgtgtgtatgtgtatctcacactcatgcattgtcctctttttatttagattggcagtgtagggagttgtgggtagtggggaagagggttaggagggtttcattgtctgtgaagtgagaccttccttttacttttcttctattgcctctgagagcatcaggcctagaggcctgactgccaagccatgggtagcctgggtgtaaaacctggagatggtggatgatccccacgccacagcccttttgtctctgcaaactgccttcttcggaaagaagaaggtgggaggatgtgaattgttagtttctgagttttaccaaataaagtagaatataagaagaaaaaaa

SEQ ID NO: 6898 - DNA, 1062 bp, Homo sapiens
  SIMILAR (3)..(257): 791254mologous to Cercopithecus aethiops UV-damaged DNA- binding protein,accession number L20216,Smith-Waterman Score=323.
ataagggcccttggaaacaggaaaatgtcgaagctgaagcttccatggtgatcgcagtcccagagccctttgggggggccatcatcattggacaggagtcaatcacctatcacaatggtgacaaatacctggctattgcccctcctatcatcaagcaaagcacgattgtgtgccacaatccgagtggacccctaatggcctcaagataccctgctgggagacatggaaggccggctcttcacagccttgcagaagaacccaactgaaaaaaaaattcctcaggctttacagcaagcaaactcvcactatgatttttacaattcctgattctdgtatccccctgggggtgtatcccagtttgcttctttagggtgggggtttattgacgttgtacatatatcccgatgtgtctgtgtgaatctttgvtcttttttgggcgagggcagagggcggttcttttttttagatattgttcctaaaaaggaataaatgcatacacctgtttgtcaaaacacctttgctttttgtgcaactgctttatattaacgatactaaaaaaaaatagctttgggaaaaaaaactactgtatgtaacgggatttgccaggaatatgcctgcacatgtattttaattttagttatccttgctttaagaatattggatgacatttcctgacatgtgggagggagaaactccctaactttttttttctgcttttaaawctgtaacatagttgaagatttcttttttctgttctcattgattggagcattttgtaacaggttttgtgtgtgtgtgtgtgtgtgtgtgcgcgcgtgcgtgtgtgttaatctgttttttgatacattcctatcccttgtgtttatcctaccactgccttcctggctatcttaaacaagttcatacatttgaaaagaaaacaaaatgttgtttaaaataatgttttctcctgctgcagtaaatattttgcgatgatgaaattccagggtcacacttttccaagtatataagtgaagctagtgattaacaatggggagtgtcaaaactattgaacttttgtat

SEQ ID NO: 6899 - DNA, 851 bp, Homo sapiens
atggcccgggggtcagctggtctcgtgctggggaggggtcggctccatgactggcagctcggctctggccacagtgcaccagggatgctggggcaggttgccctggctggtcgtacagagcttgctgtgcccagcctggacacccccggaggtggcgagcagcgggcatcagacctctcccgcaccctttcgtcttcccatgagtctgaccacacagtgcgggctgcccactcccctctgcccgctgaagccctgacccgctccctgccttgtctccagaatgtcgcccatgtgagattgtacatcaagtgccagcttgactttggtggggattcgattgctgtagggaccccgtggtatcccatggtgtggattcccgtggtgtggattcccgtggtgtggattcccgtggtgtggatggagcacactgtgctcattcacttgcctgtcggtgggcacgtgggcagctcccatctctcagctcctgtgaataacgtctgtgggaacgtggccgaggagcccccagccctgtgtgggaccaaggcttcaaagcccccactgaccccaccacccataagatcaaaagcgaaattcctcggtgggtcagtttgcttgggccgccataacaaactctcacagaccaggtggctgaaacaacagacgtttatttcccacgatcctggaggctggaagtccaacatcaagctgacccggccggcccaggacctgctgatgtccgtctgcatgaactgcaacacgcacggttccgaagacatggacgtcatctcacacctgatcaagatccgcctcaagcccaaggtcctcctcaaccacttcatgctgtgcatcat

SEQ ID NO: 6900 - DNA, 3235 bp, Homo sapiens
  SIMILAR (2958)..(2275): 301254mologous to Homo sapiens Protein polymer adhesive substrate PPAS1-B,accession number AAW49715,Smith-Waterman Score= 125.
atctcctgcttctcccgctgggcggtctgcagctcacggttcagcatctccgtccgggtctcctcatccgtcatggtgcacggtgggtaggagtagttgttggtcatcaccatctccatgagcatcttcagggtcgggtactcctcccacgcagccaggccgatgttctctgggttgaatgcggcgacgaccagcaggaggggcccaggccttccaattaaagggtaaaaaatggcgaaggttcggaggctggtaaccccggtgggaagctggatgttttcagggtgaatggtaaggtgccacagattcaagaacggcgtcgaatcagctgggtcctccccaccttcagcacctccacatcaatccgcctgcacggcagccgcccgctttcaacagggtggtcaagcaagctccatggcgtccgcaggcccgagcgggagctcccgggacagcccgatgaccaggatgcgcatcagcgtgtcctccagaatgggcacctcggagcacagacgcaggaagaagttgcggtcactctcgggtggccagttgtcccacttgtagtaggtctccggctgctctgtggaacagcaccttgtgcaggcagtgcacgtagtccttaggggcgagcttgctgatggaggggaccacagtgtggagccaccagacggcatcccgctggatggcggcaatctggttctggaatgagcggagcacttccaggttcctcttttctcctttgtcccaggcgatgccggcctccttcacctgcgctgtgatgcccagcatcatggacacggccaggacgtcggtgatgtgcaccacgaagcgctcctgcaggtgcagcacggggtctgtatccagaagggacacccgggagccccactccacacccacgtgggcgcggcacggggtcttgaactccatctccaggtactgcggctccttgcgctcctgcatgagccccaggcagaaggcctggaagttgatctcgtgcttggtctgcttgatgatctcctttagcttggcccgcgaggcccgcaggtagtcgtccttgttggtcagcaggtcctggagcaccatggccaggaacttgggcgccagctctgagctgtgctgcagtgcggtatagaggacctgcatgttgttcgggttccgggcgctggagagctcattgaagatcaccaacttgatggtggtgcccaggttgtccttgtgcgcgctcagcagctccctgatgcacagcatgaagtggttgaggaggaccttgggcttgaggcggatcttgatcaggtgtgagatgaacgtccatgtcttcggaaccgtgcgtgttgcagttcatgcagacggacatcagcaggtcctgggccggccgggtcagcttggggttctgcagccacatctccagcttctgcaccgccagcagccgcacctccttatagccgcaggtggaggtgaggagccgcaggaggttcctggagacgttgtcgatgggctggcgccggttcagctggtcccgcagcatgtccaggacatactcctccacgctctccgcgagctcttcgtacctgggcatgagctggccctcctgcatcggggctcagcttctcctccgcgatcagcaactccgtcttggatgtcctcctcctccgttgagggaggggtgtgggctgctccctgcacccaggtcgcccgcaacgcggcccgcctccccctgcagcagcacgctcctggggggcattctggtgttgaaggccgtctggatgttgtccacaaacgtcttacagtgagggctgtccacccagatccgctcccccagggagtcctcgatgtacaccttgacaaagatctcgggccagttctcgtcctcctcgtaggcggccatgaggaggttacaggccagcacagacaccaggctgttccccttggccttgaagttgatggaggcgtcccgccgcaggaggctacacagagcctcaatgacgccctcagtggcgaagatgttgggcttgatcttggccaggtacatgaggctcaggtagagggtgctgtcaggcttggcgcgggtgaccttcagctgcttcacggccccgcacagcacgccctcgatcctgtcatcgttgccctccagctcggccgcctcgatctcatccagcagcaccgtgggcagcacttcaattggcaccacagatggctctttaatcgacggagaaatggctcgtttttctgccactgcagcctcagccaggcgccccagggcactcagagggggtgtggaggagagtttggggcgtttggtgagaccggtgagggccgaggcactggacaacgcggccgccgcatcccgcttgcgctcagaaggcaggccggaaggggctggcttcagcagggtggacgccgttttcgattcattggcctgaccctttgagcccagagcaatgaagtctcctgggggagggtgccctgagggtttggccgcggcgctgggccggcgcaccgtggtgggcttggcccggttcatcctgccccgtccctcgcggctcccggcggctgcggcgtcacctctggcccatcgcgaccggagcgccgccgccgccacccggccaccccggaatcggaaaccgatctcaccgccctcgaggacccgacttccggaacaaccggaaggaaaacagtgcggcgggaagcgggcccagaaggaggcgcgagaggcccgcggcgccggcctgatgcctgcagcgccccatggcggcgggaggcgggctggccggcgccgcgcgcatgtggtccggtccaggtgggtcggcggcgcggggcaggcgctggcctctccattcacaggtggtgctggtctaccggggaagagctcagaccctttggcttcaaagagcgggggccagtcccggttccacccccaggcaggaactctctcctgcctgaggctgggggctgccctgggagcatgcatcaggcactggcagggtggtgccccccagcccaggctgttctgtggagaagaggcagccagcggctgttcaccatcgcgggctgcagctgctgggcccgtgcgccaccgggcagcgagcctcctaacatgcagacccccgccagcaagcagaagctccgggggagttgagtgggggagcagcttctggctggagactaggaagtgctttccaacaattgtccgggggcttctgtcctgcaggtgcagacgacacggctggggctggtgcat

SEQ ID NO: 6901 - DNA, 1065 bp, Homo sapiens
  SIMILAR (425)..(1048): 311254mologous to Mus musculus reverse transcriptase,accession number U15647,Smith-Waterman Score=225.
tcatatgatcctatgtgtagaaaactccaaagactccaccaaaaaaaacctattagatctaataaatgaattcagtaaagttgcaggatatagaattaatatacaaaaatccatggccattttattcacaaataacaacctagctgagaaatcaagaaagcaatgcccatttatgataacataaaacacttaagaatacatttgaccaagaagatgaaagtgcatcagtatagcctgcacactgaaaaccacaaaacattgatgaaatacattgaagaggacacaaataaataaaacgatattccatgctcatagattggaagaattaatgttgttaaagtgtccatactacccaaagcaatatatagattcaatgcaatccctatcaaaatctcatcagcattcttcacagaaatagaaaaaaatcatacaatttctgtggatccacaaaagatcccaaataaccaaagcaattctgagaaaaaaaaatcctggaggcatcatacttcccaatttaaatttatattacaaaacgagagtaatcaaaacaatacagtattggcataagagatacacaggacagtgaaatagccagaaataaatccaaacatgtatggttaatgaatttttgacaagagcaccaaaaagacaaaatgaggaaaagggtagtctcttcaataaataggtgctgggatttccacatgcaaaagaatgaaattaggactcttacattacaccatacacaaaaatcaatccaaaatggataaaagatctgaatgtaaggacctgaagccataaatctaggaaggaaaacataaggggaaaagctccttggacactgggctttgggcaatgtttccttggatatcacaccaaaacctcaggctacaaaagcaacaataaataaatgaaattatatcaatctaaaaaacttctacacagaacgaaaacaatcaacaaaatgaaaaggcaatgtacagataaggagaaaatatttgcaaaccatatatcaggcaaggttttaatattcaggatttaggaagaactcatacaactcaatagcag

SEQ ID NO: 6902 - DNA, 413 bp, Homo sapiens
gcacactgctcccagagatccaggcctacacgcaggagcagtggctaggcagccctgaggaggccactgccctggcagagcggctacagcaggagtcagctgggccaggactccagatgaatgggggcctggtcctgggggcctgggtgtgccttccccctgctcacgacccccagctgaacccagcactggggcccagtcgtgggttggtggctgagagggccctgggggctgtgggaaagtgatggtgacaggtgggagtttggtggtcttggcttggacggcagagtcagagatctccagtcacacctgtgtgctccgcattgtgtcctgagaactgaaggtgcagagaagggtgggtcatgccaccgcatgccccttgttttctcctcagatctgctaggctgaacacc

SEQ ID NO: 6903 - DNA, 684 bp, Homo sapiens
  SIMILAR (684)..(145): 691254mologous to Mus musculus D12 protein,accession number AF353245,Smith-Waterman Score=584.
ttatttgagtttaggcatgattcgaatgaagaggatcatgctaatgaagatgaagcagacgataatgagcatggcccagagcagccagttgactgacttctgcgtgtgctgctccagacgctctgactccgtcttcagtttctccaggttctggtccgccattttcagtgagtgtgacagggtctggttgtccttcttgatgacactctgggcggccaggtattggtcttgaggctccgggccagtcctagcatctcttccgccagcttttcctggaggttctgatgtcgctgcagagtccgtgcctagtagctcactccgcatctcgctggtgtaccgcgcccgtgactgcagatgcaccgtctttgtggcgggcactcgctctctggctgtggttggcacacggccaggggccaggaactggttggccagtgctttctctgaggaggaggtcagcttctcggcttgcagcatccccttcagaaaatccaccttccaggaatattcattgatcacctcagaggccggtttgctcgcgtggaccttcagggcctgcaacatgtcctctagggctcccacgtacttctccaggcgccactcgtccgggtcccgtttctccgctgccatcgcctcgcagcgggatagcagccgcaccaggtttagctccagcctcgacgccgccat

SEQ ID NO: 6904 - DNA, 442 bp, Homo sapiens
  SIMILAR (195)..(422): 1001254mologous to Homo sapiens spermatid perinuclear RNA- binding protein,accession number AF333337,Smith-Waterman Score=398.
accgggcgcgcgcagagcgcggcggcgcgggtgtgttccagagaattagcctttttacatttgctatattgacgctgagctgtcaggggactcaggcttatgaggaggtattgttacacaaaacagtgtctagtgaagacgacaagaaagaggggaaaggatcggaaaaagaagctaaaatactatagaaaaccatgagatctattcgatcttttgctaatgatgatcgccatgttatggtgaaacattcaacaatctatccatctccggaggaacttgaagctgttcagaatatggtatctactgttgaatgtgctcttaaacatgtctcagattggttggatgaaacaaataaaggcacaaaaacagagggtgagacagaagtgaagaaagatgaggccggagaaaactattccaaggattaatggctgacggacattgt

SEQ ID NO: 6905 - DNA, 792 bp, Homo sapiens
  SIMILAR (243)..(467): 731254mologous to Mus musculus putative,accession number AK003493,Smith-Waterman Score=249.
aaaccactctggaccgcttttaattattgggtcgacgatttcgtctggccttgagggagagctggggcctgctcccttatagatactgctatgtcgatcgaaatcgaatcttcggatgtgatccgccttattatgcagtacttgaaggagaacagtttacatcgggcgttagccaccttgcaggaggagactactgtgtctctgaatacatgtggacagcattgagagttttgtggctgacattaaaaagtggccattgggatactgtgttgcaggctatacagtctctgaaattgccagacaaaaccctcattgacctctatgaacaggttgttctggaattgatagagctccgtggaatttgggtgctgccaggtcactttttgagacaagacctgatcccatgatcaaggttaaaacaaacacagccagagcgatatattcatctggagaacctttttggccaggtcttactttgatcctcgtgaggcatacccagatggaagtagcaaagaaaagagaagagcagcaattgcccaggccttagctggcgaagtcagtgtggtgcctccatctcgtctcatggcattgctgggacaggcactgaagtggcagcagcatcagggattgcttcctcctggtatgaccatagatttgtttcgaggcaaggcagctgtcaaagatgtggaagaagaaaagtttcctacacaactgagcaggcatattaagtttggtcagaaatcacatgtggagtgtgctcctcgtgccgaattcgtgcagcgcaggtcaaat

SEQ ID NO: 6906 - DNA, 888 bp, Homo sapiens
  SIMILAR (628)..(395): 861254mologous to Homo sapiens Similar to uncharacterized hematopoietic stem/progenitor cells protein MDS032,accession number BC006005,Smith-Waterman Score=306.
tttttttttttttttttgggcgggggtctttatttgagtttaggcatgattcgaatgaagaggatcaagctaatgaagatgaagcagacgataatgagcatggcccagagcagccagttgactgacttctgcgtgtgctgctccagccgttctgattccgttcttcagtttctccaggttctggtccgccattttcagtgagtgtgacagggtctggttgtccttcttgatgacactctgggcggccaggggtattggtcttgaagctcccgggccagtcctaagcatctcttccgccagcttttcctggaggttctgatgtcgctgcaggacgaggtcttagctcagctgccgactgcttctcactcactgggctggggaccctggccactccagttctcttccttacgtccaatctcaagcttctgcaagagtccgtgcctaagtagctcaattccgcatcttcgctggtgtaccgcgcccgtgactgcagatgcaccgtctttgtggcgggcactcgctctctggctgtggttggcacacggccaggggccaggaactggttggccagtgctttctctgaggaggaggtcagcttctcggcttgcagcatccccttcagaaaatcccaccttccaggaatattcattgatcacctcagaggccggtttgctggaaggcaggaagaagaaaaacaaaacctcgcgtggaccttcaggcgcttgaaacatgtcctctagggctcccacgtacttctccaggcgccactcgtccgggtcccgtttctccgctgccatcgcctcgcagcgggatagcagccgcaccaggtttagctccagcctcgacgccgccattatcgcccggccctacaccaccccttccgccggc

SEQ ID NO: 6907 - DNA, 1867 bp, Homo sapiens
  SIMILAR (1083)..(1018): 631254mologous to Homo sapiens Human secreted protein encoded by gene 75,accession number AAY76198,Smith-Waterman Score=70.
ttttttttttttttttttagcacaccacagccaccatacagacaggagtgcagcccctcctccctaggaacccccacccctactcttcactaggcagggcccatggctcatgaatgcagaacaggcaccccagccatggctgaggcatacccactgttagtgacacagagtttccctgagaagaggctcccaaaggcatacgacagccccttggccactgccacagttaacagtggctatccctcctgcccttgggactaggggaggacacaaagagcctaagggctaacacttcaaacttagagttacattcacaggccaccatatgggaggagggaggaccaacctcttcctccctgtggaggcctttcaacttccctggttccccaacaaacaggaaccccaagctcatgccagcagtgcagccgccccatcccagtggctgaacaccctcagtaacagtggctccacatttcttggaggtggagcccctaggggcaatcaaaagcctctctaccactacctctgccatggaacagtacttgctaccctcagactaacaaagaaacgaagacccaaagtgccttatccacgccttcgacaaactgcaatcaacccaaggagagaaggccagtctgtctcccatgggtcccgcccacctcctgttcatcaacagacagggaacccccagcttgggcccacagcacagaccctccatcctgtgatggcactgctaaagtcccttcctctgctggctccaagttggggaggaaacatcaccccagagctgcagtgggcagcctgggagcgtcaagccacaatctaaaggcaatgggagaggaacccacactttgacagcattgagagggagcaaggttacaactgtgaggaaaccacacgaccaaggaagaagctatcaactgatcaatacacttaagcaccacctactggatcacatcccaaagcttcaacaccaaaaatacgctgctgtgttagtccgttctcacgctgctatgaagaaatacccgagacagggtgacttataaaggaaagaggtttaattgactcacagttccatatggctggagagccctcaggaaacttacaaccatggcggaaggcaaaggagaaacaggcaccttcttcacagagtggcaggacagagtgagtgccagcaggggaaatgctggacacctataaaaccattaggtctcatgagactcactcactatcacgagaacagcatggggaaaaccacccctatgatccaattacctccacctggtcccacccttgacacgtggggattatggggattacaattcaaggtgagatttgggtggggacacagagccaaaccatatcgctaacatacccatccccatgaaatcaaacaaaagaagtcagcaacaaataaagaccttgcacaaagcttggaaccctatgaaaaccatcccagaatggaagtctattaattactcaaactacactgcagttaaagggattttttagcacgctgcagccgccatacaagcaggagtggcagcctttcctccctaggaacccccgcccctactcttcactaggcagggcccatggctcatgaatgcagaacagtcaccccagccatggctgagcatacccactgttagtgacacagagtttccctgggaagaggctcccaaaggcacacagagaaaagaaagacccaatgcaagaactccagtaattcaaatgaccagagtgtcacatgtcttaaaatgaccacatcagttctttaataagggttcttaaccaggctgagctggctgaaatgacagaaatcctcgtgccaagcttggcgtagtcatctaacaatgttttcaag

SEQ ID NO: 6908 - DNA, 381 bp, Homo sapiens
  misc_feature (1)...(381): n = a,t,c or g
tcttgcctgttattcccccccttttggggggcccnnnnnnnnnntcccccgagggccgggggttcaaacccccccggccccccaggtttaaccccctttccccctaaaaaaccaaaaaattactgggccannnnnnnnnnnccctttattcccccccctcgggagggttgggccgggggattctttttaccccggaggggaagggttcccttagccccgggttccaataacttagaattggggccccttccctcccccccggggtaccaaaaaaaaactcccttttcnnnnnnnnnnnnnnnggaaaagaaaaaaaggaaaaggtaataaaaggtgaatctagacaaatactacttttcaaagtttcaaaaatattatctg

SEQ ID NO: 6909 - DNA, 829 bp, Homo sapiens
  SIMILAR (20)..(220): 651254mologous to Homo sapiens neuronal thread protein AD7c- NTP,accession number AF010144,Smith-Waterman Score=214.
gagacagagtttcactcttattgcccaggctggagtgcaatggtgcaatctcgcctcactgcaacttccgtcgcccgggttcaagccattctcttgcctcagcctcccgagtagctgggattacaggtgtgtgccaccatgcctgactaattttcgtatttttagtagagatggagtttcatcatgctggccaggctggtcttgaactcctgacctcaggtgatccatccccgccttggtctccaaaagtgataggattaccaggcatggagccactgccacctggccctacatctttaaaaatttttaccccacgagacccagttaaaactcccttagtttaaaaaggaccagttgaattcaaatgccagctttgtaaatggaaaggttacagtttgtctgtccttcatggctgaagatcttaccaagttttaagaaaaacaggatagcaaatttacatctcaaaacagagaaaattaagcattttcaagaagaagttagggtatgttagagaaagattaaaaatggacaacaagtgatatagtttgagtatttgtcctcttcaaatctcatgttgaaatgttatccccagtgttggaggttgggtcaagtaggaggtttttgggtcatggtggcaggtccctcatgaatggctgggttctgtccttgtggtaatgagtgagttcttattccattagctcatgtgagagctggttttaaaaagagtctagtgtctttctcacctttctcttgctccctttttggccatgtgatatgcctgctcctcctcttcgccttccaccatgattgtaagcttctttttcttttc

SEQ ID NO: 6910 - DNA, 484 bp, Homo sapiens
  SIMILAR (75)..(287): 531254mologous to Homo sapiens putative p150,accession number U93570,Smith-Waterman Score=195.
agttgcaagtcccatgtttaaaggtggaagcggtcacctccccatctaggcttagggattcttagttggcctaggaaatccagctagtcctatctctcaaaacgagcctcaataaatttaagaaaattgaaattatatcaagcattctctcagaccacagtggaataaaactggaaatcaactccaaagggaaacttcaaaaccatgcaaatacatggaaattaaataacctgctcctgaatgagcactgggtcaaaaacaaaatcaagatggaaattaaaacattcttgaactgaatgacaataatggcacagcctatcaaaacctctgggatacagcaaaggcggtgctaagaggaaagttcacagccctaaacgcctacatcaaaaagtatgaaagagcacagacagacaatctaaggtcacacctcaaggaactagagaaacaacaaaccaaacccaaatccagcagaagaaaaaaaaaa

SEQ ID NO: 6911 - DNA, 1106 bp, Homo sapiens
  SIMILAR (198)..(596): 481254mologous to Mus musculus reverse transcriptase,accession number D84391,Smith-Waterman Score=308.
gccatcagaacctaagcacgtgtgcttgcttcagcagcacatgtactggaattagaatgatgcagagaagattagcatggtccctgcacaaggatgatgcacaaatccgtgaagtattccatataaaaacaaagaagaagaagaagcagctgcagcaaaacccgcccaaggagactctgagctcagacacacctagccctgccccaacccagtggtcctaccctacccaccctgtgcatggaactttctccaagacagaccatatgataggctacaaagcaagcctcaataaatttaaggaaaatgaaattatatcaagcactctctcagaccacagtggaataaaactggaaatcaactgcaaaaggaagcttcaaaactatgcaaatacatcgaaattaaataacctgttcctgaatgatcattggctcaaaaatgaaatcaagatggaaattaaaaaattcttcgaactgaatgacaatagtgacacagcctatcaaaacctctgggattcagcaaaggcggtgctaagaggaaagttcatagccctaaaagcctacatcacaaagtctgaaagagcacagacagacaatctaagaattaaaaacaaaaatcacatgatcatctcaatagatgcagaaaaagcatttgacaaaatccagcatccctttatgattaaaactctcagcaaaatcggcatacaaaggacatacctcaatgtaataaaagccatctatgacgaacccacagccaacataatactgaatggtgaaaagcatgctgttggcattgttgtaaacaaagaagctaagggcaagattcttgccaagagaattaatgtgcggattgagtacattaagcactctaagagccaagatagcttcctgaaacgcatgagggaaaatgatcagaaaaaggaagccaaaaagagaggtacctgggttcaactcaagtgccaggctgctccacccagagaagtgtactttgtgagaaccaatggaaaggagtctgggctgctggaacctatcccctatgaattcaagcataataggtgcaaaaacataaaagacctctggactgtaaaaatgtttctcttcattaagtag

SEQ ID NO: 6912 - DNA, 1205 bp, Homo sapiens
  SIMILAR (802)..(1086): 681254mologous to Homo sapiens putative p150,accession number U93572,Smith-Waterman Score=325.
  misc_feature (1)...(1205): n = a,t,c or g
gccatcagaacctaagcacgtgtgcttgcttcagcagcacatgtactggaattagaatgatgcagagaagattagcatggtccctgcacaaggatgatgcacaaatccgtgaagtattccatataaaaacaaagaagaagaagaaggaaaagggggagagtattacatcaagggaacatgccatgggacaaaaggatctgaacaacagccttcagccctggaccttccctctgacagagcctacccaaatgagaaggaaccagaaaactgactctggtaatatgaaaaaacaaggttccttaacacccccaaaagatcacactagctcaccagcaatggatccaaaccaagaagaaatccttgatttacctgaaaaagaattcgggaggttactaattaagctactcagggaggcaccagagaaaggtgaagcccaattgcatggaactttctccaagacagaccatatgataggctacaaagcaagcctcaataaatttaaggaaaatgaaattatatcaagcactctctcagaccacagtggaataaaactggaaatcaactgcaaaaggaagcttcaaaactatgcaaatacatcgaaattaaataacctgttcctgaatgatcattggctcaaaaatgaaatcaagatggaaattaaaaaattcttcgaactgaatgacaatagtgacacagcctatcaaaacctctgggattcagcaaaggcggtgctaagaggaaagttcatagccctaaaagcctacatcacaaagtctgaaagagcacagacagacaatctaagtactggaagttctaaccagagcagtcagacaagagaaagaaataaagggtattcaaattggaaaagaggaagtcaaactgttgctgttcgccgatgatatgatcatgtacctagaaaaccctaaagactcatccaaaaagctcctaggtctgatgaatgaattcagtagagtttcaggatacaaaatcaatgtacacaaatcagtagcactgctatataccaacagtgaccaagctgagaatcaaatcaagaactcagccccttttacagtagttgcaaaaaaaaataantaaataantaaataaaatacttaggaatacacctaaccaaggaggtgaaagacctctacaaggaaaactacaaaacactgctgaaagaaagcatagatgacataagcaaatag

SEQ ID NO: 6913 - DNA, 419 bp, Homo sapiens
  SIMILAR (207)..(416): 381254mologous to Canis familiaris ORF2,accession number AB012223,Smith-Waterman Score=122.
ccagagtcgaatgcgtagttggtttagagtatgataggtcagcggcggcaagtaacacaataacccaggtagttgtaactcacatccaggctttgtcccatgaacaatagcagcatatacatccttctcaaataagcatgagtcattttccaggatacaccttctgttaggccacaaattaggtctcaatcacttttaaaatgtaggtatcatgcaaactcttctccaaccccaataggataacgttagaaatcaataccagaagtaaaactgaaaaatccacaaatttgtggaagttaaacaacacactcttaaacagccaacagtccagagaagaaatcccaagggaaaaagaaaatacttagaatgaaaacgaaaacgcagcagcccagcacttacaggatgctgcaaaagcagcc

SEQ ID NO: 6914 - DNA, 432 bp, Homo sapiens
  misc_feature (1)...(432): n = a,t,c or g
aggatgggaacttgtgttaacccccgttccctaaaaggttttggcccaaggccagggggaaaaaaaaagccccaaagttccccattaaaaagtttccaaaaatggctttaatgggaggcaaccccgggggtgcgcccccctttttccggtttcttttttttaacttccgctttgggccaaaaaagnnnnnnnnnnnagcccccattttcttctttttgaaaaaagggctttaaataaattttggccccccaagggaaccgggtggttttaaccaaaaaccccagtttccctcagccccgggttttgaaccttggaaccccccccaggggcccaaaccttaaaaggttttttccnnnnnnnnnnnnncnnnnnnnnnnnnnnnnnnnnnnnnnnnnnnnnnnnnnnnnnnnnnnnnnnnnnnnnnnnnnnnnc

SEQ ID NO: 6915 - DNA, 493 bp, Homo sapiens
  SIMILAR (13)..(408): 871254mologous to Homo sapiens MHC Class II p41 specific region,accession number AAY39883,Smith-Waterman Score=633.
  misc_feature (1)...(493): n = a,t,c or g
gtgtggtgcaattccctgagacaccttacgaacaccatggagaccatagactggaaggactttgagagctggatgctccattggctcctgtatgaaatgagcaggcactccttggagcagaagcccactgacgctccaccgaaagtactgaccaagtgccaggaagaggtcatccacatccgtgctgtccacccgggttcattcaagcccaagcgcgacgagaacggcaactatctgccactccagtgctatgggagcatccgctactgctggcgtgtcttgcccaacggtacggaggtccccaacaccagaagccgcgggcaccatatctgcagtgagacactggaactggaggacccgtcttctgggctgggagggaccaagcatgatctgggcccagtccccatgtgagagcagcagaggcggtctataacatactgccagccccacacagctacagctttattgctcccttcagcccccagcccctccn

SEQ ID NO: 6916 - DNA, 379 bp, Homo sapiens
  SIMILAR (145)..(378): 481254mologous to Oryctolagus cuniculus translationally controlled tumor protein 3,accession number AJ277092,Smith-Waterman Score=172.
  misc_feature (1)...(379): n = a,t,c or g
cgcacgccccccgtggcggggacgacccattcgaacgtctgcccagtaaaagcctttctgcagctnnnnnnnnnnnnnnnnngaaaaaaacctaaaaccaaaaaaagaactgggcccgttagacagaacgtgagatggggccgctcgctatccccgggccgagcccccgctgaaggcccccagggcggaagtaccgaaagccctccccttctggtggggagatgcctgatccttggcctgcgggaaccaggggtcccaccagccgcctacgggaggttcctgagggattacatgaattctatccaagggaaacttgaaaaacaaagaccanaatgaggtttgccttctttgactggcgctgcggaactaatcaagcacc

SEQ ID NO: 6917 - DNA, 774 bp, Homo sapiens
  SIMILAR (6)..(95): 601254mologous to Rattus rattus invariant chain (AA 1- 280),accession number X14254,Smith-Waterman Score=75.
atggtgaccagcgcgaccttatctccaacaatgagcaactgcccatgctgggcggcgccctggggccccggagagccagaggccagcacagccatccagggacaccaggcccccacttcccagccccaaaatagcctcacccatgtgttccctcaaaaagggctagaaggctattaccccaatgcccctgctaccccagtctccaaaaactcccaagcctgtagcaagatgcgcatggccaccccgctgctgatgcaggcgctgcccatggagccctgccccaggggcccatgcagaatgccaccaagtatgcaacatgacagaggaccatgtgatgcacctgctccagtactgaccaagtgccggaagaggtcagccacatccctgctgtccacccgggttcattcaggcccagtgcgacgagaacggcaactatctgccactccagtgctatgggagcatggctactgctggtgtgtcttccccaacggcacggaggtccccaacaccaaagccgcgggcaccataactgcagtgcccccagcccctcccccatctcccacctgtacctcatcccatgagaccctggtgcctggctctttcgtcaccctggacaagacaaaccaagtcggaacagcagataacaatgcagcaaggcccgctgcccaatctccatctgtcaacaggggcgtgaggtcccaggaagtggcaaaagctagacagatccccgttcctgacatcacagcagcctccaacacaggctccaagacctag

SEQ ID NO: 6918 - DNA, 1205 bp, Homo sapiens
  SIMILAR (293)..(928): 491254mologous to Homo sapiens MHC Class II p41 specific region,accession number AAY39883,Smith-Waterman Score=374.
atgcacaggaggagaagcaggagctgtcgggaagatcagaagccagtcatggatgaccagcgcgaccttatctccaacaatgagcaactgcccatgctgggccggcgccctggggccccggagagcaagtgcagccgcggagccctgtacacaggcttttccatcctggtgactctgctcctcgctggccaggccaccaccgcctacttcctgtaccagcagcagggccggctggacaaactgacagtcacctcccagaacctgcagctggagaacctgcgcatgaagcttccccaagcctcccaagcctgtgagcaagatgcgcatggccaccccgctgctgatgcaggcgctgcccatgggagccctgccccaggggcccatgcagaatgccaccaagtatggcaacatgacagaggaccatgtgatgcacctgctccagaatgctgaccgccctgaaggtgtacccgccactgaaggggagcttcccggagaacctgagacacctttaagaacaccatggagaccatagacttggaaggtctttgagatgctggatgcaccacttggctccctgtttgaaatgagccagccactcccttgcagcaaaagcccactggacgctccaccgataagtactgaccaagtgccagggaagaggtcagccacatccctgctgtccacccgggttcatttcagggcccaagtgcggacgaggaacgggcaattatcttgccattccagttgcttattggggagcatcggctacttgcttggtgttgtcttttccccaacgggcacgggaggtccccaacaccagaagccgcgggcaccataacttgcagtgagtcacttggaacttggaaggacccgtctttcttggggcttggggtgttgaccaaggcaggatctgggcccagtccccattgtgagagcaagcagaggcggtcttcaacatcctgccagccccacacagctacagctttcttgctcccttcagcccccagcccctcccccatctcccaccctgtaaccttatcccatgagacctgggtgctgggttcttttgtgacctttggacaagacaaaccaagttgggaacagcagataacaatgcagcaaggccctgctgcccaatctccatctgtcaacaggggcgtgaggtccccagaagtggccaaaagctagacagatccccgttcctg

SEQ ID NO: 6919 - DNA, 339 bp, Homo sapiens
cttttgggcaaatagccggttactgtgtcaggcctggtagcgtgagcaggatgtatgactgtctggttcccccttagtcacagccacctctcaggtgcctggtctcagcaggggaaagactggaggccctgatcctgccctttggctttgccagcacccccgaccagccctatatctcctcctccaccttcaagatcatccctgagaagacctcgagccccgagtgggtgcccttggggctgtcctgggagcctccagcaggcccctgggccactccactggcaggactaccgtcctggagtgagggtgaggcttcccgggtagggcgtgcctcgtgcc

SEQ ID NO: 6920 - DNA, 464 bp, Homo sapiens
  SIMILAR (1)..(207): 1001254mologous to Homo sapiens SAMSN1,accession number AF222927,Smith-Waterman Score=364.
gatgaggaagatggagagaatgcccacccatatagaaacagtgaccctgtgattgggacccacacagagaaggtgtccctcaaagccagtgactccatggatagtctctacagtggacagagctcatcaagtggcataacaagctgttcagatggtacaagtaaccgggacagctttcgactggatgacgatggcccctattcaggtaccatactgtgaccaggccacactgcataccgatttcacgccaagtccctatgacactgactccctcaaaatctagaaaggagacatcatagacattatttgcaaaacaccaatgaggatgtggaccggaatggtgaacaataaagtgggaaacttccaattcatttatgtggatgtcatctcagatgaggaagcagcccccatgacaataaaggcaaaccgaaggagtatcagcatattatccaagactctgcagg

SEQ ID NO: 6921 - DNA, 2120 bp, Homo sapiens
  SIMILAR (313)..(573): 971254mologous to Homo sapiens SH3-SAM adaptor protein,accession number AF218085,Smith-Waterman Score=493.
ttatctcttttcttagatctaaatgaaaatgattttctaagtaacaacatacatacctatcaaggaaaaactctacaaggaacttcctatcaggccataaaatcaggcagtgaccctgtggaatcaatggggacattaaagcgactacagaaactggtttggactaagaaagccagagtgcagaatctggatgaggtgaaaccgacattaataaacctccaagatgaagatgacacgttgatttcttgtttgaaattaaccaagtcccgagaaaagaaagtgaatagtgttagcacgaggaggaaggaagaaatggagattagattggatactctttctgcatcactgggtagatccagcactttaaataactgcaacttggaagataaattagcttggtatgaaggtgaagcttacatgtggcatcactggaagccttttcctgaaaaccctctctggacatgtcttgatttccaaatagcacaagttggaccctgggaccactgctcctcttgtattcgccacacacgtctcaagtcttcctgctcagatatggatctcctacattcatgggtaacattatgcagacaggagagctctaatataacatgttggaccaaactgagagagaagaggggtgatcttttctgcattctgtttgtctgtttcatagacaggaaaacaccgaggaagtttagtgatcaacaagctttagaaattttgaaaattggaagaaagcagaaagtgcactcactaggagtagtcagaattcaaaatgctcaagagaaagccatccaatgtttcagagaaggagaaacatcaaaaaccaaagaatatgaatctgtaatcaagttttatcccaagcagcgaagcagcagttttgggaatttcgatcgttttcggaataattctttatcaaaaccagatgattcaactgaggcacatgaaggagatcccacaaatggaagtggagaacaaagtaaaacttcaaataatggaggcggtttggggtaaaaaaatgagagctatttcatggacaatgaagaaaaaagtggggtaaaaagtacatcaaagccctttctgaggaaaaggatgaggaagatggagagaatgcccacccatatagaaacagtgaccctgtgattgggacccacacagagaaggtgtccctcaaagccagtgactccatggatagtctctacagtggacagagctcatcaagtggcataacaagctgttcagatggtacaagtaaccgggacagctttcgactggatgacgatggcccctattcaggaccattctgtggccgtgccagagtgcatacggatttcacgccaagtccctatgacactgactccctcaaaatcaaggttattggggaacaggggtgtttggttacatggaaaggagacatcatagacattatttgcaaaacaccaatggggatgtggacaggaatgttgaacaataaagtgggaaacttcaaattcatttatgtggatgtcatctcagaagaggaagcagcccccaagaaaataaaggcaaaccgaaggagtaacagcaaaaaatccaagactctgcaggagttcctagagaggattcatctgcaggaatacacctcaacacttttgctcaatggttatgagactctagaagatttaaaagatataaaagagagtcacctcattgaattaaatattgaaaacccagatgacagaagaaggttactatcagctgctgaaaacttccttgaagaagaaattattcaagagcaagaaaatgaacctgagcccctatccttgagctcagacatctccttaaataagtcacagttagatgactgcccaagggactctggttgctatatctcatcaggaaattcagataatggcaaagaggatctggagtctgaaaatctgtctgacatgctccttacggatcctctgcagctctcgcctcagctccctcaacgtggggcagggaacatcaacagaaggaagacaggtttttctcttggccatggaaagctgaataaagagcagcggaaagataagaaacggctcatccaaggttgggaggtagctgaggaacttggaccttctgctgcttttggctga

SEQ ID NO: 6922 - DNA, 654 bp, Homo sapiens; identical to SEQ ID NO: 244
  SIMILAR (24)..(449): 1001254mologous to Homo sapiens alpha globin,accession number V00488,Smith-Waterman Score=733.
  misc_feature (1)...(654): n = a,t,c or g

SEQ ID NO: 6923 - DNA, 693 bp, Homo sapiens
  SIMILAR (46)..(426): 591254mologous to Homo sapiens alpha globin,accession number V00488,Smith-Waterman Score=284.
  misc_feature (1)...(693): n = a,t,c or g
cccgactcttctggtccccacagactcagagagaacccacccatggttgctgtctcctgcccgacaaagaccaacgtcaagggcccgcctgggggtaaggtcggcgcgcacgctggcgcagtatggcttcggaggccctgggaaggagttttcctgtccttccccaccaaccaagacctacttcccgcacttcgaccttgagccacggtttctgcccaggtttaaggggccacgggcaagaaggtggccgacgcgctgaccaacgccgtggcgcacgtggacgacatgcccaacgtcgctgtccgcccctgaagcgacctgcacgcgcacaagcttcgggtggacccggtcaacttcaagctcctaagccacttgcctgcttggttgaccctggcccgcccaccttccccggccgagtttcaccccttgcggtggcacgccttccctggaacaaagttcctgggcttcttgttgaagcaccgttgcttgaaccttccaaatacccgttaaagcttggaagccttcgggttggccatgctttctttgcccctttggggcttccccccagcccctcctcccctttcctgcacccgtacccccgtgggtcttttgaataaaattttgaattgggggggcaaaaaaaaaaaaaaaaaaaagatctttnaatttaagggggcggaaagtttatttcaa

SEQ ID NO: 6924 - DNA, 472 bp, Homo sapiens
  SIMILAR (253)..(2): 1001254mologous to Homo sapiens Similar to RIKEN cDNA 1110017H11 gene,accession number BC004290,Smith-Waterman Score=477.
  misc_feature (1)...(472): n = a,t,c or g
cccacggagtactggatcccagtgatgggaaagctgtggcccacatcaaaggaccggataagctggaagcagccgttgcggttggcgaagacgtgcagcaggccctggttgtcaccagcccagagctggggttcctggtaggacatgcagagcaggtaggagtccagctgcagacgctgcaggacgctgttggctcggcggtccaccaccaccagggtgtggtcctcgctgcctgagatgatgtgccggtcatccgccagcagggtcagcacgggtctggagtgtagttgctggtgcttcaacagggctgggccggctctggggtcgtagatggtcaccttcttgtcataggtgccagtcaccaggatgtcaggcaggtaggagaggcacagcacggctgagctggcctttatctcgccgaacctcgtgccgaattcctgcagcgcgggtctatccaagggcngggcgaagg

SEQ ID NO: 6925 - DNA, 419 bp, Homo sapiens
  SIMILAR (63)..(7): 411254mologous to Homo sapiens Similar to RIKEN cDNA 1110017H11 gene,accession number BC004290,Smith-Waterman Score=40.
  misc_feature (1)...(419): n = a,t,c or g
aattactggatcccagtgatgggaaaagctgtggccccacatcaaaggactgcaggaggaggatcaggcaacantcagtcgaggctctcccaaggcccgccctcccccacaccaccaggggctcgggtaggaaggaagcccggggggagggacagtcaggggcaggagctccagcagacccggataagctggaagcagccgttgcggttggcgaagacgtgcagcaggcccctggttgtcaccagcccagagctggggttcctggtaggacatgcagagcaggtaggagtccagctacgagagggacaagggacgggacagctcaggccgggctgggcctgcaacagtccccatccctccaggcccctggggagggcccacctgcagacgctgcaggacgctgttggctcggcggtcca

SEQ ID NO: 6926 - DNA, 264 bp, Homo sapiens
  SIMILAR (2)..(139): 761254mologous to Homo sapiens Human C3 protein mutant FT- 1,accession number AAW34623,Smith-Waterman Score=167.
  misc_feature (1)...(264): n = a,t,c or g
cgccggtgtcttctgcgacgcggggctgaccttcacgagcagcagtggccagcagaccgcccagagggcagaacttttgtgcccgcagccagccgccctccgacgccggtctgagcctttctcggtgcatttattggacatttctgtgtgagtacctcttggggacattctattattgcgttgaaaatctgcgtgatggcccctgcgtggtagctgatgccgtgtgnnnnnnnnnnnnnnnnnnnnnnnnnnnnnnnnnnnccg

SEQ ID NO: 6927 - DNA, 393 bp, Homo sapiens
  misc_feature (1)...(393): n = a,t,c or g
cggaatcttcatacattttgatggaaatataaaaattacaacgcttttggaaaacaatttgacaatttctgataaagttaagcctataaaaaaattacagagtggcacaannnnnnnnnnnnnnnnnnnnnnnnnnnnnnnnnnnnnnnnnnnnnnnnnnnnnnnnnnnnnnnnnnnnnnnnnnnnnnnnnnnnnnnnnnnnnnnnnntgggcagtgtactgcacatcatttatgctttcatgatgctataaaatataatgtaagccagcactttccctattaggaatctaaactacagaagtaaaaacatatgtttacacaaatcgttgttgtgaaatgtccacatcagctttgctcatagtagcaaaaaattgaaagcattccaaatgttt

SEQ ID NO: 6928 - DNA, 394 bp, Homo sapiens
  SIMILAR (82)..(393): 981254mologous to Homo sapiens hypothetical protein,accession number AL137532,Smith-Waterman Score=530.
cccatagtaatctgaattttgtgactgggttgctgatttggatgttcagaaatatgagcaaccatctccgaagcattgacatctatgggttctactgaagctcgcgttgattacatgggctcaagtatcctcatgggcatcttcagtaatgctgatcttaagcttcaggatgaatggaaagtcaacttgtataatacattggattcaagcataactgataaaagtgagattttcgtccatggagatttgaagtgggatattttccaagtaatgatatcaaggtcaaccacaccagatctgataaaaataggaatgaagctccaggaatttttcacacaacaatttgataccagcacacgagctctgtctacctggggaccagttccttaccttc

SEQ ID NO: 6929 - DNA, 372 bp, Homo sapiens
tttttttttttttttttgagagagtcccactcttgcccaggccagagtgctgtggtgccttcacagctcaccacagcctcaatctccatgggctcaagcaatcctgcctcccaagccaagcagctggtactgcaggcatgtgccaccgtgcctggctcctgaagactgaggttggtttagattaatgagttgcccaaattcagacagttcttaagtggcaaagttaggattccaacccaggtcaacataactaaagcccaaaccccatctcacccctctagggcatcaaatattggctgggtgcggtggtttatgtctgcctccccggagtgttgggattgcaggggtgggccaccacgcccgggctattta

SEQ ID NO: 6930 - DNA, 1744 bp, Homo sapiens
  SIMILAR (1565)..(1744): 611254mologous to Homo sapiens PRO1847,accession number AF119855,Smith-Waterman Score=181.
  misc_feature (1)...(1744): n = a,t,c or g
cctaaatttgcattgactatgttttagtgtatttataaatggtgaactcagtttctgaaattaaacttcttatttgcaattttctagtgctggcagacactggctttttatttttaggataagaaaacagcgcatattctttgtggtccattatctagagcccatacttgggcagcatttgaaatttcaccttaaccacagacagggctccagggaagtggagatgtaattcttacaacaacagttctgatcatggccatggtgatgactttccaggtctcgtgttcaagtggtgccagaatgcaggagccggtgggcagtcctgaggggttgccttgtacgcagcctctgtgcacagctcttcctggagtcctcttacccggtagctgtgcgcttgttcccgtgagaacagcctgcttgcaaagtgcacatgagagctgctcagagacagagcctgtgagactgcataggatgccactctctctgagtatcccaacctcttggatgtatacagagattttatagaatagaacctatagcttctaccatgagttatatgagtcaagatcctgcctaacctgaaattattagggatttactcagccctgctgccagctaacagtggagttatgtcactgatctgaaggtcactgttaagggcttctgctgccatccttgtgggttgctacctttaagtcgcataactctagctgtatcatcctcttcacctgtcattcttctggaggggtctcaggacaaggggcccnggggatggagcccaccnggggtattcaccaacaggcctgacttgatactaagtgattaagttttccaagttgtcccactgcccattcaaagtccagcccctggagtgtatttgttctcagtcctaaccctggggcccagagattggtcccgaggttgagaattccttcctcctcatccttggtgttgctttctccaaatgattgttttagactagccaaaaatgcctgtggcaaaagagctcagaaatccaatttggataccaaaggtttctcatgttaatttctcagcccccaaagaagcaccctactccctgaaccctagacagggaagtattgttttcagtcacagaaaagcttttcctggggtaccctcngggttagcactttcctactctctgatatttcctatggtacatagctttttattgttgtaaatccctttcttaatggttaaataggattgttagcaactatgggtttgcagttttctgagtaggtgagttttgaatatgggtaaatcagaataatgagacaacttgttaatctctttaatactaaaaataaattactcttctatttcgagggacttaggtaatttaaaataaaccttcaatttatggtcttctgttttgaagctcatgggaaaattgtgatcaaaagggctatgggaagggcagaccccgccaatgatttctcttcacctgtcttaagattaaataaaaaagagtgtcctggcagttatcttgaggtggggaaggaggtgatgaaacattagtttgtgaaatccaaggccctggctttctttctttctttttttttttttttttttttgaaacagtctctctctgtcacccaggctggcgtgcaatggcgcagttgactcactacagcctctgcctcccaggttcaagcgattctcatgccttagcctcccaagtagctgggattacaggtgtgtgccgcaatgcccagctaat

SEQ ID NO: 6931 - DNA, 483 bp, Homo sapiens
  SIMILAR (92)..(250): 881254mologous to Homo sapiens sorting nexin 11,accession number AF121861,Smith-Waterman Score=246.
tcggagaaccaagaacaggaggaggtgattacagtgcgtgtttatgacccccgagtgcagaatgagggctcctggaactcttatgtggatgtataagatattcctccataccaacagcaaagcctttactgccaagacttcctgtgtgcggcgccgctaccgtgagttcgtgtggctgagaaagcagctacagagatatgctggattggtgcctgtttctgaacttcctgggatgccaaccttatacggcctttattgatgagtacattggtatatcgtaactatggtatgcttctttcaccaggatatttgatcaagatatgttgatttctctattttctcttgcactcctccttgtagttgtgccattccgtctcttagtcatgattgatttgagtcgttttttttacactgccctatgctatttatttattatcagatctttttgactatcttatggccttttgtacatatgttttatta

SEQ ID NO: 6932 - DNA, 830 bp, Homo sapiens
  SIMILAR (12)..(260): 451254mologous to Homo sapiens transformation-related protein,accession number L24521,Smith-Waterman Score=155.
tgtgctgtcaccccaggctggcatgcagtgggcatgattcttggcttattgccaatctctgcctcccaggttccaagagattcccgtgcctcagcctcccgagtagctgggattacaagcagccctgtcaccacacccggataattttggtatttttagtagagaccgaggtttcaccatgttggccagactggtctcgaaatctccggaactcgggagatccacccactttggcctcccaaaagtgctgggattataaggcatgagcaactacacccaggctaagttttcctttttcaaaaattgatttgtgctataaggaatcacattaaaattattaaggaaggattcatgtttttaaagttttctttcaggcatttttaaagcaccctcaataaactcagaaatacttataaaaaccaatatgctaatcataaatacttcagataattacatctcgttagtacaatcaactgctttatataaactaagaactatttaattaagactactatatgtcactataagacttaaaaacaatacatatgagtatatttttacatactcaaccactatgatgatctattaattcagactgttcttccccagaggaaaggtggtatcctataaagagcaattgatcactgctgaaaacttgtatggtgttaaagcattatgaagagcattctggtccagcttcctcatctgaaaatggcaaaaatgctttctctggacccctctcaaagatatcgtaatagtaagtaaacaatatgaagggtctctagatcgaaaaatcactataaaaaatatatggaacactttcatcacga

SEQ ID NO: 6933 - DNA, 375 bp, Homo sapiens
  SIMILAR (47)..(370): 481254mologous to Mus musculus alpha-NAC, muscle-specific form gp220,accession number U48363,Smith-Waterman Score=205.
gcgcgcagcattgactccttccacttacaaaggggccccatcccccaaagagctcctcattccaccaggggtgacttcggcttcccccaaagaggcacctactcctccagctgtgactcctccatcccccgaaaagggcccagcaactccagcccccaaagggactcccacttccccacctgtgactccttcctccctcaaagactcccctacttccccagcttctgtcacatgtaaaatgggggccactgttcctcaagcatctaaagggcttccagcaaagaaaggccccacagctctgaaagaagtacttgttgccccagctccagaaagcacgccaatcatcacagctcccactcggaaaggtccacagat

SEQ ID NO: 6934 - DNA, 425 bp, Homo sapiens
  SIMILAR (374)..(261): 1001254mologous to Homo sapiens Human nucleic acid binding protein,accession number AAW73576,Smith-Waterman Score=215.
  misc_feature (1)...(425): n = a,t,c or g
tatttttccccccccaaaaaggggttttttttctaaaaaaaagggggtggtatttaatccccccacnnnnnnnnnnnggttttttgcccgtccccccccgggggtgggtccccccccacaaatnnnnnnnnnnnnnnnnnnnnnattttatttttatannnnnnnnnnnnnnnannnnnnnnnnnnnaatttttcnnnnnnnnnnnnnnnnnnnnnnnnnnnnnnnnnnnnnnnnnangccagcagcatccgcacctttatccgcactgtaggctgggctgggcagagcgcgcctggccccggggacaccactgtatcactataaaacccagaggaaacaaggaacaagtgcaagtccggggagagggaccacttgccacactcctcagtcacctccccttccaggtcatcatcgatgtccttgg

SEQ ID NO: 6935 - DNA, 253 bp, Homo sapiens
  SIMILAR (200)..(21): 661254mologous to Homo sapiens Human nucleic acid binding protein,accession number AAW73576,Smith-Waterman Score=223.
gcacctttatccgcactgtaggctgggctgggcagacgcgcctggccccggggacaccactgtatcactataaaacccagaggaaacaaggaacaagtgcaagtccggggagagggacactgtcacgcagagaggtcactgttatcaaaacgctcctgggtcgtacacttcagccaccacttggggccacaaaaccagcgccacccaggtcaaagaggttcatgggagacacagcatctttggacgactgggc

SEQ ID NO: 6936 - DNA, 563 bp, Homo sapiens
  SIMILAR (542)..(330): 941254mologous to Homo sapiens Human nucleic acid binding protein,accession number AAW73576,Smith-Waterman Score=328.
  misc_feature (1)...(563): n = a,t,c or g
tttttttttcagggccagcagcatccgcacctttatccgcactgtaggctgggctgggcaaagcgcgcctggccccggggacaccactgtatcactataaaacccagaggaaacaaggaacaagtgcaagtccggggagagggaccactgtcacgcaaagaggtcactgttatcaaaacgctcctggtcgtacacttcagccaccaccttgcggccagcaaaccagcggccattgagggcctggatggccttatgagtctcagaggctatggaaaactccacaaagatcttgacaatgatttctgcatcctcctcctcgccttgccacactcctgcttgcggagcagcttctgcatcaccatgtgtcgggcgctactgcccgagatgctcatgtgctcctgctcgctcagcatctctggccgctctgactcgggaaacagctcctcttcttccttctccttcttgggctccaggagaccccacgttggagggctggccagggaatggttcaccactcccaccgagggggatgtgaccgggatagaggacgggctggngtccac

SEQ ID NO: 6937 - DNA, 1883 bp, Homo sapiens
  SIMILAR (2)..(1708): 791254mologous to Homo sapiens poly-U binding splicing factor PUF60,accession number AF190744,Smith-Waterman Score=2073.
  misc_feature (1)...(1883): n = a,t,c or g
ggcgaccatagctctccaggtcaatggccagcaaggaggggggtccgagccggcggcggcggcggcagtggtggcagcgggagacaaatggaaacctccacagggcacagactccatcaagatggagaacgggcagagcacagccgccaagctggggctgcctcccctgacgcccgagcagcaggaggcccttcagaaggccaagaagtacgccatggagcagagcatcaagagtgtgctggtgaagcagaccatcgcgcaccagcagcagcagctcaccaacctgcagatggcagcagtgacaatgggctttggagatcctctctcacctttgcaatcgatggcggctcagcggcagggggcgctggccatcatgtgccgcgtctacgtgggctctatctactatgagctgggggaggacaccatccgccaggcctttgccccctttggccccatcaagagcatcgacatgtcctgggactccgtcaccatgaagcacaagggctttgccttcgtggagtatgaggtccccgaagctgcacagctggccttggagcagatgaactcggtgatgctggggggcaggaacatcaaggtgggcagacccagcaacatagggcaggcccagcccatcatagaccagttggctgaggaggcacgggccttcaaccgcatctacgtggcctctgtgcaccaggacctctcagacgatgacatcaagagcgtgtttgaggcctttggcaagatcaagtcctgcacactggcccgggaccccacaactggcaagcacaagggctacggcttcattgagtacgagaaggcccagtcgtcccaagatgctgtgtcttccatgaacctctttgacctgggtggccagtacttgcgggtgggcaaggctgtcacaccgcccatgcccctactcacaccagccacgcctggaggcctcccacctgccgctgctgtggcagctgctgcagccactgccaagatcacagctcaggaagcagtggccggagcagcggtgctgggtaccctgggcacacctggactggtgtccccagcactgaccctgggcccagccccttggcacttttccccaggctgtcaatggctgcccaggcacctggagtccatcaacagttgtgaccccagcccgtcctcctattnccggtcacccataccctcggtgggagttgtgaaaccccaatcctgcccagccctccaaccctgtggtctcctggagcccaagaaggagaaggaagaagaggagctgtttcccgagtcagagcgcccagagatgttaagcgagcagaagcacatgagcactctggggcagtagcgcccgacacatggtgatgcagcaagcctgctccgcaagcaggagtctacagtgatggttctgcgcaacatggtggaaccccaaggaacatcgaatgaatgaccctggaaagggagggtgacaagaggagtgtggcaaagttcggggcccgtgaaccgcgggtctcatctaccaaagagaaagcaaggcggaggaggaggatgcaagaaatccattgtccaagatctttttgtgagttttccaatagcctctgaagaactcaaataaggccatccaaggccctcaaatggcccgctggttttgctggcccgcaaggtggtggttaaagtgtacgacccaggagccgttttgataacaagtgacctctctgncgtgacagtggtccctctccccggacttgcacttgttccttgtttcctctgggttttatagtgatacaagtggtgtccccggggccaggcgcgcttctgcccagcccagcctggagtgcggataaaggtgcggagtgctgctggccctgaaaaaaaaaaaaaaaaaactcgag

SEQ ID NO: 6938 - DNA, 638 bp, Homo sapiens
cctcccagccaggggtctggtggaggtctgactcctctgtcctgtgcccttggatgtggtatggaggaggggagaataaggcagcccccaggttctgggcgcaccccactccctacgtgggaagggcaggtggctccctctctagcctgccgtggtggcagggtccacagaccccactggggcccaacaacgtgaggccctgccttgccctgcactgggcgcctgtgtacccagtctcccaaggccttgtcccacctcacagccaagctgctcacctggatgcctgccgctacggcccagctttgctaccctgaggactcagctgcactgtgcagggaaggttctaggtccagggaaagccttgggggatgggcagggctgtctgcccagcacctgggccagtgaggctcgaggaaaggcccgtctgtggcacaccctgtctctgcctccaccctgccaggatgactcctgcctgggggtccatacactgtctcccttcccatggtgggtgtccctgcctgccagtaaatgctcccagctggctcggacaaccatccccatgggccagggcccttctccaatgatgggtggtactgggagctgagggcctccaccccaccctcaggacgacagtggga

SEQ ID NO: 6939 - DNA, 407 bp, Homo sapiens
  SIMILAR (128)..(403): 931254mologous to Homo sapiens creatine kinase-B,accession number M16364,Smith-Waterman Score=459.
  misc_feature (1)...(407): n = a,t,c or g
tcaagagcatgacggaggcggagcagcagcagctcatcgacgaccacttcctcttcgacaagcccgtgtcgcccctgctgctggcctcgggcatggcccgcgactggcccgacgcccgcggtatctgattgaaactctcttcaagtctaaggactatgagttcatgtggaaccctcacctgggctacatcctcacctgcccatccaacctgggcaccgggctgcgggcaggtgtgcatatcaagcatgagaagttctcggaggtgcttaagcggctgcgacttcagaagcgaggcacaggcggtgtggacacggctgcggtgggcggggtcttcgacgtctccaacgctgaccgcctgggcttctcagaggtggagctggtgcagatggtggtggacggagtgaacn

SEQ ID NO: 6940 - DNA, 407 bp, Homo sapiens
  SIMILAR (1)..(153): 1001254mologous to Rattus norvegicus creatine kinase- B,accession number M57664,Smith-Waterman Score=249.
  misc_feature (1)...(407): n = a,t,c or g
aagttctcggaggtgcttaagcggctgcgacttcagaagcgaggcacaggcggtgtggacacggctgcggtgggcggggtcttcgacgtctccaacgctgaccgcctgggcttctcagaggtggagctggtgcagatggtggtggacggagtgcccaccatgcacccctgatgttcgccgtctggcgagcccttagccttgctgtagagacttccgtcacccttggtagagtttatttttttgatggctaagatactgctgatgctgaaataaactagggttttggcctgcccccggnnnnnnggnngnggggggnggngngccccgnnnngnnnnnaagagtttgggcccctttaaaaaaaccaaatttacaccccccgcctcacaactttattttttttggggcg

SEQ ID NO: 6941 - DNA, 411 bp, Homo sapiens
  SIMILAR (1)..(99): 961254mologous to Homo sapiens creatine kinase,accession number M21494,Smith-Waterman Score=180.
tcctacgaagttttcaaggaactctttgaccccatcatctcggatcgccacgggggctacaaacccactgacaagcacaagactgacctcaaccacaaacctcaagggtggagacgacctggaccccaactacgtgctcagcagccgcgtccgcactggccgcagcatcaagggctacacgttgcccccacactgctcccgtggcgagcgccgggcggtggagaagctctctgtggaagctctcaacagcctgacgggcgagttcaaagggaagtactaccctctgaagagcatgacggagaaggagcagcagcagctcatcgatgaccacttcctgttcgacaagcccgtgtccccgctgctgctggcctcaggcatggcccgcgactggcccgacgcccgtggcatctg

SEQ ID NO: 6942 - DNA, 1499 bp, Homo sapiens
  SIMILAR (360)..(1211): 431254mologous to Homo sapiens creatine kinase-B,accession number L47647,Smith-Waterman Score=401.
gctgccgacggacggagcgcccccgcccccgcccggccgcccgcccgccgccgccatgcccttctccaacagccacaacgcactgaagctgcgcttcccggccgaggacgagttccccgacctgagcgcccacaacaaccacatggccaaggtgctgacccccgagctgtacgcggagctgcgcgccaagagcacgccgagcggcttcacgctggacgacgtcatccagacaggcgtggacaacccgggccacccgtacatcatgaccgtgggctgcgtggcgggcgacgaggagtcctacgaagtgttcaaggatctcttcgaccccatcatcgaggaccgggacggtggctacaagcccagcgatgagcacaagaccgacctcgaccccgacaacctgcaggggggcgacgacctggaccccaactacagtgctgagctcgcgggtgcgcacgggccgcagcatccgtggcttctgcctccccccgcactgcagccgcggggaaggccgcgccaatcgagaagctcgcggtggaaagccctgtccagccttggacggcgacctggcgggccgatactacgcgctcaagagcatgacggaggcggagcagcagcagctcatcgacgaccactttctcttcgacaagcccgtgttcgcccctgctgctggggctcgggcatgggcgccgcaactggcccgacgcccgcggtatctggcacaatgacaataagaccttcctggtgtgggtcaacgaaggaggaccacctgcgggttcatctccatgcagaaaggggggcaacatgaaggaggtgtttcacccgcttctgcaccggcctcacccagattgaaactctcttcaagtctaaggaactatgagttcatgtggaaccccttccactgggctacttccctccccctgccattgcaacctggggcaccgggctgcgggccaggtttgcatattcaagctgcccaacctggggcaaggcatgagaaagttctcggaagttgcttaagccggctgccgaactttcaaaaagccgaaggccaccaggcggtgtggaacacggtctgcggtgggcgggggtcttcgacgtcttccaaacgctgaaccgccctgggccttctcagagcgtggagcttggtgcagatgmgtggtggacggagtghaagctgcttcatcgagatggaacagcaggctggagcagggccaggccatcgacgacctacatgcctggcccaagaaatgaagcccggcccacaccgcgacaaccagccctgctgcttcccaactctatgtgcctggggcagtgcccacacatgcaccacctgaatgttcgccgtctggcgagcccttagccttgctgtaggagactttccgtcacccttgtaggagtttatttttttttgatggctaagatactggctgatgctgaaataaaactagggttttggcctgccaaaaaaaaaaaaaaaaaaaaaaaaaaagtcgtatcga

SEQ ID NO: 6943 - DNA, 584 bp, Homo sapiens
  SIMILAR (1)..(51): 881254mologous to Homo sapiens LIMK-2,accession number D45906,Smith-Waterman Score=74.
gagcagctgccctactttgtcacgttcatctccatgccggccaccactgaggcaggcggggcttctccttgtccgtggagagtgcctgctccaactacgctaccactgtgcaagtgaaagtggtcaaccggatgcacatcagtcccagagctctaggaactcttcatcacaactagatttgcctcttctaagtgtctatgagcttgcaccatatttaataaattgggaacgggttcggggtattaatgcaatgtgtggtggttgtattggagcagggggaattgataaaggagagtggttgctgttaatattatcttatctattgggtggtatgtgaaatattgtacatagacctgatgagttgtgggaccagatgtcatctctggtcagagtttacttgctatatagactgtacttatgtgtgaagtttgcaagcttgctttacggctgagccctggactcccagcagcagcacagttcagcattgtgtggctggttgtttcctggctgtccccagcaagtgtaggagtggtgggcctgaactgggccattgatcagactaaataaattaagcagttaacatc

SEQ ID NO: 6944 - DNA, 497 bp, Homo sapiens
  misc_feature (1)...(497): n = a,t,c or g
tctgtcacgctattctcaatgccggccaccatgaagggcaggcggggcttctccgtgtccgtggagagtgcctgctccaactaattntgcctcttctaagtgtctatgagcttgcaccatttttaataaattgggaatgggtttggggtattaatgcaatgtgtggtggttgtattggagcagggggaattgataaaggagagtggttgctgttaatattatcttatctattgggtggtatgtgaaatattgtacatagacctgatgagttgtgggaccagatgtcatctctggtcagagtttacttgctatatagactgtacttatgtgtgaagtttgcaagcttgctttagggctgagccctggactcccagcagcagcacagttcagcattgtgtggctggttgtttcctggctgtccccagcaagtgtaggagtggtgggcctgaactgggccattgatcagactaaataaattaagcagttaacataactgg

SEQ ID NO: 6945 - DNA, 3711 bp, Homo sapiens
  SIMILAR (115)..(2028): 1001254mologous to Homo sapiens LIMK-2,accession number D45906,Smith-Waterman Score=3406.
gtggtcttcccgcgcctgaggcggcggcggcaggagctgaggggagttgtagggaactgaggggagctgctgtgtcccccgcctcctcctccccatttccgggctcccgggaccatgtccgcgctggcgggtgaagatgtctggaggtgtccaggctgtggggaccacattgctccaagccagatatggtacaggactgtcaacgaaacctggcacggctcttgcttccggtgttcagaatgccaggattccctcaccaactggtactatgagaaggatgggaagctctactgccccaaggactactgggggaagtttggggagttctgtcatgggtgctccctgctgatgacagggccttttatggtggctggggagttcaagtaccacccagagtgctttgcctgtatgagctgcaaggtgatcattgaggatggggatgcatatgcactggtgcagcatgccaccctctactgtgggaagtgccacaatgaggtggtgctggcacccatgtttgagagactctccacagagtctgttcaggagcagctgccctactctgtcacgctcatctccatgccggccaccactgaaggcaggcggggcttctccgtgtccgtggagagtgcctgctccaactacgccaccactgtgcaagtgaaagaggtcaaccggatgcacatcagtcccaacaatcgaaacgccatccaccctggggaccgcatcctggagatcaatgggacccccgtccgcacacttcgagtggaggaggtggaggatgcaattagccagacgagccagacacttcagctgttgattgaacatgaccccgtctcccaacgcctggaccagctgcggctggaggcccggctcgctcctcacatgcagaatgccggacacccccacgccctcagcaccctggacaccaaggagaatctggaggggacactgaggagacgttccctaaggcgcagtaacagtatctccaagtcccctggccccagctccccaaaggagcccctgctgttcagccgtgacatcagccgctcagaatcccttcgttgttccagcagctattcacagcagatcttccggccctgtgacctaatccatggggaggtcctggggaagggcttctttgggcaggctatcaaggtgacacacaaagccacgggcaaagtgatggtcatgaaagagttaattcgatgtgatgaggagacccagaaaacttttctgactgaggtgaaagtgatgcgcagcctggaccaccccaatgtgctcaagttcattggtgtgctgtacaaggataagaagctgaacctgctgacagagtacattgaggggggcacactgaaggactttctgcgcagtatggatccgttcccctggcagcagaaggtcaggtttgccaaaggaatcgcctccggaatggcctatttgcactctatgtgcatcatccaccgggatctgaactcgcacaactgcctcatcaagttggacaagactgtggtggtggcagactttgggctgtcacggctcatagtggaagagaggaaaagggcccccatggagaaggccaccaccaagaaacgcaccttgcgcaagaacgaccgcaagaagcgctacacggtggtgggaaacccctactggatggcccctgagatgctgaacggaaagagctatgatgagacggtggatatcttctcctttgggatcgttctctgtgagatcattgggcaggtgtatgcagatcctgactgccttccccgaacactggactttggcctcaacgtgaagcttttctgggagaagtttgttcccacagattgtcccccggccttcttcccgctggccgccatctgctgcagactggagcctgagagcagaccagcattctcgaaattggaggactcctttgaggccctctccctgtacctgggggagctgggcatcccgctgcctgcagagctggaggagttggaccacactgtgagcatgcagtacggcctgacccgggactcacctccctagccctggcccagccccctgcaggggggtgttctacagccagcattgcccctctgtgccccattcctgctgtgagcagggccgtccgggcttcctgtggattggcggaatgtttagaagcagaacaagccattcctattacctccccaggaggcaagtgggcgcagcaccagggaaatgtatctccacaggttctggggcctagttactgtctgtaaatccaatacttgcctgaaagctgtgaagaagaaaaaaacccctggcctttgggccaggaggaatctgttactcgaatccacccaggaactccctggcagtggattgtgggaggctcttgcttacactaatcagcgtgacctggacctgctgggcaggatcccagggtgaacctgcctgtgaactctgaagtcactagtccagctgggtgcaggaggacttcaagtgtgtggacgaaagaaagactgatggctcaaagggtgtgaaaaagtcagtgatgctccccctttctactccagatcctgtccttcctggagcaaggttgagggagtaggttttgaagagtcccttaatatgtggtggaacaggccaggagttagagaaagggctggcttctgtttacctgctcactggctctagccagcccagggaccacatcaatgtgagaggaagcctccacctcatgttttcaaacttaatactggagactggctgagaacttacggacaacatcctttctgtctgaaacaaacagtcacaagcacaggaagaggctgggggactagaaagaggccctgccctctagaaagctcagatcttggcttctgttactcatactcgggtgggctccttagtcagatgcctaaaacattttgcctaaagctcgatgggttctggaggacagtgtggcttgtcacaggcctagagtctgagggaggggagtgggagtctcagcaatctcttggtcttggcttcatggcaaccactgctcacccttcaacatgcctggtttaggcagcagcttgggctgggaagaggtggtggcagagtctcaaagctgagatgctgagagagatagctccctgagctgcggccatctgacttctacctcccatgtttgctctcccaactcattagctcctgggcagcatcctcctgagccacatgtgcaggtactggaaaaccctccatcttggctccccagagctctaggaactcttcatcacaactagaatttgccctccttcctaagtgcctatgaaccttgcacccataaatttaataatttgggaatgggtttggggtaattaatgccaatgtgtggtggttgtattggagcaagggggaattgataaaggagagtggttgcctgttaatattatcgttatctattgggtggtatgtgaaatattgtacatagacctgatgaagttgtgggacccagatgtcatctcctggtcagagtttacttgctatatagactgtacttatgtgtgaaagtttgcaagcttgctcttcaggctgagccctggactcccagcagcagcaccagttcagcattgtgtggctggtctgtttcctggctgtccccagcaaagtgtaggagtggtgggcctgaactgggccattgatcagactaaataaattaagcagttaacataaaaaaaaaaaaaaagggcggccgct

SEQ ID NO: 6946 - DNA, 1136 bp, Homo sapiens
  SIMILAR (866)..(1006): 971254mologous to Mus musculus putative,accession number AK005094,Smith-Waterman Score=232.
taaattaacggccgcgtcgacctctcctgggcagttaggaaaatcaaattgctgcaaaagtgattgagcaaaattccaccaaaacagagaatattcttattaatgcatttagaaataaatacagcagataaacctgaggagtaaaaatagcagttgatatttattgggcacttaccatgtgccaggcactgtcccaagcactttatgtgtattagttcactgacttctcacggcagccctgggagataggtattcttttcatccccactctagagatgaagacactgagccctgaggtgttaacttgctccaggttgcatagtaagtggcagaggcaggactgatacataagcaggctgacccagggcccgcactctcaacccctgccccacactgacccaccccctatcttgtcagccataccggtggctccaccaccagaccagcccaccccaatcccatccccatgcgcactgaggaatcagacttcctctcagcttcttgtggcctttctagaacaaaaggatctacaactgcatgatgatctcttcaagaagagtgatctctctctccccaattgtcctgcttcagatttttgattgtccccggctgaagttttctgagattccccagcgcctcacagccctgctattgccccctgacccaattgtcatcaaccatgtcatcaggtgaggtggccccagcttgcttctcagaccagggaatgatctcgttcctgccttccctgcccctccctctcctcccactcccatctcttctccctccctgttggatctgccccagccccggggccctggggcccgtatgggggcatcgtggacacgaagggctggacttccctggcagcgtggacccttcagaccagaagaagacggcgtgctatgacattgacgtggaggtggaggagccattaaaggggcagatgagcagcttcctcctatccacggccaaccagcaggagatcagtgctctggacagtaaggtggggcccaagcccagagctggagtgggacattaacccagagatgatagaggagacttttctgagaccagggtgtggttgcagatgagcagtctgggttaaattaaaaaaaaaaaaaaaaaagtcgtatcga

SEQ ID NO: 6947 - DNA, 1783 bp, Homo sapiens
  SIMILAR (150)..(377): 281254mologous to Homo sapiens SWI/SNF complex 60 KDa subunit,accession number U66619,Smith-Waterman Score=67.
  misc_feature (1)...(1783): n = a,t,c or g
gaattccggcgcaggcgcccgagccgagcgccgagcagggagcgggcggccgcgctccgggccggggtcccgggggagcagatcctcagaatggcccttggtgctgcaggcgcggtgggctccgggcccaggcaccgagggggcactggatgactctccaggtgcaggaccctgccatctatgactccaggtcttcagcacccacccaccgtggtacagcgccccgggatgccgtctggagcccggatgccccaccaggggcgcccatgggccccccgggctccccgtacatgggcagccccgccgtgcgacccggcctggcccccgcgggatggagcccgcccgcaagcgagcagcgcccccgcccggcagagccaggcacagagccagggccagccggagcccaccgcccccgcgcggagccgcagtgccaagaggaggaagatggctgacaaaatcctccctcaaaggattcgggagctggtccccgagtcccaggcttacatggacctcttggcatttgagaggaaactggatcaaaccatcatgcggaagggggtggacatccaggaggctctgaagaggcccatgaagcaaaagcggaagctgcgactctatatctccaacacttttaaccctgcgaagtctgatgctgaggattccgacggcagcattgcctcctgggagctacgggtggaggggaagctcctggatgatcccagcaaacagaagcggaagttctcttctttcttcaagagtttggtcatcgagctggacaaagatctttatggccctgacaaccaacctcgttgagtggcatcggacacccacgacccaggagacggacggcttccaggtcaaaccggcctggggacctgagtgtgcgctgccacgctgctcctcatgctggactaccagcctccccagttcaaactggatccccgcctagcccggctgctggggctgcacacacagagccgctcagccattgtccaggccctgtggccagtatgtgaagaccaacaggctgcaggactcccatgacaaagaaatacacaatgggggacaagtatttcccgcagaattttgaattgctccccggctgaagtttacttagattccccagcgcgtcacagccgtgctaatagccccctgacccaattgtcatcaaccatgtcatcagcggtggacccttcagacccagaagaagacggtcgtgctatgacattgacgtggaggtggaggagcccattaaaggggccagatgagcagcttcctcctatccacggccaaaaccagcaggagatcagtgctctggacagtaagatccatgagacgattgagtccataaaccacgctcaagatccaagagggacttcaatgctaagctttctccggagaccccataagctatgtgccagaacctggctccgctcccaagagccggggacctcaaggtgattgacagatgtagccggcaaccctgaagaggagcgccgggcttgagttctaccaccaagccctggtcccaggaggccgtcagtcgctacttctacttgcaagatccaagcaagcgcaggcaaggaagcttggangcaagtcgcttggtttgtgccgcaacaccttaaggaagcccaaaaataaagcaagcaccgacggaacttttcaagcccgtgttcccggggcccaagattttgccccgggctccagcatcacttcttcttgccaactttggggttttgggggctggattaaaagtcattcatctgacaaaaaaaaaaaa

SEQ ID NO: 6948 - DNA, 1306 bp, Homo sapiens
  SIMILAR (1305)..(904): 941254mologous to Homo sapiens muscle specific ring finger protein (MURF-2),accession number AJ291712,Smith-Waterman Score= 637.
ttttttttttttaaaaacatcatttatttaagagttcatataaagttacacttatgttctgaaggaggcattatggtgggacaaatattaacaaagcatgatttaaatatatatatatttaatgtgtgatatgtttgtatatatatttaaacacatgcaattgttctacaatttaccagattggtgccacagtgaataaaagagaaagtagacagcttttgctggaagattcaactaaagtgcctaatacgtgaaaatctaaaactaatattagaaaaatgtcacaagagatgcccaggccttcagctttctggaccatgaaagtgtcaccaaattcaaagaacatttctgaatgtacatccagtgacatctgttatgcaaaagaggaaaactttgtgaaacatttcatagctttggtcaatgatttactttttgtccatgtattgataaatcagtcacttctgagttgacactgattttcactgaccacctgcactgttaaagagtaaaggaaatgaaagctaccataatataataacaaaaagtcagtgcctatgagagacaaaagcatagtgaccacttttttcaccatttgccacttgttagtgacatacacatgtaccacacctacacacccttcacaacattttccacacaatagaagatttgtataagatcaagtttattatttccagtgctttctgcaactattttctcaaaatattctttccccccaagatgttagataagtcatatggaattacagtttggggctatttttgcagaaatcctgttcagaggtccctttcatcatctgcataatattaatttcacttgggcttcctgctgcccacatgcatctcagccaggcagacagaggggcagcagttggaatgaatatcattcatttagggagttcaaccaggaaaaggagaagatatggcgagctggctcagaatcagctccactgccactcgctggagctgcagcctgtccctggaggggaggagcctcaaatccaatctgtgtcacaggggcatccgcagcaggtggcagggctggaggtggctctggagaggaaactggaagtgccccaggggcagcctgcagctccacctgagagagctatgaagctttttctgggttctcatcttctcctggaaactctgtttgaacattttctacctcttccacttatactgcttctcctcccacttctccttctccttctgtttctccttctccgccgtgttattattattcatcttcatcttctctgtaaaagtcaatttcacgtattatcttt

SEQ ID NO: 6949 - DNA, 426 bp, Homo sapiens
  SIMILAR (274)..(369): 1001254mologous to Bos taurus retinal short-chain dehydrogenase/reductase retSDR1,accession number AF061742,Smith- Waterman Score=160.
gaggggatgatttgccagggcttgggctcaggccagcagggatgtccacgaacaaggtggccagacaagacgaatgaccagctctagtacacatcagactttgtgaaatatgctcggtgtcctggggcagggagccctcggccctctccctcgcaggaaggctcgggccctagagcatcatgtgtgtccggggtgggctgttctccccgaaagaaaggtggaggggttgtcagagctgcagctgctccaccctgacaccccatctgccctcagaccaccaaggccttcctgccgcgtatgctggagctgcagaatggccacatcgtgtgcctcaactccgtgctggcactgtctgccattcccggggccaatcgactactgcacatccgaagcggcagactttggcttcatggagagcctgaccct

SEQ ID NO: 6950 - DNA, 1465 bp, Homo sapiens
  SIMILAR (55)..(264): 981254mologous to Homo sapiens retinal short-chain dehydrogenase/reductase retSDR1,accession number AF061741,Smith- Waterman Score=336.
cgtattgctcggcccggggagtttcgccccctgcccggctccgcggcgcggaggatggcgtggaaacggctgggcgcgctggtgatgttccctctacagatgatctatctggtggtgaaagcagccgtcggactggtgctgcccgccaagctgcgggacctgtcgcgggagaacgtcctcatcaccggcggcgggagaggcatcgggcgtcagctcgcccgcgagttcgcggagcgcggcgccagaaagattgttctcgtggggccggactgagaaatgcctgaaggagacgacagaggagatccggcagatgggcactgagtgccattaccttcatctgtgatgtgggcaaccgggacgacggtgtaccagacggccaaggccgcccgggagaaggtgggtgacatcaccatcctggtgaaaaaatgccgccgtggtccaatgggaaagagcttaatggacaagtgatgatgatgccttcctaaaagcccaaaaacataaacaccctggggccagttttggaaccaccaggggcccttctctggcaagttatgctggaaacagcagaatgggccgcatcggtgtgccttcaacttccgttgctgggcattgttcttgccattcccccggtgccatcgactacttgcacatccaaagcgtcagctttcgccttcatggagagccttgaccctgggggcttgctgggacttgtccgggagtcaagcgccaccacagtgcttgccctttccacaacaagcaccgagatgttccaggggcattgagagttcaggttttcccaacctctttcccccactgaaagccggagacggtggcccggaagaacaagtggaagctgtgcagctcaaccaggccctcctcctcctcccatggacaatgcatgccctcgttatcttgaaaagcatacttccacaggctgcactcgaggagatccacaaaattctcaaggaaacctacaaccttgaatgaacacttttcaaaaggggcggacattagagacaggatgaaagacattgctttgaggagccacggagttttggggggccacagcaccttggggcacacaacccgagcaaccttgttccatttggcatggcttctgctgggtgagcaggacagctcctgtccccagcgaagaatccggctgcccctgggccagtcccaggacctttgcacaggactgatgggtgtaactgacccccacagggaggcaggaaaacagccagaagccaccttgacacttttgaacatttccagttctgtagagtttattgtcaattgcttctcaagtctaaccagcctcagcagtgtgcatagaccatttccaggagggtctgtccccagatgctctgcctcccgttccaaaacccactcatcctcagcttgcacaaactggttgaacggcaggaatgaaaaataaagagagatggcttttgtgaaaaaaaaa

SEQ ID NO: 6951 - DNA, 376 bp, Homo sapiens
  SIMILAR (36)..(335): 631254mologous to Homo sapiens Fln29,accession number AB007447,Smith-Waterman Score=297.
  misc_feature (1)...(376): n = a,t,c or g
aaacaggctgcaagtaaccagttagactctttgatgggcctgggcgttcccaccctgtggaggagaggggcattatcctatgtgaattctgtggggtacagctgttttacgatgtgctggtccattaccaggaccagtgggaccttcgcccaggcactgctttcttccgtgtgacagaggggattcctagactgcattcccaagtctcaagagacctggccagagctgctcttaggcgtgttagacgccaagaaaacctgtcttctggttacctggatgatactttgcttgaaacagctaatgggcccaccttttgtctgccggcccgtccactntaacaatatgacagctacctataaccagctatcgagatcag

SEQ ID NO: 6952 - DNA, 2755 bp, Homo sapiens
  SIMILAR (1259)..(2749): 571254mologous to Homo sapiens zinc finger protein,accession number L11672,Smith-Waterman Score=1612.
atgaaggagttctcatcaacagcacaaggcaatacagaagtgatccacacagggacattgcaaagacatgaacgtcatcacattggagatttttgcttccaggaaatggagaaagatattcatgattttgagtttcagtggaaagaagatgaaagaaatagccatgaagcacccatgacagaaatcaaacagttgacgggtagtacaaaccgacatgatcaaaggcatgctggaaacaagcctattaaagatcagcttggatcaagctttcattcgcatctgcctgaactccacatgtttcagaccgaagggaaaattggtaatcaagttgagaagtctatcaacagtgcttcgttggtttcaacatcccaaagaatttcttgtaggcctaaaacccacatttctaagaactatgggaataatttcctgaattcttcattactcacacaaaagcaggaagtacacatgagagaaaaatctttccaatgtaatgagagtggcaaagcctttaattatagctcagtcttaaggaaacatcagataatccatttaggagcgaaacaatataaatgtgatgtgtgtggcaaggtctttaatcaaaagcgatatcttgcatgtcatcgtagatgtcacactggcaagaaaccttacaagtgtaatgattgtggcaagaccttcagtcaggagttaacccttacatgccatcatagacttcatactggagagaaacattacaagtgcagtgagtgtggcaagaccttcagtcgaaattcagcccttgtaattcataaggcaattcatactggagagaaatcttacaagtgtaatgaatgtggcaagaccttcagtcaaacgtcataccttgtgtaccatcgtagacttcatactggagagaaaccttacaaatgtgaagaatgtgacaaagctttcagtttcaaatcaaaccttgaaagacataggaaaattcatactggagagaaaccttacaagtgtaatgaatgcagcaggacctttagtcggaagtcatcccttacacgccatcgtagacttcatactggagagaaaccttataagtgtaatgattgtggcaagaccttcagtcagatgtcatcccttgtataccatcgtagacttcatactggagagaaaccttacaaatgtgaagaatgtgatgaagctttcagtttcaaatcgaaccttgaaagacataggagaattcatactggagagaaaccttacaagtgtaatgattgtgagcaaagcctttacttcacattcacacctcattagacatcagagaatccatactggacagaaatcttacaaatgtgaagaatgtgatgaagctttcagtttcaaatcaaaccttgaaagacataggataattcatactggagagaaactttacaagtgtaatgaatgtggcaagacctttagtcggaagtcatcccttacacgccattgtagacttcatactggagagaaaccttaccagtgtaatgagtgtggcaaagcctttcgtgggcagtcagcacttatttaccatcaagcaatccatggtatagggaaactttacaaatgtaatgattgtcaccaagtctttagtaatgctacaaccattgcaaatcattggagaatccataatgaagagagatcgtacaagtgtaatagatgtggcaaatttttcagacatcgttcataccttgcagttcattggcgaactcatagtggagagaaaccttacaaatgtgaagaatgtgatgaagctttcagtttcaaatcaaaccttcaaagacataggagaattcatactggagagaaaccttacaggtgtaatgaatgtggcaagacctttagtcggaagtcataccttacatgccatcgtagacttcatactggagagaaaccttacaagtgtaatgagtgtggcaagaccttcggtcgaaattcagcccttataattcacaaggcaattcatactggagagaaaccttacaagtgtaatgagtgtggcaaggccttcagtcagaagtcatcccttacatgccatcttagacttcatactggagagaaaccttacaaatgtgaagaatgtgacaaagttttcagtcgcaaatcaagccttgaaaaacacaggagaattcatacttggaagagaaaccatacaaatgtaaggtttgtgacaaagcttttgggcgtgattcacacctgggcacaacatactagaattcacactggagagaaaccttacaagtgtaatgaatgtggcaagaacttccgtcacaattcagcccttgtaattcataaggcaattcatagtggagagaaaccttacaagtgtaatgagtgtggcaagaccttccgtcacaattcagcccttgaaattcataaggcaattcatactggagaaaaaccttacaagtgtagtgaatgtggcaaggtttttaatagaaaagcaaacctttcacgtcatcatagacttcatactggagagaaaccttacaagtgtaataaatgtggtaaggtttttaatcaacaagcacaccttgcatgtcatcatagaattcatactggagagaaaccttacaagtgtaatgagtgtggcaaaaccttccgtcacaattcagtccttgtaattcataagacaattcatactggagagaaaccttacaagtgtaatgaatgtggcaaggtttttaatcgaaaagcaaaacttgcacgtcatcatagaattcatactggaaagaaacattag

SEQ ID NO: 6953 - DNA, 149 bp, Homo sapiens
gattcatttggggcttctcgatttctgaggatacatgccgagagcttatttcactcttagggcttattttgctgagagcagatgcattgaggccttggatgaacttgcttcacttcaggtcacaatgcatcaagctcagaaacacacat

SEQ ID NO: 6954 - DNA, 331 bp, Homo sapiens
atgaattttgagattgtatttttagaaagatctaagaactagagtcaccctaaatcctggagaatacaagaaaaatttgaaaaggggccaggttcttgttacttattctttatttgctagatgccttcctcttcatatcttgatctctttttccttgagtacccgtcttattttctcttatgtttctgttctttactcttattttttttctgtcactgtttttcgctatatttctttgtctgtcgtccctcttcatccctcttttctagctctatcttattaatccttctcttctttcttgttcgttttctcctcttttgcttgtttctcg

SEQ ID NO: 6955 - DNA, 1114 bp, Homo sapiens
  SIMILAR (885)..(1112): 591254mologous to Homo sapiens Human histiocyte-secreted factor HSF,accession number AAR96800,Smith-Waterman Score=186.
  misc_feature (1)...(1114): n = a,t,c or g
tttttttttttttttttgagggggcgtctcactctctcacccaggctggagtacagtggcgcaatctccgttcactgcaacctccagcctggcgagagagcgagactctgtcttaaaaaaaaaagccattaggccaggcgtggtagctcactcctataaccccagcacttagggaggctggtggttaccatgacattcgctggaagaggaatggaactgggatcagattgccacaagggaggccctctgcagtccctccctttgaacaagaagttgtagtaggcaattaagaggagaccagagtgaaaagagatctagtctgttaattccttccactttgcagcttcaattaacatttgctgggttttttttttttannagtcaagctctgtgctgggacttgtgtatataaaaatgagtaaaatatgcttcctaccccggtggagttcacagtcttggtggagttcacaatctatctcaaaaaacttgttaataacgttatgacaaagcacaatagggttatgttaagttatataactggactatgagagcaatgggaaggttggggaatatctgagaaaaggtgatgcctgaataaaagaggatttaagaaaacagtcttggaaaaagggcaccttgagccaaacatttaggcgtggtgctctggagaacagccccagaagtctagggtggagtttaagctacaagacattccatgttgtcttgtatcatatatacatatatatatataaaacacacacacacacacgtatttatatatatatacacatatacatatatacacacacatatatacacatatacatacatatgtatacacacacacatacatatatatatatatatatatatacacacacacttttttttttttttttttttttttgagacggagtctcgctcagttacccaggctggagtgcagtggcatgatctgggctcactgcaagccgcctcctggggtcacgccattctcctgcctcaacctcccaagcagctgggaccacaggtgcccaccaccacgcccagctattttttttttttttgtatttttagtagagacggggcctcaccgtgctagccaggatagtct

SEQ ID NO: 6956 - DNA, 337 bp, Homo sapiens
  SIMILAR (42)..(161): 801254mologous to Homo sapiens CASH beta protein,accession number Y14040,Smith-Waterman Score=161.
cggagtgttttccgggaaagaggtaaactgtctgccgggccttggtggagcggctgtacagagtgaggcgatttgaccggttcgaacgtatcttgaagatggccagaaaagctgtggagacccacgtgctcaggagccctcaccttgtttcggactatagagactccatcatcccttctgaatccctgttggccctaccctgctgaggaagtttatcagggtgggctcccttcctgcacttcctgcgcttggaggcattggagagcccacattgaaaatctcttcagtcaaccacatttaaagtgctgacgccagagattttcaatgtgggctctcc

SEQ ID NO: 6957 - DNA, 434 bp, Homo sapiens
  misc_feature (1)...(434): n = a,t,c or g
ccagcccgcaattcccgccacgacccacgcgtccgggctgaatatgaggggaggggatatttatgactgtgttaatcttttttgatcattagctgaatattcaatatttgatatgtaaccatatagggatgtgttcgatataactatataggcaagggatatattgatttggccacatctatttgatttatggagggcaaatacctgtttcttttacatacagccattgccggggcattctaaatgttttttactaacataaagatgattgcgtatnnnnnnnnnnnnnnnnnnnnnnnnnnnnnnnnnnnnnnnnnnnnnnnnnnnnnnnnnnnnnnnnnnnnnnnnnnnnnnnnnnnnnnnnnnnnnnnnnnnnnnnnnnnnnnnnnnnnnnnnnnnnnnnnnncaatactattctccgcatggctccgtgc

SEQ ID NO: 6958 - DNA, 1144 bp, Homo sapiens
tttttgtttttttgagacggagtctcgctctgtctcaaaaacaacaacaacaaaaaaaccccccaaaaaacaaaaaaaaacggaagggagaaaggaaattttaaaaatacaatttggctttagtttgtgaatgttgtgtgcaggtgacacacgatcttttttttttttttttgagagacagtgtctcacttgttgcccaggctggtctcaaactcctggccttgagtgatcctcctgcctcagcctcccaaaggttctaaaattacaggcatgagcaactgctcccagccatacacaatcatctttatcttagtagaaaacttttagaatgccccggcgaatggctgtatctaaaagaaacaggtatttgccctccataaatcaaatagatgtggccaaatcaatatatcccttgcctatatagttatatcgaacacatccctatatggttacatatcaaatattgaatattcagctaatgatcaaaaaagattaacacagtcataaatatcccctcccctcatattcagccttcaaccaaaagtctttctaaggcagcatataacagtgctaacagcaaactgacaaattaaagtggcatactaggaaaaatggagaaataatgccatttgctctgaaaaatacttcagttttatcttcagaatcagatatgtttaatatctgcatataacttaatatgcatttcttccattacaatttttaagtataatccaaggctttaaaaggtatcttttttttacagtaatttaaaattatagaagatgcctttcctataattgaagttattgatcaattgaaggtataaccagactgaaatatacagcaacttcttgaagaatggcaaaaataaagtgaaagttctaaattcttctctgaatttttcagctattgctaatggaaggtcctgccaatataataggcaacacaggttcgtctaacacaggtcggtctaacactggtccaagtaatcaatcatcatatcttatttctttcctttttcttttttgtttttttgagacggagtctcgctctggtcgcccagggctgggagtgcagtgggcgtggatctcgggctcactggcaagctctgcctcctgggtccacaccattctcctgcctcagc

SEQ ID NO: 6959 - DNA, 640 bp, Homo sapiens
  misc_feature (1)...(640): n = a,t,c or g
aagggtcctgtcagcaaggagcccaggagtggtatgaaccgtaacagtgcccttagagtaaatgtgcggcccctaagaccctgccctcaggaaggcggccttcccctgcagtcctgtgtcccacccctgggtctctgtagggtgccatccaggggcaagcaacccaagcacttgcttcccaccgggtgatgagccattgcaggccttccaaacttgcacgtcattgatttcattcccttaaagttgagttttggcctttgaggagttccccagggtcctcccccactgggcaggggtcctcaaagccaaggaagcctggtgacacaggcacccatgggaggtgggcccagaaaggggcttcccatagataggccctgtgagtagggagcttgtacactggggccatgggcagcgccagttcccttgagcagtaaaggcccttttccccctacggtgggacccaggagtctctctgacagcttttctgcaaggcanagtggctcatgctgtaattccaacatctgggaggccgaggcgggaagatcacttgaggtcagagttcagaacagctggccaacatggtgaaagtgtctctgctaaaatacaaaattagtgggtgtggttaaagngctataaccca

SEQ ID NO: 6960 - DNA, 681 bp, Homo sapiens
  SIMILAR (278)..(400): 701254mologous to Homo sapiens NY-REN-25 antigen,accession number AF155103,Smith-Waterman Score=147.
gcaacacgtgagctggtgaccagctctgggctgaggaggaaaacggggctgtgggccaggcccagagagaagcccacagcctggcacctggcctccttgtccagaccagatgagctggtacgaaatcctcaggagccccagcctgggcccagggaggagggcagcttgggccacgtggccaggacaccagctcccgggggaggcgggcagcggcatctgagcagagcagggcactccaggccaggcagaaggttcaaggcaacactgtggctgaggtgaagagcacccgctctccctgggtgaccaggtgacccccatcatcgacctaatggccatcagcaacgctcactttgccaagctgcgcgacttcatcactctgcgccttccacctgggcttccccgtcaaaattgagattccccttttccacgtgctcaatgcccgcattcacctttcaggcaacctgtgtgggtgttgatggaggcccctgaggttccgtgtggggtgccgggcccccagcttttgtgttcggccgcattcagggggaacccttttcccgttggcgagggtgggaccccaccttgtttttgaagttgcccaacgggtacagcgtgctgggcatggagcgcaacgagcccctccgggacgaggacgatgaactctctgcagtctgccatcagacg

SEQ ID NO: 6961 - DNA, 1074 bp, Homo sapiens
  SIMILAR (211)..(1059): 951254mologous to Homo sapiens glucose transporter-like protein,accession number M20681,Smith-Waterman Score=1352.
atgactagtgctaaaactgagatagtcctgggcaaacgggatctgctggaggaagtcatcgacatcctgccggcccccgtgcaggcgtttctctacgagactgcctgccaggagcgtttctgcgccgaattatgtgacgccctgcgcgagcgccatgacagcggcgagatcctgagctatctgcaggcccaccaggtgttcctggtgccggtcaccccagctctgatctttgccatcacagttgctacaatcggctctttccagtttggctacaacactggggtcatcaatgctcctgagacgatcataaaggaatttatcaataaaactttgacggacaaggcaaatgcccctccctctgaggtgctgctcacgaatctctggtccttgtctgtggccatattttccgtcgggggtatgatcggctccttttccgtcggactctttgttaaccgctttggcaggcgcaattcaatgctgattgtcaacctgttggctgccactggtggctgccttatgggactgtgtaaaatagctgagtcagttgaaatgctgatcctgggccgcttggttattggcctcttctgcggactctgcacaggttttgtgcccatgtacattggagagatctcgcctactgccctgaggggtgcctttggcactctcaaccagctgggcatagttattggaattctggtggcccagatctttggtctggaactcatccttgggtctgaagagctatggccggtgctattaggctttaccatccttccagctatcctgcaaagtgcagcccttccatgttgccctgaaagtcccagatttttgctcattaacagaaaaaaagaggagaatgctacgcggatcctccagcggttgtggggcacccaggatgtatcccaagacatccaggagatgaaagatgagagtgcaaggatgtcacaagaaaagcaagtcaccgtgctggagctctttagagtgtccagctaccgacagcccatcatcatttccattgtgctccagctctctcagcagctctctgggatcaatgctgtgagtgtgatactttag

SEQ ID NO: 6962 - DNA, 696 bp, Homo sapiens
  misc_feature (1)...(696): n = a,t,c or g
cagttgctctatcggctctttccagtttggctctaccctggggtcatcaatgctcntgagacgatcataaagaaatttatcaataaatcttgacggccaaggcaaatgcccctccctctgaggtgctgctcacgaatctctggtccttgtctgtggccatattttcccgtcgggggtatgaatcggnctcccttttcccgtcgggactctttgttaacccgctttggccaggtattgacctagaaaacgggccaaggaaagtgggctctgcccagcccacattgaggacaagtgtggagagttagggcagggaggtgatgatgccctttgaataagaacacccttgaattcctaatcaagggaaaccctagtcccaactggccccgaatatgactgcccttgcttggagctctactaccctggatagctcccacccagctgtgcaagagatgaactgtgtgagtgattggcctttgcagcccagctagggatagatcataattattccctagaaaactcaactatggggtttctagaaacatacttaattttacaaggtccgaagttgtttacttgtattataaatgtttttattattttaccccaggattggtacgaattatttttgtctatggcaaatgtggataatgacaaaaaaaaagtcttattctatagaagcttaacactatgttttaa

SEQ ID NO: 6963 - DNA, 404 bp, Homo sapiens
acagacaggcaggggcatgtggtgctcactggtcctgttccttctcatccttccagcaactccaagaaaacaatctgaacctaagacaacagacgcagctgcacctgggacagcagacacagctgggcctgggacaatggacacagctgtacctagaaaagcagaaacagctgtgcctgggaaaaggaacacagctgtgcctggaacagcagacccagcttcacctgggacagcagacacagcagaacctatgagaacaaccactccaacagttctggcctcctggccttctctcacccagagcaccaacagcacccagcccacggctcttaccagccccctcaccaggatcctgctctgcaacatccacttcctgctcccgatctccctgaaggggctgctgg

SEQ ID NO: 6964 - DNA, 200 bp, Homo sapiens
tccagtggccacgcagagccaggctctggtggtcctggattcttaagtccacactgctacgaggaggtatgtggtttcttcccctctctgtcctctttctccccctcacccccagaatgctcacctcagctggtacctgcaggggcccgtgtagatgccctggaccgagctggtcgcacacccctgcacctggccaagtc

SEQ ID NO: 6965 - DNA, 416 bp, Homo sapiens
  SIMILAR (15)..(137): 1001254mologous to Homo sapiens dJ466N1.4 (novel protein similar to ANK3 (ankyrin 3, node of Ranvier (ankyrin G))),accession number Z97630,Smith-Waterman Score=220.
tttgcctgtttccagtgcagctgctcctggaccatggtgctgatcctaaccagcgagatgggctggggaacacgccactgcacctggcggcctgcaccaaccacgttcctgtcatcaccacactgctacgaggaggtatgtggtttcttcccctctctgtcctctttctccccctcacccccagaatgctcacctcagctggtacctgcaggggcccgcgtagatgccctggaccgagctggtcgcacacccctgcacctggccgagtcaaagctgaatatcctgctagagggccatgcccagtgcctagaggctgtgcgtctggaggagaagcacatcatccatatgctgaaggagcatctggagctcctagggcgacattaccaactgattaacgcctggatgaccttagatcc

SEQ ID NO: 6966 - DNA, 395 bp, Homo sapiens
  SIMILAR (20)..(85): 861254mologous to Homo sapiens gephyrin,accession number AF272663,Smith-Waterman Score=94.
aaagtccagtccaggtgcagcagcaagggagaacattctcagagccagtcacagtgctgtcgatatcaccaaggtggctagaagaccttcgcatggcgtcttttgctctgacatctatggacaaagcctttatcacagtcctggagatgactccggtgcttgggacagaaatcatcaattaccgatatggaatggcacgaggtcttgttcaatatgtagtttctgatgacattgttttcagcttcctattctcgttactatatgagtactttattcgatcttttcatttttcattgtctttatttatttatctttccttacgaagtttttttaaactccgtgaatctttcttttgcttttcttctatcttcctgtctagtacttttgctctgtcc

SEQ ID NO: 6967 - DNA, 444 bp, Homo sapiens
  SIMILAR (277)..(438): 721254mologous to Homo sapiens Human guanylate binding protein B (HGBPB),accession number AAW48892,Smith-Waterman Score= 199.
  misc_feature (1)...(444): n = a,t,c or g
gcgatttttgtttataatgaacaagtagattcaatattaaattgcattttcctcattcttagaacaaatttgcttttttagtttacctgattagttaccatttagctatttacttagggtttatgaagatatattaatctaagtgacatcaggtggaaggacatttattcaaggtagataaatgatgctgagtgcatagtctatgctaactaaatcctattctttattctccaggtagagatcacagagttcaaaatttccatttgcctcgactgtgtatacagaagctctttccgaaatgcgaaatgctttatctatgagttacctgctcaccgcaagaagcttgtgcaacttgaaccactgactgacgatgagctagagcctgactttgtgcgacaggtgacagaatctatgtcctacatctttagccattctatgatctan

SEQ ID NO: 6968 - DNA, 870 bp, Homo sapiens
  SIMILAR (11)..(70): 651254mologous to Homo sapiens FLJ00106 protein,accession number AK024498,Smith-Waterman Score=66.
  misc_feature (1)...(870): n = a,t,c or g
cggttgacgtgtgggtgtggccgggccagcgccctggtggcttcgcgtatcactagggggcaggggatttccacacgcccatcagtggtgactaaggtggccgagcggggcaaagcagaggacgctgacctccggcctggagacataatcgtggccatcaacggggaaagcgcggagggcatgctgcatgccgaggcccagagcaagatccgccagagcccctcgcccctgcggctgcagctggaccggtctcaggctacgtctccagggcagaccaatggggacagctccttggaagtgctggcgactcgcttccagggctccgtgaggacatacactgagagtcagtcctccttaaggtcctcctactccagcccaacctccctcagctctcgggcctgagccccgccatgccctccagcctgcctcaactgctgggccccgggtcatgccctatataaagttggcatggccagggaacaatggtgggcagttgnctccttacatgagcctaagtttggagaccttgaggccccttttgtcctcgctgggtgggccaaggtctgggaccctgtcttggactgtgggagactcaccctcgaccttgccaggcctctcccctgcaggactggcattgcactaagtctgaggtggccactgcctttgatcaacctttgtgtgcgagggtctaagtagggtcgaacacagaagtgggaaggagaggggtgggccaggggctatatggtgtcactgtgtaaagtttttgacatactagctctataaatatatgaatatggacaaaacaaaacacacctaaactgacgaacttgtacttgaaatatgcaaatggggcgcccgtctctcgtgtag

SEQ ID NO: 6969 - DNA, 431 bp, Homo sapiens
  misc_feature (1)...(431): n = a,t,c or g
atgggaacctccctggcccggcccggtgcttggcctccccctcccacctcttcctcctcctagctccccaagctccctgcctattcccccacctccgaggggctgcagcttgggagcctcctcagcatgacagcttgggtctcctccccaaaagagcctgtcaggcctcaagaaccacctccaggtggggagggcagtaacgaaaaccatcgcaggaaatggcaccctcccttttcggtgatgttgaaatcatgttactaatgaaaactgtcctagggaagtggttctgtctcctcacaggcttcacccacggcgatgaggcccttgaatgtggtcactttgtgctgtatggttgagggaccctcacaccaaagggaccttcccatgtgagatgtgctcccgcccccacctgcccacaagcaaacacaccn

SEQ ID NO: 6970 - DNA, 448 bp, Homo sapiens
  SIMILAR (270)..(136): 951254mologous to Homo sapiens Similar to SKAP55 protein; associates with protein tyrosine kinase p59fyn; 64Similarity to e321911 (PID:g2252496),accession number AC003999,Smith-Waterman Score=230.
ttttttatatttaaacatcagtatttttattattgttaacatgtcaaggaaagtattaatcaaatgttaatgtctctataaatgaaatcaaaacattttatcaacttaatttcaaggcaacataaaaactacaacctgatatatacgtttatcaggagcagagatttcaaaacagcaatctttctttccatcctttcttagagtgttattcattctgacactgtagccatctattgcaaattcacctttctgttgtttgtctgttgaagataaaaccagttagaatttcatttactaagtattaatgctcaattatcttttatgtaaaatttcttcatcaattcttggaaataacattttttggtcatattgctttagtaatataatgcttaggtaatgtttttagaaatcatttttaattctgaaacatggaagtattagggatgat

SEQ ID NO: 6971 - DNA, 442 bp, Homo sapiens
  SIMILAR (322)..(441): 851254mologous to Homo sapiens IRS-1 PH domain binding protein PHIP,accession number AF310250,Smith-Waterman Score=192.
cccacgcgtccgggtttattatttccgacaaggacatgaagcctatgtcgaaatggcccggaaaaataaaatatatagtatcaatcccaaaaaacaaccatggcataaaatggagctacgggaacaagaacttatgaaaatagttggcataaagtatgaagtgggattacctaccctttgctgccttaaacttgcttttctagatcctgatactggtaaactgactggcggatcatttaccatgaaataccatgatatgcctgacgttatagatttcctagtcttgagacaacaatttgatgatgcaaaatacaggcgatggaatataggaaagggagagtgagtgaccgcttcaggtctgtcatagatgatgcctggtggtttggaacaatcgaaagccaggaacctcttcaacttgagtaccctgatagtctgtttcaag

SEQ ID NO: 6972 - DNA, 1232 bp, Homo sapiens
  SIMILAR (1165)..(1221): 781254mologous to Homo sapiens PRO1722,accession number AF119851,Smith-Waterman Score=71.
tggtagagctgtactttttcttcacagcttttaccatggtttataattatacacttatacagtttagtcatcaatgactattttgcttactattgtgtctatgatatgtgatacaaagcaaatattttctaaatattcattgactaaacagccatcaagatgaaacaggacaggagagaactgttcagtgtgatacagagctgccatttccaaagtattctggaagcaagccattgccttactcttgattttcaacagttctaaacagcaacagcatccacctaatataccttcagaatatcaaagcgaaaactgatagaactacaaagagaaataaaatccattctcacggcaggcaaatcagtgagaaaaaatgtaaagatctggaggatttacttagtatcgctaacaagctggatccagtagatgcgtatggaatttcaaatacacatagacgatgcacaaaaaaccaccctgtacgaaggccacaaagaacagctcagatgcacaaagattcacaccatacaggccaaattatagaatcccccaaccccaagacactgcaccctatgggctataccctcaggcagggccctgcttttctaggaattgactccaatgcagaatagtgagaaatcaacaaaaagcaaaataagacaattccagacactcctgaatttacttggatttaaagaggttaataaaaacaaactataaactctgtagactgggctgacagtaaaagcacagaatacaaaacccaggggatggggctgggaggggctgtgaggggctggcacctcagctcagaaaaggtagcagcattccccaaagcagcagaaggcaggggttaaatcaggataaaaacagacatcagtggaatcgaaaaccaatagttagttaatataaagccagaagggtttgttttttttcaggtggggtctcgctctgtcacctaaactagactggagtgcagtggcctgatctcggctcactgcaacctctgcctcccgagttcaagcaattctcctgcctcagcctcctgaggggctgggattgcaggcgtccgctaccacaactggctgatttttgcatttttagtagagacgggggatattgctatgttggccaggctggtctcaaacttctgacctcaaatgattgcctgcctcagcctcccaaagtgctgggattacaggtgtaagtctctgtacccagcccaaaagcagttt

SEQ ID NO: 6973 - DNA, 424 bp, Homo sapiens
  SIMILAR (186)..(422): 911254mologous to Homo sapiens Human transport protein TPPT- 30,accession number AAB60110,Smith-Waterman Score=374.
aagcctctggctggcagctggtgttttccagcccccgcctggactggcccatcgaacgactggcgctcacagcccgggtgcatggaggggctttgggtgaacatgacaagatggtggcagcagccaccggcagcgagatcctgctatgggctctgcaggcggaaggcggcggctccgagataggtgacagcgggaactggatcgagatcgcctatggcaccagcttagggggcgtgcgggtcatcgtgcagcacccggagactgtgggctcggggcctcagctcttacagaccttcactgtgcaccgcagccctgtcaccaagatcatgctgtgggagaagcacctcatctcagtctgtgccgacaacaaccacgtgcggacatgtgctgtgactcgctaccgcggcatgatttgcacccagcc

SEQ ID NO: 6974 - DNA, 645 bp, Homo sapiens
  SIMILAR (13)..(249): 1001254mologous to Homo sapiens betaIV spectrin isoform sigma3,accession number AY004226,Smith-Waterman Score=399.
atggaggttgcactgcaggagggggcggcccagctgcggacggtgtatgcgggtgaacatgccgaggccatcgctagccgggagcaggaggtgctgcagggttggaaagagctgctgtcagcctgtgaggatgcccgcctgcatgtcagctccacagccgacgccctgcgcttccacagccaagtccgcgacctgctctcctggatggatggcatcgccagccagattggggcagccgacaagcccaggtgcttcgtgtgtattcagaccccttttttaggcctgtcattggggacttcggtcatggggcatccttctgtccgctgtccttcccagttgcctattattaccctctccatgggatgtcacagcatgaaacaggctaaagacaggatgggcaagggagtgttcccagtgaagcggcggaaccggcacagcctagtggggcctcagcagctaggaggacggccagcccctgtccgacggagcaacacgatgccccccaaccttggcaatgcagggctgctgggccgaatgctggatgagaaaacccctccctcaccctcaggacaacctgaggagccggggatggtgcgcctgccccataaggtgggtactcttactatccgcaaagagaagctgtga

SEQ ID NO: 6975 - DNA, 4988 bp, Homo sapiens
  SIMILAR (181)..(4713): 1001254mologous to Homo sapiens latent transforming growth factor-beta binding protein 4S,accession number AF051344,Smith- Waterman Score=8731.
cacccgtaattcccgggtcgacgatttcgtcgctgcagccatggcgggcggcgtgcggctgctctgggtgtcgctattggtgctgctggcgcagctaggggccgcagcctggactgggccggctcggagagcgtctccgcgtgcgcttcaccccggtcgtgtgcggcctgcgctgcgtccatgggccgaccggctcccgctgtaccccgacctgcgcgccccgcaacgccaccagcgtggacagcggcgctcccggcggggcggccccggggggacccgggcttccgcgccttcctgtgtcccttgatctgtcacaatggcggtgtgtgcgtgaagcctgaccgctgcctctgtcccccggacttcgctggcaagttctgccagttgcactcctcgggcgcccggcccccggccccggctataccaggcctcacccgctccgtgtacactatgccactggccaaccaccgcgacgacgagcacggcgtggcatctatggtgagcgtccacgtggagcacccgcaggaggcgtcggtggtggtgcaccaggtggagcgtgtgtctggcccttgggaggaggcggacgctgaggcggtggcgcgggcggaagcggcggcgcgggcggaggcggcagcgccctacacggtgttggcacagagcgcgccgcgggaggacggctactcagatgcctcgggcttcggttactgctttcgggagctgcgcggaggcgaatgcgcgtccccgctgcccgggctccggacgcaggaggtctgctgccgaggggccggcttggcctggggcgttcacgactgtcagctgtgctccgagcgcctggggaactccgaaagagtgagcgccccagatggaccttgtccaaccggctttgaaagagttaatgggtcctgcgaagatgtggatgagtgcgcgactggcgggcgctgccagcacggcgagtgtgcaaacacgcgcggcgggtacacgtgtgtgtgccccgacggctttctgctcgactcgtcccgcagcagctgcatctcccaacacgtgatctcagaggccaaagggccctgcttccgcgtgctccgcgacggcggctgttcgctgcccattctgcggaacatcactaaacagatctgctgctgcagccgcgtaggcaaggcctggggccggggctgccagctctgcccacccttcggctcagagggtttccgggagatctgcccggctggtcctggttaccactactcggcctccgacctccgctacaacaccagacccctgggccaggagccaccccgagtgtcactcagccagcctcgtaccctgccagccacctctcggccatctgcaggctttctgcccacccatcgcctggagccccggcctgaaccccggcccgatccccggcccggccctgagtttcccttgcccagcatccctgcctggactggtcctgagattcctgaatcaggtccttcctccggcatgtgtcagcgcaacccccaggtctgcggcccaggacgctgcatttcccggcccagcggctacacctgcgcttgcgactctggcttccggctcagcccccagggcacccgatgcattgatgtggacgaatgtcgccgcgtgcccccgccctgtgctcccgggcgctgcgagaactcaccaggcagcttccgctgcgtgtgcggcccgggcttccgagccggcccacgggctgcggaatgcctggatgtggacgagtgccaccgcgtgccgccgccgtgtgacctcgggcgctgcgagaacacgccaggcagcttcctgtgcgtgtgccccgccgggtaccaggctgcaccgcacggagccagctgccaggatgtggatgaatgcacccagagcccaggcctgtgtggccgaggggcctgcaagaacctgcctggctctttccgctgtgtttgcccggctggcttccggggctcggcgtgtgaagaggatgtggatgagtgtgcccaggagccgccgccctgtgggcccggccgctgtgacaacacggcaggctcctttcactgtgcctgccctgctggcttccgctcccgagggcccggggccccctgccaagatgtggatgagtgtgcccgaagccccccaccctgcacctacggccggtgtgagaacacagaaggcagcttccagtgtgtctgccccatgggcttccaacccaacgctgctggctccgagtgcgaggatgtggatgagtgtgagaaccacctcgcatgccctgggcaggagtgtgtgaactcgcccggctccttccagtgcagggcctgtccttctggccaccacctgcaccgtggcagatgcactgatgtggacgaatgcagttcgggtgcccctccctgtggtccccacggccactgcactaacaccgaaggctccttccgctgcagctgcgcgccaggctaccgggcgccgtcgggtcggcccgggccctgcgcagacgtgaacgagtgcctggagggcgatttctgcttccctcacggcgagtgcctcaacactgacggctcctttgcctgtacttgtgcccctggctaccgacccggaccccgcggagcctcttgcctcgacgttgacgagtgcagcgaggaggacctttgccagagcggcatctgtaccaacaccgacggctccttcgagtgcatctgtcctccgggacaccgcgctggcccggacctcgcctcctgcctcgacgtggacgaatgtcgcgagcgaggcccagccctgtgcgggtcgcagcgctgtgagaactctcccggctcctaccgctgtgtccgggactgcgatcctgggtaccacgcgggccccgagggcacctgtgacgatgtggatgagtgccaagaatatggtcccgagatttgtggagcccagcgttgtgagaacacccctggctcctaccgctgcacaccagcctgtgaccctggctatcagcccacgccagggggcggatgccaggatgtggacgaatgccggaaccggtccttctgcggtgcccacgccgtgtgccagaacctgcccggctccttccagtgcctctgtgaccagggttacgagggggcacgggatgggcgtcactgcgtggatgtgaacgagtgtgaaacactacagggtgtatgtggagctgccctgtgtgaaaatgtcgaaggctccttcctctgtgtctgccccaacagcccggaagagtttgaccccatgactggacgctgtgttcccccacgaacttctgctggcatgttcccaggctcgcagccccaggcacctgctagccccgttctgcccgccaggccacctccgccacccctgccccgccgacccagcacacctaggcagggccctgtggggagtgggcgccgggagtgctactttgacacagcggccccggatgcatgtgacaacatcctggctcggaatgtgacatggcaggagtgctgctgtactgtgggtgagggctggggcagcggctgccgcatccagcagtgcccgggcaccgagacagctgagtaccagtcattgtgccctcacggccggggctacctggcgcccagtggagacctgagcctccggagagacgtggacgaatgtcagctcttccgagaccaggtgtgcaagagtggcgtgtgtgtgaacacggccccgggctactcatgctattgcagcaacggctactactaccacacacagcggctggagtgcatcgacaatgacgagtgcgccgatgaggaaccggcctgtgagggcggccgctgtgtcaacactgtgggctcttatcactgtacctgcgagcccccactggtgctggatggctcgcagcgccgctgcgtctccaacgagagccagagcctcgatgacaatctgggagtgtgctggcaggaagtgggggctgacctcgtgtgcagccaccctcggctggaccgtcaggccacctacacagagtgctgctgcctgtatggagaggcctggggcatggactgcgccctctgccctgcgcaggactcagatgacttcgaggccctgtgcaatgtgctacgcccccccgcatatagccccccgcgaccaggtggctttggactcccctacgagtacggcccagacttaggtccaccttaccagggcctcccatatgggcctgagttgtacccaccacctgcgctaccctacgacccctacccaccgccacctgggcccttcgcccgccgggaggctccttatggggcaccccgcttcgacatgccagactttgaggacgatggtggcccctatggcgaatctgaggctcctgcgccacctggcccgggcacccgctggccctatcggtcccgggacacccgccgctccttcccagagcccgaggagcctcctgaaggtggaagctatgctggttccctggctgagccctacgaggagctggaggccgaggagtgcgggatcctggacggctgcaccaacggccgctgcgtgcgcgtccccgaaggcttcacctgccgttgcttcgacggctaccgcctggacatgacccgcatggcctgcgttgacatcaacgagtgtgatgaggccgaggctgcctccccgctgtgcgtcaacgcgcgttgcctcaacacggatggctccttccgctgcatctgccgcccaggatttgcacccacgcaccagccacaccactgtgcgcccgcacgaccccgggcctgagccctggcacccgatggccacccacccgcgcccgccactcggggcccctgccccgcatcctgcagcccgcttagtctgatgacgaggaagcccgccagaaagtccagaagaaggaacgacggacgcaaagcggcgccgcctaccatgcctcccccccccaccaccaccccccccaactgtggtcgtccccgcccggcccaccccgcccccatttctccccccttctttcaataaaaatttcaatcataaaaaaccacctataaaaaaaaaaa

SEQ ID NO: 6976 - DNA, 1501 bp, Homo sapiens
  SIMILAR (749)..(844): 871254mologous to Homo sapiens Human transport protein TPPT- 30,accession number AAB60110,Smith-Waterman Score=138.
atgacgcaaaagaaaaaccaaacagagcagaaagagcaaaaaaacgaacaaaaaaaacaacacaacgaacgaaaagaacacaagaagaaacaaacagaatacaaaacacacgagacaaacagacccaggaaaacagaaagagcggagcacgacgaacaaaaaagagagaacgagggaaaaaggagacgacacaagaaacggacagtgagaggaaaaaaacgaacgaagagacagagacacggaaaggaagggagaagccagaacaagcaagacaagccagaaaagagaaacaaaagagacaacggggggaaagacaaaacagaagagaaaaaaagaaaaaacaacagacaagaaaacgaagaggaagaagcgaacgagcaagacagaagagaacaaaaagaggaaacaagaaaaagaggaccgagaaagagacgagagcacaaagaggaggaaggaaggagagagagaaagaagaggaaacgcaagacgaaggaaaaagggcggagagcacagcaaaaagagaggagagaggaggaacaacagcaaaggagaaggagaagaagaggaaagaggaagaaaaacgaaagcgaagacgaggaggacaaggcaagcaacaaacacagacagcaagaacgagaaaggcagaaaaggaaaggggcagacgcgggcgcgcagaccagcagaaacagggaggaggagaagaaaaagaaagagacagaggaaagcaggcgaaacaacgccaggagagacagggagatggtgtgcttccgtgcgctccgtggacggctcacccacaacagccttcacagtgttggagtgcgagggctcccggcggctcggctcatcggccccggcgctacctgctcaattgccaggccaacggcagcttggccatgtgggacctaaccaccgccattggacggcttcggccaggcccctgcaggtggcctgacggagcaagagctgatggaacagctggaacactgtgagctggccccgccggctggcttcaagctccctcaatggggctgtctccccaagcccctcaccccgcatctccctcaccaagcctccactcaagcctccagcaacacctcctttgtctggccaaccgtgggaagcccaaagccccccgcaaggctgaaggcccggcgccgtgggtggggggaagctttgtggaaagctgccaggaactggtgcggagtgggccagacctccgacggccacccacaccaagccccgtggccctccaagcggtctcggcactcccctcacaccttccaagaatgaagctcaatgaaacttccttttgaacaacgcagctgccatgatgccttgggatgccctggtcctgggggactcaggtgcctccctgattcctgtgggaaccccgggttcagggccagggcctccttggaataaatggttattgttactaggtccccaccttccctcttttctggaagccaaagtcaccctccccaataaagtcctcactgcc

SEQ ID NO: 6977 - DNA, 1703 bp, Homo sapiens
  SIMILAR (544)..(1218): 861254mologous to Homo sapiens Human transport protein TPPT- 30,accession number AAB60110,Smith-Waterman Score=996.
atggcgggcggcgtgcggctgctctgggtgtcgctattggtgctgctggcgcagctagggccgcagcctggactgggccggctcggagagcgtctccgcgtgcgcttcaccccggtcgtgtgcggcctgcgctgcgtccatgggccgaccggctcccgctgtaccccgacctgcgcgccccgcaacgccaccagcgtggacagcggcgctcccggcggggcggccccggggggacccggcttccgcgccttgttcccagtgaagcggcggaaccggcacagcctagtggggcctcagcagctaggaggacggcccagcccctgtccgacggagcaacacgatgccccccaaccttggcaatgcacggctgctgggccgaatgctggatgagaaaacccctccctcaccctcaggtacgtttctatctcgtggaaggacaacctgaggagccggggatggtgcgcctggtgtgtggacaccataattggatcgctgtggcctatacccagtttctagtctgctacaggttgaaggaagcctctggctggcagctggtgttttccagcccccgcctggactggcccatcgaacgattggcgcttcacagcccgggtgcatggtggggctttgggtgaacatgacaagatggtggcagcagccaccggcagcgagatcctgctatgggctctgcaggcggaaggcggtggctccgagataggggtctttcatctgggggtgcctgtggaggccttgttcttcgtcgggaaccagctcattgctacaagccacacagggcgcatcggggtgtggaatgccgtcaccaagcactggcaggtccaggaggtgcagcccatcaccagttatgacgcggcaggctccttcctcctcctgggctgcaacaacggctccatttactacgtggatgtgcagaagttccccttgcgcatgaaagacaacgacctccttgtcagcgagctctatcgggacccagcggaggatggggtcaccgccctcagtgtctacctcacccccaagaccagtgacagtgggaactggatcgagatcgcctatggcaccagctcagggggcgtgcgggtcatcgtgcagcacccggagactgtgggctcggggcctcagctcttccagaccttcactgtgcaccgcaggccctgtcaccaagatcatgctgtcggagaagcacctcatctcagtctgtgccgacaacaaccacgtgcggacatggtctgtgactcgcttccgcgtgcatgatttccacccagcccggctccaccccactcgcttcctttaagatcctggctctggagtcggcagatgggcatggcggctgcagtgctggcaatgacattggcccctacggtgagcgggacgaccagcaagtgttcatccagaaggtggtgcccagtgccagccagctcttcgtgcgtctctcatctactgggcagcgggtgtgctccgtgcgctccgtggacggctcacccacgacagccttcacagtgctggagtgcgagggctcccggcggctcggctctcggccccggcgctacctgctcactggccaggccaacggcagcttggccatgtgggacctaaccaccgccatggacggcctcggcaggcccctgcaggtggcctgacggagcaagagctgatggaacagctggaacactgtgagctggccccgc

SEQ ID NO: 6978 - DNA, 566 bp, Homo sapiens
  SIMILAR (20)..(322): 341254mologous to Mus musculus putative,accession number AK014534,Smith-Waterman Score=165.
atcgtagactctagtcactgtggggaattcccagggacgcgagggcttggcttttctcgtcagctgccctgaggggagagcggactgtgccagtgagtcggcgtgcagcagcgacagcctggacgaggccagatcgtccggctcggaagggacgccggcagacacgggtgacctctcgcctggccacggcgcgtcagcgccctcggtgtccagagaggctcgccaaacggtgccgcccctgacggtcaggctgcacacacagagcgtgtcggagtgcatcacggaggacggcaggactgtggccgtgggggacatcgtctggggtcaccgacgatgagggcgcacctgctgtcctggagcttccgatctctgttcggggaccctgtgagccttctggccggctgcgtgcagagcccactgggcacggtggtcggcctggtgtgaggtcccccggggaccggcagtgtgttcagggaggggatggacctgagcccagcggctcctcccgctgagtgtatttgttcccaccactcagcgcatggctgccctggctcacgaggcagtat

SEQ ID NO: 6979 - DNA, 906 bp, Homo sapiens
  SIMILAR (80)..(532): 481254mologous to Mus musculus putative,accession number AK014534,Smith-Waterman Score=396.
  misc_feature (1)...(906): n = a,t,c or g
gagccctgaaattctggtggacccacgcctccgcccacgcgtccgcttggcttttctcgtcagctgccttgtggggagagcggactgtgccagtgagtcggcgtgcagcagcgacagcctggacgaggccagatcgtccggctcggaagggacgccggcagacacgggtgacctctcgcctggccacggcgcgtcagcgccctcggtgtccagagaggctcgccaaacggtgccgcccctgacggtcaggctgcacacacagagcgtgtcggagtgcatcacggaggacggcaggactgtggccgtgggggacatcgtctggggtaagatccatggttttccttggtggccggcgcgtgttcttgacatcagtctcggccagaaggaggacggagagccgtcttggcgagaagcgaaggtctcgtggattggttctccgactacgtcgttcttgtctatttcaaaactctcccctttctctgaatttttcaaactgagatttaatcgtaagaagaaggggatgtatcggaaagctataaccgaggctgcaaatgccgcaagacacgtggccccggaaatcagggagctcttaacccagtttgaaacgtaactggttccctgaccaggtcaccgacgatgagggcgcacctgctgtcctgggagcttccgatctctgttccggggaccctgtgagccttctggccggctgcgtgcagagcccactgggnacggtggtcggcctggtgtgaggccccccggggaccggcagtgtgtccagggaggggatggccctgagcccagcggctcctcccgctgagtgtatttcttcccaccactcagcgcatggctgccctggctcacgaggcagtcgggactcgtgacttgctggctgctggctgctgctgc

SEQ ID NO: 6980 - DNA, 392 bp, Homo sapiens
  SIMILAR (94)..(390): 951254mologous to Homo sapiens HEYL protein,accession number AJ272215,Smith-Waterman Score=488.
tcgcagacgctgcggtgccaactcgctgtgtgacctcgggccactctctgcctatctctgggcatgctgctgaatcggagctctttcatagacacaggcatcatcctgccatcccggaggaatgtgctgcccattcgaggggcatcttccacccggagggcccgccccctagagaggccagcgacccctgtgcctgtcgcccccagcagcagggctgccaggagcagacacatagatcccctcctgcagtcttcctccccaacaccccctggtcctacagggtcggctgcttacgtggctgttcccacccccaactcatcctccccagggccagctgggaggccagcgggagccatgctctaccactcctgggtctctgaaatcactgaaat

SEQ ID NO: 6981 - DNA, 372 bp, Homo sapiens
  SIMILAR (94)..(372): 791254mologous to Homo sapiens hluPGFS,accession number AB018580,Smith-Waterman Score=375.
cggacgcgtgggtccggacgcgtgggtctaccctcgcgtccgttcttaagagaagcagcggcaaacatttgctaggcggacaactgacagggaatggattccaaacgccggggtgttaagctaaatgatggccagttcatgcctgtattgggatttggcacctatgcaccttcttaggttccgagaagtaaagctttggaggtcacaaaattagcaatagaacctgggttccgccgtatagattctggtcatttatacactaatgaggagcaggcgggactggccatcctaaacatgattgccgatggctgtgtgaaaagagaagacatattctacacttcggagctttgggccactttttattgaccagag

SEQ ID NO: 6982 - DNA, 393 bp, Homo sapiens
ttaaggatttcgtaatcctcccagggattcccaccacccgcactccactcgcagacggcgggccttcctccgacgctgggagaaggaccctgggagaggcaagggaagggctccggaaccagcgcagcagcgggacgctagcccgcccacacggcggccacttgaaggtcctccagggaacacctgaggcagtgggagcgtctgccctttcctaagtctccttggaaagaagtattcgctttcgtttccgcaaacaaagcatgctccgcgctttcaggaccggtggctcccgtggagaccgcagcggaacccagtccgccttcgcacgcgtccgggggagaagcggccccaggactaagggcgcgcgcccgaggaaccggtgctgtgacgacc

SEQ ID NO: 6983 - DNA, 399 bp, Homo sapiens
  SIMILAR (5)..(40): 751254mologous to Homo sapiens Sec22 homolog,accession number AF100749,Smith-Waterman Score=53.
ggcgaggacaaatactggtggcagaccatactgcttcattaggatgaggtaacttaattcataggacccagcagggatataataatcccaggcctctttcaaccaatataattctttctgacatacaaaccgaaaccaagctgaggcctccttatcaaatttccatgtgcgaactggggtcagccaaaggagtcacatcagcattttctgctgactgtaaaggagctgagaagatttcttctggtcaccaacgactggaaccagcaactctgtcagggattgcagagatttatccttagtcttttatggggagctctgaatttaattccaggctttcatgctatacaaaggctcctgcagagagaaggcgacgattttaactccttcatcgcattgttc

SEQ ID NO: 6984 - DNA, 401 bp, Homo sapiens
  SIMILAR (69)..(1): 951254mologous to Homo sapiens CDC10 homolog=hCDC10,accession number S72008,Smith-Waterman Score=117.
  misc_feature (1)...(401): n = a,t,c or g
gttcacgcatgattctgcatttaggtagtcctcaaatttactatcaatgtaatcgataacaggctgccagctgtacagtctttttaattctgtgagaaggacctggatactctggagaatacaaatctatgaggaataatgagttgattaatgtcgactttcccaatccacatttcgcccaagctcaggggggacgacgtgcgcggccgcnggcttgantggcgctggccattgaggggcttctgcgccaccgtgcgatggtgcccgccaggtgctgccggttggtgcgcatngcctgttcgcgcagagtctgcctttntgcgcccggccaagtcgtaaatctcctcctcgtagcttacaggcgacnggcggccagccgaagcctctggacacagaagcgc

SEQ ID NO: 6985 - DNA, 443 bp, Homo sapiens
  SIMILAR (112)..(219): 941254mologous to Homo sapiens bA291L22.2 (similar to CDC10 (cell division cycle 10, S. cerevisiae, homolog)),accession number AL133216,Smith-Waterman Score=175.
  misc_feature (1)...(443): n = a,t,c or g
nttgattgcagtccctagtccgtgcggtggaattcctgtcgcgcagaagctcctcaatggccagcgccagctgcagccccggccgcccactcgcctcatctgagcctgggcgaatctggattgggaaagttgatattaatcaactcattattcctcacagatttgtattctccagagtatccaggtccttctcagagaattaaaaagcctgtacaggtctacatattggtatttttaattgatgataagctggaataatattaatacacacaaagcacgtgttgtaactttcattatgcttccctagagctggcagcctgctatcaattacattgatagtaaatttgaggactacctaaatgcagaatcgcgagtgaacagatgtcagatgcctggtaacagggtgcaggggtgtttatacttcattgctccttcaggacatg

SEQ ID NO: 6986 - DNA, 674 bp, Homo sapiens
  SIMILAR (306)..(518): 881254mologous to Homo sapiens CDC10 homolog=hCDC10,accession number S72008,Smith-Waterman Score=322.
tttcgtgggcgggatgtaaccggctgctgagctggcagttctgtgtcgctaggcttctgcccggccgccgccgcacataagctgcgaggaggagctttacgacttcccggtcttcggggccgggcgcagcaagggccagactctgcgctagcaggcgctgcgcgccaaccggccggcacctgtcgcagaaggtgcaaccgatcgcactgtcgcgcagaagctcctcaatggccagcgccagctgcagccccggccgcccactcgcctcatctgagcctgggtggaacaatccaaagttttaatcaaagtatggtggtgttcagttgctgcttacgatagttgataccccacgatttggagatgcagtggataacagtaattgctggcagcctgttatcaattacattgatattaaatttgaggactacctaaatgcagaatcgcgagtgaacagatgtcagatgcctggtaacagggtgcagtgatgattatacttcattgctccttcaggacatggaccattacataactgaagactcccaccttcaggcaggattgggtagtacgtgtttgtaactacctggcattgccttttgttgaggaagggtagatgtctacccaaatggaatattgagtatcagagacttcaaatgataacttttgtttgtttggag

SEQ ID NO: 6987 - DNA, 627 bp, Homo sapiens
  SIMILAR (345)..(464): 771254mologous to Rattus norvegicus CDC10,accession number AF142759,Smith-Waterman Score=143.
gggagtgcgagatccgctgctgctgaggagaggagcgtcaacagcagcaccatggtagctcaacagaagaaccttgaaggctatgtgggatttgccaatctcccaaatcaagtatacagaaaatcggtgaagagaggttttgaattcacgcttatggtagtgggtgaatctggattgggaaagtcgacattaatcaactcattattcctcacagatttgtattctccagagtatccaggtccttctcatagaattaaaaagactgtacaggtggaacaatgcggagtttgtaatcaaagaagggggtgttcacttgctgctcacaatagttgataccccaggattttggagatgcagtggataataagtaattgcctggcagcctgtttatcgactacattgatagtaaatttgaggactacctaaatgcagaatcacgagtgaccagacgtcagatgcctgattaacagggtgcagtgttgtttatacttcattgctccttcaggacatggactttaaaccattggatattgagtttatgaagcgtttgcatgaaaaagtgaatatcatcccacttattgccaaagcagacacactcacaccagaggaatgccaacagtttaaaaa

SEQ ID NO: 6988 - DNA, 371 bp, Homo sapiens
  SIMILAR (23)..(271): 921254mologous to Mus musculus putative,accession number AK008516,Smith-Waterman Score=418.
tgtgctggagttggaagagcgcgcgctactacgcgaagcccgactggggagagcccgaagctcagggggcatgcaggccacccctgccactgagggtctggcgcggccccaggctccttcatcgtccgccttccgttgcccctactgcaaaggcaagtttcgcacctcagcggagcgcgaacgccacctgcacatcctgcataggccctggaagtgcggcctgtgcagtttcggctccagccaggaggaggagctgctgcaccacagcctgccaagtgtgcggccagagctttacacagtcttggtttctcaagggccacatgcgtaagcacaaggcctccttcgatcatgcgtgtccggtgtgcggccgc

SEQ ID NO: 6989 - DNA, 983 bp, Homo sapiens
  SIMILAR (430)..(933): 341254mologous to Homo sapiens zinc finger protein 219,accession number AB015427,Smith-Waterman Score=168.
ttttcctgctcttccctgcacttcccagaaccaaagaatgtgaagggggtccatggagggctcacgtccccgcgccccgagcggccacttagcgccgtcgccgccggctttcgacggcgagctggatctgcagcgatactccaacgggccagccgtgagcgcagggtcgctcgggatgggagcggtgagctggtctgagagtcgtgcaggcgaacggcgcttcccctgccctgtatgcgggaagcgcttccgcttcaactctatccttgctttgcacctgcgggcgcacccaggagcccaggccttccagtgccctcactgcggccaccgcgcggcgcagcgggctctgctgcgctcgcacctgcgcacacaccagcccgagcgcccacgtagtcctgctgcacgcctgttgctggagttggaagagcgcgcgctactacgcgaggccccgactggggagagcccgaagctcagggggcatgcaggccaccccttgccactgatggtctggcgcggccccaggctccttcatcgtccgccttccgttgcccctactgcaaaggcaagtttcgcacctcggctggagcgcgaacgccacctgcacatcctgcataggccctggaagtgcggcctgtgcagtttcggctccagccaggaggaggagctgctgcaccacagcctgacggcccacggggctcccgagcgtcccctggcggccacctccgttgcgcctccgcctcagcctcagcctcagcctccaccccagcccgaacccagatcagtcccccagccggagccggagccggagcccgaacgtgaggcaaccccgaccccagctcctgccgctcccgaggagcccccagcgcctccggagttccgctgccaagtgtgcggccagagctttacacagtcttggtttctcaagggccaacatgcgtaagcacaaggcctccttcgatcatgcgtgtccggtgtgcggtcgc

SEQ ID NO: 6990 - DNA, 582 bp, Homo sapiens
  SIMILAR (161)..(580): 971254mologous to Homo sapiens phospholipase C alpha,accession number AF170071,Smith-Waterman Score=714.
ggtaatgctggattaagtagcctgacggaaggggtcttggatctttttgcagtgaaggctgtatacatgggccaccctggcattgatatacacactgtgtgtgttcagaacaaactgggtagcatgttcctgtcagagactggtgtgacattgctctatgggcttcagaccacaagacaacagattattgcacttcgtggcaccaaagcacacagctaaaatgctcttcagcggattattggaactcactagagctgtgagaaagatgaggaaattccctgaccaaagacagcagtggctgcggaaacagtacgtcagcctttatcaggaggatggacggtatgaaggcccaactttggctcacgctgtggagttgtttggtggcagacggtggagtgctcgaaaccccagccccggaacatcagcaaagaatgctgagaagcccaatatgcagagaaacaataccctgggcataagcactaccaagaaaaagaagaaaatcctcatgaggggtgagagtggagaggtaactgacgatgagatggcaacccgaaaggccaagatgcacaaagagtgtcgaag

SEQ ID NO: 6991 - DNA, 428 bp, Homo sapiens
  SIMILAR (92)..(427): 681254mologous to Rattus norvegicus synaptic SAPAP- interacting protein Synamon,accession number AF102855,Smith- Waterman Score=423.
  misc_feature (1)...(428): n = a,t,c or g
ctccgtggggtcggagtcagacagctccaaagaagagaccatctatgacacgatccgggccactgcggagaagccgggcggtgccaggacggaggagagccagggcaacacgctggtgatccgcgtggtcatccatgacctgcagcagacgaaatgcattcgatttaacccggatgccacagtgtgggttgcaaagcagcggatcctgtgtacattaacccagagtttgaaagatgtgctgaactacggcctgttccagccggccagcaatgggcgtgacggcaagttcctggatgaggagcggctcctgcgcgagtacccacagcccgtgggtgagggcgttccttccctggagtttcgatacaagaagcgggtgtataaacaagccagtctcgatgagaaacagttggccaagctccacacgaagn

SEQ ID NO: 6992 - DNA, 311 bp, Homo sapiens
gctcgacctctcttgctcctctcacaggctcttttctgagtaacaccaagtacttgggaacaaaattacacattgctctctgtttatttatggttatatttatcttggcaatcgacctgttaagctagttttaactttcttatgggtaacagtcacatgttttaaaaggaacctgatggttccagaatccttgttactactaccttttttttttggagacagaatctctgtcacccaggctggagcgcagtggcacagtctcggctcactgcagcctctgactcccgagttcaagcgattctcctgcctca

SEQ ID NO: 6993 - DNA, 330 bp, Homo sapiens
  SIMILAR (1)..(96): 1001254mologous to Homo sapiens alanine-glyoxylate aminotransferase 2,accession number AJ292204,Smith-Waterman Score= 154.
gtcattttcttggtgaacagtggctcagaagccaatgagctggccatgctgatggccagggcgcactcaaacaacatagacatcatttctttcagacaatgtgtccagatgtttttcgtggcccttggggaggaagccactgtcgagattctccagtgcaaacaatcaggaagtgcagctgtgcaccaggtccgactgggcaaggggggtgccagtggagtgttggaagttggaagggacacgaataaaggcagactcatccctgagggaacaattgaatttgaaaacatggaaaagggaaaagccagaggaagcaaaactggaaagtaa

SEQ ID NO: 6994 - DNA, 501 bp, Homo sapiens
  SIMILAR (1)..(87): 1001254mologous to Homo sapiens alanine-glyoxylate aminotransferase 2,accession number AJ292204,Smith-Waterman Score= 155.
atgactctaatctggagacatttgctgagacccttgtgcctggtcacttccgctcccaggatccttgagatgcatcctttcctgagccgtaagtggaaaccagggggacgtgggtcagtagaggatcagcgagaggagcacgcatgggacagaggggacctccacagagaaggctgtgagagatcatgtccggagcggatgataccgaacagcaatggtgagggtcctcagcagcgtgctgcagactgcggccccatgtgtgaagagaaaacgaccactctggagtctccaagctggcagctccagcacagagaagcagaggagaaaaatttctctaccgaccagacactgtccctcaggcgtccaaaccccaacacagcttcagcaggcctccatgggaggcagtgtctcaaacgtacttcccggacatcagtaaccaagctcagtcttcatacaaagcccagaatgcctccatgtgacttcatgcctgaaagataccag

SEQ ID NO: 6995 - DNA, 380 bp, Homo sapiens
  SIMILAR (3)..(371): 811254mologous to Homo sapiens alanine-glyoxylate aminotransferase 2,accession number AJ292204,Smith-Waterman Score= 539.
gagcctaccatggatgcagtccttacacacttggcttgacaaacgtagggatctacaagatggaactccctggtgggacaggttgccaaccaacaatgtgtccagatgtttttcgtggcccttggggaggaagccactgtcgagattctccagtgcaaacaatcaggaagtgcagctgtgcaccagactgctgccaagctaaagatcagtatattgagcaattcaaagatacgctgagcacatctgtggccaagtcaattgctggatttttccgcagaacctattcaaggtgtgaatggagttgtccagtacccaaaggggtttttaaaggaagccttttgagcttggtgcgagcaaggggaaggccgtgtgcattgcag

SEQ ID NO: 6996 - DNA, 864 bp, Homo sapiens
  SIMILAR (244)..(285): 1001254mologous to Homo sapiens alanine-glyoxylate aminotransferase 2,accession number AJ292204,Smith-Waterman Score= 79.
ctctctctccttcctattttcattctatctcttttcctcactctctttttctcccccttgaaggcactgttactagaaatagagagctctggggcttgctgcaagccatgggagttcaccactccaggattccccttttagcgcctcctccccatcttaatctcaaagtccagcaggatagtgagcagttagagcccggcctccaatctgcttccatgggggttggctttctgagtgggagaaatgactctaatctggagacatttgctgagacccttgtgcctgggtcaattccgctcccagggatccttgagatgcatcctttcctgagcctaggtacttcccggacatcagtaaccaagctcagtcttcatataaagcccagaatgcctccatgtgacttcatgcctgaaagataccaggtcattttcttggtgaacagtggctcagaagcccaatgaagctggccatgctgatggccagggcgcactcaaacaacatagacatccatttctttcagaggagcctacccatggatgcagtccttacacacttggcttgacaaacgtagggacctacaagatggaaactccctggtgggacaggttgccaaccagtgagtttggagatttttctcttgtttctttaaagactgctgggtatgtgaagtagttgatcaggttttcctggtataaggattagaaactaatataaagcctgtcattaatcaggggctcaatttgacctaattgaattggagaccacttgaggacaccattagaaaggccttccgagtctgagtaataattaatgacagagttttaaaatgtattttgcttttaaataaaatcaagtaaactgcaa

SEQ ID NO: 6997 - DNA, 1576 bp, Homo sapiens
  SIMILAR (95)..(151): 841254mologous to Homo sapiens Human secreted protein, SEQ ID NO: 7874,accession number AAG03793,Smith-Waterman Score=89.
tttttcatttttaaaaaaggttttaattccatatagtacagtacttcaatttttttgtttgtttgtttgtttgtttgtttgagacagaatctactctgtcacccaggctggaaggcagtggtgtgatctcggctcactgcaacctccaccctccctcctgggttcaataattcttgtgcctcagcctcccgagtagctgggactacacagtgagactccgtctcaaaaaaaaaaaaaaagaaagaattaaactatacctttaatatatgaagaaaatgatagtttggcatcatttatagtaaatgtgttcataaacattctaaatattccaaacacgtacatacagaagaacataatcttaagacaatgatttttattacctttagtctaccacatttgtcactataaatatacttattgaaaaaaaaccatactatttaaataagaattcagttcatgaaagtttacaaaatacaaccaatgtactctgacttgtggttatatcttaactatctcaactgtacttttctggttatggccagaccttttgcaaatattaccatggggattttaattttatgatataaaaccagtagccaatttattaaggttttcccattattaaaaattaatatggtaattctccaaaatactgaaaaaactgttttatgaaaggcaggtacccacatcactggcaacgtatttcctttctcttggggaaaacatctttcaaaagggcacattttaattactagtgtttatatctaaagatagtagtttggaggttttggaatttccagtcaattttccattatctcaaaattgagctaatggagggttggaagaggtaggagaacgcaggtttccaatgaactgccctcagggcagcagaatcctcattcatctcgtccatgaagaccaaaaggaagatataagggaaaaaggaatggcagatctgttttgcatcctaatttaaccttctacacaaaatacttcattaaaagcaaataaacaaacacaagatagtaagcttagaaaacaaaaggccctagacccacaaattaccccagttaagccccaagtggtgacattggttttaagcctcaagaaaatgaaacttctgcttctgtaaaatcacatcttcatcaattgaatttaaatcacttagtgcattaacaatgttacaaattccaataatgtccagacatatggatggatattcaaaataaagtacaaaaatacatttccaaaatccaaatataaatggacttttatggttatcctgccatgctcccctttaatttggcctgatagtctacatttgactgtaattataataacatctgtaatttcaagtacaatagtacaatcataataattttgaagaacgtatgacctaggaccccaaaatgcaatccaatatacaatttggagtatggtttactttttagtgaagtttaatactaattgaagtactaaattgaacaaggccagtactctgaagtactaatctcaagtatttgatcccatgtaagaaacagaagggaatttttaaggcaattttggtattccaaaa

SEQ ID NO: 6998 - DNA, 310 bp, Homo sapiens
  SIMILAR (13)..(309): 421254mologous to Alcelaphine herpesvirus 1 putative immediate early protein,accession number AF005370,Smith-Waterman Score=161.
cggccgcgtcgacggggagaccacagggaggtgaaaggtgggcggggggggaaaggaggagaggggagaccacagggaggtcaaaggtgggcagtggggaaaggaggagaggggagaccacagggaggtcaaaggtgggcagtggggaaaggaggagaggggagaccacagggaggtcaaaggtgggcggaggggaaaggaggagaggggagaccacagggaggtcaaaggtgggcagtgggggaaaggaggagaggggagaccacagggaggtgaaaggtgggccgggggggaaaggaggagaggggag

SEQ ID NO: 6999 - DNA, 384 bp, Homo sapiens
  SIMILAR (255)..(314): 801254mologous to Homo sapiens GK002,accession number AF226045,Smith-Waterman Score=78.
caaatatgtgtttactgatatatcatatagcataccacaccgggagcgttttattgtcgtcagagaaccaagtggcacactacgcaaagcctcttgggaagaacgggaccgaatgatacaagtttatttcccaaaagaaggtcgtaaaattttgacaccaataattttcaaggaagaaaatcttaggtttgagccagattccacagagtatatcaaggttcatcacaagacctatgaagatataggtaaacgtgggaaaatatgaccttttacgttcaacaaggtactttgggtgggaatgggtgtgggtattttgttaaattattaaaaaggtttgatgggtttgcttgatttgacccggtttccggaggaggttttaattcg

SEQ ID NO: 7000 - DNA, 1207 bp, Homo sapiens
  SIMILAR (798)..(1067): 1001254mologous to Homo sapiens GK002,accession number AF226045,Smith-Waterman Score=456.
tattgctgtggagcctcttgaggagttctccgggcgtggaacgggtctgtttccgggctcgaatccagccctggcacggtggcctgctccaaccgctaccttgctctttcgagatggggctgtcacagccgacggatcaactcctatggcgcagaatctggtagcccagagaccaagaaacctacatttatggatgaggaagttcaaagcagtactcacgaaaatgacaggcttgaacttgcagaagacttttaagccagctatacaagaactgaagccaccaacctataagctaatgactcaggcacagttggaagaggctacaagacaggcagttgaggcagctaaagtacgattaaaaatgccaccagttctggaagagcgagtaccaataaatgatgtgttagctggagataaggatttttggaaaggaacagaaacaaccaaatatgtgtttactggatatatcatattgcataccacaccgggagcgttttattggtcgtcagagaaccaagtggcacactacgcaaagcctccttgggaagaccgggaccgaatgatacaagtttatttcccaaaagaaggtcgtaaaattttgccaccaataattttcaaggaagaaaatcttaggactatgtatagccaggacaggcatgttgatgtcctcaatctctgctttgcccagtttgagccagattccacagagtatatcaaggttcatcacaagacctatgaagatatagataaacgtggaaaatatgaccttttacgttcaacaagatactttggtggaaatggtgtggtattttgtaaataataaaaagattgatggtttgctgattgaccagattcagagagatttaatcgatgatgcaaccaacttggtccagctgtatcacgtgctccatccagatggccagtcggctcaaggggccaaggatcaggctgctgagggaataaatttaatcaaggtctttgcaaaaacagaagcacagaagggagcctatatagaactaacactgcagacttatcaagaagcactcagtcgccattctgcagcttcctaaaaatattttaaaaatacatttattttactaaatactgactacatttctctgttaatattgagctaaatgttaaaaaatggccagattaaaagatatcaatttgtagttctccctacaaaaaaaaaaaaaaaaaaaaa

SEQ ID NO: 7001 - DNA, 383 bp, Homo sapiens
  SIMILAR (17)..(304): 431254mologous to Volvox carteri extensin,accession number X65165,Smith-Waterman Score=167.
cttctctgcgcctgctgcatctgagccccttcccttctctggacctcctccatctgagccccttcccttctctgggccgcccccatctgaccccctagccttcgctgcacctcctccatctgagccccttactttttctgggccccctcctccatctgagccccttaccttctctgggccgcccccatctgaccccctttgcttcactgcacctcctccatctgagcctgttcctttctctgggcctgctccatctgaccgccttcccttctttggacctactacatctgagccccccaatagactgggatgcctactcaaccacaccccatatgcctctccaagaacactcctttgcctgagcccacacgtttgcatcccct

SEQ ID NO: 7002 - DNA, 2484 bp, Homo sapiens
  SIMILAR (6)..(767): 881254mologous to Rattus norvegicus Munc13-4 protein,accession number AF159356,Smith-Waterman Score=1191.
  misc_feature (1)...(2484): n = a,t,c or g
cgccagccatcaagataaggcgccgcagagtcagagatctacaggatcccccaccccaaatggccccggagatccagcctccatcccaccacttctcccccgagcagcgggccctgctctacgaggacacactctacactgtcttgcaccgcctgggtcatcctgagcccaaccatgtgacggaggcctctgagctgctgcgatacctgcaggaggccttccacgtggagcctgaggagcaccagcagacactgcagcgggtcagggagcttgagaagccaatattttgtctgaaggcaacagtgaaacaggccaagggcattctgggcaaagatgtcagtgggttcagcgacccctactgcctgctgggcattgagcagggggtaggtgtgccagggggcagccccgggtcccggcatcggcagaaggctgtggtgaggcacaccatccccgaggaggagacccaccgcacgcaggtcatcacccagacactcaaccccgtctgggacgagaccttcatcctggagtttgaggacatcaccaatgcgagctttcatctggacatgtgggacctggacactgtggagtctgtccgacagaagcttggggagctcacggatctgcatgggcttcgcaggatctttaaagaggcccggaaggacaaaggccaggacgactttctggggaacgtggttctgaggctgcaggacctgcgctgccgagaggaccagtggtaccccctggaaccccgcactgatatcctacccagaccgaggccagggccacctccaggggcaactcgtgcataagcggagagccacttcggccagccgcttcgcagccgagctacaccgtgcacctccacctcctgcagcagcttgtgtcccacgaggtcacccagcacgaggcgggaagcacctcctgggacgggtcgctgagtccccaggctgccaccgtcctctttctgcacgccacacagaaggacctatccgacttccaccaatccatggcgcagtgggtggcctacagccgcctctaccagagcctggagttccccagcagctgcctcctgcaccccatcaccagcatcgagtaccagtggatccagggtcggctcaaggcagaacagcaggaggagctggccgcctcattcagctccctgctgacctacggcctctccctcatccggaggttccgctctgtcttccccctctctgtctcggactccccagcccggctgcagtctcttctcagggtcctggtacagatgtgcaagatgaaggcctttggagaactgtgccccaacaccgccccattgccccagctggtgactgaggccctgcagactggcaccactgaatggttccacctgaagcagcagcaccatcaacccatggtgcagggcatcccggaggcaggcaaggccttgctgggcctggtacaggatgtcattggcgacctgcaccagtgccagcgcacatgggacaagatcttccacaagtgagcttatttccagtaccctcaagatccacctcttctccatggctttccgggagctgcagtggctggtggccaagcgggtgcaggaccacacgacggttgtgggtgatgtagtgtccccagagatgggcgagagtctgttccagctctacatcagcctcaaggagctctgccagctgcgcatgagctcctcagagagggatggagtcctggccctggataatttccaccgctggttccagccggccatcccctcctggctgcagaagacgtacaacgaggccctggcgcgggtgcagcgcgctgtgcagatggatgagctggtgccccctgggtgaactgaccaagcacagcacatcagcggtggatctatccaccggctttgcccagatcagccacactgcccggcagctggattggccagacccagaggaggcattcatgattaccgtcaagtttgtggaggacacctgtcgcctggccctggtgtacttgcagccttattaaaggcccgggcccgcgagctttttttcagggccagaaggaccaaggccagggcagccaacatgctgtgtgtggtggtgaatgacatggagcagctgcggctggtgattcggcaagttgcccgcccagctggcatgggaggccctggagcagcgggtaggggccgtgctggagcaggggcagctgcagaacacgctgcatgcccagctgccngagcgcgctggccgggctgggccatgagattccgcactgggtgtccgcaccctggccgagccagttggaggtgggcatcgccaagcacatccagaaactggtgggcgtcagggagtctgtcctgcctgaggatgccattctgcccctgatgaagttcctggaggtggagctttgctacatgaacaccaacttggtgcaggagaacttcagcagcctcctgaccctgctctggacccacacactcacagtgctggtggaggcggccgc

SEQ ID NO: 7003 - DNA, 363 bp, Homo sapiens
  SIMILAR (231)..(362): 681254mologous to Homo sapiens PRO2550,accession number AF130089,Smith-Waterman Score=143.
gtgagccactgtgcccggccaaattaaggtgtttaatatgactcccatgtgtcacacctgggaggatggtagtcttcagatgaagagtcagggtatggagaagtcatgagttcaagtttggatatatagagttcgaattacaagtggcacattgtaagctgtggggtggacatttgttgtcttgcctgctgaataccccttgccctttcaactggtaatggcactctactttttttcttttgagacagagtttcgctcttgtcacccacgctggagtgtagtggtgtgatctcagctcactgcaacctctgcctcccaggctcgagctattctgctgccttagcctcccaagtagctgggatt

SEQ ID NO: 7004 - DNA, 510 bp, Homo sapiens
  SIMILAR (49)..(159): 451254mologous to Homo sapiens putative p150,accession number U93567,Smith-Waterman Score=87.
  misc_feature (1)...(510): n = a,t,c or g
agtgcccaatcganngcatggcagatccngggcgaccacgcgtccgataaagagactataacaattgtaaatatatatgcacccaacatcagagcatgttctaagtatataaagcaaacattaacagaactgaaaggtgaggtagacagcaatgtaataacagcgatttcaatactccgttttcaacaacttccaacacttatcaagactgaatcattaagaaatagaaatnnnnnnnnnnnnnnnnnnnnnnnnnnnnnnnnnnnnnnnnnnnnnnnnnnnnnnttaaaaaaagtctcccaacaaaggaaagcataggaccagatggtttcacagatgaattctaccaaacatttaaagaagaattaaaactaagnnnnnnnnnnnnnnnnnnnnnnnnnnnnnnnnnnnnnnnnnnnnnnnnnnnnnnnnnnnnnnnnnnnnnnnnnnnnnnnnnnnnnnagaaaaggatgctacaagagaagaaaattacaggccaatatccctgan

SEQ ID NO: 7005 - DNA, 469 bp, Homo sapiens
  SIMILAR (8)..(127): 671254mologous to Homo sapiens NAG13,accession number AF194537,Smith-Waterman Score=140.
  misc_feature (1)...(469): n = a,t,c or g
aacataccacattgacagaataaaggacaaaagccacatgatcatctcaattgccacagaaaaagcatttgacaagattgaacatcctttcatgataaaagccctctcccaactagaagtggtaggaaatgaccaatgtaataaaggccatttataaaaagtccatggctaatatcactcaacaatgaaaggctgatagctaagatcagnnnnnnnnnnnnnnnnnnnnnnnnnnnnnnnnnnnnnnnnnnnnnnnnnnnnnnnnnnnnnnnnnnnnnnnnnnnnnnnnnnnnnnnnnnnnnnnnnnnnnnnnnnnnnnnnnnnnnnnnnnnnnnnnnnnnnnnnnnnnnnnnnnnnnnnnnnnnnnnnnnnnnnnnnnnnnnnnnnnnnnnnnnnnnnnnnnnnnnnnnnnnnnnnncgcgtgggtggccgtngnctacggtcactacgacggcgtcattggcactcc

SEQ ID NO: 7006 - DNA, 409 bp, Homo sapiens
  SIMILAR (9)..(365): 791254mologous to Homo sapiens Human secreted protein, SEQ ID NO: 5763,accession number AAG01682,Smith-Waterman Score=469.
  misc_feature (1)...(409): n = a,t,c or g
ggaacacggcgaaccgggcagcgagagtgagtgccagcattgaggacagtccggacaacagcgaaacgctgccgcccgacgagagcttccgcaacggggagaacgccaagcgcttcgccatcgacataggcgggacgttaaccaagctggcctactattcaacggtacagcacaaagtggccaaggggcgggctttcgaccactccggaaaggacacagaacgtgaacacgagccgccctatgagagttcagttcaagaagagagcactgctcgacggcacttcattaaggcggagaaaacctacaccgaagcctgcctggacttcatcaaagaccatctcgtcaacacagagaccaaggtcatccaggcgaccgggggcggggcctacaaggtcaaagacctcatcgn

SEQ ID NO: 7007 - DNA, 480 bp, Homo sapiens
  SIMILAR (91)..(129): 921254mologous to Arabidopsis thaliana Putative membrane protein,accession number AC011001,Smith-Waterman Score=67.
attgagcccgatgtaccggtccgtttgatccgcgttgacccacgcgtccgcccacgcgtccgcccaggctccactccccagttgtgaaaggaggagctctacggtgactttgaagacttggaaacaggacgtgcacaagggaaaatcgggccccgacactcagaatgaagatatagagaaacacggatgaaattgaccccgacgaaaaaaaaagtgccaagaaaaagcatttggataagaagagaaaattgaaggagatgttggatgcagaatatgatgaaggagaaagcacatattttgatgatcttaaaggagaaatgcagaaagaagcacagatgcgtctgaagaatcatcgctggtataagaaaatcctcaagtcccaagatccaatcatattttctgtagggtggaggagggttcacaccatcctgctctattatatcgaagaccacaatggaagacaaaggcttctaaagtata

SEQ ID NO: 7008 - DNA, 1557 bp, Homo sapiens
  SIMILAR (529)..(1038): 331254mologous to Arabidopsis thaliana Putative membrane protein,accession number AC011001,Smith-Waterman Score=252.
atggctgcaaacaggaaggattttattcaccgtcgatgcggccccgagttgtcccaaagcgaggcagtgccccaaggtctatgcagagcagaacgcagctccgccctcgcaatgctctccgggtctgtgccgaggagaacgcagctccgcccttgcaaaggcacacagcgccggtgccggcgtggcggagaagcggacagcggcggagaggcggtcggcggcggcgcggcggagaggcggtcggcggcggcgcggcggagaggcggtcggcggcggggcggcggagaggcggtcggcggcggcgcggcggagaggcggtcggcggcggcgcggcggaggcgaggcgggcggcggcggcgcggcggaggcgaggcgggcggcggcggcgcggcggaggcgaggcgggcggcggcggcgaggcgggcggcggcggcgaggcgggcggcggcggcgcggcgggcggcggcggcgcggcgggcggcggcggcgcggcggatagcggagagcggcggagaggcgcacagccgcggagaggcgcacagcggcggagaggcgcacagcggcggcgcaggcgcggagaggcgcaggcccaggctccactccccagctctgaaaactcatcctggtcagagttcagaaggacatgtggagtataagctgaatcacgtagaatttgaagatcaagatgatgaagccagagttcagtatgagggttttcgacctgggatgtatgtccgcgttgagattgaaaatgttccctgtgaatttgtgcagaactttgaccccctttaccccattatcctgggtggcttgggcaacagtgagggaaatgttggacatgtgcagatgcgtctgaagaaacatctctggtataagaaaatccctcaagtcccaagatccattcatatcttctgtaggtggaaggaggtttcagaccattcctactctattatattgaagaccacaatggaagacaaaggcttctaaagtataccccacagcacatgcattgtggagcagcccttttggggtaaaatatgattacaataacttgcctattgccgagattaaactttacaggctgcgttattttagctttgtgcttttcctttcataaaattccactcctaagatgtttctgttttctgggagcggggaggtggtttggagtatatatgtaaatctatatccaaatctaaatgtccgtatccagtatgttaaactagaatctaaaatttctggtttgctatatttctttttttccttttcctttaagaccctatcactccacagggaactggtttcttggcaatacagtctgtcagtggcataatggtaactatcttggacaatttcttttacagattggtttgagaaatatatcctgaatgtgggttattatgtacatgagcctttaagttgaaaattactcatttttattattataaagtaaatttccctttgcttttaatctttgtacatccttttcagtagggtgtgggattaaaggaggggcggtggaagaattataatggtacattaaaaattaaaaaaaaa

SEQ ID NO: 7009 - DNA, 904 bp, Homo sapiens
  SIMILAR (629)..(793): 721254mologous to Arabidopsis thaliana Putative membrane protein,accession number AC011001,Smith-Waterman Score=238.
  misc_feature (1)...(904): n = a,t,c or g
gcgctgcaggaattcggcacgaggcacagcgaggcgccggcccagactccactccccagctgtgaaaggaggagctctacggtgactttgaagacttggaaacaggggacgtgcacaagggaaaatcgggccccgatactcagaatgaagatgtagagaaacaaggaagaaattgaccctgacgaagaagaaagtgccaagaaaaagcatttggataagaagagaaaattgaaggagatgtttgatgtggaatatgatgaaggagaaagcacatattttgatgatcttaaaggagaaatgcagaaacaagcacagataacagcatacaggttttccccccccaccccgtcatgtacagctgaatcatgcagaatttgaagatcaagatgatgaagccagagttcagtatgagggttttcgacctgggatgtacgtctgcgttgagattgaaaatgttccctgtgaatttgtgtagaactttgacccccgctaccccattatcctgggtggcttgggcaacagcgagggaaatgttggatacgtgcaggtgggtccctttgctgcatatttggtgcctgaggctctgtggatttcccctccatcaatcatcttaccctctcatccccctcagatgcgtctgaagaaacatcgctggtataagaaaatcctcaagtcccgagatccaatcatattttctgtagggtggaggaggtttcagaccatcccgctctgttatatcgaagaccacaatggaagacaaaggcttctaaagtataccccacagcacgtgcatcgcgganagccttttgggataaaatatgtttacaataacttgcctattgctgagattaaaccttacaggctgcgttattttaaaaaaaaaaannnnacactncaaannatc

SEQ ID NO: 7010 - DNA, 1194 bp, Homo sapiens
  SIMILAR (109)..(249): 481254mologous to Arabidopsis thaliana Putative membrane protein,accession number AC011001,Smith-Waterman Score=107.
  misc_feature (1)...(1194): n = a,t,c or g
ctaagaatgaggcttggaacgcggagtgcattgtgggcctgtcgtgggtggggccagcagcacatgcatgcctggctcacagagcagcctttgggtgttcttttcccagaggagctctacggtgactttgaagacttggaaacaggggacgtgcacaagggaaaatcgggccccgatactcagaatgaagatatagagaaagaagttaaggaagaaattgaccctgaccgaagaagaaagtgccaagaaaaagcatttggataagaagagaaaattgaaggagatgtttgatgcagaatatgatgaaggagaaagcacatattttgatgatcttaaaggagaaatgcagaaaagaagcacagctgaattcacgtagaatttgaagatcaagatgatgaagccagagttcagtatgagggttttcgacctgggatgtacgtccgcattgagattgaaaatgttccctgtgaattttgtgcagaactttgacccccattaccccattatcctgggtggcttgggcaacagtgagggaaatgttggctacgtgcagatgcgtctgaagaaacatcgctggtataagaaaatcctcaagtcccgagatccaatcatattttctgtagggtggaggaggtttcacaccatcccactgtattatatcgaagaccacaatggaagacaaaggcttctaaagtataccccacagcacatgcattgcggagcagccttttggggccctatcactccacagggaactggtttcttggcaatacagtctgtcaagtggcataatgcctgattttcgggtagctgctacaggagttgtccttgatctggataaatccataaaaattgtgaagaaattaaagctaactggttttccatataaaattttcaagaacacttcatttattaagggaatgtttaattctgccttggaagtggccaaatttgaaggtgctgtgattcgaacagtcagtgggataaggggggcagatcaagaaagcactccgagctccagaaggagttttcagggccagctttgaggataagctgctgatgagcgatattgtcctcatgcgacttggnacctgttccatcccagcgtctatacccagtaacatcttgttgaaccattggtgagaagcacctggtcagaatgcggccccggccantcagctcccctggtcagct

SEQ ID NO: 7011 - DNA, 371 bp, Homo sapiens
  SIMILAR (184)..(369): 511254mologous to Rattus sp. reverse transcriptase homolog,accession number S80119,Smith-Waterman Score=183.
  misc_feature (1)...(371): n = a,t,c or g
nnnnnnnnnnnnnnnnnnnnnnnnnnnnnnnnnnnnnnnnnnnnnnnnnnnnnnnnnnnnnnnnnnnnnnnnnnnnnnnnnnnnnnnnnnnnnnnnnnnnnnnnnnnnnnnnnnnnnnnnnnnnnnnnnnnnnnnnnnnnnnnnnnnnnnnngcagtcttaaaaaggaacaacaaagttggtagtcaaactttctgatttcaaatcttatttcaaagctatagtaattaaaacagtgaggaactgcataaatacaaaccatatagatcaatggaacagaatacagaatccagaaataaaccctcacatatatggtcaaatgattttcaagaaacgtgccaagaacaaacaatggaaaaaggacggtcttcn

SEQ ID NO: 7012 - DNA, 1482 bp, Homo sapiens
  SIMILAR (1)..(1482): 1001254mologous to Homo sapiens Human manganese superoxide dismutase gene,accession number AAN81159,Smith-Waterman Score=2603.
atgttgagccgggcagtgtgcgggtgagaaggaaggggacccggtcacgccccaaggggaaggggctcgcggcgggcagggctccgggcaatggcgacatggccgcacgggcctggcgggaccgccgacctgcaggcggttctcccgggagtgccccgcgcggcggcctggagccggggatccgagggaggggacgcggggactcgggggacgccgcgctgcgttcctcggcagcccagcctgcgtagacggtccgcggcgctgactgaccgggctgtgctttctcgtcttcaggcaccagcaggcagctggctccggttttggggtatctgggctccaggcagaagcacagcctccccgacctgccctacgactacggcgccctggaacctcacatcaacgcgcagatcatgcagctgcaccacagcaagcaccacgcggcctacgtgaacaacctgaacgtcaccgaggagaagtaccaggaggcgttggccaagggtaggttccaggctgagcgggaaaaaaatgtggtttgcacttttaacttttaaggagatgttacagcccagatagctcttcagcctgcactgaagttcaatggtggtggtcatatcaatcatagcattttctggacaaacctcagccctaacggtggtggagaacccaaaggttggatatattgtgcacccttatctacaacttcttgcacagtaggaatcgatgtaatttcttgggccctatgacaaaaaatattttgaatacatgtaatataacattttactgtaattattggaaatctgttcatttgtgggtggttttgggattttttttttaataggggagttgctggaagccatcaaacgtgactttggttcctttgacaagtttaaggagaagctgacggctgcatctgttggtgtccaaggctcaggttggggttggcttggtttcaataagcaacggggacacttacaaattgctgcttgtccaaatcaggatccactgcaaggaacaacaggttacatttagatagggttgagtgttgttccagtttggaaaacgagtccactattaaagaacgtggactccaaggtcaaagggcgaaaaaccgtctatcagggcgatggccactacgtgaaccatcacccaaatcaagttttttggggtcgaggtgccgtgaaagcactaaatcggaacctaaagggagcccccgatttagagcttgacggggaaagccgggcgaactgtggcgagaaaggaagggaagaaagcgaaaggagcgggcgctaggcgtggcaattgtgtagcgtcactggcgcccccttctttctaacaggccttattccactgctggggattgatgtgtgggagcacgcttactaccttcagtataaaaatgtcaggcctgattatctaaaagctatttggaatgtaatcaactgggagaatgtaactgaaagatacatggcttgcaaaaagtaa

SEQ ID NO: 7013 - DNA, 371 bp, Homo sapiens
  SIMILAR (139)..(198): 951254mologous to Bos taurus manganous superoxide dismutase; MnSOD,accession number S67818,Smith-Waterman Score=98.
  misc_feature (1)...(371): n = a,t,c or g
gctgaattttaggacaaacggatgttatagataagctggtcccattatctaatagcttaccaaagaaaaaaatataatgtatacagtggttgaaaaagtaggagttacaaaaaaatgtgtttgcattttaacttttcaggagatgttacagcccagatagctcttcagcctgcactgaagttcaatgggggggggcattatcaatcatagcattttttggacaaacctcagccctaacggtggtggagaacccaaaggttggtatatattggtgcacccttatctacattttgtgcacagtaggaatcgattgttgatttactggaggtaacctatacctggttttttgttttttttgtggncgggttttg

SEQ ID NO: 7014 - DNA, 423 bp, Homo sapiens
  misc_feature (1)...(423): n = a,t,c or g
atgttttgcaactcagttaattcgagtccacttttgaaatgcatcatgattagaaagtgtctgtagtttgaaaattagtccaaatttctcctgttgtgagtgtatttagaagtagataccaaaatggaagcttgacacccctgttagctcagcaagcagagacgatcactatatatatattgatgtatggccttccagggtttttctatgcacatagatnnnnnnnnnnnnnnnnnnnnnnnnnnnnnnnnnnnnatcgacatgcaccggcgctgagggtcacgaatcggagtcattctcctactgggggacgcgtggcccttccgcaaccatggcttgtgatggtttaacgcgtacagaccattcctccccgtcccgcgcgcggtatacgatnnnnngatccgggaattccggacgggtaca

SEQ ID NO: 7015 - DNA, 360 bp, Homo sapiens
  misc_feature (1)...(360): n = a,t,c or g
attaacnnnnnnnnnnnnnnnnnnnnnnnnnnnnnnnnnnnnnnnnnnnnnnnnnnnnnnnnnnnnnnnnnnnnnnnnnnnnnnnnnnnnnnnnnnnnnnnnnnnnnnnnnnnnnnnnnnnnnnnnnnnnnnnnnnnnnnnnnnnnnnnnnnnnnnnnnnnnnnnnnnnnnnnnnnnnnnnnnttcctttagaagtacaatttgtaatgtacttgtcacttaatgagtgttatacccatttctgttctgaccaaactaatccccaaatgtcatctttgattcctaggacagtccagagaaaactgctgccacggtaaggggagatttttatgtcactggagacagaggaatgatggacag

SEQ ID NO: 7016 - DNA, 1023 bp, Homo sapiens
  SIMILAR (588)..(665): 921254mologous to Homo sapiens Human manganese superoxide dismutase gene,accession number AAN81159,Smith-Waterman Score=131.
tttcgtcggccctgctccccgcgctttcttaaggcccgcgggcggcgcaggagcggcactcgtggctgtggtggcttcggcagcggcttcagcagatcggcggcatcagcggtagcaccagcactagcagcatgttgagccgggcagtgtgcggcaccagcaggcagctggctccggttttggggtatctgggctccaggcagaagcacagcctctcccgacctgccctacgactacggcgccctggaacctcacatcaacgcgcatatcatgcatctgcaccacagcaagcaccacgcggcctacgtgaacaacctgaacgtcaccgaggagaagtaccatgaggcgttggccaaggggagatgttacagcccagatagctcttcagcctgcacttgaagttcaatggtggtggtcatatcaatcatagcattttctggacaaacctcagccctaacggtggtggagaacccaaaggggggagttgctggaagccatcaaaacgtggactttggttcctttgacaagtttaagggagaagctgacggctgcatctgttggtgtccaaggctcaggttggggttggcttggttttcaataaggaacggggacacttacaaattgctgcttgtccaaatcaggatccactgcaaggaacaacagggccttattccactgctggggattgatgtgtgggagcacgcttactaccttcagtataaaaatgtcaggcctgattatctaaaagctatttggaatgtaatcaactgggagaatgtaactgaaagatacatggcttgcaaaaagtaaaccacgatcgttatgctgagtatgttaagctctttatgactgtttttgtagtggtatagagtactgcagaatacagtaagctgctctattgtagcatttcttgatgttgcttagtcacttatttcataaacaacttaatgttctgaataatttcttactaaacattttgttattgggcaagtgattgaaaatagtaaatgctttgtgtgattg

SEQ ID NO: 7017 - DNA, 436 bp, Homo sapiens
ctctggcaggggtgccagtctcaggcccggcgtgcgccctccatcagtgtcatgggagccatattcgggcccaggctccacaccaccccctccctccagcaggagcaaagacgtgggaaaaccagcccagagctgggtccgaggcggctccacccagcctaacacgggacagctgccgaaagaggggctgagtacgccccacccagtccctagagctggaatcccttcctccagacaggcccttctaagctcagggaacccggggactcgggcacccagcgccccagcactccgccccgaggcccaggcaagtccagcggagtttccaggcgcaccattcctgagctaggtggggagaggctgggtggcgcccgtttccaggagcccccaccccagccggcagcgagcttcccgggagcagccgctacccaggcgc

SEQ ID NO: 7018 - DNA, 394 bp, Homo sapiens
  SIMILAR (22)..(321): 571254mologous to Homo sapiens triple LIM domain protein,accession number U93305,Smith-Waterman Score=369.
cccggctcgagccggcagcgctgttggcaccaaccttgctttgcctgccaggcctgtggccaggccctgataaacctcatctacttctaccatgatggacaactctactgcggccgtcatcatgcagagttgctgcgcccgcgctgcccggcttgtgaccagctgatcttctcctggcgctgcaccgaggcggagggacagcgctggcatgagaaccacttctgttgccaggactgcgccgggcctctgggcgggggacgttatgccctgcctgggggaagcccctgctgccccagctgcttcgagaaccgctactcggatgcaggctcgagctgggccggtgcactggaaggtgacgcattccttggggagactggactcgaccaactgaagg

SEQ ID NO: 7019 - DNA, 1608 bp, Homo sapiens
  SIMILAR (322)..(1239): 261254mologous to Mus musculus Plenty of SH3s; POSH,accession number AF030131,Smith-Waterman Score=196.
atgggaggccacctggcaaatgttcccacaggaacttctcttcaacaaacagggcttatggaaaaacattttacatctggtaaacaactcttaaaaacccttcagaataacattccacaaaccacagagaggacgcacaatgggtggcaccaggcatggctgttggttttcagctgtgtcaggtctttctacgtagctgctctgtttgctgtgggcctgggttgtggcattcattggttctgcttggctgtcttttctgtctgtgcaggacattccacagccgtggtcagtctgcctggctcccagcaacacctctcagcgaacatgtttgtagccctgcactcctactcagcccatggacccgatgagctggacctgcaaaagggagaaggcgtcagggtcctggggaagtgccaggacggctggctcaggggcgtctccttggtcaccgggcgagtcggcatcttcccaaacaattacgtcatccccattttcagcacaccctcacagttatccgggtgtagggaggtggggccaactttagttaagcctgtagttcacaaaatgggtgtgtatgggtgggaagaaggcagcatttcagaaggtgatccacggcaaagccgtcccttcaaatccgtctttgtgcccactgccatagtcaaccccgtgagaagcacagccggccctgggactttaggacaagggtctcttcggaaagggcggagcagcatgagaaagaatggatccctgcagagacccctccagtccgggatccccactctcgtggtaggctccctcagacgcagccccaccatggtccttcggcctcagcagttccaattctaccagccacaggggatcccctcctccccctcagccgtggtggtggagatggggtccaagcctgccctcacgggggagcccgccctcacgtgcatcagcaggggcagtgaggcccggatccactccgcggccagctccctcattatggaagacaaagaaatccccatcaagagtgagcctctgccaaaaccgcccgcatctgccccaccatccatcctggtgaaaccagaaaactcaagaaatggcatcgaaaagcaagtcaaaaccgtgagatttcagaaatacaagccctcctcccaccaaacattacactcccatatcccacctccggaaagcctgaacagcctagcctccctcaatgcgttccagcctgaagcagcgtccttgggcccagagaggaccgtcctatttgcccaccgaagtggctgccactccggacagcagacagacctccggagaaagtcagctcttggcaaggccacaaccctggtgtccaactgcctcaaggcacgcagaccgtgtttcccagcaaatgaacctacggggtggcttttcctaggaccccaaagaggtgaattgcatttaaatacagtctgcctccactgagggcatcctgccattctttggggacttgagcatgggtccttgttcttcctatttcacctccaggaaagcaaaagtgggagcagaaattcctgccctgggtgggaggatagatggcgtggccttccaaacatacaaacataatgatttgatgccacaaag

SEQ ID NO: 7020 - DNA, 1576 bp, Homo sapiens; identical to SEQ ID NO: 6997
  SIMILAR (95)..(151): 841254mologous to Homo sapiens Human secreted protein, SEQ ID NO: 7874,accession number AAG03793,Smith-Waterman Score=89.

SEQ ID NO: 7021 - DNA, 1576 bp, Homo sapiens; identical to SEQ ID NO: 6997
  SIMILAR (95)..(151): 841254mologous to Homo sapiens Human secreted protein, SEQ ID NO: 7874,accession number AAG03793,Smith-Waterman Score=89.

SEQ ID NO: 7022 - DNA, 514 bp, Homo sapiens
  SIMILAR (1)..(84): 1001254mologous to Homo sapiens CTCL tumor antigen se2- 5,accession number AF177228,Smith-Waterman Score=144.
  misc_feature (1)...(514): n = a,t,c or g
ctatcccaaagtgagaagaacaattactattcaagccgttttagccctgacagccagtatattgacaacaggagtgtgaacagtgacagggcttcacagggngagagagagcaccccgactgaaccacccgcctgagcagatagactctcactcaagactacctcatagcgcacacccctcgggaaaaccaccatccgctccagcctcggcacctcagaatgtatttagtacgactgtaagcagtggttataacaccaaaaaaataggcaagaggcttaatatccagcttaagaaaggtacagaaggtttgggattcagcatcacttccagagatgtaacaataggtggctcagctccaatctatgtgaaaaacattctcccccggggggcggccattcaggatggccgacttaaggcaggagacagacttatagaggtaaatggagtaggatttagtgggcaaatcccaagaggaagttgtttcgctgttgagaagcaccaagatggaaggag

SEQ ID NO: 7023 - DNA, 515 bp, Homo sapiens
  SIMILAR (468)..(515): 561254mologous to Escherichia coli valyl-tRNA synthetase,accession number X05891,Smith-Waterman Score=49.
  misc_feature (1)...(515): n = a,t,c or g
ggtagtccaggcggccccaatgaaaaccccagtttgacngcanacncgnccggnaatnngggnngacccacgcgtccgcgccgcaggcattctgtatgagtttacctggaaccagttctgtgactggtatctcgagctgaccgggccggtaatgaacggtggcaccgaagcaaaactgcgcggtactcgccatacgctggtgactgtactggaaggtctgctgcgcctcgcgcatccgatcattccgttcatcaccgaaaccatctggcagcgtgtgaaagtactttgcggtatcactgccgacaccatcatgctgcagccgttcccgcagtacgatgcatctcaggttgatgaagccgcactggccgacacagagtggttgaagcaggcgatcgttgcggtacgtaacatccgtgcagaaatgaacatcgcgccgggcaaaccgctggagctgcttgtggctggtttgcacgcggaatccaaacacgtcggtaaatgaaaaccgtggtttcttg

SEQ ID NO: 7024 - DNA, 505 bp, Homo sapiens
  SIMILAR (354)..(503): 941254mologous to Homo sapiens Human secreted protein encoded by gene 30 clone HRDDV47,accession number AAY41337,Smith-Waterman Score=236.
  misc_feature (1)...(505): n = a,t,c or g
ggagcctgtcaagaagatatttaactatattatacatgtgtttcgaaacatcatggatttcaaactcttccttgtgtttgtggcaggagtttttcttttcttttatgcaaggaccctgagtcaaagccctactttctattactcctcgggaactgtgctaggtgttctaatgacattagtctttgtcttgctgttggtgaaaagattcattccgaagtatagcaccttttgngctctaatggttggttgttggtttgcctcagtttatattgtatgccagttgatggaagatctgaagtggctgcggtatgataacaggatatatgtattaggctatgtcttgatagttggatttttcagcttttgttgtttgttacaagcatgggccccttgcagacgacaggagcagaagtcttctgatgtggatgctgcgactcctctccctggttctggtctatgctggtgtggccgtgcctcagtttgcctatgcagccataatcctccg

SEQ ID NO: 7025 - DNA, 417 bp, Homo sapiens
  SIMILAR (29)..(388): 741254mologous to Homo sapiens Human secreted protein encoded by gene 30 clone HRDDV47,accession number AAY41337,Smith-Waterman Score=442.
  misc_feature (1)...(417): n = a,t,c or g
ggagcctgtcaagaagatatttaactatatgatacatgtgaatcgaaacatcatggatttcaaactcttccttgtgtttgtggcaggagtttttcttttcttttatgcaaggaccctgagtcaaagccctactttctattactcctcgggaactgtgctaggtgttctaatgacattagtctttgtcttgctgttggtgaaaagattcattccgaagtatagcaccttttgggctctaatggttggttgttggtttgcctcagtttatattgtatgccagttgatggaagatctgaagtggctgtggtatgaaaacaggatatatgtattaagctatgtcttgatagttggatttttcagctcttgtggttggtacaagcatgggcccccttgcagacgacaagagcagaaatcttn

SEQ ID NO: 7026 - DNA, 357 bp, Homo sapiens
  SIMILAR (86)..(175): 601254mologous to Homo sapiens Human secreted protein, SEQ ID NO: 7492,accession number AAG03411,Smith-Waterman Score=83.
  misc_feature (1)...(357): n = a,t,c or g
ctgaccctccatgaacccgccctgccctnggccctcccccaaagtgctgggattaatagncgtgagcccactgcgcccnggcccttttttttttttttttggtgatagggtcttgctctgtcaccccaggctggagtgcagtggcatgatcacagctcactgcagcctcaaactcctgtgctcccagtgancctcccacaacagcctcctgaatagctgggaacacagacacatgccaccacacctagctaaatttttttttcatcagcagacaaagctataaaagaaatgaaacaaaaatagatcacttgaatccgcaccactgtctgtgttcataaagaaagtgacaactacact

SEQ ID NO: 7027 - DNA, 426 bp, Homo sapiens
  SIMILAR (17)..(265): 961254mologous to Homo sapiens CTP synthetase isoform,accession number AF226667,Smith-Waterman Score=418.
cccgaaggtttaacgccccattagaatggccgtgaagcagaagatttctatgttgtgtcacgtcaaccctgaacaggtcatatgtatccatgatgtttcttccacataccgagttcctgtgcttttagaggaacaaagcattgtgaaatattttaaggagagattgcacctgcccatcggtgattctgcaagtaatttgctttttaagtggagaaatatggctgacaggtatgaaaggttacagaaaatatgctccatagccctcggttggcaaatacaccaagctcagagactgctacgcctctgtgttcaaagccctggaacactcagccctggccatcaaccacaagttgaatctgatgtacatagactccattgatctggagaagatcactgaaaccgaggaccctgtgaaatttcatgaag

SEQ ID NO: 7028 - DNA, 266 bp, Homo sapiens
  SIMILAR (119)..(196): 1001254mologous to Homo sapiens Human FLEXHT-3 protein sequence SEQ ID NO:3,accession number AAB36581,Smith-Waterman Score =136.
ggcacgagggggagggttgctggccatgctgtatctgcagctcgtaaccgcactggttgaggcaggtatgcgtatgtgtggcactgcccccagggaccaggcctagagactccgctttgttgcagacaccagtggagcctattttcgccgggaaggattaggtagcaactacctaggtggtcgtagccccactgaggtaagctgagtggggtgggacatgctggcaaggagacatagaataattgtcacgaaacaatcaggctttt

SEQ ID NO: 7029 - DNA, 1047 bp, Homo sapiens
  SIMILAR (40)..(375): 531254mologous to Homo sapiens Human myelin oligodendrocyte glycoprotein gene,accession number AAZ29204,Smith-Waterman Score= 285.
tcctaatataatctggatagggaatctttcttgggtatatgtttgcaggaattttctaccctgaagtttgcctatttattctctttttttttttttttgagatggagtctcactttatcacccaggctggagtgcagtggcacggatctcggctcactgcaacctccgcctcccaggttcatgccattctcctgcctcagcctcccgagtagctgggattacaggtgcccaccaccatgcccggctaattttttgttatctttactagagacggggtttcaccatgttgggccaggctggtcttgaactcctgacctcaagtgatccacccgccttggcctcccaaagtgctgggattacaggtgtgagccaccgtgcctggtgaaacttttttttatttttatttttgagaaagagtttcactcttgttgcccctgctagagtgcagtggcctgatcttggctcacagaaacatccgcctcctgggttcaagtgattctcctgtatcagcctcccgtgtagctgggatttcaggcatgtgccaccacacccagccaatttttgtatttgtagttgagatgaggttttactatgttggccaggctggtctcgaagtcctgacctcaggtgatccgcccgtctcggccgcccaaagtactgggattacaggcttgagccaccgcgcccagccaagttctgtgaggttctgacaaggaaaatctggtcatataattacagataatcccagtaagaataggaggaagtcagtatgattttatgggacttaaaaaaaaattaactcagtatgtatgaaagtggaaggaaacaggaaatacaaacaagaatgaatataaaacagtagtagactaaaacagatgatgaactgagtctgaaaaatgcaggtgggcacagtggctcacgcctgtaatcccaggactttgggaagctgaggtgggaggattgcttgaagccaggagttatgtggaccagtttggaccacacagcaaagaccctatctctgttaaaaaaaattttttttttttaaag

SEQ ID NO: 7030 - DNA, 894 bp, Homo sapiens
  SIMILAR (798)..(893): 751254mologous to Homo sapiens Human secreted protein, SEQ ID NO: 7001,accession number AAG02920,Smith-Waterman Score=132.
tttttttttttttttttaactaaagtccatagtttattcagatttttttctttttgaaacgggatctcactctgttgcccaggctagagtcacatacttgattttcacaacggcttaaaggaaaacaagagacaagtagattccctgcccacacctctgctgaaggaagacaaagtatgctccaagtgcctcctacccagggccagaggcagatggggacaaagcagaggagcacagctctgagggcatcccagaccgcaaagaaaataaggtgcacctgccccaaagctcagccaagactcctttccactgtgactcccaaatggagggccccaggtgctgtgtaaacttctcctctcagaggagctgagttctgtctccctcccttcactgacccggcctcccaggtgctgagtgtcacagatctcaactgctcccacttgaagcaggaccctgagatgtgagactcggcccaggccacgtacctaagcccttcctgtgtcacactcctgtccttatagcacccctctggacacagcttctccatctcctcagtggcacatacaattggttggcagttataatccactcatgtccttctagaatgcctcctgtaacttagaggcttggtgagctgaaacctatttcaaagactcccattctgctaggattctacatgctaatcaggctcctatatatgcgcaccagaaggaagcaaggtggaggccagctgcttgaccttctggctgtctgtggtgacaaagtggtggaaatacaggacctttgaaagcacgggtaggctgggcacggtggctcatacctgtaatcccagcaccttgggaggccaaggcgggtggatcatgaggtcaggagtccaagaccagcctggccaac

SEQ ID NO: 7031 - DNA, 452 bp, Homo sapiens
  SIMILAR (253)..(53): 881254mologous to Homo sapiens RNA polymerase III transcription initiation factor B'' short,accession number AF298152,Smith-Waterman Score=300.
tctccggttcctcaactcattgtccccaccgtcctatcagtggtgctcctagagccctttcttggggctccgctccccgcaaatcgactgtggacacatctgtgggctccgcgggcttggaagcagagtccgtggcaggctccggcggcttggaagactcccgtcctcgctggggattggaagctgtggagcccctggcgcgtacaccaggcctgacattcggcttcacgataaggcgtgccctgcggaacatggcggaggcagggggcccggggaggcagcctcacggccgctcacagccccgagccccggcggctgcccggaaaggggattaggaactacgccctccccacaaagccgcaccgccagctcagggggcagctaccgtagtttcactgacccgccgccgcctcctcctatctgccaccaccgccgctttttcttgaccctgc

SEQ ID NO: 7032 - DNA, 421 bp, Homo sapiens
  SIMILAR (48)..(269): 901254mologous to Mus musculus Plenty of SH3s; POSH,accession number AF030131,Smith-Waterman Score=374.
agctctgcagatcttttgagctacaattagccacagtgttgctctgagacctgcaaagctcccagggcggacagcagcctcgggtgcaatcctggagccctccagggagggggatacctcagttaccatgtgccaaagcattatacaactatgaaggaaaagagcctggagaccttaaattcagcaaaggtgacataatcattttgcgaacacaagtggatgaaaattggtaccatggggaagtcaatggaatccatggcttttttccccaccaactttgtgcagattattaaaccgttacctcagcccccacctcagtgcaaagcactttatgactttgaagggaaagacaaggaagcagacaaagattgccttccatttgcaaaggatgatgttctgactgtgatccgaagagtggatg

SEQ ID NO: 7033 - DNA, 492 bp, Homo sapiens
  SIMILAR (44)..(457): 921254mologous to Homo sapiens TAPL,accession number AB045381,Smith-Waterman Score=637.
attgacactgttgaacaccattacgccaagcttggcacgagggaacttctaccccctggaggggggccgggtgctgctggacggcaagcccattagcgcctacgaccacaagtacttgcaccgtgtgatctccctggtgagccaggagcccgtgctgttcgcccgctccatcacggataacatctcctacggcctgcccactgtgcctttcgagatggtggtggaggccgcacagaaggccaatgcccacggcttcatcatggaactccaggacggctacagcacagagacaggggagaagggcgcccagctgtcaggtggccagaagcagcgggtggccatggcccgggctctggtgcggaaccccccagtcctcatcctggatgaagccaccaacgctttggatgccgacagccgagatctgatccaacatgccctctcttgggaacctgagaaaacacagggattttttatcccccccggtttggcccg

SEQ ID NO: 7034 - DNA, 909 bp, Homo sapiens
  SIMILAR (231)..(473): 431254mologous to Homo sapiens Human secreted protein clone cw1481_1 protein sequence SEQ ID NO:106,accession number AAY53050,Smith-Waterman Score=149.
cgaaggcaaagtggaggagcctgaaaacccagctgccaaggagaaatgtgagggcaaagaagaggaagaagaaaccgatggcagcgggaaggagagcaagcaggaatgtgaggcagaggccagctctgtgaaaaatgaactgaaaggtgttgaggtcggcgcaaacactgggtccaaatctatttcagagaaaggttccgaagaggatgaagaggaaaagctggaggatgacgaataagtcggaagagtcttcccagcccgaagcaggagctgtctctagagggaagaattttgatgaagaaagcaatgcttccatgagcactgctagagatgaaacccgagatggattctacatggaggacggagatccttcagtagctcagctccttcatgaaagaacatttgccttctcgttttggcctaaggatagagtaatgataaaccgcttagacaacatctgtgaagcagtggttgaaaggcaaatgggccagtaaataggcgccagatgtttgatttccaaggcctcatcccaggttacacacccaccacagtggacagccccttgcagaagaggagctttgctgagctctccatggtcggccaagccagcattagtgggagtgaggacatcactacgtctcctcagttgtcaaaggaagatgccctcaacctctctgtccctcgccagcggaggaggaggaggagaaaaatcggaaattgaggccggaaagagctgccaagaggcgaaatctcatggagatggttgcccagcttcgagagtctcaggtggtctcagaaaatggacaagaaaaagttgtagatttatcaaaggcctcaagagaggcaacaagctctacctcaaatttttcatctctttcttcaaaagtttatcttgcctaatgtctcaac

SEQ ID NO: 7035 - DNA, 381 bp, Homo sapiens
  SIMILAR (334)..(378): 861254mologous to Homo sapiens PRO0898,accession number AF130051,Smith-Waterman Score=61.
tcttttccatttttatttttttagccaatttccaaagccctaaatcacattttcccttagactgaaactctagaaaaacattattattattattatttattattttttgagacaggggtcttgcctcatttgcccaaggcttggaggtgcagtggcacaatctcagctcactgcaaccttccacctccagtgttgaggcgattcgtccgtgccttggccttccaaggggctgcgattacaggcccgtgccaccacaccaggctaatttttgtattgttagtagagacgggttttaccatgttggccaggctggtcttgaactcctgacctcaagtgatccgcccacctcgcaatcccaaagtgctgggattacaggcgtga

SEQ ID NO: 7036 - DNA, 389 bp, Homo sapiens
  SIMILAR (84)..(188): 481254mologous to Homo sapiens NAG13,accession number AF194537,Smith-Waterman Score=80.
  misc_feature (1)...(389): n = a,t,c or g
gaaaataaagaggaaggacaacttcccagttcattttatgaagctagtattatcctgacactaaaaccagataaagacagtacaaaaaaatcctttacagaccaacatcctcatgaattttgatgcaaaaaatatttaacaaaatgtttacaaatagaattcagcaatacatagaaagaattatacactnnnnnnnnnnnnnnnnnnnnnnnnnnnnnnnnnnnnnnnnnnnnnnnnnnnnnnnnnnnnnnnnnnnnnnnnnnnnnnnnnnnnnnnnnnnnnnnnnnnnnnnnnnnnnnnnnnnnnnnnnnnnnnnnnnnnnnnnnnnnnnnnnnnnnnnnnnnnnnnnnnnnnnnnnnnnnnnnnnnnnnnnnnnnnnnnnnnnnnnn

SEQ ID NO: 7037 - DNA, 357 bp, Homo sapiens; identical to SEQ ID NO: 7026
  SIMILAR (86)..(175): 601254mologous to Homo sapiens Human secreted protein, SEQ ID NO: 7492,accession number AAG03411,Smith-Waterman Score=83.
  misc_feature (1)...(357): n = a,t,c or g

SEQ ID NO: 7038 - DNA, 2837 bp, Homo sapiens
  SIMILAR (1397)..(2497): 981254mologous to Homo sapiens leucin rich neuronal protein,accession number AF053356,Smith-Waterman Score=1955.
atggcggcggccgtagcggctccactcgccgccgggggtgaggaggcggcagccacgacctccgtgcccgggtctccaggtctgccggggagacgcagtgcagagcgggccctagaggacgccgtggccaccgggaccctgaacctgtctaaccggcgcttgaagcacttcccccggggcgcggcccgtagctacgacctgtcagacatcacccaggctgacctgtcccggaaccggtttcccgaggtgcccgaggcggcgtgccagctggtgtccctggagggcctgagcctctaccacaattgcctgagatgcctgaacccagccttggggaatctcacagccctcacctacctcaacctcagccgaaaccagctgtcgctgctgccaccctacatctgccagctgcccctgagggtcctcatcgtcagcaacaacaagctgggagccctgccccctgacatcggcaccctgggaagcctgcgacagcttgacgtgagcagcaacgagctccaatccctgccctcggaactgtgtggcctctcttccctgcgggacctcaatgtccggaggaaccagctcagtacgctgcccgaagagctgggggacctccctctggtccgcctggatttctcctgtaaccgcgtctcccgaatcccagtctccttctgccgcctgaggcacctgcaggtcattctgctggacagcaaccctctgcagagtccacctgcccaggtctgcctgaaggggaaacttcacatcttcaagtatttgtccacagaggccgggcagcgtgggtcggccctgggggacctggccccttctcggcccccgagtttcagtccctgccctgcagaggatctatttccgggacatcggtacgatggtgggctggactcaggcttccacagcgttgatagtggcagcaagaggtggtctggaaatgagtcaacagatgaattttcagagctgtcattccggatctcagagctggcccgggagccccgggggcccagagaacgcaaggaggatggctcagcggacggagaccctgtgcagattgacttcatcgacagccatgtccccggggaggatgaagagcgaggcactgtggaggagcagcgaccacccgaattaagccctggggcaggggacagggagagggcaccaaacagcaggcgggaggagccggcaggggaggagcggcggcgcccggacaccttgcagctgtggcaggagcgggaacggcggcagcagcagcagagcggggcgtggggggccccgaggaaggatagcctcttgaagccagggctcagggctgttgtgggaggggccgccgccgtgtccactcaagccatgcacaacggctcgcctaagtccagtgcctcccaagcagggggctgcagcggggcagggagcccccgcccctgcccctgcctcccaagagccccttcccatagctggaccagcgacagaacctgctccacggccacttggctccattcagagaccaaacagcttcctcttccgttcctcctctcagagtggctcaggcccttcctcaccagactctgtcctgagacctcggcggtacccccaggttccagatgagaaggacttaatgactcagctgcgccaggtccttgagtcccggctgcagcggcccctgcctgaggacctggccgaggctctggccagtggggtcatcctgtgccagctggccaaccagctacggccgcgctccgtgcccttcatccatgtgccctcccctgctgtgccaaaactcagtgccctcaaggctcggaagaatgtggagagttttctagaagcctgtcgaaaaatgggggtgcctgaggctgacctgtgctcgccctcggatctcctccagggcactgcccgggggctgcggaccgcgctggaggccgtgaagcgggtggggggcaaggccctaccgcccctctggcccccctctggtctgggcggcttcgtcgtcttctacgtggtcctcatgctgctgctctatgtcacctacactcggctcctggatccccgttccccccaggtggcctgggaggtggccccctcgaggatgactccactagcgccctgggaccccaagtatgaagccaaagcaggacctcggccggtgtgggtgagttgggggcaaacctgtgggactggctggggtgctcagggagctgtgcggtggcctgaggctccagtgctctgtcctcctcaccctagggggccaactgtagctcaggagcctcgttctcaggccggacgctgtgtcacccctcattctggccgctgtatgaagcagcctcgggcaggggtctcaggcccgtggcccctgccacagggcactggaatggacagcaggcgcccccagatgcagggttcccggtggtgtgctgtgaagatgtcttcctctcggaccctctgctgccccgggggcagcgtgttcccctgtacctgtccaaggccccccagcagatgatgggctccctgaaactgctgccgccgccccccatcatgtctgccagggtgctcccccgcccatcaccctcccggggcccctccactgcctggctcagcgggccggagctgatcgctctcactggcctgctgcagatgagccagggggagcctaggcccagctcctccgcggttggccccccagaccatacctctgacccacccagcccctgtggtagccccagcagttctcagggtgctgacctctctctcccacagaccccagacacccattgtccatagccttctcagggcagagtgggctggttgtgttgacaataaaacagtgttggtttgca

SEQ ID NO: 7039 - DNA, 719 bp, Homo sapiens
  SIMILAR (165)..(341): 981254mologous to Homo sapiens Human regulator of gene transcription (HRGT),accession number AAW94506,Smith-Waterman Score =305.
agacctccgccggtaccccaggttccagataagaaggacttaatgactcagctgcgcagggtccttgagtcccggctgcaacgggcccctgcctgaggacctggccgaggctctggccagtggggtcatcctgtgccagctggccaaccagctacggccgcggctccgtgcccttcatccatgtgccctcccctgctgtgccaaaactcagtgccctcaaggctcggaagaatgtggagagttttctagaagcctgtcgaaaaatgggggtgcctgaggagtcactgtgccagccccaccacatcctggaagaggagggggccccgggaaggggccctccggctaatcatcgctgctgtcgtccaacgccctgctggaccggccttaggggtgaaggtgggggcacagggccccccccgcccgggaccccgggagcagaagacgcgcctgggctccgcgctttcagaaaagcacgtggtgagggtggcctgggcctgggcacgccttggcctgccgcgcctggctgcctctggggtcgagggtctgggtggaaggacctgcgggtgtcgcaggtgtcgtgtcagccgcaataaacagaagccagaagccctctggaaaagggggtgtaagatcaaaaaaaaactctaaattggggggggcccttttaaaaagttcctggggggggccccctatttcccgcgggcggggaatataatttt

SEQ ID NO: 7040 - DNA, 450 bp, Homo sapiens
  SIMILAR (36)..(170): 971254mologous to Homo sapiens OCIM,accession number AJ223366,Smith-Waterman Score=232.
  misc_feature (1)...(450): n = a,t,c or g
aatcgagatccctagtccagcgtggtggaattcccctgggggggtggcgcatgggagttaggaggactggccaggtggggcccactatgcacccacccccagtgtcaggtgcttctcctctcctcctccaccacctcctcctcctcctcctcatcatcatcctcacttgttgaggacgtcctgtgtgccaagtggtttatatgcccagcnnnnnnnnnnnnnnnnnnnnnnnnnnnnnnnnnnnnnnnnnnnnnnnnnnnnnnnnnnnnnnnnnnnnnnnnnnnnnnnnnagctcaacaagttgcctaagttccaagtttcctctcccaactctcctaccctctcctcttccttctcctttctcccattcttccctgcctcttccctaactagacaattttttattgagtgtctcccaggtgcaggcatgagccaggtgctgggaaaatn

SEQ ID NO: 7041 - DNA, 368 bp, Homo sapiens
  SIMILAR (47)..(367): 801254mologous to Homo sapiens thymopoietin beta,accession number U09087,Smith-Waterman Score=424.
ttcttttgggtcaggctgtgaaatacggagttgaatcctggtccttatggtggaaccacccaggaagctatatgagaaaaagcttttgaggctgagggagcaaggaccagaatcaagatgttctactcctgtgcccacaatttcttcttcagcagaaaatgcaaggcagaatggaagtaatgattctggcagatacagtgtcaatgaagaagactctaaaatagagctcaagcttgagaagagagatccgctaaagggcagagcaaagactccagtaacacgcaagcaaagaagagttgagctcagtgagagttattctcaagctggaatggatgagggtgtatggtccagtggatcttctaaaggcg

SEQ ID NO: 7042 - DNA, 1761 bp, Homo sapiens
  SIMILAR (848)..(1375): 231254mologous to Plasmodium falciparum liver stage antigen,accession number X56203,Smith-Waterman Score=66.
gcattgatggatgagattctcatgctccaggatgaaatcaatgagctccagtcctctctcgcagaggagctggtatccgagtcttgtgaggccgaccctgcggagcagctggccttgcagtccacgctcactgtcttagccgagcgaatgtccaccatcaggatgaaagcctcggggaaacggcagcttttggaggagaagttgaatgatcagctggaggaacaaaggcaggaacaggccctgcagaggtatcgctgtgaagccgatgagctggacagctggctcttgagtaccaaggccactctggacactgcgctgagtccacccaaggagcccatggacatggaggcccagcttatggactgccagaatatgctggtggaaatagagcagaaggtggtggctttatcagaactgtcagtccacaatgagaacctgctgctggagggcaaagctcacaccaaggacgaggccgagcagctggctggaaagctgagaaggctcaaggggagcctgctggagctgcagagagccctgcatgataagcagctcaacatgcagcagggaacagcacaggagaaggaggagagcgatgttgacctaacagccacgcagagccccggcgtccaggaatggctggcccaagctcgcaccacatggacccagcagcggcagagcagtctccagcaacaaaaagagttagaacaggaattagccgagcagaagagtctccttcgctcagtagccagtcgtggagaggagattctaattcaacattcggcggcagagacctctggtgatgctggcgaaaaacctgatgtgttatcccaggagttggggatggaagaagaagaaatcatccgctgaagaccagatgagaatgaaatgggaaagcctacatcaagaatttagtaccaagcagaaactactacagaatgttctggaacaggaacaagagcaagtgctttatagcaggccaaatcgactcttgtctggtgtgccactgtacaaaggggacgtgccaacccaagataaatctgcagttacatctttgctggatggactgaaccaagccttcgaggaggtttcatcccagagtggaggggcaaagaggcagagtatacacttggagcagaagttgtatgatggagtctcagccacctctacttggttggatgacgttgaagaacgtttatttgttgccacagcacttttaccagaagaaacagagacttgtctcttcaaccaagagattcttgccaaagacattaaggaaatgtctgaagaaatggataagaacaaaaacttgttttcccaagcttttccagagaatggtgataatcgagatgttattgaagatactttgggttgtcttttgggcaggttatccttgctagactcagtagtgaatcaacgatgtcatcagatgaaagaaagacttcagcaaatactaaatttccaggtaagtaagatattatcaaaggatacgtgaccattctctaggtattcagtaatagtcagtcacgagtctgtgttacagacctggttgttgtttttctaaatggggtaatgaagaacaagagcattgtagaaaatgaagggggttgaattaaaggattagaagctaaagattttttgctcctagaaatggaaggttgagaaaaccacccacttcaaaataaggactgaatagaattcaatcaataaaagtccccattcccggatcattataattataatttttagttactaataccggag

SEQ ID NO: 7043 - DNA, 1075 bp, Homo sapiens
  SIMILAR (813)..(1031): 581254mologous to Homo sapiens PRO0657,accession number AF090942,Smith-Waterman Score=222.
tttttttttttttttttacagcgatgagataaacatgtatttgttgacatggaaagaggttcacaatgtacagttaagtgcaaaagcagattataagaaaacagtgtgcatagtaggataccacggtggcaaaatctatattctatatattcatagaaaaaggcctagaagaaaatataacagtattcaccccagagagtgggatggccaatgagtcttctttctgcttctattttctaatctttctacaatgtttgtgtagtcagttttcctggtttgctttttttttttttttttttttgagcacaggtgggtcatgggagtcacgctctcatgctgcctgtcaagagcatggtacttgctacaggggctactccccagcagctctgcttaagaagattctgggaatgtcttgagtctcccaagaacaaggaaacaaagaactttcctgtgccccagggaaccagcaagcttccccacttccttctcacagcaaccttgtggggtatgaggtttctctgtctgcttgatggaaaagaagagcccagagaggggaggtacctgcctaagttcacacagcagggatttaaagccgggtcacctgggcccaggagccccggggcttatttaaagcttatgaacagagcaagcagctgagcccaggggaagggctcaaacattctccccgtgatttcccgctgtgtttgacaagctgcaaaatgtgccaggaaaggactgggtgtggtggcctccatgccctgtaatccccccgcactttgggaggcctgaaggtgggcggatcaccctgaagcctcaggagttccaagacccagcctaggcaacatggcaaaacctcgtctttactaaaaatacaaaaaattagccgggtgtggtgacgcaccctgctactggggaagctgaggcaggagaactgcttgaacccaggaggtggaggttgcagtgagccaagattgcaccactgcactccagcctgggcgactgaatgagactctgggtctcaaaaaaaaaaaaagggtcaggggaggaagagctgtcacttcagtgttaggacccc

SEQ ID NO: 7044 - DNA, 1258 bp, Homo sapiens
atagacacccctggacgcctgcggaattcgccacgagcacatgtggccaggagagaggaattttaaaatatttatatactctaaattagtttgttgcaaaataccattctaattaatgcttttatgtcattctcatgaaactaatctgaaagagtaaacttagttttctatttttagatattgtttcaacataccaaataccaaaataaaattaaataattttaaagaacataacacaacttatacatccaaatgcctattgttttcttaaaagtagtcacccccgtcagtgactttttagcataaggttaggagacagattcttatcttttcagcatgcatttgatttttacaaattttcaaaggctgcttgataccttaatcaggccaatatattagctaattaaattaagtcatactgttaaaacatgatatttatagaattaaaagttaaaaaatagtctaagggtttatcttaagttttatcttaaaaaaattagaaaaatgttttgagctatgttattgttggaaggtgtggttattccacggtaaatgttacgatataccactcatttgcatgtgtaaggttcagagtacacttataatttatgtgcacagattttcattataaagtcattctcttcaattgacatatttttacttgctatttttgtacttattatgccactggcagattcaccttattaagtgaaactctttattgctctgttttcagtagaaaaatcacttttcaaaattaatacttcatctgtgtataagcatattcttttggtttctaagatttgctgtcatatttttaaagttgagttttaaagaattaaaataatttttgttgttgttattttctcatggtttaccattgaatatacctgtataataaaggtgcaggatgggaggcaggatagtggaataattaattccatagactagaatcagattgcctggattagtatttcagctttattgcctactagcaatatgactttgacaagctatttaacctctcattcagtttcctcatctgtaaagtggcagttacagtaatacttaaccttatagtggtttggggattttttttttttttttgagacacggtctcactctgtcacccaggctgggttgcagtgagctgagattgtgccactgcactccagcctgggtgacagagtaagactgtctccaaaaacaaaaaacaaaaaaacagccgctgaaagactgaaaaagaaaaaaaaaaaaa

SEQ ID NO: 7045 - DNA, 445 bp, Homo sapiens
  SIMILAR (95)..(445): 891254mologous to Homo sapiens bA119B16.1 (KIAA1271),accession number AL353194,Smith-Waterman Score=522.
  misc_feature (1)...(445): n = a,t,c or g
ntttgatgtcatncgaacnacnngcnnnaatagtcgacccacgcgtccggtgaccattccaagcctatcatttgctccaaggttttatttttttgccaactctctgccctccaaagggccgaccaccttgatgcctgtgaacacagcggccctgacagtgcctgccaacccagcatctgtcatcacagtgccctccaagttgccaactagctcaaagccccctggtgcagtgccttctaatgcgctcaccaatccagcaccatccaaattgcccatcaactcaacccgtgctggcatggtgccatccaaagtgcctactagcatggtgctcaccaaggggtgtgccagcacagtccccactgacgggagcagcataaatgaggagaccccaatggctcctacacccgccggtgccgttggaagcagcttagcctggctagacact

SEQ ID NO: 7046 - DNA, 416 bp, Homo sapiens
  SIMILAR (93)..(416): 871254mologous to Homo sapiens Human transport protein TPPT- 13,accession number AAB60093,Smith-Waterman Score=461.
cgacccacgcgtccgagttcattggcctggcagggtcaggtgctgctacggtcatttttgtatcagcttatgaacttaatggcttgttttctgtgctgatgttggcctggagcttcctacccatctacattgctggtcaggtagacatgtatgcgggtgccatcttcatccagcagtctttgcacctggatctgtacctggccatagttgggctactggccatcactgctgtatacacggttgctggtggcctggctgctgtgatctacacggatgccctgcagacgctgatcatgcttataggagcgctcaccttgatgggctacagtttcgccgcggttggtgggatggaaggactgaaggagaagtacttcttggccctggctagcaaccggagtgagaacagcagctgcggg

SEQ ID NO: 7047 - DNA, 2118 bp, Homo sapiens
  SIMILAR (766)..(1077): 1001254mologous to Homo sapiens Human transport protein TPPT- 13,accession number AAB60093,Smith-Waterman Score=543.
atgaacaaccatgtcaagctaatttttaaaattttatcatccttgaacaccacgctgccttcaactagtgcctggtcatccattcgtgcctccaactacaacgttcccctcagcagtacagcacaaagcacttcaggttccagctggggtgagagcagctcagggagaataacaaattggcttgttctaaaaaaccttacacctcagatcgatggctcaactctgcgcactctgtgcatgcagcacggcccgctgatcacattccacctgaacctccctcacggaaatgctctggtccgctacagttcaaaagaagaggtagtgaaggcacaaaagtctctgcacatgtgtgtactggggaacactactattcttgctgagtttgccagtgaagaggagatcagtcgtttctttgcacaaagccagtctctgaccccttctcccggctggcagtctctcgggagctcgggggcgaaacctgtgtatggatttcagtgtatgacttcagatcatgctccaacttgccaggtggatgaaccggggaatgacgacaaggtcaaattggggcccttgacccagaggatcaaattcaggttgaatggcatgaagaagcagcaggttgaagtgtttgaaaacacagactctgaaatcagactggattcgagtcccagctttgtcacttgtcagccatgtgactttggacacgacttaaactctcagagccatcactccccctgtaaagatccagaggtctcgttcaggaccatggagagcggcaccagcagccctcagcctccacagttagatcccctggatgcgtttccccagaagggcttggagcctggggacatcgcggtgctagttctgtacttcctctttgtcctggctgttggactatggtccacagtgaagaccaaaagagacacagtgaaaggctacttcctggctggaggggacatggtgtggtggccagtgggtgcatccttgtttgccagcaatgttggaagtggacatttcattggcctggcagggtcaggtgctgctacgggcatttctgtatcagcttatgaacttaatgcgcacgctctaaagcttccacgtgtgaggcatgccaagaaatttggattccaaatccccattgtcgccttcaaagatacttttgtgcaagaagttacaccctttgtaggagctatatcaacgtgcaagttagtccatgggactgtaccttgtcagagacagttgcccgaaggcatcaatgtgctcaaggacagtgtgaaatatgcagtttttgttaatgacctaactgcattagcagtgacacaaaccgggcttggtggacacgtttcaaggacaggtactcatgcccactggacacagcacattcagccgatcccgcgtctacaagaacgcatacaggatcctgaggagcagcctaggcgtattgacggacatcggtgcaaggtcacttgtcgtatgatcccggtattggcgctgcggacgggcagttcggggggaacgagctctctgccctgcaaggagcagtgcccaacagaaaaaacgagaacacaaacattaatcgttcttcgggaccctcctgtgtccgctatcaaatcgcctcgtggtgtgcgcactcctgtccccgggcgacagaacgcagaccccccaagagccaaacagaaacaaaggaaagcaaccatgggcctcatgtgtttgccctacctcctacctgcggagtgccgagctgtgacagcccattttacccgaccgtttctccgcttctctcggccgccgctcttcagtcacctcacctccgcaggccccggccgggaagtgaatccccactcggcaaccccttccgggagcaccacgcccactggcccccaagatggaggccctagcaactggacccgcagattgggcagtctgtccgttccccagtttggtgccgtcttgtggcacaacgggcgcacaagtcgaaatcatattgggccaacgcaacaagtggacagaactcgtacagacacccccgtatgtcagattgcacctagtggtcatagtcatcgccagaaaagaaatgagctcatagacccgctctgtgacatgagaaaggctatctga

SEQ ID NO: 7048 - DNA, 664 bp, Homo sapiens
  SIMILAR (1)..(570): 981254mologous to Homo sapiens Human transport protein TPPT- 13,accession number AAB60093,Smith-Waterman Score=934.
tctctctttgccagtaatgttggaagtggacatttcattggcctggcagggtcaggtgctgctacgggcatttctgtatcagcttatgaacttaatggcttgttttctgtgctgatgttggcctgggtcttcctacccatctacattgctggtcaggtcaccacgatgccagaatacctacggaagcgcttcggtggcatcagaatccccatcatcctggctgtactctacctatttatctacatcttcaccaagatctcggtagacatgtatgcaggtgccatcttcatccagcagtctttgcacctggatctgtacctggccatagttgggctactggccatcactgctgtatacacggttgctggtggcctggctgctgtgatctacacggatgccctgcagacgctgatcatgcttataggagcgctcaccttgatgtgctacagtttcgccgcggttggtgggatggaaggactgaaggagaagtacttcttggccctggctagcaaccggagtgagaacagcagctgcgggctgccccgggaagatgcctttcatatttttcgaaaatccgctgacatctgatcttccgtggccgggggtcctatttggaatgtccatcccatccctctggtactggtgcacggatcagggtggctga

SEQ ID NO: 7049 - DNA, 577 bp, Homo sapiens
  SIMILAR (576)..(1): 791254mologous to Mus sp. semaphorin homolog=M-Sema F,accession number S79463,Smith-Waterman Score=787.
caccgccagccacaccagccccaggttttccaggggggcccgggcctccaaggtcaccgacgggcctgccacgacagccacaaggtagccttcagcagccagccgcgccccctgctcctttgaaaagcagtggtaggccccggcatggcggggctgggcagccatcacaaccagggcctggagccgggcatcgtagaggaaggacccgggctgttccgcaggcaggtcccggcccccaaaggtccagcgggcatgggccaagttggaggagaggtggcagggcagcaccaggtctgtgcccgccaccaccgtgatgtttttgggagtgggcctgactttcttactgccacggaggttgcagatgcctgaagtgtccgaggtcatcacatgctggatcagtagagatccagagtggccacccacggccacacagcggctggtgttgacgctccaggcgcaataggggtcccgggcgaggacacagtctgcacaggagcgacacttcatgcagtcggccacgggcagctgcaccagctgagagcgggagccggcaaagagcagcttcttgctctgagcc

SEQ ID NO: 7050 - DNA, 660 bp, Homo sapiens
  SIMILAR (1)..(87): 961254mologous to Homo sapiens Human SEC11 protein sequence (clone ID 20422974.0.132-ext2),accession number AAB48378,Smith- Waterman Score=145.
gacggctggctgctcaaggctgtgagcctggggcctggggttcacctgattgaggagctgcagctgtttgaccaggagcccatgagaaagcctggtgctatctcagagcaagaagctgctctttgccggctcccgctctcagctggtgcagctgcccgtggccgactgcataaagtatcgctcctgtgcagactgtgtcctcgcccgggacccctattgcgcctggagcgtcaacaccagccgctgtgtggccgtgggtggccactttggatctttactgatccagcatgtgatgacctcggacacttcaggcatttgcaacctccgtggcagtaagaaagtcaggcccactcccaaaaacatcacggtggtggcgggcacagacctggtgctgccctgccacctctcctccacttggccccggggttcagtggtattttatacttgccttcttcctgtacagggctgggaaaggctgtgtgaggggaaaaaagggaaagggtgggcctgctgtggacaatggcatactctcttccagccctaggaggagggctcctaacagtgtaacttattgtgtccccgcgtatttatttgttgtaaatatttgagtatttttatattgacaaataaaatggagaaaatgaaaaaaaaaaaaaaaaa

SEQ ID NO: 7051 - DNA, 631 bp, Homo sapiens
  SIMILAR (308)..(144): 561254mologous to Homo sapiens Human SEC11 protein sequence (clone ID 20422974.0.132-ext2),accession number AAB48378,Smith- Waterman Score=178.
ttttttttttttttttcttagccccatcagagcaatcgtttcattttctccattttatttgtcaatataaaaatactcaaatatttacaacaaataaatacgcggggacacaataagttacactgttaggagccctcctcctagggctggaagagagtatgccattgtccacagcaggcccaccctctcccttctctcccctcacacagcctttcccagccctgtacagggaagaaggcaagtataaaataccactgaaccccggggccaagatgtgagggccccacccaacccttccccccaaacacacagcaggctccattttccttccccccaccctgaaaacattcacaggccttggagcaggactaggcccaccccaagccctgcactccctctgaaggggcacagcaccctgtccaccccacctccatatgtacatcgctgcccgacattcgggggcagtggggggtaggagagacaaagtgatacgacccgttcccgttcatagctccaatgactcatcaggaggacacatgccatgggaagatttgacggagaaaggaaggctatgcacgtacgagcaggtgacatgtacgcaactataagcacacagaaacccatgtgcaat

SEQ ID NO: 7052 - DNA, 455 bp, Homo sapiens
aggtgacacagggcacagggagagaagcctaggactgctacgggagaagcacacttggggccctccccacccacaggcaacaccacaggctgctgtgcccagctcaaggtacacccagcctggtcctcagtgggtgggtcactgtccagggacagcctccaagcagaggggagcacccacgccctgcagcaggtctcagtcagcttctacatctgggtgtccctgacataggactgggacagtctggtctggactgtgaggtcacacccaaaccctcctattccttcccagggacaagtggggcagggccccctggcacgatgggctcctcactgccagggaatggaaattgggacgaggaagcacacacattgccccagggacaagaaggcatgaatgaaggtggggtcccgtggagactgatatttaggtaaaaatcgagctcagccggggtt

SEQ ID NO: 7053 - DNA, 496 bp, Homo sapiens
  SIMILAR (341)..(472): 791254mologous to Homo sapiens Human phospholipase 2 HPPL2,accession number AAB03628,Smith-Waterman Score=191.
gtcttcatgccatgtcattttacatgatactttgtaggttttgatgagaaagttggtatttttaatgcactcaaaaattggttttagttagagagtttgcttatcaatataactttcagatcagttaattaagataaaaggcatacactgtccatagatcagaggattaaataacttagcattgtttttctgtttgtaaacagaaaatcttattacattcttacacagagtgtgacacatttaatatttgctagaaaatgcatcttagaaattaaattattaagagttagtggtgaggaattttaaatttaatgttctatgatatagcacaacacagatttatttatttatttatgaaatggaatcttgctctgtcacccaggctggagtgcagtggcgtgatcttggctcactgcaacctccgcctcttgggtgcaagcaatgctcctgcctcagcctccctagtagctggggattgcaggtgcctgccactaca

SEQ ID NO: 7054 - DNA, 967 bp, Homo sapiens
  SIMILAR (790)..(933): 501254mologous to Homo sapiens Human secreted protein, SEQ ID NO: 6619,accession number AAG02538,Smith-Waterman Score=134.
gcccaggcctgcctcccttccctaggcctggctccttctgttgacatgggagattttagctcatcttgggggcctccttaaacacccccatttcttgcggaagatgctccccatcccactgactgcttgacctttacctccaacccttctgttcatcgggagggctccaccaattgagtctctcccaccatgcatgcaggtcactgtgtgtgtgcatgtgtgcctgtgtgagtgttgactgactgtgtgtgtgtggaggggtgactgtccgtggaggggtgactgtgtccgtggtgtgtattatggctgtcatatcacagtcaagtgaactgtggtgtatgtgccacgggatttgagtggttgcgtgggcaacactgttcagggtttgggcgtgtgtgttcatgtgggtgttgtgtgacctttgcctgaaaaagcaggtattttctcagaccccagagcagtattaatgatgcagaggccggaggttagaggttgtgactgtggctcagacccaggggtgcgggcatagctggagctggaatctgcctccggcgtgagggaacctggctcctaccacttcggagccatgggggcaagtgtgaagcagccagtccctgggtcagccagaggcttgaactgttacagaagccctctgccctctggtggcctctgggcctgctgcatgtacatattttctggaaatatacatgcgccgggagcttccttgcaggaaaactgctccgaatcacttttaatttttttcttttttttttcttgccctttcccattagttgtattttttatttatttttatttttatttttttttagagatggagtctcactatgttgctcaggctggccttgaactcctgggctcaagcaatcctcctgcctcagcctccctagtagctgggactttaagtgtacaccactgtgcctgctttgaatcctttacgaagagaaaa

SEQ ID NO: 7055 - DNA, 372 bp, Homo sapiens
atggagaaagaggaaccgggagtggaaaggaagaaggaaaaccgagtaaaggaggttattcataagaacaggaaaggggccgaggggcctccagctggagccgcactgccgctcgggggccggggcgaaggtccctgccggagcctcccggaggagcggctgccccgcgggcgggggaacggtgcggccaactcgcgggggcgagcccggagccggcggagaccggaacccgggaacccaggccccgcggcgctagcgctgccagaaaactcgctgcggccgcgccggtcggcctacttcgccccggctgtccgcgcgcgggacgtagaagagcgccctggccgggaaagagattatctgagccgagagtga

SEQ ID NO: 7056 - DNA, 366 bp, Homo sapiens
cagatgcagagactccaggctcagggccgctgagaaaggccaggcccagtgggtacactgaccacacccacgcagggacctcacccccctgcaggccccttgcagaccgggttcacttgggttcacttggccctatccaggcccatgcacttggagaccagcctggttccctgcccgaccacccccagctgggtccatcaccccacctggtttttgcacgcacacactggtcagtttggacccgggccgtgactgcccctccccccccaccggagactgtgattccctgtgtcctccacatccagacgccagcccaggaataaaggcattttgtgcacagggaaaaaaaaaaaaaaaaaaaaaaaa

SEQ ID NO: 7057 - DNA, 462 bp, Homo sapiens
  SIMILAR (45)..(419): 461254mologous to Homo sapiens Spir-1 protein,accession number AJ277587,Smith-Waterman Score=230.
catccgggcccggaactacaagctgcgcaaggtcatggtggatggggacatcccgccccgggtcgaagaaggacgctcacgagctcatcctggactttatccgctcacggcctccactgaagcaggtctctgagaggcggctgcgccgtttgccaccaaagcaaaggtccctgcatgagaagatcctggaggagatcaagcaggagcggaggctgcgcccggtgcggggcgagggctgggctgcccgcgggtttggctctctgccctgcatcctcaacgcctgctccggagatgccaagtccacctcctgcatcaacctgtcagtcacagatgctgggggcagcgcccagcgcccgcggccccgcgtgctgctcaaggcgcctaccttggctgaaatggaagagatgaatacatctgagataagagcccagggtccccggaatgtcacagcccacaaccaag

SEQ ID NO: 7058 - DNA, 1002 bp, Homo sapiens
  SIMILAR (86)..(490): 311254mologous to Arabidopsis thaliana putative protein,accession number AL022373,Smith-Waterman Score=115.
gacgggacccggcgtgcccatgtgtcaggtgggcgaggactacggggagccggcgcctgaggagccgcccccggcgccgcggcccagccgtgagcagaagtgtgtgaagtgcaaggaagcgcagcccgttgtggtgatacgagccggagatgccttctgcagggactgtttcaaggccttctacgtccacaagttcagagccatgctgggcaagaaccggctcatcttttcaggcgagaaggtgctcttggcgtggtctggggggccttcgtccagctccatggtctggcaggatcttgagggcctgagccaagattttgccaaaagactgcgctttgtggcaggagtcatcttttttgacgagggagcagcctgtggccagagcctagaggagagatcaaagaccctggccgaagtgaagcccattctgcaagcaactgggttcccatggcatgtggtggccttagaggaggagctagtgggatccgagggggcctacaaggcggccgtggacagcttcctccagcagcagcatgtgctggggggccgggggtggtcctggcccgactcaaggggaggaacagccaccccagcccccgctggacccccagaacctggcaagaccgcctgcccctgcccagactgaggctctttcccaactgttctgctcagtgaggacactgactgccaaggaggagcttctgcagaccctgcggacccacctgatcctccacgtggcccgagcccacggctactccaaggtcatgactggggacagctgcacacgcttggctatcaagctcatgaccaacctggcgctgggtcgaggggccttcctggcctgggatacgggcttctcggatgagcggcacggggacgtggtggtggtgcggcccatgcgggaccacaccctgaaggaggtcgctttctacaaccgcctgttctccgttccttctgtcttcacaccagccgtcgacaccaaggcccctgaaaaggccagca

SEQ ID NO: 7059 - DNA, 397 bp, Homo sapiens
  SIMILAR (40)..(381): 431254mologous to Gallus gallus myomesin,accession number U58204,Smith-Waterman Score=235.
agcccctgatacccccgactcctcaaagtttcagcgttcaaagactacaagggcccactggacccccaaaggggcaagatcgaggataaagttaacaagtccaaggtcatcctgaaagaacccggcctcgaggatttgggcacctactcagacatagtcactgatgccgatgaagacatctccgcaagccacacgctaaccgaggaagagctggagaaactgaagaagctgagtcatgagatcagaaacccagggatcaaactgatctccggctggaacattgacatcctggagcgaggggaggcgcggctttggctggaattagaaaagttatgtccagccgctgagctacatctaatcgttcacaacaaggaaatctttaggttgccgaaccgca

SEQ ID NO: 7060 - DNA, 849 bp, Homo sapiens
  SIMILAR (1)..(387): 941254mologous to Mus musculus putative,accession number AK010807,Smith-Waterman Score=622.
cagaaaaaggagctgggtcatgtcaatggactggtggacaaatctggcaaacggactacatcccccagcagtgacactgacttgttggacagatcggccagcaaaactgaactaaaggccattgcccatgcccggatcctggaaaggagagccagcaggcctggcacacccacatccagcgccagcacagagactcccacctttgagcagaatgatgtcgacgaagacatcattgacgtggatgaggaaccagtagcagcggagccagactatgtgcagccccagctgaggcggccctttgagctgctgattgctgccgccatggagcggaaccccacccaatttcagttgcccaatgaactgacttgtacccctgcactaccaggttctagcaagaggagaagaaaggaggaaaccacagggaaaaatgttaagaagacacagcagtgaattagatcacaatggtctcgttcccttacccgtcaaagtctgcttcacgtgtaacaggagatgccgcgtggctcctctcatccagcgtgactattgccctctcctgtttcacatggattgcctcgagccgccactcactgccatgcccctgggcagatggatgtgttcgaatcacatcgaacatgtggtgctgaaccacaataatatgacactgagctatcggtgccaggtgtttgatcgttttcaagacaccgtttcgcagcatgtcgtcaaagtggacttcctgaaccgaatccacaagaagcacccccctaaccggcgtgtgctccagtcggtcaaaagaagaagcttgaaggttcctgatgctataaaatctcagaaccaagtttccaccccctc

SEQ ID NO: 7061 - DNA, 444 bp, Homo sapiens
  SIMILAR (4)..(147): 701254mologous to Arabidopsis thaliana putative protein,accession number AL162506,Smith-Waterman Score=181.
  misc_feature (1)...(444): n = a,t,c or g
atgaaaaaaaaaaaagaagaagaagaagaggaagaagaggaagaagaggaggaggaggaggaaaaggaggaggaagaggaggaggaagaagaggaggaggaagaagaagaagaggaaaagaagaagaaaaagaaacataatatttttaaaattctatctaatctttatattttcattatcattttttattgtagtaaaaaacnnnnnnnnnnnnnnnnnnnnnnnnnnnnnnnnnnnnnnnnnnnnnnnnnnncatattgttactattgtgaaaaagatcttcagaactttttcatgtgcagatctgaaactatccattaaannnnnnnnnnnnnnnnnnnnnnnnnnnnnnnnnnnnnnnnnnnnnnnnnnnnnnnnnnnnnnnnnnnnnnnnnnnnnnnnnnnnatacnnnnnnnnnnnnnnnaaataaaaaacagtgtttc

SEQ ID NO: 7062 - DNA, 774 bp, Homo sapiens
taaaaaggactaggctgggcatgatggctcatgccgcaatctcagcactctgggaggccaaggtggacgggtcacaaggtcaggagttcgagaccagcctgacctcaagtgatctccctgtcttggccctcccaaagtgctgagaccacaggcacgagccaccacgcccggcctggatgtttttttttaaaaatgagcataaatcgtaagtatctacctcataagtgagttagtacaagaaaagcacccaagcctggccgacagagcgagaccgtgtctcagaaaacaaacaaaccaaaaaacaaaaacaaaaaaaccctaaggaggaaagtggcattctatttccagcattttttcccctcatccccattatgggagctacagcttaagaatcaatttcagctctaatcccttagccttacaatcaccagtatctgcctttgacgtcctctgagaccctgctctccttcgtgcagggagtgccatgccctcgtgggtgacagcgtgctgacagagtggactgtgaatattcttcaagtacttgtggtcctgggtcatcaggggttgcattctacccagttacagagggtttcccatcgaggaagccagcagcatcagagaagttggaaggggggctttcctccgtgtgtaagggccggccttgctaacccgaaacatttcctagaaatgtgctgcttgctaacagccgctgcttcactttcagctttcagagtccactgctgaatacctcttaatggagaaggaactggatga

SEQ ID NO: 7063 - DNA, 1476 bp, Homo sapiens
  SIMILAR (1)..(1263): 831254mologous to Mus musculus Plenty of SH3s; POSH,accession number AF030131,Smith-Waterman Score=1735.
ctgactgtgatccgaagagtggatgaaaactgggctgaaggaatgctggcagacaaaataggaatatttccaatttcatatgttgagtttaactcggctgctaagcagctgatagaatgggataagcctcctgtgccaggagttgatgctggagaatgttcctcggcagcagcccagagcagcactgccccaaagcactccgacaccaagaagaacaccagaaagcggcactccttcacttccctcactatggccaacaagtcctcccaggcatcccagaaccgccactccatggagatcagcccccctgtcctcatcagctccagcaaccccactgctgctgcacggatcagcgagctgtctgggctctcctgcagtgccccttctcaggttcatataagtaccaccgggttaattgtgaccccgcccccaagcagcccagtgacaactggcccctcgtttactttcccatcagatgatccctaccaagctgcccttggaactttgaatcctcctcttccaccaccccctctcctggctgccactgtccttgcctccacaccaccaggcgccaccgccgctgctgctgctgctggaatgggaccgaggcccatggcaggatccactgaccagattgcacatttacggccgcagactcgccccagtgtgtatgttgctatatatccatacactcctcggaaagaggatgaactagagctgagaaaaggggagatgtttttagtgtttgagcgctgccaggatggctggttcaaagggacatccatggcataccagcaagaatagggggtttccctggcaatttatgtggcaccagtcacaagggcggtgacaaatgcttcccaagctaaagtccctatgtctacagctggccagacaagtcggggagtgaccatggtcagtccttccacggcaggaggggcctgcccagaaagctccagggaaatggcgtggctgggagtccccagtgttgtccccgcagctgtggtatcagcagctcacatccagacaagtcctcaggctaaggtcttgttgcacatgacggggcaaatgacagtcaaccaggcccgcaatgctgtgaggaccagttgcagcgcacaaccagggaacgcccccacggcagcagtgacacccatccaggtacagaatgccgccggcctcagccctgcatctgtgggcctgtcccatcactcgctggcctccccacaacctgcgcctctgatgccagggctcagccacgcacactgctgccatcagtatcagtcgagccagtgcccctctgggcctgtgcagcagctgctccactgacttccccaagcatcaccagtgcttctctggaggctgagcccagtggccggatagtgaccgttctccctggactccccacatctcctgacagtgcttcatcagcttgtgggaacagttcagcaaccaaaccagacaaggatagcaaaaaaa

SEQ ID NO: 7064 - DNA, 7154 bp, Homo sapiens
  SIMILAR (157)..(6501): 1001254mologous to Homo sapiens NuMA protein,accession number Z11583,Smith-Waterman Score=10399.
acgaagaggtacgattccggagaatcgcgaggcagagcgggagcgcgcagccaggtggaaactaattctaagccagactgctggagatcaccctgttctagtgtgtggaggcttccaccaggaggcgcattggagtgactgtctggcatcaccaagatgacactccacgccacccggggggctgcactcctctcttgggtgaacagtctacacgtggctgaccctgtggaggctgtgctgcagctccaggactgcagcatcttcatcaagatcattgacagaatccatggcactgaagagggacagcaaatcttgaagcagccggtgtcagagagactggactttgtgtgcagttttctgcagaaaaatcgaaaacatccctcttccccagaatgcctggtatctgcacagaaggtgctagagggatcagagctggaactggcgaagatgaccatgctgctcttataccactctaccatgagctccaaaagtcccagggactgggaacagtttgaatataaaattcaggctgagttggctgtcattcttaaatttgtgctggaccatgaggacgggctaaaccttaatgaggacctagagaacttcctacagaaagctcctgtgccttctacctgttctagcacattccctgaagagctctccccacctagccaccaggccaagagggagattcgcttcctagagctacagaaggttgcctcctcttccagtgggaacaactttctctcaggttctccagcttctcccatgggtgatatcctgcagaccccacagttccagatgagacggctgaagaagcagcttgctgatgagagaagtaatagggatgagctggagctggagctagctgagaaccgcaagctcctcaccgagaaggatgcacagatagccatgatgcagcagcgcattgaccgcctagccctgctgaatgagaagcaggcggccagcccactggagcccaaggagcttgaggagctgcgtgacaagaatgagagccttaccatgcggctgcatgaaaccctgaagcagtgccaggacctgaagacagagaagagccagatggatcgcaaaatcaaccagctttcggaggagaatggagacctttcctttaagctgcgggagtttgccagtcatctgcagcagctacaggatgccctcaatgagctgacggaggagcacagcaaggccactcaggagtggctagagaagcaggcccagctggagaaggagctcagcgcagccctgcaggacaagaaatgccttgaagagaagaacgaaatccttcagggaaaactttcacagctggaagaacacttgtcccagctgcaggataacccaccccaggagaagggcgaggtgctgggtgatgtcttgcagctggaaaccttgaagcaagaggcagccactcttgctgcaaacaacacacagctccaagccagggtagagatgctggagactgagcgaggccagcaggaagccaagctgcttgctgagcggggccacttcgaagaagaaaagcagcagctgtctagcctgatcactgacctgcagagctccatctccaacctcagccaggccaaggaagagctggagcaggcctcccaggctcatggggcccggttgactgcccaggtggcctctctgacctctgagctcaccacactcaatgccaccatccagcaacaggatcaagaactggctggcctgaagcagcaggccaaagagaagcaggcccagctagcacagaccctccaacagcaagaacaggcctcccagggcctccgccaccaggtggagcagctaagcagtagcctgaagcagaaggagcagcagttgaaggaggtagcggagaagcaggaggcaactaggcaggaccatgcccagcaactggccactgctgcagaggagcgagaggcctccttaagggagcgggatgcggctctcaagcagctggaggcactggagaaggagaaggctgccaagctggagattctgcagcagcaacttcaggtggctaatgaagcccgggacagtgcccagacctcagtgacacaggcccagcgggagaaggcagagctgagccggaaggtggaggaactccaggcctgtgttgagacagcccgccaggaacagcatgaggcccaggcccaggttgcagagctagagttgcagctgcggtctgagcagcaaaaagcaactgagaaagaaagggtggcccaggagaaggaccagctccaggagcagctccaggccctcaaagagtccttgaaggtcaccaagggcagccttgaagaggagaagcgcagggctgcagatgccctggaagagcagcagcgttgtatctctgagctgaaggcagagacccgaagcctggtggagcagcataagcgggaacgaaaggagctggaagaagagagggctgggcgcaaggggctggaggctcgattacagcagcttggggaggcccatcaggctgagactgaagtcctgcggcgggagctggcagaggccatggctgcccagcacacagctgagagtgagtgtgagcagctcgtcaaagaagtagctgcctggcgtgagcggtatgaggatagccagcaagaggaggcacagtatggcgccatgttccaggaacagctgatgactttgaaggaggaatgtgagaaggcccgccaggagctgcaggaggcaaaggagaaggtggcaggcatagaatcccacagcgagctccagataagccggcagcagaacgaactagctgagctccatgccaacctggccagagcactccagcaggtccaagagaaggaagtcagggcccagaagcttgcagatgacctctccactctgcaggaaaagatggctgccaccagcaaagaggtggcccgcttggagaccttggtgcgcaaggcaggtgagcagcaggaaacagcctcccgggagttagtcaaggagcctgcgagggcaggagacagacagcccgagtggctggaagagcaacagggacgccagttctgcagcacacaggcagcgctgcaggctatggagcgggaggcagagcagatgggcaatgagctggaacggctgcgggccgcgctgatggagagccaggggcagcagcaggaggagcgtgggcagcaggaaagggaggtggcgcggctgacccaggagcggggccgtgcccaggctgaccttgccctggagaaggcggccagagcagagcttgagatgcggctgcagaacgccctcaacgagcagcgtgtggagttcgctaccctgcaagaggcactggctcatgccctgacggaaaaggaaggcaaggaccaggagttggccaagcttcgtggtctggaggcagcccagataaaagagctggaggaacttcggcaaaccgtgaagcaactgaaggaacagctggctaagaaagaaaaggagcacgcatctggctcaggagcccaatctgaggctgctggcaggacagagccaacaggccccaagctggaggcactgcgggcagaggtgagcaagctggaacagcaatgccagaagcagcaggagcaggctgacagcctggaacgcagcctcgaggctgagcgggcctcccgggctgagcgggacagtgctctggagactctgcagggccagttagaggagaaggcccaggagctagggcacagtcagagtgccttagcctcggcccaacgggagttggctgccttccgcaccaaggtacaagaccacagcaaggctgaagatgagtggaaggcccaggtggcccggggccggcaagaggctgagaggaaaaatagcctcatcagcagcttggaggaggaggtgtccatcctgaatcgccaggtcctggagaaggagggggagagcaaggagttgaagcggctggtgatggccgagtcagagaagagccagaagctggaggagaggctgcgcctgctgcaggcagagacagccagcaacagtgccagagctgcagaacgcagctctgctctgcgggaggaggtgcagagcctccgggaggaggctgagaaacagcgggtggcttcagagaacctgcggcaggagctgacctcacaggctgagcgtgcggaggagctgggccaagaattgaaggcgtggcaggagaagttcttccagaaagagcaggccctctccaccctgcagctcgagcacaccagcacacaggccctggtgagtgagctgctgccagctaagcacctctgccagcagctgcaggccgagcaggccgctgccgagaaacgccaccgtgaggagctggagcagagcaagcaggccgctgggggactgcgggcagagctgctgcgggcccagcgggagcttggggagctgattcctctgcggcagaaggtggcagagcaggagcgaacagctcagcagctgcgggcagagaaggccagctatgcagagcagctgagcatgctgaagaaggcgcatggcctgctggcagaggagaaccgggggctgggtgagcgggccaaccttggccggcagtttctggaagtggagttggaccaggcccgggagaagtatgtccaagagttggcagccgtacgtgctgatgctgagacccgtctggctgaggtgcagcgagaagcacagagcactgcccgggagctggaggtgatgactgccaagtatgagggtgccaaggtcaaggtcctggaggagaggcagcggttccaggaagagaggcagaaactcactgcccaggtggagcagctagaggtatttcagagagagcaaactaagcaggtggaagaactgagtaagaaactggctgactctgaccaagccagcaaggtgcagcagcagaagctgaaggctgtccaggctcagggaggcgagagccagcaggaggcccagcgcctccaggcccagctgaatgaactgcaagcccagttgagccagaaggagcaggcagctgagcactataagctgcagatggagaaagccaaaacacattatgatgccaagaagcagcagaaccaagagctgcaggagcagctgcggagcctggagcagctgcagaaggaaaacaaagagctgcgagctgaagctgaacggctgggccatgagctacagcaggctgggctgaagaccaaggaggctgaacagacctgccgccaccttactgcccaggtgcgcagcctggaggcacaggttgcccatgcagaccagcagcttcgagacctgggcaaattccaggtggcaactgatgctttaaagagccgtgagccccaggctaagccccagctggacttgagtattgacagcctggatctgagctgcgaggaggggaccccactcagtatcaccagcaagctgcctcgtacccagccagacggcaccagcgtccctggagaaccagcctcacctatctcccagcgcctgccccccaaggtagaatccctggagagtctctacttcactcccatccctgctcggagtcaggcccccctggagagcagcctggactccctgggagacgtcttccaggactcgggtcgtaagacccgctccgctcgtcggcgcaccacgcagatcatcaacatcaccatgaccaagaagctagatgtggaagagccagacagcgccaactcatcgttctacagcacgcggtctgctcctgcttcccaggctagcctgcgagccacctcctctactcagtctctagctcgcctgggttctcccgattatggcaactcagccctgctcagcttgcctggctaccgccccaccactcgcagttctgctcgtcgttcccaggccggggtgtccagtggggcccctccaggaaggaacagcttctacatgggcacttgccaggatgagcctgagcagctggatgactggaaccgcattgcagagctgcagcagcgcaatcgagtgtgccccccacatctgaagacctgctatcccctggagtccaggccttccctgagcctgggcaccatcacagatgaggagatgaaaactggagacccccaagagaccctgcgccgagccagcatgcagccaatccagatagccgagggcactggcatcaccacccggcagcagcgtaaacgggtctccctagagccccaccagggccctggaactcctgagtctaagaaggccaccagctgtttcccacgccccatgactccccgagaccgacatgaagggcgcaaacagagcactactgaggcccagaagaaagcagctccagcttctactaaacaggctgaccggcgccagtcgatggccttcagcatcctcaacacacccaagaagctagggaacagccttctgcggcggggagcctcaaagaaggccctgtccaaggcttcccccaacactcgcagtggaacccgccgttctccgcgcattgccaccaccacagccagcgccgccactgctgccgccattggtgccacccctcgagccaagggcaaggcaaagcactaaagggccagtaccagtgagtggccccacctgtgtccccgatgctgccgtcacctggtcctccgcctactgtccctctcagtgccttctctcagctcccaggccaacagtagccaaacccctagagacagtgatgcctgcccgcaccctggcctggtccctggtccttcactggcgccttctcggagctggcccagggggcctggagcatggacagtgtgggcgctctccctaccttgcctccttttttcttaaagcaaagtcacttctccatcacaaccagatttgaggctggttttgatggctgggtccttgggcctggccagtcttcctcttagcctctggatctagaagggaccataagaggagtaggccctggttcctgctgtcctggtggctgggcccagcaggggccctcactcttgaagtccaggactgggtctgacctggtgggagcacctgccagaggatgctctttcccaggacggatgggccctgtgtctcaggagtggggttgggggacagccttcagcagcagctcacaccctaccttccccagacttgcactggggtgggatttggagtgatgggaaggtttttaagggccggggatggatcttttctaaatgttattacttgtaaatcccgaattc

SEQ ID NO: 7065 - DNA, 425 bp, Homo sapiens
cccaactcagatatccctttgcagcccacctactacccaagaagctgctgtgtagggacagagcccaccagggcactggggacacgtggcacaggccagagagctcctgaggcctgggaggctgccatgttgggtcccagatggacacaccccagtacgcccagtctcagggcctgagccacccactggttctagaattctctcaggagaagagagcccctcacggcccccttcatcacaggctgcgcggcctcagcctggccagccccgagacccttctagcttgcggatccccctcctgctcccccgaccctgactctcccagagtggactggccagctctgggtctggtctgcgggcaggagccctgcccaggcggcccccagggccggccctcctctccccgactccatgcacgtctataa

SEQ ID NO: 7066 - DNA, 6589 bp, Homo sapiens
  SIMILAR (1)..(5214): 1001254mologous to Homo sapiens NuMA protein,accession number Z11583,Smith-Waterman Score=8479.
atgacactccacgccacccggggggctgcactcctctcttgggtgaacagtctacacgtggctgaccctgtggaggctgtgctgcagctccaggactgcagcatcttcatcaagatcattgacagaatccatggcactgaagagggacagcaaatcttgaagcagccggtgtcagagagactggactttgtgtgcagttttctgcagaaaaatcgaaaacatccctcttccccagaatgcctggtatctgcacagaaggtgctagagggatcagagctggaactggcgaagatgaccatgctgctcttataccactctaccatgagctccaaaagtcccagggactgggaacagtttgaatataaaattcaggctgagttggctgtcattcttaaatttgtgctggaccatgaggacgggctaaaccttaatgaggacctagagaacttcctacagaaagctcctgtgccttctacctgttctagcacattccctgaagagctctccccacctagccaccaggccaagagggagattcgcttcctagagctacagaaggttgcctcctcttccagtgggaacaactttctctcaggttctccagcttctcccatgggtgatatcctgcagaccccacagttccagatgagacggctgaagaagcagcttgctgatgagagaagtaatagggatgagctggagctggagctagctgagaaccgcaagctcctcaccgagaaggatgcacagatagccatgatgcagcagcgcattgaccgcctagccctgctgaatgagaagcaggcggccagcccactggagcccaaggagcttgaggagctgcgtgacaagaatgagagccttaccatgcggctgcatgaaaccctgaagcagtgccaggacctgaagacagagaagagccagatggatcgcaaaatcaaccagctttcggaggagaatggagacctttcctttaagctgcgggagtttgccagtcatctgcagcagctacaggatgccctcaatgagctgacggaggagcacagcaaggccactcaggagtggctagagaagcaggcccagctggagaaggagctcagcgcagccctgcaggacaagaaatgccttgaagagaagaacgaaatccttcagggaaaactttcacagctggaagaacacttgtcccagctgcaggataacccaccccaggagaagggcgaggtgctgggtgatgtcttgcagctggaaaccttgaagcaagaggcagccactcttgctgcaaacaacacacagctccaagccagggtagagatgctggagactgagcgaggccagcaggaagccaagctgcttgctgagcggggccacttcgaagaagaaaagcagcagctgtctagcctgatcactgacctgcagagctccatctccaacctcagccaggccaaggaagagctggagcaggcctcccaggctcatggggcccggttgactgcccaggtggcctctctgacctctgagctcaccacactcaatgccaccatccagcaacaggatcaagaactggctggcctgaagcagcaggccaaagagaagcaggcccagctagcacagaccctccaacagcaagaacaggcctcccagggcctccgccaccaggtggagcagctaagcagtagcctgaagcagaaggagcagcagttgaaggaggtagcggagaagcaggaggcaactaggcaggaccatgcccagcaactggccactgctgcagaggagcgagaggcctccttaagggagcgggatgcggctctcaagcagctggaggcactggagaaggagaaggctgccaagctggagattctgcagcagcaacttcaggtggctaatgaagcccgggacagtgcccagacctcagtgacacaggcccagcgggagaaggcagagctgagccggaaggtggaggaactccaggcctgtgttgagacagcccgccaggaacagcatgaggcccaggcccaggttgcagagctagagttgcagctgcggtctgagcagcaaaaagcaactgagaaagaaagggtggcccaggagaaggaccagctccaggagcagctccaggccctcaaagagtccttgaaggtcaccaagggcagccttgaagaggagaagcgcagggctgcagatgccctggaagagcagcagcgttgtatctctgagctgaaggcagagacccgaagcctggtggagcagcataagcgggaacgaaaggagctggaagaagagagggctgggcgcaaggggctggaggctcgattacagcagcttggggaggcccatcaggctgagactgaagtcctgcggcgggagctggcagaggccatggctgcccagcacacagctgagagtgagtgtgagcagctcgtcaaagaagtagctgcctggcgtgagcggtatgaggatagccagcaagaggaggcacagtatggcgccatgttccaggaacagctgatgactttgaaggaggaatgtgagaaggcccgccaggagctgcaggaggcaaaggagaaggtggcaggcatagaatcccacagcgagctccagataagccggcagcagaacgaactagctgagctccatgccaacctggccagagcactccagcaggtccaagagaaggaagtcagggcccagaagcttgcagatgacctctccactctgcaggaaaagatggctgccaccagcaaagaggtggcccgcttggagaccttggtgcgcaaggcaggtgagcagcaggaaacagcctcccgggagttagtcaaggagcctgcgagggcaggagacagacagcccgagtggctggaagagcaacagggacgccagttctgcagcacacaggcagcgctgcaggctatggagcgggaggcagagcagatgggcaatgagctggaacggctgcgggccgcgctgatggagagccaggggcagcagcaggaggagcgtgggcagcaggaaagggaggtggcgcggctgacccaggagcggggccgtgcccaggctgaccttgccctggagaaggcggccagagcagagcttgagatgcggctgcagaacgccctcaacgagcagcgtgtggagttcgctaccctgcaagaggcactggctcatgccctgacggaaaaggaaggcaaggaccaggagttggccaagcttcgtggtctggaggcagcccagataaaagagctggaggaacttcggcaaaccgtgaagcaactgaaggaacagctggctaagaaagaaaaggagcacgcatctggctcaggagcccaatctgaggctgctggcaggacagagccaacaggccccaagctggaggcactgcgggcagaggtgagcaagctggaacagcaatgccagaagcagcaggagcaggctgacagcctggaacgcagcctcgaggctgagcgggcctcccgggctgagcgggacagtgctctggagactctgcagggccagttagaggagaaggcccaggagctagggcacagtcagagtgccttagcctcggcccaacgggagttggctgccttccgcaccaaggtacaagaccacagcaaggctgaagatgagtggaaggcccaggtggcccggggccggcaagaggctgagaggaaaaatagcctcatcagcagcttggaggaggaggtgtccatcctgaatcgccaggtcctggagaaggagggggagagcaaggagttgaagcggctggtgatggccgagtcagagaagagccagaagctggaggagaggctgcgcctgctgcaggcagagacagccagcaacagtgccagagctgcagaacgcagctctgctctgcgggaggaggtgcagagcctccgggaggaggctgagaaacagcgggtggcttcagagaacctgcggcaggagctgacctcacaggctgagcgtgcggaggagctgggccaagaattgaaggcgtggcaggagaagttcttccagaaagagcaggccctctccaccctgcagctcgagcacaccagcacacaggccctggtgagtgagctgctgccagctaagcacctctgccagcagctgcaggccgagcaggccgctgccgagaaacgccaccgtgaggagctggagcagagcaagcaggccgctgggggactgcgggcagagctgctgcgggcccagcgggagcttggggagctgattcctctgcggcagaaggtggcagagcaggagcgaacagctcagcagctgcgggcagagaaggccagctatgcagagcagctgagcatgctgaagaaggcgcatggcctgctggcagaggagaaccgggggctgggtgagcgggccaaccttggccggcagtttctggaagtggagttggaccaggcccgggagaagtatgtccaagagttggcagccgtacgtgctgatgctgagacccgtctggctgaggtgcagcgagaagcacagagcactgcccgggagctggaggtgatgactgccaagtatgagggtgccaaggtcaaggtcctggaggagaggcagcggttccaggaagagaggcagaaactcactgcccaggtggagcagctagaggtatttcagagagagcaaactaagcaggtggaagaactgagtaagaaactggctgactctgaccaagccagcaaggtgcagcagcagaagctgaaggctgtccaggctcagggaggcgagagccagcaggaggcccagcgcctccaggcccagctgaatgaactgcaagcccagttgagccagaaggagcaggcagctgagcactataagctgcagatggagaaagccaaaacacattatgatgccaagaagcagcagaaccaagagctgcaggagcagctgcggagcctggagcagctgcagaaggaaaacaaagagctgcgagctgaagctgaacggctgggccatgagctacagcaggctgggctgaagaccaaggaggctgaacagacctgccgccaccttactgcccaggtgcgcagcctggaggcacaggttgcccatgcagaccagcagcttcgagacctgggcaaattccaggtggcaactgatgctttaaagagccgtgagccccaggctaagccccagctggacttgagtattgacagcctggatctgagctgcgaggaggggaccccactcagtatcaccaggtcaggaggcagccttcctccctatgtctgtttatggagtgcctgctgtttatcaggctgtatcctagtgagataaataagatgtgatctaaatttattcttagagaagaataaagaaaaacgggtattataccagatatctatttagggcacagttggaataaaaagcaagtggtcaagaaaggcttcgtggaagctatcgctcctgctgagtcctgaaagcatccataggtgtgtgtgccaggttgacgagaagagcagtgtgaacagaggctgtgaaagagcctgactaagctgagatgtgaggccaggaaggcccattggagaccggctattaagacttgatcctaaaggcattgaggaaaccttggtggctgtaattgaaaggtttaggagaaaaaaaaaggaaccttggaagaatttgaaactgaagagtacatggttaatttgcatcttaaaaagattattctaatagctagtatagaagttaagactggaaaaatgtttttattaaacacttacatttacttattttgtgctagacataaagcactcatgacaattatacctgatttatcccccaacactcgcagtggaacccgccgttctccgcgcattgccaccaccacagccagcgccgccactgctgccgccattggtgccacccctcgagccaagggcaaggcaaagcactaaagggccagtaccagtgagtggccccacctgtgtccccgatgctgccgtcacctggtcctccgcctactgtccctctcagtgccttctctcagctcccaggccaacagtagccaaacccctagagacagtgatgcctgcccgcaccctggcctggtccctggtccttcactggcgccttctcggagctggcccagggggcctggagcatggacagtgtgggcgctctccctaccttgcctccttttttcttaaagcaaagtcacttctccatcacaaccagatttgaggctggttttgatggctgggtccttgggcctggccagtcttcctcttagcctctggatctagaagggaccataagaggagtaggccctggttcctgctgtcctggtggctgggcccagcaggggccctcactcttgaagtccaggactgggtctgacctggtgggagcacctgccagaggatgctctttcccaggacggatgggccctgtgtctcaggagtggggttgggggacagccttcagcagcagctcacaccctaccttccccagacttgcactggggtgggatttggagtgatgggaaggtttttaagggccggggatggatcttttctaaatgttattacttgtaaataaagtctatttttctcccgtgaaaaaaaaaaaaaaa

SEQ ID NO: 7067 - DNA, 7251 bp, Homo sapiens
  SIMILAR (259)..(5571): 971254mologous to Homo sapiens NuMA protein,accession number Z11583,Smith-Waterman Score=8430.
gcccacgaagaggtacgattccggagaatcgcgaggcagagcgggagcgcgcagccaggtggaaactaattctaagccagactgctggagatcaccctgttctagtgtgtggaggcttccaccaggagtctggagtgcaatggcacgatctcggctcactgcaacctccacctcccaggttcaagcgattctcctgcctcagcctcccaagtagctgggattacaggcgcattggagtgactgtctggcatcaccaagatgacactccacgccacccggggggctgcactcctctcttgggtgaacagtctacacgtggctgaccctgtggaggctgtgctgcagctccaggactgcagcatcttcatcaagatcattgacagaatccatggcactgaagagggacagcaaatcttgaagcagccggtgtcagagagactggactttgtgtgcagttttctgcagaaaaatcgaaaacatccctcttccccagaatgcctggtatctgcacagaaggtgctagagggatcagagctggaactggcgaagatgaccatgctgctcttataccactctaccatgagctccaaaagtcccagggactgggaacagtttgaatataaaattcaggctgagttggctgtcattcttaaatttgtgctggaccatgaggacgggctaaaccttaatgaggacctagagaacttcctacagaaagctcctgtgccttctacctgttctagcacattccctgaagagctctccccacctagccaccaggccaagagggagattcgcttcctagagctacagaaggttgcctcctcttccagtgggaacaactttctctcaggttctccagcttctcccatgggtgatatcctgcagaccccacagttccagatgagacggctgaagaagcagcttgctgatgagagaagtaatagggatgagctggagctggagctagctgagaaccgcaagctcctcaccgagaaggatgcacagatagccatgatgcagcagcgcattgaccgcctagccctgctgaatgagaagcaggcggccagcccactggagcccaaggagcttgaggagctgcgtgacaagaatgagagccttaccatgcggctgcatgaaaccctgaagcagtgccaggacctgaagacagagaagagccagatggatcgcaaaatcaaccagctttcggaggagaatggagacctttcctttaagctgcgggagtttgccagtcatctgcagcagctacaggatgccctcaatgagctgacggaggagcacagcaaggccactcaggagtggctagagaagcaggcccagctggagaaggagctcagcgcagccctgcaggacaagaaatgccttgaagagaagaacgaaatccttcagggaaaactttcacagctggaagaacacttgtcccagctgcaggataacccaccccaggagaagggcgaggtgctgggtgatgtcttgcagctggaaaccttgaagcaagaggcagccactcttgctgcaaacaacacacagctccaagccagggtagagatgctggagactgagcgaggccagcaggaagccaagctgcttgctgagcggggccacttcgaagaagaaaagcagcagctgtctagcctgatcactgacctgcagagctccatctccaacctcagccaggccaaggaagagctggagcaggcctcccaggctcatggggcccggttgactgcccaggtggcctctctgacctctgagctcaccacactcaatgccaccatccagcaacaggatcaagaactggctggcctgaagcagcaggccaaagagaagcaggcccagctagcacagaccctccaacagcaagaacaggcctcccagggcctccgccaccaggtggagcagctaagcagtagcctgaagcagaaggagcagcagttgaaggaggtagcggagaagcaggaggcaactaggcaggaccatgcccagcaactggccactgctgcagaggagcgagaggcctccttaagggagcgggatgcggctctcaagcagctggaggcactggagaaggagaaggctgccaagctggagattctgcagcagcaacttcaggtggctaatgaagcccgggacagtgcccagacctcagtgacacaggcccagcgggagaaggcagagctgagccggaaggtggaggaactccaggcctgtgttgagacagcccgccaggaacagcatgaggcccaggcccaggttgcagagctagagttgcagctgcggtctgagcagcaaaaagcaactgagaaagaaagggtggcccaggagaaggaccagctccaggagcagctccaggccctcaaagagtccttgaaggtcaccaagggcagccttgaagaggagaagcgcagggctgcagatgccctggaagagcagcagcgttgtatctctgagctgaaggcagagacccgaagcctggtggagcagcataagcgggaacgaaaggagctggaagaagagagggctgggcgcaaggggctggaggctcgattactgcagcttggggaggcccatcaggctgagactgaagtcctgcggcgggagctggcagaggccatggctgcccagcacacagctgagagtgagtgtgagcagctcgtcaaagaagtagctgcctggcgtgacgggtatgaggatagccagcaagaggaggcacagtatggcgccatgttccaggaacagctgatgactttgaaggaggaatgtgagaaggcccgccaggagctgcaggaggcaaaggagaaggtggcaggcatagaatcccacagcgagctccagataagccggcagcagaacaaactagctgagctccatgccaacctggccagagcactccagcaggtccaagagaaggaagtcagggcccagaagcttgcagatgacctctccactctgcaggaaaagatggctgccaccagcaaagaggtggcccgcttggagaccttggtgcgcaaggcaggtgagcagcaggaaacagcctcccgggagttagtcaaggagcctgcgagggcaggagacagacagcccgagtggctggaagagcaacagggacgccagttctgcagcacacaggcagcgctgcaggctatggagcgggaggcagagcagatgggcaatgagctggaacggctgcgggccgcgctgatggagagccaggggcagcagcaggaggagcgtgggcagcaggaaagggaggtggcgcggctgacccaggagcggggccgtgcccaggctgaccttgccctggagaaggcggccagagcagagcttgagatgcggctgcagaacgccctcaacgagcagcgtgtggagttcgctaccctgcaagaggcactggctcatgccctgacggaaaaggaaggcaaggaccaggagttggccaagcttcgtggtctggaggcagcccagataaaagagctggaggaacttcggcaaaccgtgaagcaactgaaggaacagctggctaagaaagaaaaggagcacgcatctggctcaggagcccaatctgaggctgctggcaggacagagccaacaggccccaagctggaagcactgcgggcagaggtgagcaagctggaacagcaatgccagaagcagcaggagcaggctgacagcctggaacgcagcctcgaggctgagcgggcctcccgggctgagcgggacagtgctctggagactctgcagggccagttagaggagaaggcccaggagctagggcacagtcagagtgccttagcctcggcccaacgggagttggctgccttccgcaccaaggtacaagaccacagcaaggctgaagatgagtggaaggcccaggtggcccggggccggcaagaggctgagaggaaaaatagcctcatcagcagcttggaggaggaggtgtccatcctgaatcgccaggtcctggagaaggagggggagagcaaggagttgaagcggctggtgatggccgagtcagagaagagccagaagctggaggagagctgcgcctgctgcaggcagagacagccagcaacagtgccagagctgcagaacgcagctctgctctgcgggaggaggtgcagagcctccgggagggaggctgagaaacagcgggtggcttcagagaacctgcggcaggagctgacctcacaggctgagcgtgcggaggagctgggccaagaattgaaggcgtggcaggagaagttcttccagaaagagcaggccctctccaccctgcagctcgagcacaccagcacacaggccctggtgagtgagctgctgccagctaagcacctctgccagcagctgcaggccgagcaggccgctgccgagaaacgccaccgtgaggagctggagcagagcaagcaggccgctgggggactgcgggcagagctgctgcgggcccagcgggagcttggggagctgattcctctgcggcagaaggtggcagagcaggagcgaacagctcagcagctgcgggcagagaaggccagctatgcagagcagctgagcatgctgaagaaggcgcatggcctgctggcagaggagaaccgggggctgggtgagcgggccaaccttggccggcagtttctggaagtggagttggaccaggcccgggaaaagtatgtccaagagttggcagccgtacgtgctgatgctgagacccgtctggctgaggtgcagcgagaagcacagagcactgcccgggagctggaggtgatgactgccaagtatgagggtgccaaggtcaaggtcctggaggagaggcagcggttccaggaagagaggcagaaactcactgcccaggtggaagaactgagtaagaaactggctgactctgaccaagccagcaaggtgcagcagcagaagctgaaggctgtccaggctcagggaggcgagagccagcaggaggcccagcgcttccaggcccagctgaatgaactgcaagcccagttgagccagaaggagcaggcagctgagcactataagctgcagatggagaaagccaaaacacattatgatgccaagaagcagcagaaccaagagctgcaggagcagctgcggagcctggagcagctgcagaaggaaaacaaagagctgcgagctgaagctgaacggctgggccatgagctacagcaggctgggctgaagaccaaggaggctgaacagacctgccgccaccttactgcccaggtgcgcagcctggaggcacaggttgcccatgcagaccagcagcttcgagacctgggcaaattccaggtggcaactgatgctttaaagagccgtgagccccaggctaagccccagctggacttgagtattgacagcctggatctgagctgcgaggaggggaccccactcagtatcaccagcaagctgcctcgtacccagccagacggcaccagcgtccctggagaaccagcctcacctatctcccagcgcctgccccccaaggtagaatccctggagagtctctacttcactcccatccctgctcggagtcaggccccccctggagagcagcctggactccctgggagacgtcttccttggactcgggtcgtaagacccgctccgctcgtcggcgcaccacgcagatcattaacattcaccatgaccaagaaagctagatgtgggaagagccagacaggcgccaaacttatcgttctacagcaacgcggtctgctcctgcttcccaggctagcctgcgagccaccctcctctacttagtctctaactcgcctgggtttctcccgattatggcaactcagccctgctcagcttgcctggctaccgccccaccactcgcagttctgctcgtcgttcccaggccggggtgtccagtggggcccctccaggaaggaacagcttctacatgggcacttgccaggatgagcctgagcagctggatgactggaaccgcattgcagagctgcagcagcgcaatcgagtgtgccccccacatctgaagacctgctatcccctggagtccaggccttccctgagcctgggcaccatcacagatgaggagatgaaaactggagacccccaagagaccctgcgccgagccagcatgcagccaatccagatagccgagggcactggcatcaccacccggcagcagcgcaaacgggtctccctagagccccaccagggccctggaactcctgagtctaagaaggccaccagctgtttcccacgccccatgactccccgagaccgacatgaagggcgcaaacagagcactactgaggcccagaagaaagcagctccagcttctactaaacaggctgaccggcgccagtcgatggccttcagcatcctcaacacacccaagaagctagggaacagccttctgcggcggggagcctcaaagaaggccctgtccaaggcttcccccaacactcgcagtggaacccgccgttctccgcgcattgccaccaccacagccagtgccgccactgctgccgccattggtgccacccctcgagccaagggcaaggcaaagcactaaagggccagtaccagtgagtggccccacctgtgtccccgatgctgccgtcacctggtcctccgcctactgtccctctcagtgccttctctcagctcccaggccaacagtagccaaacccctagagacagtgatgcctgcccgcaccctggcctggcccctggtccttcactggcgccttctcggagctggcccagggggcctggagcatggacagtgtgggcgctctccctaccttgcctccttttttcttaaagcaaagtcacttctccatcacaaccagatttgaggctggttttgatggctgggtccttgggcctggccagtcttcctcttagcctctggatctagaagggaccataagaggagtaggccctggttcctgctgtcctggtggctgggcccagcaggggccctcactcttgaagtccaggactgggtctgacctggtgggagcacctgccagaggatgctctttcccaggacggatgggccctgtgtctcaggagtggggttgggggacagccttcagcagcagctcacaccctaccttccccagacttgcactggggtgggatttggagtgatgggaaggtttttaagggccggggatggatcttttctaaatgttattacttgtaaataaagtctatttttctcccgtgaaaaaaaaaaaaaaa

SEQ ID NO: 7068 - DNA, 1487 bp, Homo sapiens
  SIMILAR (785)..(1120): 781254mologous to Homo sapiens Similar to nuclear mitotic apparatus protein 1,accession number BC004165,Smith-Waterman Score= 401.
  misc_feature (1)...(1487): n = a,t,c or g
ttttttttttttttttagaagttaagactggaaaaatgtttttattaaacacttacatttacttattttgtgctagacataaagtcactcatgacaattatacctgatttgtcccccaacaaccctctgaggtaaggtttattctgtctccctttaaacagaatgnaatctggggcatagaggggcagtcacttgcccaaggttccccagtggtagaagctggggtttgaacccctgggcaccctggcctgagttcttggcttgtcaccactcatcttcctctgtcagtgcccatgatgagtctagggtgagaggagatgaagcagaccaggggaaaggacatgaagcatgggagtgggggtgtgggttagttgctgttcaggaagcttgggtgattggggctcgccaaggcagggacgacattgggatttatgccccacgttcatggccttgggggcctgagtggggggcgttccctattcactgaaatgggagatgcaggaggaagaacagagaagtgggcttagattgggacgtgtttgctgtgaagcagccttgttcatctggtggggatgggacatctggggctgggcattgctcactatgaggagctattaggagaagccaggggagtggactgaaaggaaggcccaggtcaagtgctttccttggtacctctgaaaaatcagagagatgggctgcttgacctcatctgcttgtagtaaggatgggaaatggtcactttcaaaaagggctggacaaaatgccttctagcgtgaaggactgtacctcagcaggtttcctttccatagcaagctgcctcgtaccacagccagacggcaccagcgtccctggagaaccagcctcacctatctcccagcgcctgccccccaaggtagaatccctggagagtctctacttcactcccatccctgctcggagtcaggcccccctggagagcagcctggactccctgggagacgtcttcctggactcgggtcgtaagacccgctccgctcgtcggcgcaccacgcagatcatcaacatcaccatgaccaaggtcaggctgctgggacaggggctgcagggcagcaattcccacttcctctcaagggcatctttgcaatagggcactcagtcaggagcagggagggatgagcagccagtccatgttacagtgggaaagctgagaggtcttaaaaagggcagtgacttggttaagggcacttctgaagaaaaaggcagggctaggattagatccctgcctcctgactaaggctagcattctctccatgcgtagcactgagcctgtgcagggtgaagggagagaacgtggcgaagctgcagcccatcctgtgcctcccagcatgccccatgcagctgagaggcattgttgctgcccagtggactgcctgacaggctgcaggcccttgcctttgtttccacatcttgaaggggaggttgggagggaattcccggcactgact

SEQ ID NO: 7069 - DNA, 530 bp, Homo sapiens
  SIMILAR (446)..(529): 1001254mologous to Mus musculus putative,accession number AK011928,Smith-Waterman Score=149.
tgggtgacagagcaagactccatctcaaaataaataaaaaataaaacactgggtacaattttgctaatagtggcttattcacagatataaataaagtattagcataaatcgtagccttaaaaaagccttttatatgtccttttatatagaattttacatggtcttcaaaaaatagtatgtaattgagaaaaagattagaagggaatatgtagaaatagaaagaattatgttagagtgataggattatgtaattttttcttagtattttctcagttcatcaaactttctattataccctgattatactgattatattacctcctacgctgactcaaaatctttttttttttcccctcaggtggcgacatgtctaagaatgtgagccagtcacagatggcaaaattgaaccaacaaatggccaaaatgatggatcctagggttcttccatcacatgggtggtatggcaggacttcagtcaatgatgaggcagtttcaacagggtgctgctggcaacatgaaaggcatgatgg

SEQ ID NO: 7070 - DNA, 1954 bp, Homo sapiens
  SIMILAR (1313)..(1516): 441254mologous to Canis familiaris 54k protein (AA 1- 504),accession number X16318,Smith-Waterman Score=110.
atggttctagcagaccttggaagaaaaataacatcagcattacgctcgttgagcaatgccaccattatcaatgaagaggtattgaatgctatgctaaaagaagtctgtaccgctttgttggaagcagatgttaatattaaactagtgaagcaactaagagaaaatgttaagtctgctattgatcttgaagagatggcatctggtcttaacaaaagaaaaatgattcagcatgctgtatttaaagaacttgtgaagcttgtagaccctggagttaaggcatggacacccactaaaggaaaacaaaatgtgattatgtttgttggattgcaagggagtggtaaaacaacaacatgttcaaagctagcatattattaccagaggaaaggttggaagacctgtttaatatgtgcagacacattcagagcaggggcttttgaccaactaaaacagaatgctaccaaagcaagaattccattttatggaagctatacagaaatggatcctgtcatcattgcttctgaaggagtagagaaatttaaaaatgaaaattttgaaattattattgttgatacaagtggccgccacaaacaagaagactctttgtttgaagaaatgcttcaagttgctaatgctatacaacctgataacattgtttatgtgatggatgcctccattgggcaggcttgtgaagcccaggctaaggcttttaaagataaagtagatgtagcctcagtaatagtgacaaaacttgatggccatgcaaaaggaggtggtgcactcagtgcagtcgctgccacaaaaagtccgattattttcattggtacaggggaacatatagatgactttgaacctttcaaaacacagccttttattagcaaacttcttggtatgggcgacattgaaggactgatagataaagtcaacgagttgaagttggatgacaatgaagcacttatagagaagttgaaacatggtcagtttacgttgcgagacatgtatgagcaatttcaaaatatcatgaaaatgggccccttcagtcagatcttggggatgatccctggttttgggacagattttatgagcaaaggaaatgaacaggagtcaatggcaaggctaaagaaattaatgacaataatggatagtatgaatgatcaagaactagacagtacggatggtgccaaagtttttagtaacaactcaggaagaatccaacgattagcaagaccatcgtgtgtatcaacgagtgatgttcaagaacttttgacacaatataccaagtttgcacagatggtaaaatagatgggaggtatcaaaggacttttccaaaggtggcgacatgtctaagaatggagccaggtcacagattgcaaaaattgaaccaacaaatggccaaaatgatggatcctaggggttcttcatcacatgggtggtatggcaagacttcagtcaatgatgaggcagtctcaaacagggtgctgctggcaacatgaaaggcatgatgggattcaataatatgtaaagaaaatgtccttaatataaactgactcagttgaatacctaatttgctgagacctcagcgtttcccttctttttgcgaattggggggaaagtgtatttttcttgcttatcatgcactctttccttttcatctcgcccgcttttcccctcctttctttttcccttccttctttcctcccctttaaataaaagggagaaatacatggtttttgggggaaatcattatatggtttgctttagattttgttctgttttcaccatcataacacttaagttaaatcatgatgtaaaattttagtacttaaaggtttttaattatctcgaaggccaagcattgcatttgtaaacagtcctggtcagtagttaaataatgtttcaattaaagtgctgtaaaataaacttcaaagtggttataagttaaaaaaaaaaaaaaagg

SEQ ID NO: 7071 - DNA, 449 bp, Homo sapiens
acttctatcctccatcaggggacctgtttctgaggaagtagttcggtctgttcaatcgtctgccctatcccccacagcacccaaaaccccattattccaggatccctggggccccgccccaccaggccctcaaaatccctccactgtttctgtctcccctttactgctggggtccctcctccaagtctcccggggctcccaagcgctgcccctccagcatctccactccgcccccttccgcaaccccgccccgcacactcactggttcctggccgggacagcgctgtcagaaagatggtgaagcccaaagctaccaggtgcgccaagatcccactgcctctccgcagccagcgggtcagtctcggctccccagctggagcgggaaccagacctacctccaggggctgcatggccgtggcccgcgggcccgtacactccagctgcccggg

SEQ ID NO: 7072 - DNA, 358 bp, Homo sapiens
atctactcatccattcatccactcatccacccacctatccacccattcacccacctggccaccatttcttccttcctttattttttcctttctttttttccttctctccttccttccacccatccacccacccactcattcacctgtctacctatccacccatccatccatccgtctacccacctgtccctctatccctgtccgtctattcttccatccatctacccactcctgagtacttcctcttccagcctgtggcccatggagatcacatggtagaatatcctctatgccaggggagcagagtccaatacctcgtctttggaagtcaccctcctccaagcccccatttccttgg

SEQ ID NO: 7073 - DNA, 1671 bp, Homo sapiens
  SIMILAR (277)..(588): 981254mologous to Homo sapiens Ras guanine nucleotide exchange factor 2,accession number AF181250,Smith-Waterman Score= 537.
atgctggtccacactcaacctccagaagttcatcaatacaaccattcaagtgctgctaccaggtcccggttccagcgacttcagctccagttaatttggggctggagtcaagtgctgcccatgagtgcattctaccagatcatcattcaggcatcagggttgcggctccatgcatgtgtgacacctggtgctgggacccactctttgccattcctgcccagtgtaggtaatttaccaagcaacaagggaaacagccgtgtttactgtttctttgcagctgatctgtttgatattttgctccccatgctgaacatttatcaagaatttgtgcgtaatcaccagtacagcctgcaagttctcgccaattgtaagcaaaacagagattttgacaaactcttaaaacagtatgaagccaatccagcctgtgaggggaggatgctggagacattcttgacctatcccatgtttcagatccccagatatatcatcacactccatgagctccttgctcacacaccccatgagcatgtggaaaggaaaagcctggagtttgccaaatcaaagctagaggaactatccagaatgatcgtggagggctgtgacatcttgctggacaccagccaaacgttcatccgccaagggaccatgaaaaacagcaacacaatcatagtaaagcacgagtggggcaggcagttacattctgactggacgctcctcctcagcggcccggacattctctgcagctccaaggaggaccggtcggcctggcccacggccgtggcagtgccaagtgctgacgatacccaggccaaggcccaggagaaacttgcgttgctcaaagccctttcacataagactggggaccatgtccgaacagtcctagagtctgcaccagcggaccgagcaggagtggaaagctcccctgcagcggacaccacagaactttcaccttgcagatccccctcaactcctcggcacctccgctatcgacagcctggaggacagacggcggacaatgcccactgctctgtttcaccggcttctgcttttgcaatagccacagctgcagcaggacatgggagtccaccagaagaggaagatgatatctgccttcctacttcacaggctcgttgtaatgaatacgtaggtcttcgtaaatccataatgctagtacagaaaaaagacaaaaagaacatcacttgcaggtcattaacacccagtgaggaaggacttgggaccattgttaaagtactggtctttagtgaaataatgtttaacctggattttaaaatagtggtggagcctcctgacgctgccgccttcactgttgtcttgttagcaccctcacgccaggagaaagctgcctggatgagtgacatcagtcagtgtgtggacaatatacgatgtaatggtttaatgactatagtgtttgaagagaattccaaagtcactgtgccacatatgattaaagcaaaagttaatggctgtaccatgtcccaccttgataactccctgactcttcccttcactgacactgagcagggcaggtcctcaagctggactgccgggcacgtgaaagccccatgtcccctgcacgcacagctccctctgcttgcctcactcttcctccaggaacttcaagcctttgctcgaatgtcaccgtatccttga

SEQ ID NO: 7074 - DNA, 2250 bp, Homo sapiens
  SIMILAR (1069)..(1500): 981254mologous to Mus musculus guanine nucleotide release/exchange factor Ras-GRF2,accession number U67326,Smith- Waterman Score=740.
atgaccatactgccaaaagcaatctacaaattcaatgcaattcccatcaaaataccaccatcattcttcacagaattagacaaaataattctaaaactcatatggaaccaaaaaggagcccacatagccaaagcaagactaagcaaaaagaacaaatctggagacatcacactacctgatttcaaactatactataaggccacagtcaccaaaacagcgtggtactggtacaaaaataggcatgtagaccaatggaacagaatagagaacccagaaataaatccaaatacttacagccaactaatcttcaacaaaagaaacaaaaacgtaagatgcagagaagggacagctgtacagcggatgttgtcatcaaaggtgtctgaagcagggtatatctgcaaccaggccctacctaccatgactggagtaaggcgcttggctctagagacagcctctctgggggacagtccactagcccatgctaaggccactgatttcgaactcaacaatgaactaaagatgaatgtcctaagacgtgctagaagaagtttagcgagacccagaccttcttccccaagaaaggaaagccgccgcgaatatcctcaggcagtctattttagctcagtccatgtttttgcaagtccttccctgatgcagcaacaccagatgttggtttgtgatgtgttagcaactggcctggccctttcacaagatgaccaagatgacatccacctaaaattagaggatataattcaaatgaagcattccctacgagtgagtgccaaccccccacagcagcagggctcggctgctctagctgtcttagaagttgacattattcctaaggcaggttgtgtgtatgtctgtcccctcagttcctgtttaatttggggctggagtcaagtgctgcccatgagtgcattctaccagatcatcattcaggcatcagggttgcggctccatgcatgtgtgacacctggtgctgggacccactctttgccattcctgcccagtgtaggtaatttaccaagcaacaagggaaacagccgtgtttactgtttctttgcagctgatctgtttgatattttgctccccatgctgaacatttatcaagaatttgtgcgtaatcaccagtacagcctgcaagttctcgccaattgtaagcaaaacagagattttgacaaactcttaaaacagtatgaagccaatccagcctgtgaggggaggatgctggagacattcttgacctatcccatgtttcagatccccagatatatcatcacactccatgagctccttgctcacacaccccatgagcatgtggaaaggaaaagcctggagtttgccaaatcaaagctagaggaactatccagagtaatgcacgatgaagtcagcgacactgaaaacataaggaaaaaccttgccatcgaaagaatgatcgtggagggctgtgacatcttgctggacaccagccaaacgttcatccgccaagggaccatgaaaaacagcaacacaatcatagtaaagcacgagtggggcaggcagtacattctgactggacgctcctcctcagcggcccggacattctctgcagctccaaggaggaccgaagaggaagatgatatctgccttcctacttcacaggctcgttgtaatgaatacgtaggtcttcgtaaatccataatgctagtacagaaaaaagacaaaaagaacatcacttgcaggtcattaacacccagtgaggaagcaagtgatccaagagagagattgaccaagatgaaaggtgctaagctcaattctagtgcccctgccctgagaaacagattccctgctgtgggaagcaaacctctgttacctatgagtaacctggtggcctcccagataatgaactatgctgatgtcagctcccgtgccaacgccatcgagaaatgggtggcagtggcggacatctgccgatgcctgcacaactacaacggcgtgctggagatcacctcggccttaaacagaagtgccatctacagtgctgctgcggccgcggtcgtgtgggctgggtggagaggggtaaaactaaaactacatttcccagactcccttgcagctatggttctggatgtaaattcagttccactaatagatgcacttggaaagacacagaaggcggaagtaggggccatcttcctatggctgaaagtcagtcatggcgatgtgagtgctttggggcaatgtcagcacccagctttaggattctag

SEQ ID NO: 7075 - DNA, 3711 bp, Homo sapiens
  SIMILAR (1)..(3711): 1001254mologous to Homo sapiens Ras-GRF2,accession number AF023130,Smith-Waterman Score=6413.
atgcagaagagcgtgcgctacaacgaggggcacgccctgtacctggcctttctggcgcgcaaggagggcaccaagcgcggcttcctgagtaagaagacggccgaggcgagccgctggcacgagaagtggttcgccctctaccagaatgtgctcttctacttcgagggcgagcagagctgccgcccggcgggcatgtacctcctggagggctgcagctgcgaacgaacgcccgcgccacccagggccggcgccgggcagggaggcgtccgagacgcgctggacaagcagtattactttactgttctttttggccatgaaggtcagaagccactggagctgcgctgtgaggaggagcaggatggtaaagagtggatggaggccattcaccaagccagttatgcagacattttgattgagagggaagtattaatgcagaagtacattcatctagttcagatcgtagagacagaaaaaattgcagctaaccaactccgacatcaacttgaagatcaagacacagaaatcgaaaggcttaaatcagagattattgctcttaataaaaccaaagaacgaatgcgaccttaccaaagcaaccaagaagacgaagatccagacatcaagaagattaaaaaggttcagagcttcatgcgaggatggttgtgcagaaggaaatggaagaccatcgtgcaggattacatttgttctcctcatgctgaaagtatgaggaagagaaaccagattgtgttcaccatggtggaggcagagtcagagtacgttcaccagctctacatcctggtcaatggctttctccggcccctgcgtatggccgccagctccaagaagccccccatcagccacgacgacgtcagcagtatttttcttaacagtgaaacaatcatgtttcttcatgaaatatttcatcaaggactaaaggcaaggatagcaaactggcccactttaattttagctgatctgtttgatattttgctccccatgctgaacatttatcaagaatttgtgcgtaatcaccagtacagcctgcaagttctcgccaattgtaagcaaaacagagattttgacaaactcttaaaacagtatgaagccaatccagcctgtgaggggaggatgctggagacattcttgacctatcccatgttccagatccccagatatatcatcacactccatgagctccttgctcacacaccccatgagcatgtggaaaggaaaagcctggagtttgccaaatcaaagctagaggaactatccagagtaatgcacgatgaagtcagcgacactgaaaacataaggaaaaaccttgccatcgaaagaatgatcgtggagggctgtgacatcttgctggacaccagccaaacgttcatccgccaaggttctcttattcaagtaccttccgttgagagggggaaacttagtaaagttcgcctgggttcgttgtctttgaaaaaggaaggagagagacaatgcttcttatttacaaaacactttttaatatgtacaagaagttcaggagggaagcttcatctgctcaagacaggtggggttctgtctctaatagactgcacattgattgaggagccagatgcaagcgatgatgactctaaaggttctgggcaagtgtttgggcacctggattttaaaatagtggtggagcctcctgaccgtgccgccttcactgttgtcttgttagcaccctcacgccaggagaaagctgcctggatgagtgacatcagtcagtgtgtggacaatatacgatgtaatggtttaatgactatagtgtttgaagagaattccaaagtcactgtgccacatatgattaagtctgatgcccgtcttcataaagacgacactgacatttgcttcagtaaaacactcaactcctgcaaagtgccccagatccgttatgccagcgtggagcgcctcttggaacgactgacagacttgcggtttcttagtattgatttcctcaacacctttctgcacacctatcgtattttcactactgccgctgtggtgctggggaaactctccgacatatacaagaggcctttcacctccatccctgtcaggtcattggaattgttttttgctaccagccagaacaacagaggtgaacatttggtggatggcaaatccccacgtctgtgtcgcaaattctcttccccgccaccactggctgtgtccagaacatcttccccagtgagggccagaaagctgtctttgacttctcccttgaactcaaagataggagcattggacctgacaacttccagcagtcccaccaccaccacccagagtcccgctgcgtctccaccaccacacactggtcagataccactggatctcagcagaggcctctcttctccagagcaaagcccgggaacggtagaagagaatgtcgataacccacgcgtggatctgtgtaacaagctaaaacgaagtattcaaaaagcagtcctagagtctgcaccagcggaccgagcaggagtggaaagctcccctgcagcggacaccacagaactttcaccttgcagatccccctcaactcctcggcacctccgctatcgacagcctggaggacagacggcggacaatgcccactgctctgtttcaccggcttctgcttttgcaatagccacagctgcagcaggacatgggagtccaccaggctttaacaacaccgagagaacatgtgataaagagtttattatacggagaacggctaccaatcgagttctgaacgtcctccgtcactgggtctcaaagcacgcacaggatttcgaactcaacaatgaactaaagatgaatgtcctaaatttgctagaagaagttttgcgagacccagaccttcttccccaagaaaggaaagccgccgcgaatatcctcagggccctttcacaagatgaccaagatgacatccacctaaaattagaggatataattcaaatgactgactgcatgaaggccgaatgctttgagtccttgtcggccatggagctggcagaacagatcaccctcctggaccatgtcattttcagaagcattccctacgaggagtttcttgggcaggggtggatgaagctggataaaaacgaaagaactccttacattatgaaaaccagccaacacttcaatgacatgagtaacctggtggcctcccagataatgaactatgctgatgtcagctcccgtgccaacgccatcgagaaatgggtggcagtggcggacatctgccgatgcctgcacaactacaacggcgtgctggagatcacctcggccttaaacagaagtgccatctacaggctgaagaaaacctgggccaaggtctctaagcagacaaaagctctaatggacaaacttcaaaagactgtttcctctgaaggaagatttaaaaatcttagagaaacccttaaaaattgtaaccctcctgcagttccttatcttgggatgtacttgacagacctggcatttattgaagaaggaacaccaaactttactgaggaaggccttgtcaatttctccaaaatgagaatgatatcacacatcatcagagagatacgccagttccagcagacttcctacagaatagatcatcagccaaaggtcgcacagtacttgcttgacaaagaccttatcatagatgaagatacgctatatgagctgtcactcaaaattgaacctcgactccctgct

SEQ ID NO: 7076 - DNA, 383 bp, Homo sapiens
  SIMILAR (39)..(383): 801254mologous to Oryctolagus cuniculus elongation factor 1 alpha,accession number U09823,Smith-Waterman Score=461.
cacaagggttcagaaaactacccctaaaaaccactacgggaaaggaaaagactcatagctgcattgtgggccttggacacgtaaattcgggcaagaccaccactactggccatctgatttataaatgcggcggcttcgacaaaagaaccattgacaaatttgagactgaggctgctgataaggcaaagggctccttcaaaaatgcctgggacttggataaactgaaagctgagcgtgaacgaggtatcaccattgatatatccttgtggaaatatgaaaccagcaggtactatgtgactatcattgttgccccatgactcatagactttatcataaacatgagtaccgggacatctcaagctgactgtgctggcctgattgtg

SEQ ID NO: 7077 - DNA, 972 bp, Homo sapiens
  SIMILAR (1)..(51): 701254mologous to Homo sapiens Ras guanine nucleotide exchange factor 2,accession number AF181250,Smith-Waterman Score= 58.
agcctggagtttagccaatcaaagttacagtatctatcaagagttaagcatcgatgaagtcagcgacactgaaaacataaggataaaccttgccatcgaaagaatgatcgtggagggctgtgacatcttgctggacaccagccaaacgttcatccgccaatgggaccatgaaaatcagcaacacaatcatagtaaagcacgagtggggcaggcagttacattctgactggacgctcctcctcagcggcccggacattctctgcagctccaaggaggaccggtcggcctggcccacggccgtggcagtgccaagtgctgacgatacccaggccaaggcccaggagaaacttgcgttgctcaaagccctttcacataagactggggaccatgtccgaagtgaaaacagctgtctgttgttcccatttttcatcagcacttccggatccgccccacacgatataatttgattcaactggtaactcccgttgccagatgaaatgtctctgatggacacttgccacgctttggtaatgcagaagctgtcgtgtttgcgaagtgtgctttgggggcatcactcgataaattaagcttttgaagagttgaagatatttgtgccggaaactgtggagaagcaacagcctgacagtgcctatttctcctcggctgttatttcaaaatgcaagacgtaaaccacatcccaagttatttttttagtgcttaggtcctctgggggaggggagaatgccccaggcaattgatttgagacaatatattgcacacatttataattttgaatttggtgaggagtggaatataaatttggaactcaaattaatcgttaatgtagtttctgtttataatgtgccaatacatttgaagatatttgtgttgccattgcctaccataatgtactgcttaaaatctctttttacctcatcaagaacaagacaatgttttgtgcacattaatttt

SEQ ID NO: 7078 - DNA, 1756 bp, Homo sapiens
  SIMILAR (1070)..(1516): 491254mologous to Homo sapiens Human PRO1418 protein UNQ732 SEQ ID NO:185,accession number AAB33453,Smith-Waterman Score=256.
atgggactggctgccgtgcagcagggggtggcgcttgtgagggaggctcgggccgcactggagcccacagagagagggggaggctcaggcatggcaggctgcaggtcccgagccctgccctgcggggaggcagctaaggcctggcgagaaatcgagcacagcagctcctggcccaggtgctaagctccccccaactgcccgtggccagcggggacggccggccgcgctgagtgccgggcccaccgagcccgccgagcccacgcccacccggaactcgggctggcccgcaagcgccccgcctgtgcgcgctggggacaaccgttgctgggtgtcccagggcctgaggcaggacggtactccgctgacaccttccctttcggccttgaggttcccagcctggtggccccaggacgttccggtcgcatggcagagtgctacggacgacgcctatgaagcccttagtccttctagttgcgcttttgctatggccttcgtctgtgccggcttatccgagcataactgtgacacctgatgaagagcaaaacttgaatcattatatacaagttttagagaacctagtacgaagtgttccctctggggagccaggtcgtgagaaaaaatctaactctccaaaacatgtttattctatagcatcaaagggatcaaaatttaaggagctagttacacatggagacgcttcaactgagaatgatgttttaaccaatcctatcagtgaagaaactacaactttccctacaggaggcttcacaccggaaataggaaagaaaaaacacacggaaagtaccccattctggtcgatcaaaccaaacaatgtttccattgttttgcatgcagaggaaccttatattgaaaatgaagagccagagccagagccggagccagctgcaaaacaaactgaggcaccaagaatgttgccagttgttactgaatcatctacaagtccatatgttacctcatacaagtcacctgtcaccactttagataagagcactggcattggggatctctacagaatcagaagatgttcctcagctctcaggtgaaactggcgataggaaaaacccgaaggagtttgggaaagcaccccagagagttgggaataatggatgacattttgaaaaaaattttaggatattaatttcacaagtgcaacagggcacttcttagtggacaccagcaacccagcatatagagaagatattgaagcctctaaagatcacctaaaacgaagccttgctctagcagcagcagcagaacataaattaaaaacaatgtataagtcccagttattgccagtaggacgaaccaagtaataaaattgatgacctcgaacctggtatttaacatgctgtgtaattctagatctaaactctatgaatatttagatattaaatgtgttcccacccagagatgagagaaaaagctgcctacagtattcaatacattaaaaaatatgtgtagatcaaggagagtcacagccttattaaaagtttattaaacaataatataaaaattttaaacctacttgatattccataacaaagctgatttaagcaaactgcattttttcacaggagaaataatcatattcgtaatttcaaaagttgtataaaaatattttctattgtagttcaaatgtgccaacatctttatgtgtcatgtgttatgaacaattttcatatgcactaaaaacctaatttaaaataaaattttggttcaggaaaaaaaaaaaaaa

SEQ ID NO: 7079 - DNA, 342 bp, Homo sapiens
tcaaagagaggtcgcgtgagaagacaggcggtggcggagatcttcagagagaggtcgcccgagaagacaggcggtggcggagatcttcagagagaggacgcccgagaagacaggcggtggcggagatcttcagagagaggacgcctgagaagacaggcggtggcggagattttcagagagagggatgcccgagaagacaggcggtggcggagatcttcagagagaggacgcccgagaagacaggcggtggcggagatcttcagagagaggacgcccgagaagacaggcggtggcggagatcttcagagagagagatgcccgagaagacaggcggtggcggag

SEQ ID NO: 7080 - DNA, 338 bp, Homo sapiens
  misc_feature (1)...(338): n = a,t,c or g
annnnnnnnnnnnnnnnnnnnnnnnnnnnnnnnnnnnnnnnnnnnnnnnnnnnnnnnnnnnnnnnnnnnnnnnnnnnggacaaaannnnnnnnnnnnnnnnnnnnnnnnnnnnnnnnnnnnnnnnnnnnnnnnnnnnnnnnnnnnnnnnnnnnnnnnnnnnnnnnnnnnnnnnnnnnnnnnnnnnnnnnnnnnnnnnnnnnngaaatccatatatttatagccaactgttttttgacaaaggaaccaagaatattcactggggatagggacagtctcttcaataaatgctgctcggaaaacttgatatccattattcagaaaaataaaactagacccc

SEQ ID NO: 7081 - DNA, 666 bp, Homo sapiens
  SIMILAR (31)..(516): 621254mologous to Mus musculus acetylglucosaminyltransferase- like protein,accession number AJ006278,Smith-Waterman Score=544.
ggagacccgggggccggccccggggaccacaaccgcttcgactgcggcccgcagccgccgccgccgcccaagtgcgagctcttgcatgtggccatcgtgtgtgcggggcataactccagccgagacgtcatcaccctggtgaagtccatgctcttctacaggaaaaatccactgcacctccacatggtgactggcgccgtggccagaaacatcatggagacgctcttccacacatggatggtgcctgctgtccgtgtcagcttttatcatgccgaccagctcaagccccaggtctcctggatccccaacaagcactactccggcctctatgggctaatgaagctggtgctgcccagtgccttgcctgctgagctggcccgcgtcattgtcctggacacggatgtcaccttcgcctctgacatctcggagctctgggccctctttgctcacttttctggtgtgatcctgctgcggctggaccggctccggcaggctggctgggagcagatgtggaggctgacagccaggcgggagctcctagcctgcctgccacctcactggctgaccaggacatcttcaacgctgtgatcaaagagcactcggggctagtgcagcgtctgccttgtgtctggaatgtgcagctgtcaaatcacacactggccgagc

SEQ ID NO: 7082 - DNA, 1289 bp, Homo sapiens
  SIMILAR (1081)..(1284): 621254mologous to Mus musculus acetylglucosaminyltransferase- like protein,accession number AJ006278,Smith-Waterman Score=203.
gtattaatttccccaccacatccggcctcgacggagacccgggggccggccccggggaccacaaccgttccgactgctgcccgcagccgccgccgccgcccaggtgcgagctcttgcatgtggccatcgtgtgtgcggggcataactccagccgagacgtcatcaccctggtgaagtccatgctcttctacaggaaaaatccactgcacctccacttggtgactgacgccgtggccagaaacatcctggagacgctcttccacacatggatggtgcctgctgtccgtgtcagcttttatcatgccgaccagctcaagccccaggtctcctggatccccaacaagcactactccggcctctatgggctaatgaagctggtgctgcccagtgccttgcctgctgagctggcccgcgtcattgtcttggacacggatgtcaccttcgcctctgacatctcggagctctgggccctctttgctcacttttctgacacgcaagcgatcgggcttgtggagaaccagagtgactggtgacctgggcaacctctggaagaaccacatgccctggcctgccttgggccggggatttaacacaggcgtgatcctgctgcggctggaccggtttcggcaaggctgggtgggagcaaatgtggaggcttacagccaggcgggagctccattagcctgcctgccacctcactggctgaccaggacatcttcaacgctgtgatcaaggagcacccggggctagtgcagcgtctgccttgtgtctggaatgtgcagctgtcagatcacacactggccgagcgctgctactctgaggcgtctgacctcaaggtgatccactggaactcaccaaagaaggttttgggtgaagaacaaccatgtggaattcttccgcaaaatctacctgatccttctggagaaccaaggaaacctgctgctggaagaagtttttttgtgccccagccagccccccacctggtgctgaccaattgcagcaggcccctgccacaactggacgaggaagacccctgctttgagttccggcagcagcagctcactgtgcaccgcgggcatgttacttttcctgccccatgaaccgccacccccccggcctcacgatgtcacccttgtggcccagctgtccatggaccggctgcagatgttggaagccctgtgcaggcactgccctggccccgtgagcctggccttgtacctgacagacgcagaagctcagcagttcctgcatttcgtcgaggccaatggggtggggatcgatagagtcaa

SEQ ID NO: 7083 - DNA, 1026 bp, Homo sapiens
  SIMILAR (271)..(1023): 991254mologous to Plasmid F Protein E,accession number M12987,Smith-Waterman Score=1305.
gtctgtggcccctctctcaccaaccccagcatgatgattgatgacctcctgactccatgctcaccaggggacccaggagccatggagatgacttggatggatgtccctggggacaaactcttagagcctgtggtttgcatggctgtcattatttgtatcaaaaacaaagaatttgaaaaggcttcaaaaattttgaagaaacatatgtccaaggaccccacaactcagtgtgacaatctaaaaacttgtcacacttcacatggatctgtcatggcggaaacagcggttatcaatcacaagaaacgtaaaaatagcccgcgaatcgtccagtcaaacgacctcactgaggcggcatatagtctctcccgggatcaaaaacgtatgctgtatctgttcgttgaccagatcagacaatctgatggcaccctacaggaacatgacggtatctgcgagatccatgttgctaaatatgctgaaatattcggattgacctctgcggaagccagtaaggatatacggcaggcattgaagagtttcgcggggaaggaagtggttttttatcgccctgaagaggatgccggcgatgaaaaaggctatgaatcttttccttggtttatcaaacgtgcgcacagtccatccagagggctttacagtgtacatatcaacccatatctcattcccttctttatcgggttacagaaccggtttacgcagtttcggcttagtgaaacaaaagaaatcaccaatccgtatgccatgcgtttatacgaatccctgtgtcagtatcgtaagccggatggctcaggcatcgtctctctgaaaatcgactggatcatagagcgttaccagctgcctcaaagttaccagcgtatgcctgacttccgccgccgcttcctgcaggtctgtgttaatgagatcaacagcagaactccaatgcgcctctcatacattgagaaaaagaaaggccgccagacgactcatatcgtattttccttccgcgatatcacttccatgacgacaggatag

SEQ ID NO: 7084 - DNA, 954 bp, Homo sapiens
  SIMILAR (538)..(795): 1001254mologous to Homo sapiens TTAGGG repeat binding factor 2,accession number AF002999,Smith-Waterman Score=446.
atggcgaccgcggcgactatcccatcggtagccacggccacagcagcggctctcggcgaggtggaggatgaagggctcctggcgtcgctgttccgggaccgcttccccgaggcccagtggcgcgagcggcccgatgtgggccgctacctccgggagttgagcggctcggggctggagcggctgcggcgcgagcccgagcgcctggcggaggagcgggcgcagctgctgcagcagacgcgcgacttggccttcgctaactacaagaccttcatccgcggcgccgagtgcaccgagcgcatccaccgcctgtttggcgacgtggaggcgtcgctcggccgcctgctcgaccgtttgcccagcttccagcagagctgcagaagcccgcgggcggctcggaacgctgtttctatcatggccgcgggagccgggacggcgggccccgcttccggcccgggcgtcgtgcgtgacccagcggcgtcacagccgaggaagcggcccggccgggagggcggggagggcgcgcggcgatcggacacgatggcgggaggaggcgggagtagcgacggcagcgggcgggcagctggcaggcgggcgtcccgcagtagcgggcgggcccggcgggggcgccacgagccggggctggggggcccggcggagcgcggcgcgggggaggcacggctggaagaggcagtcaatcgctgggtgctcaagttctacttccacgaggcgctgcgggcctttcggggtagccggtacggggacttcagacagatccgggacatcatgcaggcgctcacattcttccgtggcactcttgatcaatcaagcaaacaagaactttccctagacctttcttcagagagcataaagaacatccaagtcaatattacctattctttgagatccagggactgtgctaattttgacattttatatgatattaaaccattttaa

SEQ ID NO: 7085 - DNA, 694 bp, Homo sapiens
  SIMILAR (1)..(315): 561254mologous to Homo sapiens TTAGGG repeat binding factor 2,accession number AF002999,Smith-Waterman Score=251.
gaggcagcctttgcaaaactggaccagaaggatctggttcttctactcaagctctcccagcatcaccagccctcaaaaacaagagacccagaaaagatgaaaacgaaagttcagccccggctgacggtgagggtggctcggaactgcagcccaaagaacaaggcccatgacaataagcaaaattggtcttgggaggaggacagccagattactgagcccagcgcaggcctcaactcctcccaggaggccgtttcagcgccaccatccaagcccaccgttttcaaccaacccctccctggagagaagaatcccaagtatgaagaccttctttgtagaaattttggggctggttggtggtcctggttgggcctggtattacttccgggaattaaggaaactttcagctaagttactcaccaccaaggcttgctcagactgctagaacttgacgcaggagtggccagtgacgacgtagccatccctgccggttctgaagccccgcatgtgggcttccaagccttgcactagggcatgagtgggaatggaaaggtttcagagcctcctactcatcgctgctttcatttttagcaaacatctgagtgtcttgacttctaaacattagtcttgtgtgttaaaagaaatttgtttgcattgggccacattatactttgacccttaaaaagagaaaaaaaaa

SEQ ID NO: 7086 - DNA, 1866 bp, Homo sapiens
  SIMILAR (802)..(1038): 941254mologous to Homo sapiens TTAGGG repeat binding factor 2,accession number AF002999,Smith-Waterman Score=369.
  misc_feature (1)...(1866): n = a,t,c or g
ggaattcggcacgagggacggcgggccccgcttccggcccgggcgtcgtgcgtgacccagcggcgtcacagccgaggaagcggcccggccgggagggcggggaggcgcgcggcgatcggacacgatggcgggaggaggcgggagtagcgacggcagcgggcgggcagctggcaggcgggcgtcccgcagtagcgggcgggcccggcgggggcgccacgagccggggctggggggcccggcggagcgcggcgcgggggaggcacggctggaagaggcagtcaatcgctgggtgctcaagttctacttccacgaggcgctgcgggcctttcggggtagccggtacggggacttcagacagatccgggacatcatgcaggctttgcttgtcaggcccttggggaaggagcacaccgtgtcccgattgctgcgggttatgcagtgtctgtcgcggattgaagaaggggaaaatttagactgttcctttgatatggaggctgagctcacaccactggaatcagctatcaatgtgctggagatgattaaaacggaatttacactgacagaagcagtggtcgaatccagtagaaaactggtcaaggaagctgctgtcattatttgtatcaaaaacaaagaatttgaaaaggcttcaaaaattttgaaaaaacatatgtccaaggaccccacaactcagaagctgagaaatgatctcctgaatattattcgagaaaacgaacttggcccatcctgttatccagaacttttcatatgagaccttccagcagaagatgctgcgcttcctgggagagccacctggatgacgccgagccctacctcctcacgattggatttatggccaaaaaggctttgaaatctgagtccgctgcctcaagtacagggaaggaagataaacagccagcaccagggcctgtggaaaagccacccagagaacccgcaaggcagctacggaatcctccaaccaccattggaatgatgactctgaaagcagctttcaagactctgtctggtgcacatgactcttaggtcagccttatctaacgtggtccataatgatctggttcttcctactcaagctctcccagcatcaccagccctcaaaaacaagagacccagaaaagatgaaaacgaaagttcagccccggctgancggtgagggtggctcggaactgcagcccaagaacaagcgcatgacaataagcagattggtcttggaggaggacagccagagtactgagcccagcgcaggcctcaactcctcccaggaggccgcttcagcgccaccatccaagcccaccgttctcaaccaacccctccctggagagaagaatcccaaagtacccaaaggcaagtggaacagctctaatggggttgaagaaaaggagacttgggtggaagaggatgaactgtttcaagttcaggcagcaccagatgaagacagtacaaccaatataacaaaaaagcagaagtggactgtagaagaaagcgagtgggtcaaggctggagtgcagaaatatggggaaggaaactgggctgccatttctaaaaattacccatttgttaaccgaacagctgtgatgattaaggatcgctggcggaccatgaaaagacttggcatgaactgaaacaggctttcatttccacagaattcacaggagcatggttcctaattaattagcccctgatagcctgctctttctttctttttcttttttttttttttttgagacagagtctcggctctgtccacccagggctgggagttgcagtggcgtgatctcggctcactgcgacctccgtttccggggttaacgcaattttcttgcttaagcctcccgagaagctggaaca

SEQ ID NO: 7087 - DNA, 503 bp, Homo sapiens
  SIMILAR (2)..(160): 941254mologous to Homo sapiens NDP52,accession number U22897,Smith-Waterman Score=254.
  misc_feature (1)...(503): n = a,t,c or g
gcaaatgaagcagaatgaaactactgcaatgaagaaacaacaggaattaatggatgaaaactttgacctgtcaaaaagactgagtgagaacgaaattatatgtaatgctctgcagagacagaaagagagattggaaggagaaaatgatgtatccaagaaagttcttcccccagcccgctctccatcaagaaatgccctatctgcaaagcagattgatatttgtgatcacaccttggagcaacagcagatgcagcccctttgtttcaattgtccagtttgtgacaagatcttcccagctacagagaagcagatctttgaagaccacgtgttctgccactctctctgagtatcccaacctccttggatgtatacagagattttattagaatagaaccctatagcttctaccatgagttatatgagtcaagatcctgcctaacctgaaattattagggatttactcagcctgctgcggctaacagtggagttatgtcnctgattga

SEQ ID NO: 7088 - DNA, 449 bp, Homo sapiens
  SIMILAR (6)..(185): 951254mologous to Homo sapiens NDP52,accession number U22897,Smith-Waterman Score=313.
tcgctggaggggacgtcacatgtcattatttcttcacccagcattttattcctcgtcgaaaggatgggattggcatcgttagagtggggtggaagacaacccgtgagtattacaccttcatgtgggttactttgcccattgacctaaacaacaaatcagctaaacagcaggaagtccaattcaaaggtgagaaaaatactggatcaaaggtgttgaagacagtagccaagactaattaattcccttcagcttgagctttctggggcagataaaaagatttccagaattttacttttctgaatagatcttattttggatgaaaaattatgttgtgttttcagcttactacctgcccaaggatgatgagtattaccagttctgctatgtggatgaggatggtgtggtccgtggagcaagtattcctttccaattccgtccagaaaatgagg

SEQ ID NO: 7089 - DNA, 2717 bp, Homo sapiens
  SIMILAR (102)..(1460): 651254mologous to Homo sapiens NDP52,accession number U22897,Smith-Waterman Score=1415.
caggcgggtcgggctctcccttgggtgcttagccccgcccccgtcccactctgccctgttgctgtcgcgccgctgctggttgctgtccctggacccctaccatggaggagaccatcaaagatccccccacatcagctgtcttgctggatcactgtcatttctctcaggtcatctttaacagtgtggagaagttctacatccctggaggggacgtcacatgtcattataccttcacccagcatttcatccctcgtcgaaaggattggattggcatctttagagtggggtggaagacaacccgtgagtattacaccttcatgtgggttactttgcccattgacctaaacaacaaatcagctaaacagcaggaagtccaattcaaagcttactacctgcccaaggatgatgagtattaccagttctgctatgtggatgaggatggtgtggtccggggagcaagtattccctttccaattccgtccagaaaatgaggaagacatcctgggttgttaccactcagggagaggttttatgagatcgatttgcacaacaaggagctttgcagagaaaaccaggagctgaaggacagctgtatcagcctccaagaagcagaactcaagacatgcaggctgagctccaaaagaagcaggaggagctagaaaccctacagagcatcaataagaagttggaactgaaagtgaaaagaacagaaggacctatttgggacgacagagctgcttcaacctgaaagaaccaaaaccagaagattgtcctcagaaaatggagaagatggggaatcagagtgggatccagcttcagggccaagctgtcaactcaagagaaagaaatgaagaagcttgtcaagggagatcaagataagccagagcagttagagcagctgaaaaaggaaaatgaccacctctttctccagtttaactgaccagaggaaggaccagaagaagctcgagcagacagtggagcaaatgaagcagaatgaaactactgcaatgaagaaacaacaggaattaatggatgaaaactttgacctgtcaaaaagactgagtgagaacgaaatttatatgtaatgctctgcagagacagaaagagagattggaaggagaaaatgatcttttgaagagggagaacagcagattgctcagttacatgggtctggattttaattcttttcccgtatcaagtacctacttcagatgaaggaggcgcaagacaaaatcccgggacttgcctatggaaacccatattctggtatccaagaaagttcttccgccagcccgctctccatcaagaaatgccctatctgcaaagcagatgatatttgtgatcacaccttggagcaacagcagatgcagcccctttgtttcaattgtccaatttgtgacaagatcttcccagctacagagaagcagatctttgaagaccacgtgttctgccactctctctgagtatcccaacctcttggatgtatacagagattttatagaatagaacctatagcttctaccatgagttatatgagtcaagatcctgcctaacctgaaattattaagggatttactcagcccctgctgccgctaacaagtggagttatgtcacctgatcttgaaggtcactgttaaagggcttctgctgccatccttgtgggttgctacctttaagtcgcataactctagctgtatcatcctctcacctgtcattcttctgagggtctcaggacaaggggccctgggatggagccaacctgggtattcaccaacaggcctgactggatactaagtgattaagttttccaagttgtcccactgcccattcaaagtccagcccctggagtgtatttgttctcagtcctaaccctggggcccagagattggtcccgaggttgagaattccttcctcctcatccttggtgttgctttctccaaatgattgttttagactagccaaaaatgcctgtggcaaaagagctcagaaatccaatttggataccaaaggtttctcatgttaatttctcagcccccaaagaagcaccctactccctgaaccctagacagggaagtattggttccagtcacagaaagcttttcctggggtaccctctggttagcactttcctactctctgatatttcctatgtacgatagctttttattgttgtaaatcctttccttaatggttaaataggattgttagcaactatgggtttgcagttttctgagtaggtgagttttgaatatgggtaaatcagaataatgagacaacttgttaatctctttaatactaaaaataaattactcttctatttcagggacttaggtaatttaaaataaaccttcaatttatggtcttctgttttgaagctcatgggaaaattgtgatcaaaagggctatgggaagggcagaccccgccaatgatttctcttcacctgtcttaagattaaataaaaaagagtgtcctggcagttatcttgaggtggggaaggaggtgatgaaacattagtttgtgaaatccaaggccctggctttctttctttctttttttttttttttttttttgaaacagtctctctctgtcacccaggctggcgtgcaatggcgcagttgactcactacagcctctgcctcccaggttcaagcgattctcatgccttagcctcccaagtagctgggattacaggtgtgtgccgcaatgcccagctaat

SEQ ID NO: 7090 - DNA, 415 bp, Homo sapiens
  SIMILAR (3)..(278): 941254mologous to Homo sapiens DCHT,accession number AF017635,Smith-Waterman Score=429.
ggctcgttttgagattaagaaactccagaaaggaacttaatgtttttctatttgagtttactccaggaagagatacagcagatggtgtatctcaggagctcttctctgctggcttggtggatggtcacgatgtatttatagtggctgctaatttacagaagattgtagatgatcccaaagctttaaaaacattgacatttaagttggcttctggctgtgatgggtcggagattcctgatgaagtgaagctgattgggtttgctcaagtgagtgtcagctgatgtatgtcccttgatgtcaccctgatctgtcatgccccaccgccacccctactccctttaaccctccctctttctgcccatttcctcccaccccctcactcccatttcctagcaaaatcagaagattgtgaacg

SEQ ID NO: 7091 - DNA, 1127 bp, Homo sapiens
  SIMILAR (660)..(761): 731254mologous to Homo sapiens Ste-20 related kinase SPAK,accession number AF099989,Smith-Waterman Score=116.
atgaggcctggaagtctcactgatgtgacacttgagccaagatctgaaggaggtaaggaaaagagtattccagaaagaaggaacggcccatgcaaagatcccggggcagcagcatgcaagctatgccttacatctgttctctttgccaccaacaggcacatgtacttgcataacctgctgctgagacagggtgtctcccgtgcctctaggcagagtgcactgacccaaagttcaggaacacctgccatgtatcagtgcagcaaaacctattacattttccaaggcatccaagttgattatcaggaagttacacacactggacctctaagcatagaaggttcaatgttggatatcataaaatacatttgtcaaccgaggagaacacaagaatggagttctggaagaggcaataatagcaacaattcttaaagaggtttttggaaggcttagactatctacacagaaacggtcagattcacagaaactccagaaaggaacttaatgacatacgatttgagtttactccaggaagaggccctaaaggaaatgatggtgaatgtgatgagaagcataccacagtcctaatgagggttgagcagcagtgggatcatacagaaaggaagacacaaactcagatgtccacagaagccaaagtgaatgatacagcagatggtgtatctcaggagctcttctctgctggcttggtggatggtcacgatgtagttatagcctgcccctccaggaatcttagactcttcataggcatcatctccacctttccaggtgctcaggccaaaaccctgggcattgtccttgacttttctttctctcatacttcacatccaactcatctgaatgtgcccaggatcctgcctttgctcaccatctcacatcccatcacgtttcaagcccctctcaactcccagttgagttcttgtattcatccctttgctgccattccagcttctgtacttgcctcccttcagcctgtcctcatctcaacagccagagatccaggcactagtcattattccagtgctctaggattcattggtcaacaaattcctgcgtacatggagcttagtcctgtgataggtgaactctgtctcagcaaagtcactgaatga

SEQ ID NO: 7092 - DNA, 1933 bp, Homo sapiens
  SIMILAR (38)..(1621): 1001254mologous to Homo sapiens precursor,accession number Y00317,Smith-Waterman Score=2803.
agcagcaactggaaaacaagcattgcattgcatcaggatgtctatgaaatggacttcagctcttctgctgatacagctgagctgttactttagctctgggagttgtggaaaggtgctggtgtggcccacagaattcagccactggatgaatataaagacaatcctggatgaacttgtccagagaggtcatgaggtgactgtattggcatcttcagcttccatttctttcgatcccaacagcccatctactcttaaatttgaagtttatcctgtatctttaactaaaactgagtttgaggatattatcaagcagctggttaagagatgggcagaacttccaaaagacacattttggtcatatttttcacaagtacaagaaatcatgtggacatttaatgacatacttagaaagttctgtaaggatatagtttcaaataagaaacttatgaagaaactacaggagtcaagatttgatgttgttcttgcagatgctgttttcccctttggtgagctgctggccgagttacttaaaataccctttgtctacaggcctcgcttctctcctggctacgcaattgaaaagcatagtggaggacttctgttccctccttcctatgtgcctgttgttatgtcagaactaagtgaccaaatgactttcatagagagggtaaaaaatatgatctatgtgctttattttgaattttggttccaaatatttgacatgaagaagtgggatcagttctacagtgaagttctaggaagacccactacgttatctgagacaatggcaaaagctgacatatggcttattcgaaactactgggattttcaatttcctcacccactcttaccaaatgttgagttcgttggaggactccactgcaaacctgccaaacccctaccgaaggaaatggaagagtttgtccagagctctggagaaaatggtgttgtggtgttttctctggggtcgatggtcagtaacacgtcagaagaaagggccaatgtaattgcatcagcccttgccaagatcccacaaaaggttctgtggagatttgatgggaataaaccagatactttaggactcaatactcggctgtacaagtggataccccagaatgatcttcttggtcacccaaaaaccagagcttttataactcatggtggagccaatggcatctataaggcaatctctcctagaatccctatggtgggcgttccattgtttgcagatcaacctgataacattgcacacatgaaggccaagggagcagctgttagtttggacttccacacaatgtcgagtacagacttactcaatgcactgaagacagtaattaatgatcctttatataaagagaatgctatgaaattatcaagaattcatcatgatcaaccagtgaagccccttgatcgagcagtcttctggattgaatttgtcatgcgccataaaggagccaagcaccttcgggttgcagcccacgacctcacctggttccagtaccactctttggatgtgactgggttcctgctggcctgtgtggcaactgtgatattcatcatcacaaaatgtctgttttgtgtctggaagtttgttagaacaggaaagaaggggaaaagagattaattacgtctgaggctggaagctgggaaacccaataaatgaactcctttagtttattacaacaagaagacgttgtgatacaagagattcctttcttcttgtgacaaaacatctttcaaaacttaccttgtcaagtcaaaatttgttttagtacctgtttggaaacaagaacattaagaagtccactgacagtatcagtactgttttgcaaatactcagcatactttggatccatttcatgcaggattgtgttgttttaactgttgttgaggaagctaataaataattaaattgtaaaaaaaaaaaaaaaaa

SEQ ID NO: 7093 - DNA, 945 bp, Homo sapiens
  SIMILAR (498)..(671): 861254mologous to Homo sapiens UDP- glucuronosyltransferase,accession number AJ005162,Smith-Waterman Score=287.
atggctgccaaactagttggaatagaatttgatccctgctgggtgaagatgcttatggagaagggtcatcagaaaaccagagaacataattatccctctatggagcaatcagaaaaagctggtgtgacagataacatacagggtaagacaaaagctttggcaggatctaggcagagtgtggctaacggaaagaattcacactgtaaagaaaatgttacatggctgttgatcattcattacgttcagcctatgaagccctacgaagtcttctggattgagtttgtcacacaccaaaaagcaaccaagtacctgtgccaactgcccacaacttcaccagatgctgttttcccctttggtgagctgctggccgagttacttaaaataccctttgtctacagcctccgcttctctcctggctacgcaattgaaaagcatagtggaggacttctgttccctccttcctatgtgcctgttgttatgtcagaactaagtgaccaaatgactttcatagagagggaagacccactacgttatctgagacaatggcaaaagctgacatatggcttattcgaaactactgggattttcaatttcctcacccactcttaccaaatgttgagttcgttggaggactccactgcaaacctgccaaacccctaccgaagaccttgggccatggatgggaccgggcaccatgaagcagagggtggcgctccctggggaggggctcaggcatggcagactgcaggtcctgagccctgccccgtgggaaggcggctgaagggtgacaattggagcacggcatggcaaagagaaggaaatcttcacatgacccatagggtcaacaggaatatagacgttcaaggtcctcaaacacattcatccagcggtccacatcctatgtcttggcttcggtgtaggacatttcctgacaaaaattgctaa

SEQ ID NO: 7094 - DNA, 2655 bp, Homo sapiens
  SIMILAR (1)..(1584): 1001254mologous to Homo sapiens precursor,accession number Y00317,Smith-Waterman Score=2803.
atgtctatgaaatggacttcagctcttctgctgatacagctgagctgttactttagctctgggagttgtggaaaggtgctggtgtggcccacagaattcagccactggatgaatataaagacaatcctggatgaacttgtccagagaggtcatgaggtgactgtattggcatcttcagcttccatttctttcgatcccaacagcccatctactcttaaatttgaagtttatcctgtatctttaactaaaactgagtttgaggatattatcaagcagctggttaagagatgggcagaacttccaaaagacacattttggtcatatttttcacaagtacaagaaatcatgtggacatttaatgacatacttagaaagttctgtaaggatatagtttcaaataagaaacttatgaagaaactacaggagtcaagatttgatgttgttcttgcagatgctgttttcccctttggtgagctgctggccgagttacttaaaataccctttgtctacaggcctcgcttctctcctggctacgcaattgaaaagcatagtggaggacttctgttccctccttcctatgtgcctgttgttatgtcagaactaagtgaccaaatgactttcatagagagggtaaaaaatatgatctatgtgctttattttgaattttggttccaaatatttgacatgaagaagtgggatcagttctacagtgaagttctaggaagacccactacgttatctgagacaatggcaaaagctgacatatggcttattcgaaactactgggattttcaatttcctcacccactcttaccaaatgttgagttcgttggaggactccactgcaaacctgccaaacccctaccgaaggaaatggaagagtttgtccagagctctggagaaaatggtgttgtggtgttttctctggggtcgatggtcagtaacacgtcagaagaaagggccaatgtaattgcatcagcccttgccaagatcccacaaaaggttctgtggagatttgatgggaataaaccagatactttaggactcaatactcggctgtacaagtggataccccagaatgatcttcttggtcacccaaaaaccagagcttttataactcatggtggagccaatggcatctataaggcaatctctcctagaatccctatggtgggcgttccattgtttgcagatcaacctgataacattgcacacatgaaggccaagggagcagctgttagtttggacttccacacaatgtcgagtacagacttactcaatgcactgaagacagtaattaatgatcctttatataaagagaatgctatgaaattatcaagaattcatcatgatcaaccagtgaagccccttgatcgagcagtcttctggattgaatttgtcatgcgccataaaggagccaagcaccttcgggttgcagcccacgacctcacctggttccagtaccactctttggatgtgactgggttcctgctggcctgtgtggcaactgtgatattcatcatcacaaaatgtctgttttgtgtctggaagtttgttagaacaggaaagaaggggaaaagagattaattctctcctggctacgcaattgaaaagcatagtggaggacttctgttccctccttcctatgtgcctgttgttatgtcagaactaagtgaccaaatgactttcatagagagggtaaaaaatatgatctatgtgctttattttgaattttggttccaaatatttgacatgaagaagtgggatcagttctacagtgaagttctaggaagacccactacgttatctgagacaatggcaaaagctgacatatggcttattcgaaactactgggattttcaatttcctcacccactcttaccaaatgttgagttcgttggaggactccactgcaaacctgccaaacccctaccgaagaaatggaaggagtttgtccagagctctggagaaaatggtgttgtggtgttttctctggggtcgatggtcagtaacacgtcagaagaaagggccaatgtaattgcatcagcccttgccaagatcccacaaaaggttctgtggagatttgatgggaataaaccagatactttaggactcaatactcggctgtacaagtggataccccagaatgatcttcttggtcacccaaaaaccagagcttttataactcatggtggagccaatggcatctatgaggcaatctaccatggaatccctatggtgggcgttccattgcttgcagatcaacctgataacattgcacacatgaaggccaagggagcagctgttagtttggacttccacacaatgtcgagtacagacttactcaatgcactgaagacagtaattaatgatcctttatataaagagaatgctatgaaattatcaagaattcatcatgatcaaccagtgaagccccttgatcgagcagtcttctggattgaatttgtcatgcgccataaaggagccaagcaccttcgggttgcagcccacgacctcacctggttccagtaccactctttggatgtgactgggttcctgctggcctgtgtggcaactgtgatattcatcatcacaaaatgtctgttttgtgtctggaagtttgttagaacaggaaagaaggggaaaagagattaa

SEQ ID NO: 7095 - DNA, 2481 bp, Homo sapiens
  SIMILAR (522)..(776): 971254mologous to Homo sapiens UDP glucuronosyltransferase 2B4 precursor,accession number AF081793,Smith-Waterman Score=440.
agcagcaactggaaaacaagcattgcattgcatcaggatgtctatgaaatggacttcagctcttctgctgatacagctgagctgttactttagctctgggagttgtggaaaggtgctggtgtggcccacagaattcagccactggatgaatataaagacaatcctggatgaacttgtccagagaggtcatgaggtgactgtattggcatcttcagcttccatttctttcgatcccaacagcccatctactcttaaatttgaagtttatcctgtatctttaactaaaactgagtttgaggatattatcaagcagctggttaagagatgggcagaacttccaaaagacacattttggtcatatttttcacaagtacaagaaatcatgtggacatttaatgacatacttagaaagttctgtaaggatatagtttcaaataagaaacttatgaagaaactacaggagtcaagatttgatgttgttcttgcagatgctgttttcccctttggtgagctgctggcccgagttacttaaaataccctttgtctacaggcctcgcttctctcctggctacgcaattgaaaagcatagtggaggacttctgttccctccttcctatgtgcctgttgttatgtcagaactaagtgaccaaatgactttcatagagagggtaaaaaatatgatctatgtgctttattttgaattttggttccaaatatttgacatgaagaagtgggatcagttctacagtgaagttctaggaagacccactacgttagtctgagacaatggcaaaagctgacatatggcttattcgaaactactgggattttcaatttcctcacccactcttaccaaatgttgagttcgttggaggactccactgcaaacctgccaaacccctaccgaaggaaatggaaggagtttgtccagagctctggagaaaatggtgttgtggtgttttctctggggtcgatggtcagtaacacgtcagaagaaagggccaatgtaattgcatcagcccttgccaagatcccacaaaaggttctgtggagatttgatgggaataaaccagatactttaggactcaatactcggctgtacaagtggataccccagaatgatcttcttggtcacccaaaaaccagagcttttataactcatggtggagccaatggcatctatgaggcaatctaccatggaatccctatggtgggcgttccattgcttgcagatcaacctgataacattgcacacatgaaggccaagggagcagctgttagtttggacttccacacaatgtcgagtacagacttactcaatgcactgaagacagtaattaatgatcctttatataaagagaatgctatgaaattatcaagaattcatcatgatcaaccagtgaagccccttgatcgagcagtcttctggattgaatttgtcatgcgccataaaggagccaagcaccttcgggttgcagcccacgacctcacctggttccagtaccactctttggatgtgactgggttcctgctggcctgtgtggcaactgtgatattcatcatcacaaaatgtctgttttgtgtctggaagtttgttagaacaggaaagaaggggaaaagagattaattacgtctgaggctggaagctgggaaacccaataaatgaactcctttagtttattacaacaagaagacgttgtgatacaagagattcctttcttcttgtgacaaaacatctttcaaaacttaccttgtcaagtcaaaatttgttttagtacctgtttaaccattagaaatatttcatgtcaaggaggaaaacattagggaaaacaaaaatgatataaagccatatgaggttatattgaaatgtattgagcttatattgaaatttattgttccaattcacaggttacatgaaaaaaaatttactaagcttaactacatgtcacacattgtacatggaaacaagaacattaagaagtccgactgacagtatcagtactgttttgcaaatactcagcatactttggatccatttcatgcaggattgtgttgttttaactgttgttgaggaagctaataaataattaaattgtaaccattagaaatatttcatgtcaaggaggaaaacattagggaaaacaaaaatgatataaagccatatgaggttatattgaaatgtattgagcttatattgaaatttattgttccaattcacaggttacatgaaaaaaaatttactaagcttaactacatgtcacacattgtacatggaaacaagaacattaagaagtccgactgacagtatcagtactgttttgcaaatactcagcatactttggatccatttcatgcaggattgtgttgttttaactgttgttgaggaagctaataaataattaaattgtactttggatccatttcatgcaggattgtgttgttttaactgttgttgaggaagctaataaataattaaattgt

SEQ ID NO: 7096 - DNA, 238 bp, Homo sapiens
  SIMILAR (40)..(171): 771254mologous to Homo sapiens Secreted protein encoded by gene 18 clone HNHFO29,accession number AAY01400,Smith-Waterman Score=168.
agcggccgcccttttttttttttttttgggcttccttttcttttcttttttttttttttttgagacagagtttcactcttgttgcccaggctgcagtgcaatggcacaatctcagctcactgcaacctctgcctcccgggctcaagcgattctcctgcctcagcctcccgagttgctgagcttccataacactttaccacccaacccattaacttctttgatcatttacttttatgtg

SEQ ID NO: 7097 - DNA, 624 bp, Homo sapiens
  misc_feature (1)...(624): n = a,t,c or g
ggggcccaagggggggggccccttaggcccggagttttaaacccccccgggccacggaaggaaagcccctttttggtaaatattttcccaagggttnnnnnnnnnnnnnnnngaaaggaaggcnccccaatagtggtaactgtgacaactaacatattgttacaaacaaaaatttcccccaaggtgaaaaaaatcaacnnnnnnnnnnnnaatcaaaacgatgcctcagtctaggaagaggtgcttcctctctggaagcagctgaacacctgagctgctgtccacaggcggacggactctccaggagcccccagtgggcctcggctcctccacgtcagctcctctcttgtccctctgctggtccacgggggccgctgcagctggccaggtctcctgggagtcggagggggccatgggttccaccccagggcccacctcatcagcacagtgctctcaccatctgagcaccagcccagaggaaaaggagaaagaatgggtgatgctgatcccccaagcagaatggtaacccctccacctcccaccctcagtgcccagggcccgttgttgggtgcttttgagaagtgggaggtggaggggtttccattttgatgttggagcggccgc

SEQ ID NO: 7098 - DNA, 764 bp, Homo sapiens
  SIMILAR (3)..(158): 981254mologous to Oryctolagus cuniculus elongation factor 1 alpha,accession number U09823,Smith-Waterman Score=275.
  misc_feature (1)...(764): n = a,t,c or g
ttgtcggtgttaacaaaatggattccactgagccnccctacagccagaagagatatgaggaaattgttaaggaagtcagcacttacattaagaaaattggctacaaccccgacacagtagcatttgtgccaatttctggttggaatggtgacaacattcgtccactgagccccctcagcagagaatatgagaatttgtaagaagtcagcacttcattagaaaattggctacacccccgacacagtagcatntgtgcnattcnntggtgggaatggtgacaacatgctggagccaagtgctaacatgccttggttcaagggatggaaagtcncccgtaaggantgcaatgccagtggaaccacgctgcttgaggctctggactgcatcctaccaccaactcgtccaactgacaagcccttgcgcctgcctctccaggatgtctacaaaattggtggtattggtactgttcctgttggccgagtggagactggtgttctcaaacccggtatggtggtcacctttgctccagtcaacgttacaacggaagtaaaatctgtcgaaatgcaccatgaagctttgagtgaagctcttcctggggacaatgtgggcttcaatgtcaagaatgtgtctgtcaaggatgttcgtcgtggcaacgttgctggtgacagcaaaaatgacccaccaatggaagcagctggcttcactgctcaggtgattatcctgaaccatccaggccaaataagcgccggctatgcccctgtatt

SEQ ID NO: 7099 - DNA, 522 bp, Homo sapiens
  SIMILAR (220)..(237): 1001254mologous to Oryctolagus cuniculus elongation factor 1 alpha,accession number U09823,Smith-Waterman Score=38.
  misc_feature (1)...(522): n = a,t,c or g
tacaacggaagtaaaatctgtcgaaatgcaccatgaagctttgagtgaagctcttcctggggacaatgtgggcttcaatgtcaagaatgtgtctgtcaaggatgttcgtcgtggcaacgttgctggtgacagcaaaaatgacccaccaatggaagcagctggcttcactgctcaggtgattatcctgaaccatccaggccaaataagcgccggctatgccctgtattggattgccattgttgatatggttcctggcaagcccatgtgtgttgagagcttctcagactatccacctttgggtcgctttgctgttcgtgatatgagacagacagttgcggtgggtgtcatcaaagcagtggacaagaaggctgctggactggcaaggtcacaagttgccagaaantcagaaggctaaatgaatattancctaatactgccacccatcttaanagtggtggaagacggntcagactgtttgttnaattggccatttaagttagtagtaaagntgttaatgataca

SEQ ID NO: 7100 - DNA, 595 bp, Homo sapiens
  SIMILAR (385)..(522): 951254mologous to Oryctolagus cuniculus elongation factor 1 alpha,accession number U09823,Smith-Waterman Score=217.
  misc_feature (1)...(595): n = a,t,c or g
cctttgctccagtcaacgttacaacggaagtaaaatctgtcgaaatgcaccatgaagctttgagtgaagctcttcctggggacaatgtgggcttcaatgtcaagaatgtgtctgtcaaggatgttcgtcgtggcaacgttgctggtgacanaaaaatgacccaccaatggaagcagctggcttcactgctcaggtgattatcctgaaccatccaggccaaataagcgccggctatgcccctgtattggattgccacacggctcacattgcatgcaagtttgctgagctgaaggaaaagattgatcgccgttctggtaaaaagctggaagatggccctaaattcatggttcctggcaagcccatgtgttgttgagagcttctcaagactatccacctttgggtcgctttgctgttcgtgatatgagacagacagttgcggtgggtgtcatcaaagcagtggacaagaaggctgctggagctggcaaggtcaccaagtctgccagaaagctccagaaggctaaatgaatattatccctaatacctgcnaccccattcttaatcagtgggtggaagaacggtctcngactgnttgtng

SEQ ID NO: 7101 - DNA, 267 bp, Homo sapiens
  SIMILAR (2)..(160): 1001254mologous to Bos taurus elongation factor 1 alpha,accession number AF013213,Smith-Waterman Score=267.
  misc_feature (1)...(267): n = a,t,c or g
ccgagtggagactggtgttctcaaacccggtatggtggtcacctttgctccagtcaacgttacaacggaagtaaaatctgtcgaaatgcaccatgaagctttgagtgaagctcttcctggggacaatgtgggcttcaatgtcaagaatgtgtctgtcaagtgttggatatggttcctggcaagcccatgtgtgttgagagcttctcagactatccacctttgggtcgctttgctgttcgtgatatgagacagacagttgncggtggg

SEQ ID NO: 7102 - DNA, 349 bp, Homo sapiens
  SIMILAR (16)..(45): 1001254mologous to Homo sapiens Elongation factor-1alpha enzyme,accession number AAW11237,Smith-Waterman Score=51.
gaattcggcacgagcacctttgctccagtcaacgttacaacggaataaaatctgtcgaaatgcaccatgaagctttgagtgaagctcttcctggggacaatgtgggcttcaatgtcaagaatgtgtctgtcaaggatgttcgtcgtggcaacgttgctggtgacagcaaaaatgacccaccaatggaagcagctggcttcactgctcaggtgattatcctgaaccatccaggcgttctggtaaaaagctggaagatggccctaaattcttgaagtctggtgatgctgcaatgtcgatatggttcctgcaagccatgtgtgttgagacttctcagactatcagctttggg

SEQ ID NO: 7103 - DNA, 509 bp, Homo sapiens
  SIMILAR (3)..(311): 951254mologous to Oryctolagus cuniculus elongation factor 1 alpha,accession number U09823,Smith-Waterman Score=536.
  misc_feature (1)...(509): n = a,t,c or g
agagatatgaggaagttgttaaggaagtcagcacttacattaagaaaattggctacaaccccgacacagtagcatttgtgccaatttctggttggaatggtgacaacatgctggagccaagtgctaacatgccttggttcaagggatggaaagtcacccgtaaggatggcaatgccagtggaaccacgctgcttgaggctctggactgcatcctaccaccaactcgtccaactgacaagcccttgcgcctgcctctccaggatgtctacaaaattggtggtattggtactgttcctgttcagaaggctaaatgaatattatccctaatacctgccacccactccttaatcaatgggtggaagaacggtctcaagaactgtttggtttcaattgggncatttaagtttaagtagtaaaaagactgggttaatggataacaatgcatcgtaaaaccttcaagaaggaaanggagaatgttttgtggaccactttggnttcctttttggcgg

SEQ ID NO: 7104 - DNA, 654 bp, Homo sapiens
  SIMILAR (503)..(589): 651254mologous to Arabidopsis thaliana T6D22.2,accession number AC026875,Smith-Waterman Score=97.
atccttaattaaattaatccccccccccccactgttcctgttggccgagtggagactggtgttctcaaacccggtatggtggtcacctttgctccagtcaacgttacaacggaagtaaaatctgtcgaaatgcaccatgaagctttgagtgaagctcttcctggggacaatgtgggcttcaatgtcaagaatgtgtctgtcaaggatgttcgtcgtggcaacgttgctggtgacagcaaaaatgacccaccaatggaagcagctggcttcactgctcaggtgattatcctgaaccatccaggccaaataagcgccggctatgcccctgtattggattgccacacggctcacattgcatgcaagtttggccgagtggagactggtgttctcaaacccggtatggtggtcacctttgctccagtcaacgttacaacggaagtaaaatctgtcgaaatgcaccatgaagctttgagtgaagctcttcctggggacaatgtgggctttcaatgtcaagaatgtgtctgtcaaggatgttcgtcgtggcaacgttgctggtgacagcaaagatgacccaccaatggaagccagctggcttcactgctcaggtgattatcctgaaccattcaggccaaataagcgccggctatgcccctg

SEQ ID NO: 7105 - DNA, 666 bp, Homo sapiens
  SIMILAR (13)..(354): 921254mologous to Rattus norvegicus elongation factor-1 alpha,accession number L10339,Smith-Waterman Score=560.
aaattggctacaccccgacacagtagcatgtgtgcaattctgggttggaatggtgacaacatgctggagcaaagtgctaacatgccttggttcaagggatggaaagtcacccgtaaggatggcaatgccagtggaaccacgctgcttgaggctctggactgcatcctaccaccaactcgtccaactgacaagcccttgcgcctgcctctccaggatgtctacaaaattggtggtattggtactgttcctgttggccgagtggagactggtgttctcaaacccggtatggtggtcacctttgctccagtcaacgttacaacggaagtaaaatctgtcgaaatgcaccatgaagctcagaaggctaaatgaatattatccctaatacctgccaccccactcttaatcagtggtggaagaacggtctcagaactgtttgtttcaattggccatttaagtttagtagtaaaagactggttaatgataacaatgcatcgtaaaaccttcagaaggaaaggagaatgttttgtggaccactttggttttcttttttgcgtgtggcagttttaagttattagtttttaaaatcagtactttttaatggaaacaacttgaacaaaaatttgtcacagaattttgagacccattaaaaaagttaaatgagaaaaa

SEQ ID NO: 7106 - DNA, 651 bp, Homo sapiens
  SIMILAR (312)..(506): 661254mologous to Mus musculus eukaryotic translation elongation factor 1 alpha 1,accession number BC004005,Smith- Waterman Score=186.
  misc_feature (1)...(651): n = a,t,c or g
gaagctggtatctccaagaatgggcagacccgagagcatgcccttctggcttacacactgggtgtgaaacaactaattgtcggtgttaacaaaatggattccactgagccaccctacagccagaagagatatgaggaaattgttaaggaagtcagcacttacattaagaaaattggctacaaccccgacacagtagcatttgtgccaatttctggttggaacattgcatgcaagtttgctgagctgaaggaaaagattgatcgccgttctgggtaaaaagctggaagatggccctaaattcttgaagtctgggtgatgctgccattgttgatatggttcctgggcaagcccatgtgtgttgagagcttctcaagactatccacctttgggtcgctttgctgttccgtgatatgagacagacagttgcggtgggtgtcatcaaagcagtggacaagaaggctgctggagctggcaaggtcaccaagtctgcccaagaaagctcagaaggctaaatgaatattatccctaatacctgccaacccactcttaatcagtggtggaagaacggtctcaagaactgtttggttcaattgggncatttaagtttaagtagtaaaagactgggntaatgataacaatgcatcngtaaaa

SEQ ID NO: 7107 - DNA, 1105 bp, Homo sapiens
  SIMILAR (1046)..(1102): 781254mologous to Homo sapiens longation factor 1-alpha 1,accession number L41498,Smith-Waterman Score=71.
atgcagtcggaacgtggtatcaccattgatatctccttgtggaaatttgagaccagcaagtactatgtgactatcattgatgccccaggacacagagactttatccaaaacatgattacagggacctctcaggctgactgtgctgtcctgattgttgctgctggtgttggtgaatttgaagctggtatctccaagaatgggcagacccgagagcatgcccttctggcttacacactgggtgtgaaacaactaattgtcggtgttaacaaaatggattccactgagccaccctacagccagaagagatatgaggaaattgttaaggaagtcagcacttacattaagaaaattggctacaaccccgacacagtagcatttgtgccaatttctggttggaatggtgacaacatgctggagccaagtgctaacatgccttggttcaagggatggaaagtcacccgtaaggatggcaatgccagtggaaccacgctgcttgaggctctggactgcatcctaccaccaactcgtccaactgacaagcccttgggcctgcctctccaggatgtctacaaaattggtggtattggtactgttcctgttggccgagtggagactggtgttctcaaacccggtatggtggtcacctttggtccagtcaacgttacaacggaagtaaaatctgtcgaaatgcaccatgaagctttgggtgaagctcttcctggggacaatgtgggcttcaatgtcaagaatgtgtctgtcaaggatgttcgtcgtggcaacgttgctggtgacagcaaaaatgacccaccaatggaagcagctggcttccctgctcaggtgattatcctgaaccatccaggccaaataagcgccggctatgcccctgtattggattgccacacggctcacattgcatgcaagtttgctgagctgaaggaaaagattgatcgccgttctggtaaaaagctggaagatggccctaaattcttgaagtctggtgatgctgccattgttgatatggttcctggcaagcccatgtgtgttgagagcttctcagactggcaaggtcaccaagtctgcccagaaagctcagaaggctaaatga

SEQ ID NO: 7108 - DNA, 618 bp, Homo sapiens
  SIMILAR (181)..(131): 941254mologous to Salmonella typhimurium tetracycline resistance protein,accession number AF117344,Smith-Waterman Score= 82.
atggagcaggtcaaaactgccgcactgatcaacggcaagatcctgcctaggatccccaacgagcaaaaagaaaatgccgatacttcattggcattttcttttatttctcaacaagatggtgaattgactatgctccgagaacgggtgcgcatagaaattgcatcaacgcatatagcgctacagcacgccatagtgactggcgatgctgtcggaatggacgatatcccgcaagaggcccggcagtaccggcataaccaagcctatgcctacagcatccagggtgacggtgccgaggatgacgatgagcgcattgttagatttcatacacgggtcaccgtcgacagcgacacacttgcatcggatgcagcccggttaacgtgccggcacgctggggtaaccggttattttgtccacataaccgtgcgcaaaatgttgtgtgataagcaggacacagcagcaatccacagcaggcatacaaccgcacaccgaggagagcatatagattattgtggatattctgttcttcctatggctgtagaacaagatgtgctaatagctgtagaacctgtgaaaacgtacgctctccaactggccaatacaaatcccttgtatccgtga

SEQ ID NO: 7109 - DNA, 3799 bp, Homo sapiens
  SIMILAR (2874)..(3263): 731254mologous to Arabidopsis thaliana T6D22.2,accession number AC026875,Smith-Waterman Score=509.
atgggaaaggaaaagactcatatcaacattgtcgtcattggacacgtagattcgggcaagtccaccactactggccatctgatctataaatgcggtggcatcgacaaaagaaccattgaaaaatttgagaaggaggctgctgagatgggaaagggctccttcaagtatgcctgggtcttggataaactgaaagctgagcgtgaacgtggtatcaccattgatatctccttgtggaaatttgagaccagcaagtactatgtgactatcattgatgccccaggacacagagactttatccaaaacatgattacagggacctctcaggctgactgtgctgtcctgattgttgctgctggtgttggtgaatttgaagctggtatctccaagaatgggcagaccccgagagcatgcccttctggcttacacactgggtgtgaaacgactaagttgtcggtgttaacaaaatggattccactgagccaccctacagccagaagagatatgaggaaattgttaaggaagtcagcacttacattaagaaaattggctacaaccccgacacagtagcatttgtgccaatttctggttggaatggtgacaacatgctggaagccaagtgctaacatgccctgggttcaagggaatgaaaagtcacccgtaaggatggcaatgccagatggaaccacgctgcttgaggctctggactgcatcctaccaccaactcgtccaactgacaagcccttgcgccatgcctctccaggatgtctacaaaattcggtggtattggtactgttcctgttggccgagtggagactggtgttctcaaaacccggtatggtggtcacctttgctccagtcaaccgttacaacggaagtaaaatctgtcgaaaatgcaccatgaagctttgaagtgaagctcttcctggggacaatgtgggctttcaatgtcaagaatgtgtcgtgtcaaggagtgttcgatcgtggcaacgtatagcatggtgacagcaaaatatgacccaccaatggaagccagctggcttcacttgctcagggtgattatcctgaaccatccaagaccaaaaaaacgcccggcatatgcccctggtattgggattgccacacggctcacattgcatgcaagtttgcctgagcctgaaaggaaaagattgatcgccgttctgggtaaaaagctgggaagatggccctaaatcttgaaatccggtggtgcaagtctggtgatgctgccatttgaagtctggtgatgctgccattgtttgatatggttcctgggcaagcccatgtgttgttgagagcttctcaagactatccaccttttgggtcgctttgctggttcgtgataatgaggacagacagttgcggttgggtgtcaatcaaaagcagtggacaaaaaaggctgctggagctcattgatgccccaggacacagagactttatcaaaaacatgattacagggacatctcaggctgactgtgctgtcctgattgttgctgctggtgttggtgaatttgaagctggtatctccaagaatgggcagacccgagagcatgcccttctggcttacacactgggtgtgaaacaactaattgtcggtgttaacaaaatggattccactgagccaccctacagccagaagagatatgaggaaattgttaaggaagtcagcacttacattaagaaaattggctacaaccccgacacagtagcatttgtgccaatttctggttggaatggtgacaacatgctggagccaagtgctaacatgccttggttcaagggatggaaagtcacccgtaaggatggcaatgccagtggaaccacgctgcttgaggctgtggactgcatcctaccaccaactcgtccaactgacaagcccttgcgcctgcctctccaggatgtctacaaaattggtggtattggtactgttcctgttggccgagtggagactggtgttctcaaacccggtatggtggtcacctttgctccagtcaacgttacaacggaagtaaaatctgtcgaaatgcaccatgaagctttgagtgaagctcttcctggggacaatgtgggcttcaatgtcaagaatgtgtctgtcaaggatgttcgtcgtggcaacgttgctggtgacagcaaaaatgacccaccaatggaaagcagctggcttcactgctcaagtgattattcctgaaccatccaggccaaataagcgcccggctatgcccctggtattggattgccacacggctcacattgcatgcaagtttgctgagctgaaggaaaagattgatcgccgttctggtaaaaagctggaagatggcccctaaattcttgaagtctggtgatgctggccattggttgatatggttccctggcaagccccatgtgtgtttgagaagcttctcaagactatccacctttgggtcgctttgctgttcgtgatatgagacagacagttgcggtgggtgtcatcaaaagcagttggacaagaaagctgctggagctggcaaggtcaccaagtctgcccagaaagctcagaaggctaaatgaatattatccctaataccctgggtttgtcgcctctacctataaatcttcccactattttgctacatagacgggtgtgctcttttagctgttcttaggtagctcgtctggtttcgggggtcttagctttggctctccttgcaaagttatttctagttaattcattatgcagaaggtataggggttagtccttgctatattatgcttggttataatttttcatctttcccttgcggtactatatctattgcgccaggtttcaatttctatcgcctatactttatttgggtaaatggtttggctaaggttgtctggtagtaaggtggagtgggtttggtactgttcctgttggccgagtggagactggtgttctcaaacccggtatggtggtcacctttgctccagtcaacgttacaacggaagtaaaatctgtcgaaatgcaccatgaagctttgagtgaagctcttcctggggacaatgtgggcttcaatgtcaagaatgtgtctgtcaaggatgttcgtcgtggcaacgttgctggtgacagcaaaaatgacccaccaatggaagcagctggcttcactgctcaggtgattatcctgaaccatccaggccaaataagcgccggctttgcccctgtattggattgccacacggctcacattgcatgcaagtttgctgagctgaaggaaaagattgatcgccgctgcttgaggctctggactgcatcctaccaccaactcgtccaactgacaagcccttgcgcctgcctctccaggatgtctacaaaattggtggtattggtactgttcctgttggccgagtggagactggtgttctcaaacccggtatggtggtcacctttgctccagtcaacgttacaacggaagtaaaatctgtcgaaatgcaccatgaagctttgagtgaagctcttcctggggacaatgtgggcttcaatgtcaagaatgtgtctgtcaaggatgttcgtcgtggcaacgttgctggtgacagcaaaaatgacccaccaatggaagcagctggcttcactgctcaggtgattatcctgaaccatccaggccaaataagcgccggctatgcccctgtattggattgccacacggctcacattgcatgcaagtttgctgagctgaaggaaaagattgatcgccgttctggtaaaaagctggaagatggcccagattctgaagtcctgtgatgctgccatgttgataggttcctggca

SEQ ID NO: 7110 - DNA, 362 bp, Homo sapiens
  SIMILAR (175)..(354): 781254mologous to Homo sapiens ovalbumin upstream promoter transcription factor II,accession number M62760,Smith-Waterman Score=225.
  misc_feature (1)...(362): n = a,t,c or g
agaacatatggtaaggggccgccctccnnnnnnnnnncgccgaaaagtgggcccgtaacatgcccttcttcccggatttgcagatgaccgaccaggtgtccctgctacgcctcacctggagcgagctgttcgggctcaacgcggcccaatgctctatgccgctgaacgaggctgccgttgctggccgccgccggcctgcaggcctaccccatgtctgccgaccgcagggtggccttcatggaccacatccgtattttccaggagcaggcggagaagttcagggcgctacacgtggggtcacccgagaaacagtgcctcaaagccatcgtgctgttcacgtctaacacctgggggcgtggcgg

SEQ ID NO: 7111 - DNA, 384 bp, Homo sapiens
  misc_feature (1)...(384): n = a,t,c or g
ncatttccatttcattagttcatttcatcaattaaattcatcatgtcatttaatttcacctcattatttcattttttcatttcattaggtcagttcatttcatctcattacatttcgtctaagttcatttcatctcatttcatgtcatcagttcagttcatctcatcttttcatctcatcatttcatgggatcatctcagcaactcttttcatcggatcatttcatcatttcatgtcatcgcttcatgtcgtatcttctcaggtcagttcaatttcatttcaatatttcatttcattatttcaggtcatctcatctcatcacctcatgtcatcacatctcatcatgtaatcaaaatagttcatcatctcaacatttcatctcat

SEQ ID NO: 7112 - DNA, 450 bp, Homo sapiens
ttctcccttccctgaacacaaggaagtcaccagtcaccaccacccggcagcctcacacgctgcccacacctgctgcccagggcggggaggtgaggctggagggactggcagcctgtgtctgctggggcagggacacaccagggagcctgctgctctgaaggactggccagggggacggcccgaggggcacaaagtgagatcagacccacctggacggcctgcatccagcactgtccagctcaaggggctcagtggggagagggatgggtgcccacccctgaggagaggaccaggcccccacagggcagagggctcaccatccagagccctgcgcccacccgggacacggggtaacactgccacccgcacaccagtctccagtgggatgagggctgcctcgtgccaagcttggcgtaatgaggttcggagtctcatggtccaggcccccgc

SEQ ID NO: 7113 - DNA, 448 bp, Homo sapiens
  SIMILAR (261)..(287): 1001254mologous to Homo sapiens n 1755 can be A, G, C, or T,accession number AX084219,Smith-Waterman Score=44.
  misc_feature (1)...(448): n = a,t,c or g
gtctcgtgtgcccctggctatgtgctgaagggccaggccagcatcaagtgtgtgcttgggcacccctcgcattggagtgaccccccacccatctgtagggctgcctctctggatgggttctacaacagtcgcagcctggatgttgccaaggcacctgctgcctccagcaccctggatgctgcccacactgcagctgccatcttcttgccactggtggcgatggtgttgttggtaggaggtgtatacttctacttctccaggagacgagagaatatgaagtctccatctaggtgggggcagtctagggaagtcaactcagacttgcaccacagtccagcagcaaggctccttgcttcctgctgtccctccacctcctgtatataccacctaggaggagatgccgccaagcctgtattgcggccgctctnnnnntccaagcaacgtgcgg

SEQ ID NO: 7114 - DNA, 531 bp, Homo sapiens
tttttttttttttttttccaaaaacaccattttaataaggaaacaacagaaataaaagattgttctctggctggagcccagaccccatataatacattacatgtacaaagtggctttcagccagctcctgggcgtctccctggggctctcctaccacctgttccatgccaaattcctgggtccttggactactggctcctctccaggaatatgcccaccccctccccttatcccataacacagtgggtcaagagggagagcctgacaagtgggctgggaattgggaggaggggactattaggggtgaaggatgtttgcaacagcttaaattaaacatcgggagggaaagtctccctttccttcagggtattaggggtgggtcagtgggaaaatgggcgtgttcctgctttgggtgtgggagcatgagtgcccaggggaagcccaacctgaggtgggggtagggtccccctgaaccccttaggatctcctaaaattactgcctccactgggacagggcaggaggcagaactg

SEQ ID NO: 7115 - DNA, 1661 bp, Homo sapiens
  SIMILAR (684)..(761): 461254mologous to Homo sapiens n 1755 can be A, G, C, or T,accession number AX084221,Smith-Waterman Score=45.
cctcccccccaagtccccttcaccggtttggccagccaggacagccgccctgtctttccaagccccactccagccatggctgcggtacccactcagccccagtccaaggagggaccctggagtccggagtcagagtcccctatgcttcgaatcacagctcccctacctccagggcccagcatggcagtgcccaccctaggcccaggggagatagccagcactacaccccccagcagagcctggacaccaacccaagagggtcctggagacatgggaaggccgtgggttgcagaggttgtgtcccagggcgcagggatcgggatccaggggaccatcacctcctccacagcttcaggagatgatgaggagaccaccactaccaccaccatcatcaccaccaccatcaccacagtccagacaccaggcccttgtagctggaatttctcaggcccagagggctctctggactcccctacagacctcagctcccccactgatgttggcctggactgcttcttctacatctctgtctaccctggctatggcgtggaaatcaaggtccagaatatcagcctccgggaaggggagacagtgactgtggaaggcctgggggggcctgacccactgcccctggccaaccagtctttcctgctgcggggccaagtcatccgcagccccacccaccaagcggccctgaggttccagagcctcccgccaccggctggccctggcaccttccatttccattaccaagcctatctcctgagctgccactttccccgtcgtccagcttatggagatgtgactgtcaccagcctccacccagggggtagtgcccgcttccattgtgccactggctaccagctgaagggcgccaggcatctcacctgtctcaatgccacccagccctttctggggatttaaaggagcccgtctgcatcgctgcttgcggcggagtgatccgcaatgccaccaccggcccgcatcgtctctccaggcttcccgggcaactacagcaacaacctcacctgtcactggctgcttgaggctcctgagggccagcggctacacctgcactttgagaaggtttccctggcagaggatgatgacaggctcatcattcgcaatggggacaacgtggaggccccaccagtgtatgattcctatgaggtggaatacccgcccccgcccccgcccctacaaccgcattaccatagagtcagcgtttgacaatccaacttacgagactggatctctttcctttgcaggagacgagagaatatgaagtctccatctaggtgggggcagtctagggaagtcaactcagacttgcaccacagtccagcagcaaggctccttgcttcctgctgtccctccacctcctgtatataccacctagggagggagatgccaccaagccctcaagaagttgttgcccttccccgcctgcgatggcccaccatgggcctattttcttggtgtcattgcccacttggggccctttcattgggccatgttcagggggcatctgacctgtggggaagaacatagctgggagcacaagcattcaacagccagcattccttgagcctcctcatgccctggaccagcctggaacacactagcagagcaggagtacctttctccacatgaccaccatg

SEQ ID NO: 7116 - DNA, 342 bp, Homo sapiens
  SIMILAR (128)..(334): 951254mologous to Homo sapiens 71 Kd heat shock cognate protein,accession number Y00371,Smith-Waterman Score=338.
ggcacgaggaaagtcttatgttggccagttccttccttggatgtctgagcgaccattcttccttagcaggaccctagcactgtcacagacctggagtccattgtagtaatttgttttatttcctaccaaggtttatgaaggcgagcgtgccatgacaaaggataacaacctgcttggcaagtttgaactcacaggcatacctcctgcaccctgaggtgttcctcagattgaagtcacttttgacattgatgccaatggtatcctcaatgtctctgctgtggacaagagtacgggaaaagagaacaagattactatcactaatgacaagggtaaggaggcact

SEQ ID NO: 7117 - DNA, 335 bp, Homo sapiens
  SIMILAR (16)..(333): 811254mologous to Homo sapiens ERPROT 213-21,accession number U94836,Smith-Waterman Score=441.
aacttctgcacgagggaagatcaccagtacgcgccattggaccctaaacacgggcacctcccaccccgcatgccgcccagcgagaggctgatggctgcagaggccgccttctacagcccaccgtaccacgacaggcccacgaacagtgaaggctgggagcataccggcctctatgaatccttccgagcaaaactgcggtccccgcggaggaaaggcccggagaagaggaacagcggaccctcgaggtctcgaaacagatccaagagccgaggacgatcctcctcacgttccaactcaagatcctcctagtcttcaggctcgtactctaggtcaag

SEQ ID NO: 7118 - DNA, 501 bp, Homo sapiens; identical to SEQ ID NO: 6545
  SIMILAR (119)..(406): 1001254mologous to Homo sapiens uroporphyrinogen decarboxylase (EC 4.1.1.37),accession number M14016,Smith-Waterman Score=515.

SEQ ID NO: 7119 - DNA, 481 bp, Homo sapiens
  misc_feature (1)...(481): n = a,t,c or g
catgttntgcaactcagttaattcgagtccacttttgaaatgcatcatgattagaaagtgtctgtagtttgaaaatttagcccaaatttctcctgttctgagtgtatttagaagtagataccaaaatggaagcttgacacccctgttagctcagcaagcagagacgatcactctatatatattgttgtatggccttccagggtttttctatgcacatagatatagtgcctggcacacagtagacactcaataaatatatcgacatgcaccggcgctgagggtcacgaatcggagtcattctcctactgggggacgcgtggcccttccgcaaccatggcttgtgatggtttaacgcggacaggccattcctccccgtcccgcgcgcggtctcctcccctcctgtgcgcccgctctttaaccaaagctgcgtgtcagtgagccgtgccggtcacatggtgtcactgctggcggccgcaagggg

SEQ ID NO: 7120 - DNA, 459 bp, Homo sapiens
  SIMILAR (254)..(457): 771254mologous to Homo sapiens galactokinase,accession number M84443,Smith-Waterman Score=249.
ccaccccccgtttcctccgaagtggttggtgccttagcaactaaagctggcaactgggaaatcgtccggtgctgcaggtctcagccgaagggcgtcggaaactgcgctcgcatcgagcagtttccagcctcctgggtaaaggagcagtctcctcccttgcttgggactctggacgcatctcattccggtgaaagtaagggacagcttaggaccagaagcctttcgcggagaaaaggctgacatgcccgtcctatatgacaggctactgaagctaatggagatgctttacttcaagtctggaactattcccatgttttatggttgagctccccgaagagtctacataataggagagcgtattcattattgcggatattctgttcttcctatggctgtagaacaagatgtgctaatagctgtagaacctgtgaaaacgtacgctctccaactggccaatac

SEQ ID NO: 7121 - DNA, 633 bp, Homo sapiens
  SIMILAR (79)..(531): 1001254mologous to Homo sapiens uroporphyrinogen decarboxylase,accession number AF047383,Smith-Waterman Score=798.
ggcacgagtggaagcgaatgggttgggcctccagcgtagcatactgacacctacccccacccccacctgatcgccagacctcagggttttccggagctgaagaatgacacattcctgcgagcagcctggggagaggaaacagactacactcccgtttggtgcatgcgccaggcaggccgttacttaccagagtttagggaaacccgggctgcccaggactttttcagcacgtgtcgctctcctgaggcctgctgtgaactgactctgcagccactgcgtcgcttccctctggatgctgccatcattttctccgacatccttgttgtaccccaggcactgggcatggaggtgaccatggtacctggcaaaggacccagcttcccagagccattaagagaagagcaggacctagaacgcctacgggatccagaagtggtagcctctgagctaggctatgtgttccaagccatcacccttacccgacaacgactggctggacgtgtgccgctgattggctttgctggtgccccagtaatgtgggacagggcagggactcggggcgcggggagatcactctggaaggtctggggtagacaaaaggaagggtcagtctggcttctgtgacaccatctt

SEQ ID NO: 7122 - DNA, 338 bp, Homo sapiens
  SIMILAR (10)..(336): 711254mologous to Homo sapiens BAT5,accession number AF129756,Smith-Waterman Score=408.
ggcacgagcttctacttgtacaggaaaggttacttgagtttgtccaaaggggtgccgatgtctcactatgctgggacattgctgctacttctggcaggtgtggcctgcctccgaggcattgtccgctggaccaacccccattaccggaagaccatgaccataccgtaagcatcacatcgaaaccagtcttctaaataccccaggcatgttgccaactacaactgtgacttccggagctggccagacgacttccactgcgatgaacccattacccggaatgagtctcaagggggccctatacgccggagtgtgcacactgcttctccaaagcccatgcc

SEQ ID NO: 7123 - DNA, 390 bp, Homo sapiens
  SIMILAR (1)..(390): 951254mologous to Homo sapiens titin,accession number X69490,Smith-Waterman Score=605.
attctggactgtcatactgatgacagtggaacctaccgtgctgtgtgcaccaactacaagggcgaagcttctgactatgcaacgttggacgtgacaggaggggattataccacctatgcttcccaacgcatagatgaagaggtccccagatctgatttccctgagctgacaagaacagaggcgtatgctgtttcatcatttaagaaaacatctgagatggaagcttcgtcttctgtcagggaagtgaaatcacagatgacggagacaagggaaagtctctcctcatatgaacactctgcatctgcataaatgaaaagtgctgcattataagaaaagtcactggaagaaaaatccacaaccagaaagatcaagacgactttggcggcaagg

SEQ ID NO: 7124 - DNA, 330 bp, Homo sapiens
  SIMILAR (128)..(232): 681254mologous to Rattus norvegicus myosin heavy chain,accession number L13606,Smith-Waterman Score=116.
gggtgaattcggccgaggaggcggaggagcaagccaacaccaacctgtccaagttccgcaaggtgcagcacgagctggatgaggagtagctttgccacattttgatctgctcatccagctcgtgctgcaccttgcggatgaggcagaggagcgggcggacatcgccgagtcccaggtcaacaagctgcgggccaagagccgtgacattggcacgggtggcttgaatgaggagtagctttgccacatcttgatctgctcagccctggaggtgccagcaaagccccatgctggagcctgtgtaacagctccttgggaggaagcagaataaag

SEQ ID NO: 7125 - DNA, 595 bp, Homo sapiens
  SIMILAR (11)..(412): 691254mologous to Sus scrofa myosin heavy chain, cardiac,accession number X91846,Smith-Waterman Score=375.
  misc_feature (1)...(595): n = a,t,c or g
aatgcgtccgcaccggctggacgaagccgagcagatcgccctcaagggtttttttaagcagctgcagaagctggaagcgcgggggcgggagctggagaatgagctggaggccgagcagaagcgcaacgcagagtcggtgaagggcatgaggaagagcgagcggacgccatncaaggagctcacctaccagacggaggaggacaggaaaaaccttgctgcggcttgcaggaccttggtagacaagctgcagctaaaggcccaaggcctacaagcgccaggccgaggaggcggaggagcagagcccaacacccaacctgtgccaagttccgcaaggttgcaggcacgagctggattgagggcagaggagcgggcggacatcgccgagtcccaggtcaacaagctgcgggccaagaagccgtgacattggcacgaaagggcttgaaatgaaggaattagcttttgccacatctttgaatcttgctccacccctgggaaggtgcccagcaaatgccccatgctggagcctgtgtaacagcttccttgggagggaagcagaataaagcaattttccttgaagccgaaaaaaaaaaaaaaa

SEQ ID NO: 7126 - DNA, 1534 bp, Homo sapiens
gcggccgccgcccgcctgcgctcatagactcacgcagccccagtcccgccagtccgccaacacagtagtgccggcccccctctttccctggccctgccccccctccccgcctttggctcgctccgcctttctgccccccacccccacctcacgggtacgggccattcccggccaggaaacgccgtggcgccgcgttgggcctaactcgagtcctgccgtctcccgggagtgccgtgcgccgcagcccgggcccaggccccggcagcgcctgtgacaaggtcttcagaactactagcagataatttggggggacttcatattcagaagtctatataaaggattcctcatgtccataacatgttggatgaggctctgcagctcacccccactctcagagtggtcagtctccattaattggaccccgtgatttccaatctctgctgtgttggacgtcatgagcattgcaatccctctgggagtcaccacatcagatacatcctactcagatatggctgctggatcagaaaaggaagtggaagccccctacctttcaagacgaagtggcactacaccaggatgtgaaagtccagcgaaagagacccaaggggcctagggggcagcacacccccagaagccaagtctattccaggcagtaccacggattatggtctgggctggaaaaatcctggtgttttgaatatgttcaggtccagttcagactcttgatcccacagccacttcttgagagaggtgggggttgctataattaccctgtttctcttgccattttcacaggccctggggattcttcccccttcagcaaagcaaagcaactgtaccagatttctgggttgaatgacatccctgattaataagtggttttcttccttaaaacagaatattattaaagagcatgtatatttcttcataaagccacctaatataacttacctgtttactgagttccttaaagaggaagacttaaagctaccctgagaaatagtatataatattctggggtagtctaaaatgaaaagcagggtttgggcttattcccatataaaaaggaaaaaggagggttgggggtggggaagggttgattttgcttcttctatagcttttttcttcttttgtttttgcttgctttgttttgtttgcatgccaaaaggtatttagttatgtcagtaactgagacttacttaaccattttaccaactctttccccaaataaagtacttaaaactctccctgcattagtaggtagccagtttgtattgtgtttataggtttttataaagtcagctactaacctggtactatgtagattgtctaactgtatagatagatagcattaacatttgtggagaaattttcaacaaagaggttaaaccaatacgtttgggaattgctgggataaaagacccagagcagttaatcttacaattggtgttttccccaaagtatagacatgactgcccgtaaatactgctggggagtctaggactaattccagaaataaaaatacttctggtct

SEQ ID NO: 7127 - DNA, 389 bp, Homo sapiens
atcgcttgaactcgggagacggaggttgtggtgaggcgagatcgtggcttgcactcaagcctgggtaacaagagaaaaactctgtctaaaaaaaaaaacctcagaagacagagacaatgaatttacaaattttctaattgaatgttctaagagacaaaaggaaagaaaaatctcttcctatacttataaaggaggacttatacctctcatttattagcttgtttgagacagggtctagctttttcacccaggctggagtgtggtggcaagatcagagctcactgcagcctccaactttatggatcaagtgatcctcccacataagcaccccaaacagctggaactaaacaacacaatcagaggatagcacaatgcaatgcagacaacaa

SEQ ID NO: 7128 - DNA, 398 bp, Homo sapiens
  SIMILAR (160)..(225): 811254mologous to Homo sapiens PRO1722,accession number AF119851,Smith-Waterman Score=86.
ttttttttttgagacagtctcactctgtcacccaggctggagtgcactggcgcgatctgagctcactgcaacctctgcctcccaggttcaagcgattctcctgcctcagcctcctgagtagctgggattacaggcatgtgccaccacgcccggctaatttttgtatttttagtagagacggggtttcaccatgttggtcaggctgttctcgaactcctgacctcatgatctgcccacctcagcctcccaaagtgctggggttacaggcgtgagaccactgcgcccagcatgtttctgcagaatctcttagctttggtgccaatgcagcaacgttagtgcaacaagctgcaggagtggctaggccctcagctcagccacccgctggttatgggcagtgt

SEQ ID NO: 7129 - DNA, 1155 bp, Homo sapiens
  SIMILAR (632)..(940): 711254mologous to Homo sapiens Human myelin oligodendrocyte glycoprotein gene,accession number AAZ29204,Smith-Waterman Score= 356.
ttttttttttttttttttgaggtggagtttcactcttgtcgcccaggctggagtgcagtagtatgatcttggctcactgcaacttctacctcccagggttcaagtgattctcctagtctacgactccggagtagctaggacatgaggcacataccaccaagcccagctgatgtgtgtatttagaatagagacggggtttcactatgttggccaggctggtctcaaatgcctgaccttgagtgatccacccgcctcggccctccccaaagagctgggattaacaggtgtgagccaccaggcccggcctccctagattaaatcttgacattttttggatcaagtaagaacccactggagcctttccctggaaaaaaagaacacatactccagtctcacacacaatttcttgggggctcacagaccctcttgaagcctatccataaaaccccctgggtgaagtccccctgcccgatagcctgagggaagacatgtgagtggatatatgtgcactaacaggggcgaagacagacctggatggtctgcaatcccagagagcatgaggcaccatgtcccaaagcttggtatgtggccctgggctcctccccctaattttatctctctgaagaagctgagttttttttttttttttttgagacggagtctccctcttgtcgcccaggctggagtgcagtggcatgatgtcagctcactgcaacctccgcctcccgggttcaagcgattctcctgcctcagcctcctgagtagctgggattacaggtgggcaccaccctgcccagctaatttttgtagcttttagtaccagccggggttttgccatgttggccaggctggtcagcaactcctagcctcaggtgatctgcctgcctcagcctcccaaagtgctggggattacaggggcgtgagccaccacgcccggccacgttctgagttttgaggatccagaaacaaaaggctggaaagcgacacttctacaggtttactgatgaagtccggagaaaatccaaaaacaaagccccactgaggggtttgtgaatttggctgttctcagtggccaggcagagtctctgctccactcttctttcccagctagcagggaagtgaaggcaaagaactgtctcagaaacaagtctctag

SEQ ID NO: 7130 - DNA, 805 bp, Homo sapiens
  SIMILAR (103)..(348): 841254mologous to Homo sapiens Human 5' EST related polypeptide SEQ ID NO:979,accession number AAY64818,Smith-Waterman Score=332.
gtattcagacgaggtttttggtggggtctctaagccgataagatgcatagaatggggggaatgcataataaatgcagggttcattgatatattatttaccgcatgaatcaccttcctcctaaccattataggagccatgtgttcacatgtcatgtggaccagtatttaactgtggaaaccgcgggtggcatggagaaggaggcagtgtccgtgactgtgctgctctccgcagccccctgcctgctgtcctgtttcctcggctcctcggtgtctgggactgggcgttctggggtttcccaggcaggaaaacttaaaggggccagagagggtgttaaaaacacacaccacttgggcaggtgatttgaagatattaaagctagaaattgggaactaggaaaatcaaaaggaatttcaagggcatctttaacgtgacagtttggaactcattttgattgttactttaaaaaagtttattgcagttattgactctcaattttttttttttttttttttgagggcaggggggccattgtggctaatgtgagcctcaattttccgggctcaaaaaaaccccccccctcactttccaaagaaccgggaacaacaggggccgcccccccccgggaaattttttttcccccaaaaaaaacaaggcttggttttgccctccacccggggtccccccctcccccgggtccttgggccccactttggtccaaaggggaaaaagttggaattttaaaaaaacacaaagtgggccgggggcgggggttcagccctgtatccccacctttttgaaagcccg

SEQ ID NO: 7131 - DNA, 1075 bp, Homo sapiens
ggagggaagacacatgccagccctgcctactggggcgcccctgataacaaaggaaccagccccaggccaaggccacctgcccctgaccacaagttgaatttgtcactcagactgcagtgtttcccaacattctaattatttgcagaggtgttcaatttggggtaattcacttaaaatccagttttggttcttctgggctgagtgggccctggcccctcccataggctgtggctcccctgggtgccccctctccagtggagctgacccaccgctcagcgcttggccttgcagcccttactaaaagacttgaaagtccctgggttcaccccctgagtgaattaaaggccagaggggccccgaagggcactgtgagggacagagactcacctgggcagtgcagaagccggccgcgtgtccctccttacaggggatgaaatgacctggggaggaaaccccagccctgccctggaggttccagagtaggcgggccgggtgctgtgaggcttcacaacctgctgtcccaagcacgcttgagttgtatgtgagtctgtgccgtgccgtgccgtatgcttcagctcctgcaaccccggctgagctcgatttttacctaaatatcagtctccaacgggaccccacccttcattcaatgccttcttgtcccttggggcaatgtgtgtgcttcctcgtcccaatttccattccctggcagtgaggagcccaatcgtgccagggggccctgccccacttgtccctgggaaggaataggagggtttgggtgtgacctcacagtccagaccagactgtcccagtcctatgtcagggacacccagatgtagaagctgactgagacctgctgcagggcgtgggtgctcccctctgcttggaggctgtccctggacagtgacccacccactgaggaccaaggctgggtgtaccttgagctgggcacagcagcctgtggtgttgcctgtgggtggggagggccccaggtgtgcttctcccgtagcagtcctaggcttctctccctgtgccctgtgtcacctggatcctccagtaaagtgaaattcagcactgt

SEQ ID NO: 7132 - DNA, 340 bp, Homo sapiens
  SIMILAR (10)..(339): 731254mologous to Homo sapiens PRO2044,accession number AF118090,Smith-Waterman Score=390.
  misc_feature (1)...(340): n = a,t,c or g
ggcacgagccaagtgttaactctaactattgcagaggtctaatgaaacctaggatgagtgggctgcaaatgatgcaaacatactgaagcaaaaagaatgccctgtgcagaagactatctatccgtggtccatgaacagatatgtgtagcgcatgagaatacgccagtaagtgacagagtccccatacgctgcccagaatccttggcgataagactaccatgcttttcagctctggaagtcgatgaaacatacggtgactaagagtataatgctgaagcattcaccttacatgcagatatatgcacactatctgagaaggagagacccatcaagaaacaan

SEQ ID NO: 7133 - DNA, 354 bp, Homo sapiens
  SIMILAR (127)..(276): 761254mologous to Homo sapiens TAR RNA loop binding protein,accession number U38847,Smith-Waterman Score=173.
  misc_feature (1)...(354): n = a,t,c or g
tgattgaatccagcctccatcaagtggaaagcatgcacggagcagggaatgccaagaagaattggcaacgattcaggagcatttcttttttgcaacatttcacccactcaaggattattgtctagaggtactaatttggttgaagcagataaccaagcagagtggaccgatgttcagaagaagattatcccatggaacagtcgtgtttccgacttaggacctgggagctcctgtttcaggatcgtgctgccagacttgggaaagtcaattagtaggactcattcgttgtgggccttcgcttcattcggacaaaccgaccaattttagggagggantgtggcagggacctgtgga

SEQ ID NO: 7134 - DNA, 926 bp, Homo sapiens
  SIMILAR (586)..(678): 961254mologous to Homo sapiens TAR RNA loop binding protein,accession number U38847,Smith-Waterman Score=149.
cttatggtgaagaaaatcttaaaacaagcatttgtacgtttttagcagttttatcacatttagacattattactcaaaatattccagaaaagaaactaattctgaagcaagcccttatagttgtgctgcagtggtgtttcaatcacaattttagtgttcgactgtatgctttagttgctcttaagaaactctggactgtgtgtaaagtgttaagtgttgaagaatttgatgccctgactcctgtgattgaatccagcctccatcaagtggaaagcatgcacggagcagggaatgccaagaagaattggcaacgcattcaggagcatttcttttttgcaacatttcacccactcaaggattattgtctagagaccatattttacatccttccacgcctttcaggccttattgaagatgaatggatcaccattgataaatttaccagattcactgatgttcctttagctgcgggatttcagtggtacctttctcaaactcaacttagtaaactaaaaccaggtgactggtctcagcaagacataggtactaatttggttgaagcagataaccaagcagagtggacccgacgttcagaagaagattatcccgtggaacagtcgtgtttccgacttagacctggagctcctgtttcaggatcgtgctgccagactttggaaagtcaattagtagactcatcgttgtggcctcgctcatcgacaaaccgaccaatttaggaggactgtgcaggacctgtgaggtatttggggcttcagtgctcgttgttggcagccttcagtgtatcagcgacaaacagtttcagcacctcagtgtctctgcagaacagtggcttcctctagtggaggtaaaaccacctcagctaattgattatctgcagcagaagaaaacagaaggttataccatcattg

SEQ ID NO: 7135 - DNA, 360 bp, Homo sapiens
  SIMILAR (3)..(320): 741254mologous to Mus musculus putative,accession number AK011330,Smith-Waterman Score=431.
tggcaacctgctccagcgatcagagcgttaaggtctgggataaaagtgaaagtggtgattggcattgtactgctagctggaagacacatagtggatctgtatggcgtgtgacatgggcccatcctgaatttgggcaggttttggctttctgcacttttgaccgatcatctgctgtatgggacgaaatattaagcgaatccagggacaacttgtgaggacatacccactgtgttaagaggactactctggaggatagcatagtatctgctacttgtgtgtagtcttttctctctcatgtgggtattatgctattatcctgtggtactttttttcctgcatgtatttgtggagttttccctg

SEQ ID NO: 7136 - DNA, 305 bp, Homo sapiens
  SIMILAR (132)..(290): 711254mologous to Homo sapiens NAG13,accession number AF194537,Smith-Waterman Score=196.
ccctgtaatcccacctactcaggagcctgagacaggagaatcgcttgaatccgagaggcggaggttgcaatcagccgagatcaggccattgcactccagcctgggcaacaagagcgaaactccatctcaaaaaacaaacaaacaaaatgctagcaaatctaatccagcagcacatcaaaaaggtaatccaccactatcaagtaggctttacccctgggatgcaaggttagttcaacatatgcaaatcagtaagtgtaatttatcacataaacagaaccacccacaaaaacgtcgccgcggccgcg

SEQ ID NO: 7137 - DNA, 217 bp, Homo sapiens
  SIMILAR (15)..(179): 741254mologous to Mus musculus putative,accession number AK002500,Smith-Waterman Score=214.
cggccgcgtcgacgatgccgatgagtttcgagtggcagagacagtaacgcttcccacccttctatacgttacaaccgaatgtgaacactcggcagaagcagttgaccgcatagtgctcgctggtcctgtccttatgccgcctgcacaaacagtccagcatgacgttgataaaaactcggctgacctcagactccatcaccgtcatgctggactgttt

SEQ ID NO: 7138 - DNA, 351 bp, Homo sapiens
  misc_feature (1)...(351): n = a,t,c or g
agattatgagatgacaacacttttgggagaggttccatgtgacaaaagatagaataaacacagttgagagacaagaaacagattggaagatttttgcaacatacctaatgaaaaaagtataaatatccagaaaatgctacaactcctacaaattagtaaggaaaaaacaactcaatagaaaatgggcaaaagaaaagaacaagcaatcacagaaaaagaaacaaagtggccagtaaacaaaaactgttcaacctcagtaaaataagaggaatgcaaactaaaggtactatctctcacccatcagtttagcaaaaagcaataaattaaattattaatcagtacgtattagcn

SEQ ID NO: 7139 - DNA, 331 bp, Homo sapiens
  SIMILAR (22)..(327): 771254mologous to Homo sapiens hypothetical protein,accession number AL080129,Smith-Waterman Score=390.
ggattgatagagatattagtaatttatgtaagtgatacacctgtaaaatgagatgtttaaagtgatatttttgaacaataagcatatgggaaaatagatggaggaaatgatgtatgtgatctacaatcatctgaaggaacgaataccaaaatgaaaaataatgaagaaatgatgatcggagaggcaatggatgaaactggtcatgatggtgaaacagagaatgagggcatatctaccaaaacttcaaagcctgatgaagctgaaactaacatgttgattgcagaaatggacacttttgtttgcgacacagttgaaatgagcactgaaggta

SEQ ID NO: 7140 - DNA, 338 bp, Homo sapiens
  misc_feature (1)...(338): n = a,t,c or g
aggaatacaggtgccctccaccacgccaagttaagtctggttttatctgaatgtcaactccagnnnnnnnnnnnnnnnnnnnnnnnnnnnnnnnnnnnnnnnnnnnnnnnnnnnnnnnnnnnnnnnnnnnnnnnnnnnnnnnnnnnnnnnnnnnnnnnnnnnnnnnnnnnnnnnnnnnnnnnnnnnnnnnnnnntcctgactttaaactaaaggagtgagactagaaggtccctgtgattctgaattatgtggcttcctctggaatttctaggttttccccttgatcccagcagggttgtactgcctaagagagcttggaaagggatagagaagtctg

SEQ ID NO: 7141 - DNA, 373 bp, Homo sapiens
atatgttggcaggctgctctcgaactcctgaactcaggtgatccacccactgcagcctcccaaagtgctgggattacaggcgtgcacacaatgcccagcctttcctgactttaaactaaaggagtgagactagaaggtccctgtgattctgaattatgtggcttcctctggaatttctaggttttccccttgaatcccagcagggttgtactgcctaagagagcttggaaaggggatagagaagtctgacccaaatttgcggagcgactgagtgtatgctgccccctttctgggccttggcttcttcctcaatcatctaggcacagtcctatggactgcctgtttttgagggatgtggggaagggtctgcaaa

SEQ ID NO: 7142 - DNA, 389 bp, Homo sapiens
  SIMILAR (138)..(389): 501254mologous to Homo sapiens Human myelin oligodendrocyte glycoprotein gene,accession number AAZ29204,Smith-Waterman Score= 148.
cgtcgacgtaagaatgtctgggatacttttgtctaagtgaaaaaaaccaaagttcagaaaagcatagtaggagcagccgggcatggtgactcacacctgtaatcccagcactttgggaggccgaggtgggtggatcacctgagatcaggagttcaagaccagcctggccaacatggtgaaaccctgtctctgctggaggtacaaaaaattggccgggcatggtggcgcatgcctgtaatcccacctactcatgaggctgaagcgggagaattgcttgggcctggggggcggaggttgcagtgagccaagatagtgccacggcactccagcctgggcaacagagcgagactgtctcaaaaaaaaaaaaaaaaaaaaaaaaaagtcgacgc

SEQ ID NO: 7143 - DNA, 358 bp, Homo sapiens
  SIMILAR (1)..(357): 831254mologous to Homo sapiens cytokine-inducible SH2 protein 6,accession number AF073958,Smith-Waterman Score=531.
  misc_feature (1)...(358): n = a,t,c or g
gtccactgtcttgtaccagacctccttcagagcaataacaacccatgttactggggagtgatggataaatacgcagccgaagcactactggaaggaaaaccagagggtacctttttacttcgagactcagcacaggaagactatttattctctgttagttttagacgctatagtcgctctcttcatgctagaattgaacagaggaatcacaactttagctttgatgcacatgacccctgagtcttccattctcctgacattactgggctcctagaacattataaggacccaagcgcctgaatgatctttgaaccacttctatccactcccttaattcggactttccctttttgcctgn

SEQ ID NO: 7144 - DNA, 481 bp, Homo sapiens
  SIMILAR (266)..(481): 621254mologous to Homo sapiens putative p150,accession number U93568,Smith-Waterman Score=226.
attcttccaaacttaggataaatgctaaaaacattaaccatacaagcaaagattaaattagcctatattaatcataataactgtttatcgcacatgtaccccttaacctaaaagatgaagaagaaaataaaaaataaaataaaatttgaagaaaatgttaaacaaaaatgaaaccataccagtactagaagaaaaatgggtgaattcctctttaacctaggcaaaggaaaggcttctctggctcccaatctggatttaattaatcctaaagtttgtatagaatcacaaaatacctcaaatagccaaaacaatcctgagcaaagagaacaaagctggaggtatcacactaccagatgccaaaatatcctgcaaagctgtagtaaccaaaacagcattatactggcatacaaatagacatatagagcaatggaacagaatagcgaacacagaaattaatccaaatatctgtaaccaactgatt

SEQ ID NO: 7145 - DNA, 315 bp, Homo sapiens
  SIMILAR (1)..(303): 751254mologous to Homo sapiens angiotensin/vasopressin receptor AII/AVP,accession number AF054176,Smith-Waterman Score= 367.
gtgaaagccaaagctaaaaagctgcagatccagcccatccagctggaattgctgtactgttcgtacgatatgcaggaggaggacttcgcgcatagggccatggactatttccccaagattgagaacaatctctccaccagaatggaccacatggtttcttccttttgcattgagaactggcatcagttggagtcactgtccctgctgatactacataacatgccccactatgaagaggatgaggaatttgaaggcctacgccttgacatggtgcagtgacgacttactagctgctctgatgctggctgacattat

SEQ ID NO: 7146 - DNA, 415 bp, Homo sapiens
  SIMILAR (229)..(2): 1001254mologous to Homo sapiens Human secreted protein encoded by gene 73 clone HSQEL25,accession number AAW74802,Smith- Waterman Score=398.
catcatcgctgtcactatcactatcatcttcggtctcagtcactttcggttttggtacaccattttcagcagtttcatcttcaattccagatggaggattagcactggcattttcttcttctggcctttcaacttcattttcatcgccatagagccactcttcctcctcatcccctccggtcccgccgctcagctccgacactaggcgctcgacctcgccggccgacatggccgccccgagcgcaacttaaacgcggcgatcaacagccccctccaaccccttccccagcctcgcagccccgaggcgcgagaagggcgggaacccgccgacgaacgaacgaagaaagctcgagactccaatcccaggaaggcgacggcagcggcggcaaagatgaagcctccagcgcagacgaca

SEQ ID NO: 7147 - DNA, 344 bp, Homo sapiens
  SIMILAR (9)..(344): 741254mologous to Homo sapiens HSA,accession number AAR32563,Smith-Waterman Score=451.
ggcacgagcatgaatgctatgccaaagtgctctatgaattgaaacctgttggggaagagcctcagaatgtaagcaaacaaaattgtgatctttttgagcagcttggacagtacgaattctaaaatgcgctattagttcgttacaccaagaatgtaccccaagggacaactccagctcttggacaggtcttaagaaacctacgaaaagtgagcagcaaatgttgtaaacatcctgaagcaaagacaatgccctgtgcagaggactatctatccgtaatcctgaaccagttatgtgcgttgcatgatagatctgctgtaagtgaccgagtctccagatgctggaca

SEQ ID NO: 7148 - DNA, 413 bp, Homo sapiens
  SIMILAR (275)..(376): 671254mologous to Homo sapiens PRO0483,accession number AF090931,Smith-Waterman Score=117.
agagcaggatacagacaaaaatgggggagtttggccacagtcattggccaacttgggctccccagtggagaggggctggtatggccccagcgacgacgggagggacaccgcaacgcccattgctcagagctggttctagatgatttacacgtaatcactcaaaatagagccaatcacaggcccaggtgtggtggctcactcctgagtgagctgaaattcgcgccactggcactccagcctgggcgacagagcaagactctgtctcaaaaaaaaaacaaacaaacaacaacaaaaaaaaacacaaaaaaacagccgggctcagtggctcatgcctgtaatcccagcactttgggaggctgaggcaggcagatcaccttgccatcaggagttcgagaccagccgggccaacatgg

SEQ ID NO: 7149 - DNA, 363 bp, Homo sapiens
  misc_feature (1)...(363): n = a,t,c or g
gaccaagagtccaggcccccagtgtcctcaggcnctgcctcagattggaaccaggacagggccagaggcagagggcagggaggctgtgagacacgggacagctcagagcagtcacagggcacaaatggccagccgccagcagaagcttcaaaggacagctggtccagcggagggaagatggccaggtgagcccccagcccccaaaggcaaaaagcaggatatccagggtccccaagtccccaaccagcacctgctagtatgagatccctggggccacctcaattccaggagccacctcaggctctatttcctctggaagttcctattccatcaccacacaccaggaacaaaatggctcgtgcc

SEQ ID NO: 7150 - DNA, 354 bp, Homo sapiens
ggcacgagagagcatttctcttgaataatagttgtttcctataggcttttgacccttatcaatgtgatagatacctttttaagatagttacagatgtttattatacaccttatgttcttatctactacatatgagcccccttgcctctattacttcagctcactcatactcattttctctctctcttcttcctataagtactcaatatctatgctcttgtctatctgtccacagctctgcctctttccctttttatctctatctcatctcctagatattctctatgtctcttctttcatttcctttctctcatgctattcctctcttctctttcgatgtactgctcacattatt

SEQ ID NO: 7151 - DNA, 337 bp, Homo sapiens
  SIMILAR (8)..(223): 771254mologous to Homo sapiens SRE-ZBP,accession number Z11773,Smith-Waterman Score=276.
ggcacgagtggcccctctgaaaggagtacaggaacaggaggttcggcatgagggggaagttacaaagcctgagaaagagaagggtgaggagacaaggattgagaatgggaagcttattgtagtatcagactcttgtggaagagtatatgtatctgggaaaatatattatcccatgtaggcttataatgatggtctcatcttggaaaggtatcagatcatgcccattgacatcattgtctcttatgtgtttatcatgatatgcttagattaatcttttgtgtctgatcctatattatttttatctcattataggtgtctattcttatggtcgtttatg

SEQ ID NO: 7152 - DNA, 350 bp, Homo sapiens
caaggacatccgtgtcggacacaggcaaaaccgagctcttcctccacaagcctctcctcccacggttgccccagggcagccaacggccttgcctcccacgggtcactcaggcccaaccatgggctggccaagccgcctctctcagctctccctgatcactgctcccacctccgccagtcccactgtggtcaagctgccatctggggcctgctggcctctcagctccacctttgcctcttctcctctgtccttggtgcagtgaccttgaaactctgactcagatcatgccacctctgcaatggctcccagctcagagtccagggaatgtctctccccatggcccgcaaggc

SEQ ID NO: 7153 - DNA, 404 bp, Homo sapiens
  SIMILAR (403)..(239): 611254mologous to Homo sapiens Human secreted protein, SEQ ID NO: 6953,accession number AAG02872,Smith-Waterman Score=176.
agatcttccctccggacctgctcctcgccttaacccatgccctgggttcccggctctcttgtgtggcagatcctggctcactcctgcttctccaggaagtggttctccttccttctgcagcggccatatccaaagatcttgcagatcctggagctgatgttgaagaaggacctggaaggaaggctccaggtagaaggcaggtggcggggctccagagacaaaggagggtcaataagaagatggtcatcacagcggtctacacagcaagcagcagaaacaaccggcatggccaagcatggtgactcacacctgtaatccgaacactttgggaggccgaggtgggtggatcacctgaggtcaggagttcgagaccagcctgaccaacatggagaaaccctgcctct

SEQ ID NO: 7154 - DNA, 376 bp, Homo sapiens
ctcacactgtctggagcccaaggacatccgtgtcggacacaggcaaaaccgagctcttcctccacaagcctctcctcccacggttgccccagggcagccaacggccttgcctcccacgggtcactcaggcccaaccatgggctggccaagccgcctctatcagctctccctgatcactgctcccacctccgccagtcccactgtggtcaagctgccatctggggcctgctggcctctcagctccacctttgcctcttctcctctgtccttggtgcagtgaccttgaaactctgactcagatcatgccacctctgcaatggcccccagctcagagtccagggaatgtctctccccatggcccgcaaggcctcgtgcc

SEQ ID NO: 7155 - DNA, 381 bp, Homo sapiens
cggacgcgtgggcgcccgcccctcaccacccctctggcctcatctcctgctcagcccagccactctgagcacactggcctccttgctgttcctctcacccctataaagctccccaaggcccctccttccctgtgtgtctccatgtctgatttctcacctctttgaagtctgctgaagtgtcactgaccaccctatttacaattgtaacctgtcccccagccctaaccctggcccttctgacccctctgaccctgtcctaccttttgttgtcatgactgattaccttctgccatgatgtgtcatttgctgttgtttcttgtcagatcctccacactgctccccccaccccgtaggtggctctttttttggaattaattaatt

SEQ ID NO: 7156 - DNA, 344 bp, Homo sapiens
  SIMILAR (16)..(342): 811254mologous to Homo sapiens KIAA1204 protein,accession number AB033030,Smith-Waterman Score=455.
aacagtggaagagtaggatcaggcaatctgatttctccactcccacctggtcctcccggtccaaggcctctggaggaggcaactccggtcctgctttctcagggcattccggaaagagaagactcattcaggaatttgaggactgatctctacatacaccagctgaagtcctaagacagccctgagatctctagcctctgtcagggagaggaggcaaccccaagacacagtgacaagcacaattcatagaatgctgcttctgaggggaaaggctgtggttttccaagcccaaccatggaggttgagatcgcctcacatgacgaggaggatgtaatccattcagc

SEQ ID NO: 7157 - DNA, 535 bp, Homo sapiens
  misc_feature (1)...(535): n = a,t,c or g
catgaccctataccggcctcgatccccgatcgacccacgcgtccgatagaannnnnnnnnnnnnnnnnnnnnnnnnnnnnnnnnnnnnnnnnnnnnnnnnnnnnnnnnnnnnnnnnnnnnnnnnnnnnnnnnnnnnnnnnnnnnnnnnnnnnnnnnnnnnnnnnnnnnnnnnnnnnnnnnnnnnnnnnnnnnnnnnnnnnnnnnnnnnnnnnnnnnnnngaatgaatgaataagtaagtgaataagtagaaataaataagcactggacaagggacacagacaaaatgtgtagaaggaaaaaagtgttaggttgaatcatatacagttgctatttttgtaagttaaaagtgatgaccgaatagacctataacaggtgaagttactacaaaaaacctcacaaagaaaagcctgagaccagatggtttcactgatgaattctgttaaacatttaaagaaggatttataccaactcttctaaaaacagttaaggagggattacatcccaccttcctctatgaggccagtataactttgn

SEQ ID NO: 7158 - DNA, 322 bp, Homo sapiens
  misc_feature (1)...(322): n = a,t,c or g
cgcacgctgaggaggatcggcggccggtgagggggaagcaagtctggtctctgtgattgaagaagtcggctctgtgctccagtgcgtgaatcacacacatacctcataatgccgggtctatgttgttgattttttctttattatattttctttggcttctttttttctgttgttttctgtctcttgtctttttattctccgtttttttcgtttgtttcttccgtttcgttcgtgtaattctgggtatttannnnnnnnnnnnnnnnnnnnnnnnnnnnnnnnnnnnnnnnnnnnnnnnnnnnnnnnnnnatcttatttattt

SEQ ID NO: 7159 - DNA, 366 bp, Homo sapiens
  SIMILAR (3)..(338): 331254mologous to Homo sapiens p40,accession number U93570,Smith-Waterman Score=199.
  misc_feature (1)...(366): n = a,t,c or g
cggacgcgtgggaaaaaaaaatctgtgaaactgaagactggctatttgaaattattcatcagaggattnnnnnnnnnngaatgaaaagaaataaagaaagcctacaggatgtataaaacaccatcaagagaactaatataaggattattggagtcataaaggagaagagagaaaagggtagaaaacttatttaagaaataatggctgaaaactctccaaatctaggaaaagatatgagcatccaggtatatgaagctcaaagatccccatacaggatacattccaaaaagacttcaccaaaacacatgataatcaaactgtcaaaagcaaaatcaagacgatgaataaaccaccaatcactaagag

SEQ ID NO: 7160 - DNA, 320 bp, Homo sapiens
  SIMILAR (6)..(233): 931254mologous to Homo sapiens Human transport protein TPPT- 33,accession number AAB60113,Smith-Waterman Score=377.
cgcacatggtggcaggcgccgtggcagggatcctggagcactgcgtgatgtaccccatcgactgcgtcaagacccggatgcagagtctacagcctgacccagctgcccgctatcgcaatgtgttggaggccctctggaggattataagaacggagggcctatggaggcccatgagggggctgaacgtctcagcatcatgcgcagggtctgcctacgctctttattttgcttgttccgattagttatttctatgtcgtgtgatgttaccatcctggcgtctcttatctgtgtcgtctatgtggtttctggctgttttcctt

SEQ ID NO: 7161 - DNA, 355 bp, Homo sapiens
  SIMILAR (1)..(354): 891254mologous to Homo sapiens unknown,accession number AF119045,Smith-Waterman Score=545.
agtggcctcaggacggaggaaaaacctcctttccaaagtgactggtctggaagttccagagggaagtacaccagatcgtccctgctcagggagacagagtctaaatcctccagttacaagttttccaaatcccagtcagaggaacaggacacctcctcctaccacgaggcaaatggcaactctgtaagaagcacttcacggatctcatcttcctccaccagggagggcagagagatgcacaagttctccaggtccacgtacaacgagacctcaagtttccgacaggagagcccagagccctacttcttacgtcggaccccataggccttagaaggggaccaaggccctaaacctg

SEQ ID NO: 7162 - DNA, 356 bp, Homo sapiens
  SIMILAR (249)..(347): 811254mologous to Homo sapiens Human secreted protein sequence encoded by gene 35 SEQ ID NO:94,accession number AAB75540,Smith-Waterman Score=142.
  misc_feature (1)...(356): n = a,t,c or g
cgaagccggagcgcatacttgaatcacaatgaataaacagcgcctgttaaaagaaactgtggacgacacagtagaagtgagcgatttcactgtaagcagatccaatgctcatgaggcatttaacacagcttttaccacgcttgctgcttgcgcggccagtatcggttaggtacttttgtacctatatctgactacatgcccctgctagtgtaaaaccaagagacagaataatatgctacaccaaagcaatgccaattcatcgattctcagacctggccccgctagtgatgcctccgctgatgaacggaatgcatgtgcacgtaaaagagcggtgcttttggaacccctgaaggatn

SEQ ID NO: 7163 - DNA, 264 bp, Homo sapiens
  SIMILAR (87)..(212): 801254mologous to Mus musculus putative,accession number AK013512,Smith-Waterman Score=188.
cggagtgttggtacacaaggcacatgcccccacacccagcacagtgtttcttttataattatgcctggaatttgtatttcttcccatacagataccttcacttgctggatggaaatgaaaattacccgtgtcttgtggatgcagacggtgatgtgatttccttcccaccaataaccaacagtgagaagacaaaggtagggtggcatgtgtgtgaacatggtgtgtcttctaggctgttccctgtagaattaacacaagtctgcg

SEQ ID NO: 7164 - DNA, 3101 bp, Homo sapiens
  SIMILAR (87)..(926): 1001254mologous to Homo sapiens XRCC2,accession number Y08837,Smith-Waterman Score=1463.
tttgactggccgtagagtctgcgcagttggtgaatggcgttggtggcgggaaagttgagtctctcctgcgccgagccttcggggcgatgtgtagtgccttccatagggctgagtctgggaccgagctccttgcccgacttgaaggtagaagttccttgaaagaaatagaaccaaatctgtttgctgatgaagattcacctgtgcatggtgatattcttgaatttcatggcccagaaggaacaggaaaaacagaaatgctttatcacctaacagcacgatgtatacttcccaaatcagaaggtggcctggaagtagaagtcttatttattgatacagattaccactttgatatgctccggctagttacaattcttgagcacagactatcccaaagctctgaagaaataatcaaatactgcctgggaagattttttttggtgtactgcagtagtagcacccacttacttcttacactttactcactagaaagtatgttttgtagtcacccatctctctgccttttgattttggatagcctgtcagctttttactggatagaccgcgtcaatggaggagaaagtgtgaacttacaggagtctactctgaggaaatgttctcagtgcttagagaagcttgtaaatgactatcgcctggttctttttgcaacgacacaaactataatgcagaaagcctcgagctcatcagaagaaccttctcatgcctctcgacgactgtgtgatgtggacatagactacagaccttatctctgtaaggcatggcagcaactggtgaagcacaggatgtttttctccaaacaagatgattctcaaagcagcaaccaattttcattagtttcacgttgtttaaaaagtaacagtttaaaaaaacatttttttattattggagaaagtggggttgaattttgttgatatacatcataaaatagtcttttgcagggtactacgcaagccttaaaatttttcttaagacagagtcttgctctgtctcccaggctggagtgcagtggcacaatcatggctcactgcagccttgaactcctggcctcaagggatcctcctatgtgtgcctcctagagtgcagggattacaggcgtgagccactgctcgtggccaaaagttttctttttttttttttttctttttgaaacagtcttactctgtctcccaggctgctggagtgcagtggcacaatctcggcccgctgcagcctctgcctcttgggttcaagtgattcttccacctcagcctcccaggtagctgggattacaggcacccaccaccacgcctggctaatttttgtatttttaatagagacggggtttcaccatgttggccaggctggtctcgaactcctgacctcaagtgatccacccacctcggcctcccaaagtgctaggattacaggcccgtgcccagccctaaagttttaaactctaggggaattaacagtatttctttacagaatggatttgttaaactagcacagtaaaagtaaagactattctgtttctaggctgttgaatcaaagtgattttagcaattaaactttgtattaatttaccaccaatatttcttcacaaaggaacttttaaaagattatctcagaaagtaaatctgagaggtaagaagtaataatgagtaaatggtaagtacttgagtaaatctaaagaaatattgatagtaaggcaatcctaagcaaaaagaacaaagctggaggcatcacgctacccagcttcaaactatactacaaggctacagtaaccaaaacagcatagtactggcacaaaaacacacgtagactgatggaacagaatagagaatttagaaatgagaccacacacctataatttttttgatcttcgatgaacctgacaaaaacaagcaatgggcaatggattctctattcaataaatcgtgctgggataactggccagccatatggaaaagattgaaaatggacgccttccttatgccatatacaaaaattaactcaagatggattaaagacttaatgtaaaacccaaaacagtaaaaatcctggaagacaacccaggcagtaccattcaggacataggcacaggcaaagatttcatgacgaagacgccaaaaacaattgcaacagaagcaaaaattcacaaatgggatctaattaaactaaagagctgcacagcaaaagaaactatcaagagagtaaacagacagcttacagaatgggagaaaattgttgcaaactatgcatctgagaaaggtctgaaatccagcatctatacgtaatttaaacaaatttagaagaaaaaaccaccccattaaaaagtgggcaaaggacatgaacagacacttttcaaaagaagacatctgtggccaacaatcctatggaaaaaagcccagcatcactgatcattagagaaatgcaaatcgaaacaacaacgagataccatctcacaccagtccaaatggctattataaaaatgtcagaaaataacagatgctggtgaggttgtggagaaaaagatatgcttatacactgttggtggaaatgtaaattaaattagttcagccattgtggaagacagtgtggggataaagacagagataccattcaacccagcaatctcattactgggtatatacccaaaggaatagaaatcattgttataaagacacatgcacgcgtatgttcgttgcagcactgcccatcagtgacagactggattaaaaaaatgtggtacatacacaccagggaatactatacagccataaaaaggaacaagactgactgggcgtggtggctcacacctgtaatcccagcactttgggaggccgaggtgggtggatcacctgaggtcaggagttcgagaccagcctgaccaacatggtgaaaccctgtctctactgaaaatacaaaaaattagctgggcgtggtggtgcatgccgataatcccagctactcgggaaggctgaggcaggagaatcacttgaaccagggaggcggaggttgcagtgagccaagatcgcatcattgcatttcagcctggacaacaagagcgaaactccatcaaataaataaacactaatagccag

SEQ ID NO: 7165 - DNA, 386 bp, Homo sapiens
  SIMILAR (340)..(384): 531254mologous to Mus musculus putative,accession number AK013512,Smith-Waterman Score=42.
ctagaacaaatgttgcagttgctgatgtctacatttgataactgttcttttctgaaatgtttttttcttttaaggttaagaaaacgacttctgatttgtttttgaaagtaacaagtgccaccagtctgcagatttgcaaggatgtcatggatgccctcattctggtgagtgtggggtggctcctcctgagaaacgcttttgagcgtgagtggtgctctgctccttgacttcccacccgtcctgcttgcctcttttttgcttactgtgttggcagacagcagcatgtcttccctgggtcacctctcatctccaggttaaaaaggtattttttatttgcagaaaatggcagaaatgaaaaagtgctctttagaagataaagaggaagg

SEQ ID NO: 7166 - DNA, 771 bp, Homo sapiens
  SIMILAR (1)..(507): 731254mologous to Mus musculus putative,accession number AK013512,Smith-Waterman Score=589.
ctgcagctggaggccgaggagcagaggaagcagaagaagcggcagagtgtgtcgggcctgcacagataccttcacttgctggatggaaatgaaaattacccgtgtcttgtggatgcagacggtgatgtgatttccttcccaccaataaccaacagtgagaagacaaaggttaagaaaacgacttctgatttgtttttggaagtaacaagtgccaccagtctgcagatttgcaaggatgtcatggatgccctcattctgaaaatggcagaaatgaaaaagtacactttagaaaataaagaggaaggatcactctcagatactgaagccgatgcagtctctggacaacttccagatcccacaacgaatcccagtgctggaaaggacgggccctcccttctggtggtggagcaggtccgggtggtgggatctggaagggagcctgaaggtggtgtacccgtccaagggccgacctgggccactgcccctccccacgtgactgtcgtgcgctgacgccaggggccgcctgtccgcgtttgtttgggccggttttgcggaggtttctatgcgggcaatgctgaaattatccgttagattttcaccccagtttttttgttggttttttttttttgagatggagtctcgctctgtcgccaggctggagtgcagtggcgtgatctcgaatcacttgaacccaggaggcagaggttgcagtgagctgagatcacgtcattgcactccatcctgagccacaagagcaaaactccgtcttca

SEQ ID NO: 7167 - DNA, 340 bp, Homo sapiens
  SIMILAR (51)..(323): 831254mologous to Homo sapiens dJ579N16.3 (novel protein similar to worm, Arabidopsis and pine proteins),accession number AL096767,Smith-Waterman Score=395.
gcacgcgagcgtaactaactctcaggatctaagctaccaaacctgcataacctattttggtttacagacctgatgtggacccataggtggccaaagactatgccagcttccggaactacacgtaaggtcccctcctggaccgtgtcttcaccacctactagctcatgcacactcaccagacagtggacttcattaggagcaggcatgcccagtttgggggcttctcctacgggaaaatgacagtcatggaggtcgaggacctgctggatgggctgatggatgagtcggacccggacttaaatttcctcaaatccttccatgcctaaaagatagcgtatgg

SEQ ID NO: 7168 - DNA, 1352 bp, Homo sapiens
  SIMILAR (419)..(1342): 531254mologous to Homo sapiens DNA binding protein,accession number M27878,Smith-Waterman Score=927.
atggcctttataagaaagaaccagactgacttaatagagctgaaaaatgctctacaagaatttcataatgcaatcacaagaattaaccgcactgtgggaggccaaggtccatccggcgatgctgggtctggacgagctcgggaggagtggttgtggccattgcacacaggcggatctgaggttcggcgacgccgctggtcgcgacccgggacaggacaacgacaggaacaccgccgagcccgcgttcccccccccgcccagagtcatggcggcagcagccgctctgagggcgcctgctcagagcagtgtgacctttgaagacgtggctgtaaacttttccctggaggaatggagtcttcttaatgaggctcagggatgcctgtaccatgatgtgatgctggagaccttgacacttatatcctccctgggtaagcgtcagacacttcacactagagaaaggccttatgagtgtattgaatgtgggaaagcctttgctgaaaagtccagtctcattaaccacaggaaagttcactctggagcaaagcgttatgaatgcaatgaatgtgggaagtcctttgcttatacatctagtctcattaaacacaggaggattcacactggagagaggccttatgagtgcagtgaatgtgggagatcctttgctgaaaactccagtcttattaaacacttgagagttcacacaggagaaaggccttatgaatgcgttgagtgtggaaaatcatttcgccgaagctcttcactcttgcagcatcagagagttcacactagagaaaggccttatgaatgtagtgaatgtgggaaatcctttagcttaaggtccaacctcattcaccatcagcgagttcatactggagaaaggcatgagtgcgggcagtgtgggaaatcctttagccgaaaatctagccttattatacatctgagagttcacactggagaaaggccttatgagtgcagtgactgtgggaaatcctttgctgaaaactccagccttattaaacacttgagagttcacactggagaaaggccatatgaatgcattgattgtggaaaatcatttcgccacagttcttcgttccgtcgccatcagagagttcatactggaatgaggccttataagtgaagcaaattttggaaattctcttgcccaggctttttgctccttcaaggccagagagttcacaccggatcaaggtgttatgagtgtgacaaatggggaatattctttagctagaatgctagcttctttacataaaagagtgctcccactgaagaagtgccttttgagtgcaatgaatgtgagaaagccttcagccctctctcattggttacca

SEQ ID NO: 7169 - DNA, 353 bp, Homo sapiens
  SIMILAR (2)..(343): 411254mologous to Mycobacterium bovis BCG C-5 sterol desaturase,accession number AF283500,Smith-Waterman Score=243.
caatcttctttaccaattttggatccatacagaggtcatcaataaccttggtcctttggaactgattcttaatactcgtagccatcatagggttcatgatggcagaaatcgttattgcatagacaaaaattatgctggtgttcttattatttgggataaaagttttgggacatttgaagcagaaaatgaaaaagttgtatatggcttaacacatcccattaatacatttgaaccaatcaaagtgcagttccatcacttattttccatatggactacattctgggccacacctggattcttcaataagttttctgtcatatttaagggaccgtgatggggtccaggtaaaccag

SEQ ID NO: 7170 - DNA, 386 bp, Homo sapiens
  SIMILAR (3)..(368): 811254mologous to Homo sapiens cadherin-6,accession number D31784,Smith-Waterman Score=487.
tgactgtccgggtctgtgcatgtgaccaccatgggaacatgcaatcctgccacgcggaggcgctcatccaccccgcgggactgagcacgggggctctggttgccatccttctgtgcatcgtgatcctactagagacagtggtgctgtttgcagctctgaggcggcagcgaaaaaaagagcctttgatcatttccaaagaggacatcatagataacattgtcagatacaacgacgaaggtggcggtgaggaggacacccaggctattgatatccgcaccctgatgaatcctgtacccatctaggacacccatctacgacgttgctttgcgccctgaacctcattatactatcaccgagcgactcctacacgatcgtgttaccacccg

SEQ ID NO: 7171 - DNA, 358 bp, Homo sapiens
  misc_feature (1)...(358): n = a,t,c or g
cccacgcgtccgtattttcctgtggacgccggggaagcacagcaccacccccgcacctgccgtcggcctttgagagctttgtggtcttcccatcatgaacgctggaaagtgacattgtgtacacactgcagcttgggggnnnnnnnnnngtattgctgcacatattatatttttgtactgtttattccatagtcctcatgtggtcttactttgatttttattacttgtattattctctttggttctatctcgttctttcttttctttaccattgttttttctataattatagtaactacttttaagtttagactgttgtattctatcatttttctttcgtatttattatgttagttat

SEQ ID NO: 7172 - DNA, 265 bp, Homo sapiens
  SIMILAR (2)..(124): 901254mologous to Homo sapiens cytochrome c oxidase subunit 3,accession number D38112,Smith-Waterman Score=179.
agtaaaacccagcccatgacccctaacaggggccctctcagccctcctaatgacctccggcctagccatgtgatttcacttccactccataacgctcctcatactaggcctactaaccaacacaccacctgtccaaaaaggccttcgatacgggataatcctatttattacctcagaggttttttcttcgcaggatttttctgagccttttacactccagcctaggcctacccccaattaggagggactgcccaacaggataccg

SEQ ID NO: 7173 - DNA, 789 bp, Homo sapiens
  SIMILAR (16)..(147): 591254mologous to Thunnus obesus cytochrome oxidase III,accession number AF260430,Smith-Waterman Score=135.
ggaattcggcacgaggcctatcatatagtaaaacccagcccatgacccctaacaggggccctctcagccctcctaatgacctccggcctagccatgtgatttcacttccatctcaaaaaaaaaaaaaaaatcggctcatcttttattgctgttggttgagatgaatctactgatgaagaaaactgtactttgcttacattcagaataaggctttcaaaactgtgggtgtgctgttttcgtgagccttctacttgaccaccaaagacagtatttttgcagctgtatcaaatgaaccgagttggaggaaattgtataggagtatatcttaatggcactacagcaaactgtgttaaatttgggtttttggcaaagattgaagaaaaactgggattcaaaatgtactgcagctgtcaccaccaagcatgaactttcactgattacccataacctactggaaatcttcagccttgctgtcagcataggaccactgtggggaaacagtacattcccattcccagtttgcccctgctttttgaagatctaaatgccattccatgttttctgttacatattgaagtttcttggttgccaaagaaaaacggattctgctgaacttgtggacagaacaaccccaaggttggaagaacaatgaaaaataatctatacttgaacatttcaaaagttaaaattttcaacagagttttaacacactgaagcttaaaatacattgacactgaaatgtcaatggggcaaacaccaatttcgccgttccattatggaaatacatca

SEQ ID NO: 7174 - DNA, 1313 bp, Homo sapiens
  SIMILAR (2)..(391): 901254mologous to Homo sapiens Human secreted protein BLAST search protein SEQ ID NO: 126,accession number AAB45452,Smith- Waterman Score=555.
cggactcctgcctcactcatttacaccaaccacccaactatctataaacctagccatggccatccccttatgagcgggcgcagtgattataggctttcgctctaagattaaaaatgccctagcccacttcttaccacaaggcacacctacaccccttatccccatactagttattatcgaaaccatcagcctactcattcaaccaatagccctggccgtacgcctaaccgctaacattactgcaggccacctactcatgcacctaattggaagcgccaccctagcaatatcaaccattaaccttccctctacacttatcatcttcacaattctaattctactgactatcctaagaaatcgctgtcgccttaatccaagccttacgttttcacacttctagtaagcctctacctgcacgacaacacataatggacccaccaatcacatgcctatcattatagtaaaacccagcccactgaccccataacagggctccatctcagccctcctaatgacctccggcctaagccatgtggatttcacttccaactccataacgctccctcatactagggcctactawaccaacacactaaaccatataccaatgatggcgcggatgttaacacgcagaaaagcacataccaagggccaccacacacgcacctgttcaaaaaaggcctttcgatacggggataaatcttatttatttacctcaggaagttttttttcttcgcaaggatttattcttgagccctttttaccacttcaagcctaggccccctaaccccccaatttaggaggggcacttggcccccatacagggcattcaccccggtgaaatccccctaggaagttcccacttccttaaacacatccggtattactcggcattcagggaggtattcaattcaccttgaggctcaccataggtctaattggaaaacaaccgaaaaccaaataattcaaagcactgcttatttacaattttactgggtcctctattttaccctcctaaaaggcctcagggtacttcgggtctcccttcaaccattttcggagggatctacggctcaacatttttttgtagccacagggcttccacgggacttcacgtcattattggctcaacttttcctcactatcttgtgcaatccgccaactaatattttcacttttacattccaaacatcactttgggcttcgaagccgccggcctgatactggcatattgtagcacgtggtctggaccatctactgtacgtcttcattctagtgactgatgggtcttaaaaaaaaaaaaaaaaaaaagc

SEQ ID NO: 7175 - DNA, 710 bp, Homo sapiens
tttttttttttttaaggcagtcagaatacacgtttattgattaagtacaccagtcttgtataggcagagttattggcaccctatagtacaacaccaacatcaaatatcactgatcacagatcaccataacagttatttattaatgaaaaagtttgaaatattatgtgaattaccaaatgagacatagagataaaaagtgagcacatgctgttggaaaaaaatggcactgatagacttccttgatacagggttgtcacaaaccttcaatttgtaaaaaactcaatacctacaaagagcaataaagcgaagtacaataaagtgtgcctgtaatatgaatgtacaaaatatagtagtttttgagatcttttttggttattttattattcattttaacttattataaaatattttgaacataagaagtagagaaaatagtataccaaatcctcatttattcatcacccacatccagtccttatttttaaaattttgttaatagacatataacaattatatgcatttatggggtatatgtcatattttgagacaattatgcaaggtgtaatgatcaaaccagggtatttaggatagctctcacctcagtcatttatctttttcttgtgctaggaacattaaaaattttctcttctaaatggataaatttctggacacatacaccctcccaagactaaaccagaaagaggtcaaat

SEQ ID NO: 7176 - DNA, 785 bp, Homo sapiens
ttttttttttttgacttaaaacaacacatttgttatttcaagtttctgtgggtcaggaatccaggtgtggtttagccaagtcttctggctcaaagtctcttacaagggtaaaagtaaggggtcagccaaggctctggtgtcatctgaaggctcaactggggaaggatttgcttctaagttccctcacatggctgctggcagcatgtggttcctcaccagttgttggactgtgggcctcagctcctggcttgctgttggccagccaccaccctcggttctctgccacatgggttttccataaggtggctcacaacacagcagctggtttcatgagcacaggaaagcaagagggttagagagacaaaattacagcaaaacagaaattcgcctcttataacctaatctcagaagtaacaacccatcattttttgccatattctatttatgagaagcaagtcactagatccagcccacacacaaaggaaagggattctccaagggggtgactatcagaaggtaaggatcattgggagccatttcagaagctgcctgccacagatgtcattgctttattttatgaaaataagcaccaaacacactacattcatctataaaataaagcttccctaaagacctataataaaaaagaccttaataatagaaagatatgccacgttcccggacagaagcactcaatggtgcaaagaagttgattatcactaaattaatctacaaaactaaaacaattgcaatgtccagtgggatttgtctgctagtttatctcg

SEQ ID NO: 7177 - DNA, 355 bp, Homo sapiens
ctggacagggacacttggagtcacttcatgatgctggttatgtctaagattgaccaagagtgtgaaagtccatgacagatgggcacatacagactgtgactaacatcagacagctgccagcccgtactctctatacccactggccacgtgagttttctccttaatccccgccgctagagagaatgcatacacgaggggccaggagggaagccagacagaaagctcctaggattagggataagaggaggggaaaaagcagagtccactgtttaggagaggagttggccaacggtggcgggtgggatagaataaggtgggggaaaggggagaggcaaggtgacagcggacgcgtggg

SEQ ID NO: 7178 - DNA, 358 bp, Homo sapiens
cccacgcgtccgcccacgcgtccgggcaaggtgatgaccagctggagagagatcacgaaaactgagacagatttgtcaggcaagttgtagggatcaacaactatagaatatctgaagagtcaggtcatccatataatatatttggaaaaatatttcatgactgtgcagacctagatacttcggaacactgactgtgtaagtgtgattcatttgataagaccttgaaacctactattaacctagtgagttataataggaattttgcatgaacaaacattgatgagaattttagatgtgggaaatcacctagctacagttcttgctattctaagcatgaagaacttcataatggaatgat

SEQ ID NO: 7179 - DNA, 413 bp, Homo sapiens
  misc_feature (1)...(413): n = a,t,c or g
ttttttttttttttttttccccagggccgccgcctttattcacagaccctcgagctccacagccacacagacacttagctttcaaagggcacaggaaggaaaagggacctggggaccctcccagcacaccccaaagccaaaacagacccagcagcagcacctcagggtcagcctggggtaggtgtgagaagctccccancgtgtccaggccacgggagcagcaagggtctgcggggagcccaggctggatgggggggggctgcccttgtcctgtatcctgaccacttaaaggacaaaaccagcccagtcccagcagcctgggaggcagcaaaggctccttcttctcccctcctgatcctgcagtggccaggggcaggagggtgaggggagaggaaagaggtcaggtcagggaa

SEQ ID NO: 7180 - DNA, 902 bp, Homo sapiens
ctgaagcgccggagcactcaggatgccaacaagtcctagagcgcccggtgcccctccccggcctccggaagatcaaggtgcgaggtgtcggttccctcctgtcctgtggtcctgcccctgggatgggggtgccttgctccagcgggctgcagatcccagcactggcgtgactgacggctgaggcctgcctctccttcccaagcccccttccttcatccttgggggtctcaggctgcccccatcatgggggtctgggccctgcccacccttctgccctcccccagccacctggctgcatttttgaagctgcctggcccccacgggccctgacctgacctctctcctctcccctcacgcctcctgcccctggccactgcaggatcaggaggggagaagaaggagcctctgctgccttcccaggctgcttgggaactgggctggttttgtcctttgaagatgatcatcgactacaggactaggggcaagcccacacccaatcccagcctggggcttccccgcagaccctttgctgcttccgtggcctgggacacgctggggagcttctcacacctacccctaccgtccagcctggccttttccctgaatcagcttcaaaatggccccagctctttgggcctaggatactgccgggccccccaaaggggtccccaacaaccaaggcctggcctcctggtgtctgcggtcaacagttgcccctggtcaaggggcacccaggctgaccctgaggtgctgctgctgggtctgtcttggctctggggtgtgctgggagggtccccaggtcccttttccttcctgtgccctctgaaagctaagtgtctgtgtggctgtggagctcgagggtctgtgaataaaggcggcggccctgggaaaaaaaaaaaaaa

SEQ ID NO: 7181 - DNA, 387 bp, Homo sapiens
  misc_feature (1)...(387): n = a,t,c or g
aaatatgtataattagagttttctaatttcactgttttatctctaacttttgagtggcaaacagatcaagtcttttgctcatagacttttctgtggggttattaaaatgcaaaagctttattttttttaataatgccatactccattattgtctgatgatggtatgcgaatatgattcattatttctatcttacatgtttttgctcatctttttctatttctattatatttttatctatcttcttttcattcatccatactnnnnnnnnnnnnnnnnnnnnnnnnnnnnnnnnnnnnnnnnnnnnnnnnnnnnnnnnnnnnnnnnnnnnnnnnnnnnnnnccatttctttcttctcaatttcttctctctatttttctcttgttttc

SEQ ID NO: 7182 - DNA, 354 bp, Homo sapiens
  misc_feature (1)...(354): n = a,t,c or g
cttgctcactgcaagctccannnnnnnnnnnnnnnnnnnnnnnnnnnnnnnnnnnnnnnnnnnnnnnnnnnnnnnnnnnnnnnnnnnnngtgtgcttaattctatataaagcgggaaccaggggaaatcttatgctaacgtgtaccggctactgtacctggaccccattcccaaaatttatgcggaggcatacactccataaaatgttaactccacaaatttggagacaaagagccccaagacgattcaaaaatttccggaggatagggagttcaagaacgatttttttgaaaaaacaaagaatggggacagagaaactggggcttttcacccctttcttttatttctggtaan

SEQ ID NO: 7183 - DNA, 2983 bp, Homo sapiens
  SIMILAR (1684)..(2847): 991254mologous to Homo sapiens ASR2A,accession number AF312032,Smith-Waterman Score=2076.
ggggtgacgcaggcgcagcgcgggctgcgcgcgctactgcccatccccggttgtcccacttttgttcgcctctcttcggtcctctactcaagagctccgtctccgtctcgccctcctcgaagtcctcgtcgcgcgcccgcgacccaggtcgccctgaaatctagcccgtccgagcgcgagtccaacggccgcggccgcaccaaggccccctcagaccgtgccatgggtgacagtgatgacgagtacgatcgaaggcgcagggacaagttcagaagagagcgcagcgactacgaccgttcccgcgagagagatgaaagacgtcgaggggacgattggaatgacagagagtgggaccgtggccgtgagcgccgtagtcggggtgaatatcgggactatgaccggaatcggcgagagcgcttctcgccacctcgccacgaactcagcccgccacagaagcgcatgaggagagactgggatgagcacagctctgacccataccacagtggctatgagatgccctatgctgggggggggtgggggcccaacttatggcccccctcagccctggggccaccctgacgtccacatcatgcagcaccatgtcctgcctatccaggccaggctgggcagcattgcagagattgacctgggtgtgccgccgcccgtgatgaagaccttcaaggagtttctcctctccctggatgactcggtggatgagacggaggccgtcaagcgctataatgactacaagctggatttccggaggcaacagatgcaggatttcttcctggcgcacaaagatgaggagtggtttcggtctaagtaccacccagatgaggtggggaagcgtcggcaggaggcccggggggccctgcaaaaccgactgagggtcttcctgtccctcatggagactggctggtttgataaccttctcctggacatagacaaagctgatgccattgtcaagatgctggatgcagccgtgattaagatggaaggaggcacggagaatgatctccgcatcctggagcaggaggaggaggaggagcaggcaggaaagcctggggagcccagcaagaaagaagaaggacgggctggagcaggcctaggggacggggagcgcaaaaccaacgacaaggatgagaagaaggaagacggcaagcaggctgagaatgacagttctaatgatgacaaaacaaagaagtcggagggtgatggggacaaggaagagaagaaagaagactccgagaaggaagccaaaaagagtagcaagaagcggaaccggaagcacagtggtgacgacagctttgacgagggcagcgtgtcagagtctgagtcggagtcagagagcggccaggctgaggaggagaaggaggaggccgaagcgctcaaggagaaggagaagcccaaggaagaagaatgggagaagcccaaggacgccgcggggctggagtgcaagccgcggccgctgcataagacctgctccctcttcatgcgcaacatcgcgcccaacatctcccgggccgagatcatctccctttgtaaaaggtacccaggctttatgcgggtggcgctctcagagccccagccagagaggaggtttttccgtcgtggctgggtgaccttcgaccgcagtgttaacattaaagagatctgttggaacctgcagaacatccgtctccggagtgtgagctgagccctggtgtgaactgggacctgacccggcgcgttcgcaacatcaacggcatcacccagcacaagcagattgtgcgcaacgacatcaagctggcggccaagctgatccacacgctggatgacaggacacagctttgggcctcagaaccagggacgcctcccctgcccacgagcctgccctcgcaaaacccgatcttgaagaatatcaccgactacctgatcgaggaagtaagcgccgaggaggaggagctgctggggagcagcgggggcgctcctcctgaggagcctcctaaggaagggaacccggcagagatcaacgtggagcgggatgagaagttgattaaggtcttggacaagctcctcctttacctgcgcatcgtgcattccttggattattacaacacctgtgagtaccccaacgaggacgagatgcccaatcgctgtgggatcatccacgttcgggggcccatgccacccaaccgcatcagtcacggggaagtgctggagtggcagaagacttttgaggagaagctcacgccgttgctgagtgtgcgggagtcactctcagaggaagaggcccagaagatggggcgcaaagacccagagcaggaagtggagaagttcgtcacctccaacacgcaggaactgggcaaggataagtggctgtgtcctctcagtggcaagaaattcaagggtcctgagtttgcgcgcaaacatatcttcaacaagcatgcagagaaaattgaggaagtgagaaaggaagtcgcgttttttaacaacttcctcactgatgctaagcgcccagctctgcctgagatcaagccagcccagccacctggccccgcccagatactccccccaggtttgaccccaggactcccctacccacaccagactccccagggcctgatgccctatggtcagccccggcccccgatcttgggctatggagctggtgctgtccgccctgcagtccccacaggaggccctccatacccccatgccccgtatggtgctggtcgagggaactatgatgccttccgaggccagggaggctatcctgggaaacctcgcaacaggatggttcgtggagacccaagggccattgtggaatatcgggacctggatgccccagacgatgttgatttcttttgagccgtcccccgttcctcagtcctgtatcatccatacttgtactaccttgtcctatgaagctctgagaattttttgtacgatcagccttactgctaataaaagcacttccacagggaaaaaaaaaaaaaaaaaa

SEQ ID NO: 7184 - DNA, 3542 bp, Homo sapiens
  SIMILAR (2367)..(3539): 961254mologous to Homo sapiens ASR2A,accession number AF312032,Smith-Waterman Score=2022.
atgaagctttgcttgcccattgctcagctcctgctgtgtggcccagttcctaacaggccatggctggcggctgagggccctggtattacagcatcaggagctagagtaggaccgagcccgattcccaccttccaggtgcccctgagccagcctccagaggatgagctggataggctgacgaagaagctggttcacgacatgaaccacccgcccagcggggagtactttggccagtgtggtggctgcggagaagatgtggttggggatggggctggggttgtggcccttgatcgcgtctttcacgtgggctgctttgtatgttctacatgccgggcccagcttcgcggccagcatttctacgccgtggagaggagggcatattgcgagggctgctacgtggccaccctggagaaatgtgccacgtgctcccagcccatcctggaccggatcctgcgggctatggggaaggcctaccaccctggctgcttcacctgcgtggtgtgtcaccgcggcctcgacggcatccccttcacagtggatgctacgagccagatccactgcattgaggactttcacaggaagtttgccccaagatgctcagtgtgcggtggggccataatgcctgagccaggtcaggaggagactgtgagaattgttgctctggatcgaagttttcacattggctgttacaagtgcgaggagtgtgggctgctgctctcctctgagggcgagtgtcagggctgctacccgctggatgggcacatcttgtgcaaggcctgcagcgcctggcgcatccaggagctctcagccaccgccccctcagaccgtgccatgggtgacagtgatgacgagtacgatcgaaggcgcagggacaagttcagaagagagcgcagcgactacgaccgttcccgcgagagagatgaaagacgtcgaggggacgattggaatgacagagagtgggaccgtggccgtgagcgccgtagtcggggtgaatatcgggactatgaccggaatcggcgagagcgcttctcgccacctcgccacgaactcagcccgccacagaagcgcatgaggagagactgggatgagcacagctctgacccataccacagtggctatgagatgccctatgctgggggggggtgggggcccaacttatggcccccctcagccctggggccaccctgacgtccacatcatgcagcaccatgtcctgcctatccaggccaggctgggcagcattgcagagattgacctgggtgtgccgccgcccgtgatgaagaccttcaaggagtttctcctctccctggatgactcggtggatgagacggaggccgtcaagcgctataatgactacaagctggatttccggaggcaacagatgcaggatttcttcctggcgcacaaagatgaggagtggtttcggtctaagtaccacccagatgaggtggggaagcgtcggcaggaggcccggggggccctggcaaaaccgactgagggtcttcctgtccctcatggagactggctggtttgataaccttctcctggacatagacaaagctgatgccattgtcaagatgctggatgcagccgtgattaagatggaaggaggcacggagaatgatctccgcatcctggagcaggaggaggaggaggagcaggcaggaaagcctggggagcccagcaagaaagaagaaggacgggctggagcaggcctaggggacggggagcgcaaaaccaacgacaaggatgagaagaaggaagacggcaagcaggctgagaatgacagttctaatgatgacaaaacaaagaagtcggagggtgatggggacaaggaagagaagaaagaagactccgagaaggaagccaaaaagagtagcaagaagcggaaccggaagcacagtggtgacgacagctttgacgagggcagcgtgtcagagtctgagtcggagtcagagagcggccaggctgaggaggagaaggaggaggccgaagaagcgctcaaggagaaggagaagcccaaggaagaagaatgggagaagcccaaggacgccgcggggctggagtgcaagccgcggccgctgcataagacctgctccctcttcatgcgcaacatcgcgcccaacatctcccgggccgagatcatctccctttgtaaaaggtacccaggctttatgcgggtggcgctctcagagccccagccagagaggaggtttttccgtcgtggctgggtgaccttcgaccgcagtgttaacattaaagagatctgttggaacctgcagaacatccgtggagctcgcagtctgatcaatcgctggtgctcaagagggaagggtcttagagctgctgtttctctggcaagcgggctccgggagtgtgagctgagccctggtgtgaacagggacctgacccggcgcgttcgcaacatcaacggcatcacccagcacaagcagattgtgcgcaacgacatcaagctggcggccaagctgatccacacgctggatgacaggacacagctttgggcctcagaaccagggacgcctcccctgcccacgagcctgccctcgcaaaacccgatcttgaagaatatcaccgactacctgatcgaggaagtaagcgccgaggaggaggagctgctggggagcagcgggggcgctcctcctgaggagcctcctaaggaagggaacccggcagagatcaacgtggagcgggatgagaagttgattaaggtcttggacaagctcctcctttacctgcgcatcgtgcattccttggattattacaacacctgtgagtaccccaacgaggacgagatgcccaatcgctgtgggatcatccacgttcgggggcccatgccacccaaccgcatcagtcacggggaagtgctggagtggcagaagacttttgaggagaagctcacgccgttgctgagtgtgcgggagtcactctcagaggaagaggcccagaagatggggcgcaaagacccagagcaggaagtggagaagttcgtcacctccaacacgcaggaactgggcaaggataagtggctgtgtcctctcagtggcaagaaattcaagggtcctgagtttgtgcgcaaacatatcttcaacaagcatgcagagaaaattgaggaagtgaaaaaggaagtcgcgttttttaacaacttcctcactgatgctaagcgcccagctctgcctgagatcaagccagcccagccacctggccccgcccagataattcatgtccctgtccgtgttgtactccccccaggtttgaccccaggactcccctacccacaccagactccccagggcctgatgccctatggtcagccccggcccccgatcttgggctatggagtccccacaggaggccctccatacccccatgccccgtatggtgctggtcgagggaactatgatgccttccgaggccagggaggttatcctgggaaacctcgcaacaggatggttcgtggagacccaagggccattgtggaatatcgggacctggatgccccagacgatgttgatttcttttga

SEQ ID NO: 7185 - DNA, 346 bp, Homo sapiens
  SIMILAR (190)..(333): 581254mologous to Allomyces macrogynus beta-tubulin 1,accession number AF162074,Smith-Waterman Score=132.
atggctgcctgtgacccccttcccacgtctccatttctttatgcctggctttgccctctcaccagccgtggaagccagcagtatcgagctctcacagtgccggaactcacccagcatgtccatgaaggaggtcgatgagcagatgcttaacgtgcagaacaagaacagcagctactttgtggaatggatcccaacaatgtcaagacagccgtctgtgacatccacctcgtggcctcaagatggcagtcaccttcattggcaatagcacagccattccaggagcttttcaagcgcatctcggagcagttcactgccatgttccgccggaaggcttcctccactcgta

SEQ ID NO: 7186 - DNA, 534 bp, Homo sapiens; identical to SEQ ID NO: 1
  SIMILAR (38)..(421): 1001254mologous to Homo sapiens alpha globin,accession number V00489,Smith-Waterman Score=657.

SEQ ID NO: 7187 - DNA, 1751 bp, Homo sapiens
  SIMILAR (145)..(1128): 701254mologous to Mus musculus putative,accession number AK011263,Smith-Waterman Score=1039.
  misc_feature (1)...(1751): n = a,t,c or g
ttcctgccgtcgcgtttgcacctcgctgctccagcctctggggcgcattccaaccttccagcctgcgacctgcggagaaaaaaaattacttattttcttgccccatacataccttgaggcgagcaaaaaaattaaattttaaccatgagggaaatcgtgcacatccaggctggtcagtgtggcaaccagatcggtgccaagttctgggaggtgatcagtgatgaacatggcatcgaccccaccggcacctaccacggggacagcgacctgcagctggaccgcatctctgtgtactacaatgaagccacaggtggcaaatatgttcctcgtgccatcctggtggatctagaacctgggaccatggactctgttcgctcaggtccttttggccagatctttagaccagacaactttgtatttggtcagtctggggcaggtaacaactgggccaaaggccactacacagagggcgccgagctggttgattctgtcctggatgtggtacggaaggaggcagagagctgtgactgcctgcagggcttccagctgacccactcactgggcgggggcacaggcctcntggaatgggcactctccattatcagcaagatccgagaagaataccctgatcgcatcatgaataccttcagtgtggtgccttgcacccaaagtgtgctgacaccgtggtcgagccctacaatgaccaccctctccgtaccatcagttggtagagaatacctgatgagacctattgcattgacaacgagggccctctatgatatctgcttccgcactctgaagctgaccacaccaaccttacggggatctgaaccaccttgtctcaggccaccatgagtggtgttcaccaccttgcctccgtttccctggtccagactcaatgctgacctccgcaagttggtcagttcaacatggtccccttcccacgtcttccatttctttatgcctgggtttgcccctcttcaccagcccgtggaaagccagcagtatcgaggctctcacaagtgccgggaactcacccagcaaggtctttcgatgccaaggaacattgatgggctgcctgtggacccccggccacgggccgatacctccaccgtggctgctggctttccgtggtcggatgtccatgaaggaggtcgatgagcagatgcttaaccgtgcagaacaagaactagcagcttactttgtgggaatggtttccccaacaatgttcaaggacagcctgtctgttcacatcccaacctcgtgggccttcaagatgggcagttcacctttcattgggcaataggcacagccattccagggagctctttcaaagcggcatcttcgggagcagtttcacttggccatgtttccgccggaaggcttttccttccactggttacacagggcgaggggcatgggacggagatgggagtttcaaccgagggttgagaggcaacattgaacgacctccgtctctgaagtatcaagcaattaccaaggatgccaacgcaagaagaggaggaggatttcggtgaggaggccgaagaggaggcctaaaggaagagcccccaatcaactcaaggcttctcagttcccttagccgtcttactcaactgccccctttcctctccctcagaatttgtgtttgctgcctctatcttgttttttgtttttttttttgggggggggtctagaacagtgcctggcacatagtaggcgctcaataaataattatttgttgaaaaaaa

SEQ ID NO: 7188 - DNA, 366 bp, Homo sapiens
  SIMILAR (11)..(256): 711254mologous to Mus musculus polydom protein,accession number AF206329,Smith-Waterman Score=337.
ggcacgaggtctctgtccacttggatatacaggcttaaagtgtgaaacagacatcgatgagtgcagcccactgccttgcctcaacaatggagtttgtaaagacctagttggggaattcatttgtgagtgcccatcaggttacacaggtcagcggtgtgaagaaaatataaatgagtgtagctccagtccttggttaaataaaggaatctgtgttgatggagtggtttgctattgctgcacatttgtgtaaggattttgtatttttaaattttcctgttcttcatgtcccctctatacgatttgacatgtgaatattatatattttacattttagttttatttatttaaatcttttacggtattcag

SEQ ID NO: 7189 - DNA, 345 bp, Homo sapiens
  SIMILAR (16)..(345): 771254mologous to Homo sapiens The KIAA0146 gene product is novel,accession number D63480,Smith-Waterman Score=404.
ggcacgagcggtactagccgcttcttatgagacgttcttcaaatgaatgattttgggacccgatggaggttctatgccacggtgatttaccaaaaaccacagctgaagagtctgctgattctggagtgaagggagacctgggtgctagggaccgatggaactttgcaaacgaaggaagagaaagaccccaggctccgcaaaactctgctggtctatgtggcccccttgttggtgctgggctctgatgtcctggaggccctctctggggctgcacctctcaggcttttcttgaaggacgctatccgtgaccaagctcggattggtcgtgctgaacgaactgtcctc

SEQ ID NO: 7190 - DNA, 351 bp, Homo sapiens
  SIMILAR (3)..(131): 971254mologous to Homo sapiens Unknown (protein for MGC:13275),accession number BC006300,Smith-Waterman Score=223.
cgtcagatccgcataccccagacgcctggaaaacagccttgctggccaacgtcggcaccatctctgccatccgctacttccgccggcaggtggggcaagggcgccgcagccacagccccagccccagctcctaggagccaggcccgggccagggagatgcaggatgaggagacgaccacaggcgcccagggcaggacgaggtgccgccctcgcccgggccctctgacccctctcttctaccgcgtccaggaggggggcgtgtcctggtgctgctccctccgactcacctgaggatccagccagtgaccacggccactccccacgcctgggagggaggtgctaaagtctggg

SEQ ID NO: 7191 - DNA, 338 bp, Homo sapiens
  SIMILAR (1)..(291): 881254mologous to Cricetulus griseus Phosphatidylglycerophosphate synthase,accession number AB016930,Smith-Waterman Score=438.
caaatcgatgagattgtcactgagaccctgttgactgaggcggagcgcggggcaaaggtctacctcaccactggctatttcaacctgacccaggcctacatggacctggtcttgggcactcgggctgagtaccagatcctgctggcctcaccagaggtgaatggcttctttggggccaagggggtggccggcgccatcccagcggcctatgtgcacatagagcgacagttcttcaatgatgagtgcagcctgtgacaatcaagagcggtgcagctttcggaatactggcgctgttctggaagatcactctctatggaatttgttcgacatgacatcgc

SEQ ID NO: 7192 - DNA, 361 bp, Homo sapiens
  SIMILAR (204)..(341): 951254mologous to Homo sapiens cell growth regulator CGR19,accession number U66469,Smith-Waterman Score=227.
aagcactcctcaagcattagaagatgctctgtggagtgaatgtctctatcaggaacagtatttgtatccttttatctgatatacccattagcactgaaaattagacttcttatggataaagggttgctaacttattgatcatttttggggtatttttgttcttatggttatagtggcaatttacctttacattttcaaaaagtattaaaaaggatagcaaagaagaaatatattgccagctaccaagagatactaaaattgaagactttgggacaggacccagatctcgctatccattggtagcgctattgaccttatctgatgaggatgaccgggaaattatgtattatttccatggggg

SEQ ID NO: 7193 - DNA, 1259 bp, Homo sapiens
  SIMILAR (743)..(1258): 971254mologous to Homo sapiens cell growth regulator CGR19,accession number U66469,Smith-Waterman Score=880.
gttcgttgccgtccggtccggaattcccgggtcgacccacgcgtccggatggctgcggtgtttctggtaacgctttatgaatactcgccgcttttctacatcgcggtggtctttacctgcttcatcgtgaccaccggcctggtattgggatggtttggttgggatgttccagtaattctgagaaattcagaagagacccagttcagcacaagagttttcaaaaagcaaatgagacaagtcaagaatccttttggcttagagatcactaatccatcttcagcttcaattacaactggcataaccttgacaacagattgccttgaagatagcctccttacatgctactgggggtgcagtgttcaaaaattatatgaagctctgcagaagcatgtttattgcttcagaataagcactccccaagcattagaagatgctctgtatagtgaatatctctatcaggaacagtatttgtatcctttcgtctgatatacccattagcactgaaaattagacttcttatggataaagtgttgctaacttattgatcattcttggtatactagaagcatgtttattgcttcagaataagcactccccatgcattagaacatgctctgtataccgaatatctgtatcaggaacaggatttgcatgctttcgtctgatatacccattagcactgataattagacttcttatggataaagtgccgctaacttattgatcattcttgggatactagaagcatgtttattgcttcagaataagcactcctcaagcattagaagatgctctgtggagtgaatatctctatcaggaacagcattttattaaaaaggatagcaaagaagaaatatattgtcagttaccaagagatactaacattgatgactttggtacagtacccagatctcgctatccattggtagcgctattgaccttatctgatgaggatgaccgggaaatttatgatattatttccatggtgtcagtgattcatattcctgataggacttataaactatcctgcagaatattgtatcaatatttactcttggctcaaggtcaatttcatgatcttaagcaacttttcatgtctgcaaataataatttcactccctccaacaattcctcttcagaagaaaaaaacacagacagaagtttgttggaaaaggtgggactctctgaaagtgaagttgagccatcggaagagaacagcaaggactgtgttgtttgccagaatgggactgtgaactggg

SEQ ID NO: 7194 - DNA, 387 bp, Homo sapiens
  SIMILAR (166)..(384): 1001254mologous to Homo sapiens inducible membrane protein,accession number X53795,Smith-Waterman Score=362.
gcctgccgagtccgcggcgttccccggctgcagccgggagggggccgaggagtgactgagccccgggctgtgcagtccgacgccgactgaggcacgagcgggtgacgctgggcctgcagcgcggagcagaaagcagaacccgcaggaagctccaggactggcgggatgggctcagcctgtatcaaagtcaccaaatactttctcttcctcttcaacttgatcttctttatcctgggcgcagtgatcctgggcttcggggtgtggatcctggccgacaagagcagtttcatctctgtcctgcaaacctcctccagctcgcttaggatgggggcctatgtcttcatcggcgtgggggcagtcactatgctcatgggcttcctgggctgg

SEQ ID NO: 7195 - DNA, 766 bp, Homo sapiens
  SIMILAR (197)..(766): 1001254mologous to Homo sapiens inducible membrane protein,accession number X53795,Smith-Waterman Score=988.
tgcggtggaattcgggctgtgcagtccgacgccgactgaggcacgagcgggtgacgctgggcctgcagcgcggagcagaaagcagaacccgcagagtcctccgtgctgctgtgtggacgacacgtgggcacaggcagaagtgggccctgtgaccagctgcactggtttcgtggaaggaagctccaggactggcgggatgggctcagcctgtatcaaagtcaccaaatactttctcttcctcttcaacttgatcttctttatcctgggcgcagtgatcctgggcttcggggtgtggatcctggccgacaagagcagtttcatctctgtcctgcaaacctcctccagctcgcttaggatgggggcctatgtcttcatcggcgtgggggcagtcactatgctcatgggcttcctgggctgcatcggcgccgtcaacgaggtccgctgcctgctggggctgtactttgctttcctgctcctgatcctcattgcccaggtgacggccggggccctcttctacttcaacatgggcaagctgaagcaggagatgggcggcatcgtgactgagctcattcgagactacaacagcagtcgcgaggacagcctgcaggatgcctgggactacgtgcaggctcaggtgaagtgctgcggctgggtcagcttctacaactggacagacaacgctgagctcatgaatcgccctgaggtcacctacccctgttcctgcgaagtcaagggggaagaggacaacagcctttctgtgaggaag

SEQ ID NO: 7196 - DNA, 420 bp, Homo sapiens
  SIMILAR (49)..(108): 601254mologous to Homo sapiens KIAA1604 protein,accession number AB046824,Smith-Waterman Score=47.
cccacgcgtccgctctaggtgatgtttgcagacataaaaagtaaacctgtcaaggaattcagagccattgggtaccttgttatttggacccagtttgaagccatcctttgatttattggaccaactggcaacagaaaatgaaaagtagtgtggcacagataaaaccttcttctggtcatgtacagtaagggaaaaccttaattcatattcagaggaactcctctccagaagacagatatgtaagaacaagaacgatccccccggggatagagattaatttgattacagcagatcagactatgagcattcaagaagaggacgttcttatgatagtagcatggagtcacgaaacagggaccgagaaaaacgcagagaaagagaaagagatacggatcggaaaaggtctcggaaatccccatc

SEQ ID NO: 7197 - DNA, 1014 bp, Homo sapiens
  SIMILAR (425)..(793): 641254mologous to Homo sapiens Protein sequence of the di- alpha haemoglobin gene contained in pSS1,accession number AAW54282,Smith-Waterman Score=334.
atggtgctgtctcctgccgacaagaccaacgtcaaggccgcctggggtaaggtcggcgcgcacgctggcgagtatggtgcggaggccctggagaggatgttcctgtccttccccaccaccaagacctacttcccgcacttcgacctgagccacggctctgcccaggttaagggccacggcaagaaggtggccgacgcgctgaccaacgccgtggcgcacgtggacgacatgcccaacgcgctgtccgccctgagcgacctgcacgcgcacaagcttcgggtggacccggtcaacttcaagctcctaagccactgcctgctggtgaccctggccgcccacctccccgccgagttcacccctgcggtgcacgcctccctggacaagttcctggcttctactcagagagaacccaccatggtgctcgtctcctgccgacaagaccaacgtcaaggccgcctggggtaaggtcggcgcgcacgctggcgagtatggtgcggaggccctggagaggatgttcctgtccttccccaccaccaagacctacttcccgcacttcgacctgagccacggtttctgcccaggtttaagggccacgggcaagaaggtggccgacgcgctgaccaacgccgtggcgcacgtgggacgacatgcccaacgtcgctgtccgccctgagcgacctgcacgcgcacaagctttcgggtgggacccggttcaactttcaagctcctaaagccacttgccttgctggtggaccctgggccggcccacttccccgtccgagtttcaacccctggcggttgcaacgtcttccctggggacaaagtttcctgggtttcttgttgaagcaccgttgctgaccttccaaatacccgttaagcttggaagcctcggttggccattgtttttttgccctttgggcttccccccagcccctcctcccctttcctgcacccgtacccccgtggtctttgaaataaagtcttgagtgggcggcaaaaaaaaaaaaaaaaaaa

SEQ ID NO: 7198 - DNA, 443 bp, Homo sapiens
  SIMILAR (4)..(207): 1001254mologous to Homo sapiens eukaryotic initiation factor 4AI,accession number D13748,Smith-Waterman Score=360.
ggccaggattcccgatccagagacaatggccccgatgggatggagcccgaaggcgtcatcgagagtaactggaatgagattgttgacagctttgatgacatgaacctctcggagtcccttctccgtggcatctacgcctatggttttgagaagccctctgccatccagcagcgagccattctaccttgtatcaagggttatgatgtgacttgtatgaaaccctgaccatcacccaggcagtcatcttcatcaacacccggaggaaggtggactggctcaccgagaagatgcatgctcgagatttcactgtatccgccatgcatggagatatggaccaaaaggaacgagacgtgattatgagggagtttcgttctggctctagcagagttttgattaccactgacctgctggccagaggcattgatgtgcagcaggtttcttta

SEQ ID NO: 7199 - DNA, 593 bp, Homo sapiens; identical to SEQ ID NO: 559
  SIMILAR (221)..(361): 1001254mologous to Mus musculus put. altern. eIF-4A (aa 1- 370),accession number X03039,Smith-Waterman Score=238.

SEQ ID NO: 7200 - DNA, 459 bp, Homo sapiens
  SIMILAR (9)..(149): 971254mologous to Mus musculus put. altern. eIF-4A (aa 1- 370),accession number X03039,Smith-Waterman Score=245.
ccaacctccaggagtggaagctggacacactatgtgacttgtatgaaaccctgaccatcacccaggcagtcatcttcatcaacacccggaggaaggtggactggctcaccgagaagatgcatgctcgagatttcactgtatccgccatggtgtgtttgcccgctgccagcctgttgtgggtctgcccgtcagaagtgtcctacttgaagccagggttcctggaacccaggtgcctacctggtctgctgcatatttgttttctcttccagcatggagatatggaccaaaaggaacgagacgtgattatgagggagtttcgttctggctctagcagagttttgattaccactgacctgctggtgagtagagggaactgatagcaaaggcagaagggaggatccaaggtgattccctctccaaggggacatcagtgcctctcaggaaagtagcagcttggaa

SEQ ID NO: 7201 - DNA, 533 bp, Homo sapiens
  SIMILAR (269)..(532): 971254mologous to Homo sapiens eukaryotic initiation factor 4AI,accession number D13748,Smith-Waterman Score=437.
catgacccccattgagtgcgtattccatgtggcggaattcgcccatgcgtgtcatctgagcctctggcttccctgccagggcagccctggcagtgtcctacttcccagggctgttgtctgcctggcgggaaggtcctgggcaaaggatcagtctttgtactctgagagcagactacttggctcctctctgttttttatcagcgaagttggatatatctctcccacatttccctaatcatatgctatatattggctttttttttcttctctagcccccaaatacatcaagatgtttgtactggatgaagctgacgaaatgttaagccgtggattcaaggaccagatctatgacatattccaaaagctcaacagcaacacccaggtagttttgctgtcagccacaatgccttctgatgtgcttgaggtgaccaagaagttcatgagggaccccattcggattcttgtcaagaaggaagaagtgaccctggagggtatccgccagttctacatcaacgtggaacgagaggagtgga

SEQ ID NO: 7202 - DNA, 495 bp, Homo sapiens
  SIMILAR (34)..(291): 951254mologous to Homo sapiens eukaryotic initiation factor 4AI,accession number D13748,Smith-Waterman Score=418.
gcggaaattcgagatcgtagtccatgcggggaactccacgtggaacgagaggagtggaagctggacacactatgtgacttgtatgaaaccctgaccatcacccaggcagtcatcttcatcaacacccggaggaaggtggactggctcaccgagaagatgcatgctcgagatttcactgtatccgccatgcatggagatatggaccaaaaggaacgagacgtgattatgagggagtttcgttctggctctagcagagttttgattaccactgacctgctggtgagtagagggaactgatagcaaaggcagaagggaggatccaaggtgattccctctccaaggggacatcagtgcctctcaggaaagtagcagcttggaatagaatctggcatgcctaaggcctttggggaactgggatgcttatttcctctgccttccttggctgcccacatggatgcctaagtgtcttccctccgggatagagtgtcctccgtg

SEQ ID NO: 7203 - DNA, 1451 bp, Homo sapiens
  SIMILAR (17)..(1270): 591254mologous to Homo sapiens eukaryotic initiation factor 4AI,accession number D13748,Smith-Waterman Score=982.
ctagtttctaaggatcatgtctgcgagccaggattcccgatccagagacaatggccccgatgggatggagcccgaaggcgtcatcgagagtaactggaatgagattgttgacagctttgatgacatgaacctctcggagtcccttctccgtggcatctacgcctatggttttgagaagccctctgccatccagcagcgagccattctaccttgtatcaagggttatgatgtgattgctcaagcccaatctgggactgggaaaacggccacatttgccatatcgattctgcagcagattgaattagatctaaaagccacccaggccttggtcctagcacccactcgagaattggctcagcagatacagaaggtggtcatggcactaggagactacatgggcgcctcctgtcacgcctgtatcgggggcaccaacgtgcgtgctgaggtgcagaaactgcagatggaagctccccacatcatcgtgggtacccctggccgtgtgtttgatatgctttaccggaagatacctggccccccaaatccatcaggatgttggtactgaatgaggctgacgaaatgttaagccgtggattcaaggaccagatctatgacatattccaaaaggctcaacagcaacacacaggatagttttgctgtcagccacaatgccctttgattgtgcttgaggtgaccaagaagttcatgaggggcccccattcggattcttgtcaagaaggaaagagttgaccctggagggtaatccgccagtttctacatcaaccgtggaacgaagaggagtggaagctgggacacataatgtgacgttgtatgaaacccgtgaccatcaccccaggcagttcatcttcatcaacacccggaggaaaggtgggactggcctcacccgagaaagatgcatgctccgagatttcactgtatcccgccatgccatgggagatatgggaccaaaagggaacgagaccgtgattatggaggggagttttcgttctgggctcttagcagagtttttgattacccacttgaccttgctgggccagaggcattgatgtgccagccaggttttctttagtcatcgaattatgaccttcccaccaaccggggaaaactatatccacaggaatcgggtcgacggtggaccgttttggccgtaaaggtgtggctattaacatggtgacagaagaagacaagaagggccctccggacacttggggcctcctacaacacctccattgaggaaatgcccctcaatgtttgctgacctcatctgaggggctgtcctgccaccctagccccagccagggctcaatctctgggggctgaggagcagcaggaggggggagggaagggagccaagggatggacatcttgtcattttttttctttgaataaactgtcactttttgaggcaaaagaaggaaccgtgaaaaaaaaaa

SEQ ID NO: 7204 - DNA, 378 bp, Homo sapiens
  SIMILAR (3)..(374): 751254mologous to Homo sapiens nucleolar protein p40,accession number U86602,Smith-Waterman Score=430.
agatggacactactccgctctcgtattctgagtcttaatccgatgaataccttgtcacaaacatgtagttgcaggatgccttctgccgagggcttgtgaaaccaggccttaatgtcttgctaaaggggcccattaacgccgtgatcgacgtgaatggcctgaaacaatgtttggcctaattcaagcggtatctggaatgcctttaaaggctcgatgtgacactgtgtccagtaccgtagatcggtggatctgatgcgcccttacctcataacaaggaccataaagctgctgatccataagactactttcagcgatagatgagtttctatcgccaagcccatgccgcaatgcttgcagtcttaccccgcctgcatcact

SEQ ID NO: 7205 - DNA, 397 bp, Homo sapiens
  SIMILAR (5)..(397): 731254mologous to Homo sapiens AAMP-1,accession number AAR32922,Smith-Waterman Score=437.
acgcgaatcggaaagctgtgctgctgctgacacccccgcactggagaccctaagcttccatggtgactgggagatcatcgaggtgtttaatcgggatctcgggtcgacgtacccagatgacctggccctctagatggaagatgtggactttgaggaagaatacgaggaatagggctacgactagggctgtgttctatatccccaggaaggggtgatcggcaacatggagggccccgactatagctaggtcacctttgcattgcactcatcatctgtgtatagggtgagcctggaccccaagacctataccttggcagtgaccggaggttacgatgacggagccttcgtatggctgctcacctatggctagctgctctttgagtgagcaagccatgaa

SEQ ID NO: 7206 - DNA, 399 bp, Homo sapiens
  SIMILAR (3)..(395): 701254mologous to Homo sapiens Human transport-associated protein-7 (TRANP-7),accession number AAY31645,Smith-Waterman Score= 429.
  misc_feature (1)...(399): n = a,t,c or g
gaaatagccaggtgctactggactcccctatccagttgtcaaagataacggagaactacgagtgtataacggaactttcaggactgctaaagagggaacagtcctcgacagtgaatgcatctaatttagagaatgacgaggctcgacttaaggcctatctggagaatcgctcagagatcgactcgctcaagaccagcaaccctatagacttataagaggcatcaatcagccaggctggcagcataaactagagtcgattctaatcatctggcatgaacaaatcctatgatgtgcgaattgataactttaatgggtctattggcgatagaatactgcttactgcagcgaatgtgatcctggcatggtgccgcctttacggtctgatgaggcagaatgtcn

SEQ ID NO: 7207 - DNA, 424 bp, Homo sapiens
  SIMILAR (424)..(161): 851254mologous to Homo sapiens Human secreted protein, SEQ ID NO: 8154,accession number AAG04073,Smith-Waterman Score=350.
ccggtccttcgagtggcaagagagcgaagtcttccaggcccgcaagaaggtcctcatggtagagcttcagaaagcgcatcgcccctggctccatcaatagcaccatctccgccaggccctcctgccctgtcagcttcacacatcatgggctctcaggccttgcgttctccagagaccccatggtgatctccatgggaccctccagcccctcttgatttggttagtccatggcaatttccaccaggccctcatgcctcagcaaccccttagaggtctccactgggcctgcagaccccacaggctccaggctcatgggcccctcatgttcctgcaaccccacaggcctcaggtttaccagcccctcatgttacagagaccccataagcatcgagctgacttgctatgcctgtcccagagactccat

SEQ ID NO: 7208 - DNA, 637 bp, Homo sapiens; identical to SEQ ID NO: 490
  SIMILAR (47)..(412): 991254mologous to Homo sapiens gamma-G globin,accession number X55656,Smith-Waterman Score=637.
  misc_feature (1)...(637): n = a,t,c or g

SEQ ID NO: 7209 - DNA, 421 bp, Homo sapiens
tttgtggtccccaattcaggagaggtatggacaccttaacatttttgggtcctgtttcaggacttccagttccaataaggatgggcagaaacttgtcccactcgtatctagtgcctccaaggccagggcccagatgatcacctgagctcatataacttttctctctggcttgtaggtaccatgtctaccctacctgtaggaacacatccgggattctaggattcacagtctctgtggtgacaaatgctatcccgttcatttcttgactttcttctttttactatatatactttctttataactttggatgatcttaataaatatcactctcattaatgtcacaaatgcaatttcagtcagcctacctcttgatttgaattattgtcggtagtctatttcaaatacttcgagattatcgacg

SEQ ID NO: 7210 - DNA, 394 bp, Homo sapiens
ccctggggtggtgattcggatgtctgctacagggaaggaggcctctgaagagccattccccctggcaggggcctggagcttcgggaaggcctgctcagggcaaacataaaaaccgctgaagggggcagaatcccagtaatcttagccacccggcccccacccctccctggccaggcattaagtgtcccttgccgcgggcggggccctccttgagctccctcctccccggtcgcgtgctctgtgccaggcctgagtttcccttacatggtcgggggctcgagccttcggcctccctcctcccttctgccctcgctccttcccctttgagaggcctcaagggcacagagaggtcaagactgaaagctgaccaagcttggggtgggtggaaagaggg

SEQ ID NO: 7211 - DNA, 704 bp, Homo sapiens
caataaaattctaataataaaaacaaatagtagaaaaaaataaaaaatagaataatgaagagataacaatcaatcaaacaacaataaaaatcataataaataatgggaaaaagaaagcaaaacctagcatcaaaagtgcatatactcattgtaactacaatcttactatatattcctacttttgttttaaaaaaagttttctttaaactatatgtctcaaagggatactaaaggtataatttcatattcttttttgaatttaaaaaacatatacgtaatcctcctttgttttggtaagttcaaatatgaattgacagtggggtaaattgattggtggattctttaagaaagctctaagaagagaatccagcatcctatatcttctttaagaagtatgagctgaaatgttaggcattccttgtattgttttttaaatatatttaaggaatgctgtttttgtaaaaccatggctttgaaaaagaaatctgagatcaaaatacattactagaagatctctataaaaggtcaccaagactatccttgtttgtgaaatcagggaaaacatttttagaatttatcttgttagaaaaaatgctaccgcttttctttctttttcttctggtgtttaattgtgataataagaaagaagaaaaagaaagaaaagtggtagcatttttcaatcttaatcttctttcttattatca

SEQ ID NO: 7212 - DNA, 397 bp, Homo sapiens
gaaattttctttatacttttctgtattttccaaattttgtgtgatcagcacattgcttttaaaatcagaagaaaaaaaataagtattttttgttacgagagaaatgtctgctaaactgcttccctcatctgtacgttgccttctacgtgtatatccccagcattttcaatttgagtggttgctaatatctgccttcttgctcaatcttttatgtgttcatcccattatcgcatcctcttctgttcttctttctgtgtttctcgctttccttttctcttcctttcttcctttctcttttctgtttccctttccttgcttttctgtttcacccttctttcatccttctgcttgattcttccgcctgtttgttgtgtatttcttgtttttttcatctttc

SEQ ID NO: 7213 - DNA, 339 bp, Homo sapiens
  SIMILAR (312)..(338): 771254mologous to Mus musculus Elongation factor 1-alpha (AA 1 - 461),accession number X13661,Smith-Waterman Score=36.
  misc_feature (1)...(339): n = a,t,c or g
tgccgccagaacacaggtgtcgtgaaaactacccctaaaagccaaaatgggaaaggaaaagactcatatcaacattgtcgtcattggacacgtagattcgggcaagtccaccactactggccatctgatctataaatgcggtggcatcgacaaaagaaccattgaaaaatttgagaaggaggctgctgagatgggaaagggctccttcaagtatgcctgcctctccaggatgtctacaaaattggtggtattggtactgttcctgttggccgagtggagactggtgttctcaaacccggtattggtggtcaactttgnttccagtcaacgttacaacgg

SEQ ID NO: 7214 - DNA, 1110 bp, Homo sapiens
  SIMILAR (404)..(1060): 361254mologous to Hypocrea jecorina translation elongation factor 1a,accession number Z23012,Smith-Waterman Score=231.
  misc_feature (1)...(1110): n = a,t,c or g
atggacataaagaagggaataacagacatcagcgcctctttgagagtggagagtggatgggaagccagaacgagaaaggaaaagactcatatcaacactgtgatcatcggacacgtagattcgggcaagtccaccactactggccatctgatctacaaatgcggtggcgtcgacaaaagaaccatcgaaaaatttgagaaggaggctgctgagatgggaaagtgctccttcaagtatgcctgggtcttggataaactgaaagctgagcgtgaacatggtatcaccattgatatctctttgtggaaatttgagaccagcaagtactatgtgactatcattgatgccccaggacacagagacctcatcaaaaacatgattacagggacatctcaggctgactggtgctgtcctgattgttgctgctggtgttggtgaatttgaaagctggtattctccaagaatgggcagacccgagagcatgcccttcttggcttacacactgggtgtgaaacgactaagttgtcggtgttaacaaaatggaattccagttagccaccctatagccatgaagagatatgaggaaattgttaaggaaggcagcacttacattaagaaaattggctacaaccccgacacagtagcatttgtgccaatttctggttggaatggtgacaacatgcatggagccaagtgctaacatgccttggttcaagggatggaaagtcacccgtaaggatgggcaatgccagtggaaccacgctgcttgaggctctggcactgcaatcctaccaccaactccgtccaacttgacaaagcccttgcggcctgccctcttccagggatgtcttacaaaattggtgggtattgggtactgttcctgttgggccgagtgggagactgggtgttctcaaacccggtatgggtgggtcacctttggctccagtcaacgttacaaacggaagttaaaatctgttcggaaatggcaccatggaaggttttgagtggaagctctttcctggggggacaatgtggggctttcaatgtttcaaggattgttgttctgttccaaggnatgtttcgttcttgggcaacttttgttnggtgnacaca

SEQ ID NO: 7215 - DNA, 415 bp, Homo sapiens
  SIMILAR (65)..(379): 721254mologous to Homo sapiens unnamed protein product,accession number AK022902,Smith-Waterman Score=389.
cagtgttggcgatccatgtcctagcacagcatctgtagaccaatgcacaatcgtgccttgaccgatggagggaccattactgctgtataggaggtgcattgagggcgtaggaggaatattcctttgggatccacaaccctcgagcccccagcatcctggagcaacaccttctacgggcgagccgggcttccctgtcgttcaccaggacctgagccatatacagcagcccgctgctgtagtggctgctctgaacaaccacaaacctcccgtgcggagctaacctccatctgccactcccgaggctttcacgtgattcagcaaatgcgatgacctcgacgaggagctcagtctcttgagatactgccatgctttcagtgaatgctaacatgatatacgtccgtctcatatccatccg

SEQ ID NO: 7216 - DNA, 360 bp, Homo sapiens
  SIMILAR (1)..(333): 831254mologous to Homo sapiens Human secreted protein encoded by gene 3 clone HLDCD04,accession number AAY41310,Smith-Waterman Score=465.
actgaacgttttgggatgtaaggaggagaggctgtctgcctttatgaagagccagtgtctgaattgctgaggagatgtgggaattgcacacgggaaagctgggtggtttccttttacctttcagctgaccatgaactcctgagcccgaccaactaccacttcttgtcctcaccgaaggaggccggggggctctgcaaggcgcagatcactgccatcatctttcagcaaggtgacatatttgtttttgacctggagacctcagctgtccgtccctttgtttggtggcaggttgaagctatcccagtagactacctaccttgttccttcgtgatgattatccccaccctatattgttcaccc

SEQ ID NO: 7217 - DNA, 378 bp, Homo sapiens
taggcggcaggcctgcttgggtcttcggcatttgcagagagctctctaaccccctgtgtcctccgagaccctcaccttccccctcccccaccggccggttttgttctatttcgaggccctggcgtctcgcggagggttctgggggtcgtgatgggagggaggtggtagtgggaccatacttgcgcggcgcttttgggatttgcaggcttaccggccgcatgcgcaagtgcccggcttcctacgctagagtcacctgatggctgtcggccatgctgaagccaccgacctgactgctctcaccatgttgatcttgaccccagaggcgtggcagctacacacaatactgtatctgtcaggcctgctggcgatgctccctgg

SEQ ID NO: 7218 - DNA, 564 bp, Homo sapiens
  SIMILAR (354)..(563): 571254mologous to Homo sapiens Human secreted protein, SEQ ID NO: 7871,accession number AAG03790,Smith-Waterman Score=179.
cttcttccataaggataaacacaaatttcctatgtaaaaacaacttctctctttttgcctccctaagtacattatctacacctgtcttctgcaatttagcatgccttaacttgtgctgtacatggcttacatagtttattacctaccagacagtaagtcctttataagaatgaggtacacgtttgactcatcttttacttttcccacagttcttttcatagtgctttagaataaatatttattgaacaatatttattttatatttatgaatatcatagaaattacagtttaaaatctttgatactggttattttatgattttatgattgcagaaaaaattcttaacggatacttttgttgttgttgttgagacaggtcttgccctgtcgcccaggctggagagctgtggcatgagcgcggctcactgcagcctcgacctcctggggtcaagcaatgctcctacttcagcctcctgagtagctgggaccgcaggcatgtgccaccacacctggctaatttttaaacatttttctgtagagatagggtctcccctgtgttgcccag

SEQ ID NO: 7219 - DNA, 761 bp, Homo sapiens
  SIMILAR (361)..(8): 571254mologous to Homo sapiens PRO2987,accession number AF116719,Smith-Waterman Score=286.
  misc_feature (1)...(761): n = a,t,c or g
gacactcgctttttggaacgtctgaggttatcaataagctcctagtccagacgcccatgggtcatttcacagaggaggacaaggctactatcacaaagcctgtggggcaaggtgaatgtggaaagatgctggaggagaaaccctgggaaggctcctggttgtctacccatggacccagaggttctttgaccagctttggcaacctgtcctctgcctctgccatccatgggcaacccccaaagtcaaggcacatggcaagaaggtgctgacttccttgggangatgccataaaagcacctgggatgatctcaagggcacctttgcccagcctgacgtgaactgcacttgtgacaagctgcaatgtggatccttgagaacttcaagctccttgggaaatgttgctggtgacccgtttttggcaatcccattttcggcaaagaattcacccctgaaggtgcagagcttcctgggcagaaagatgggtgacttggagttggccagtggccctgttcctccaggataccactgagctcactggcccatgatgcagagcttttcaaggataaggcttttattcttgcaagcaattacaaataataaatctatttctgctaagagatcaccaaannnnnatnntnnnnnnncccccggattttttatttagcgggccgcacctttttccccttttagggggggtaaatttatattgggccttgggccggggttttcaaaagcggggggannnnnnnnnnaaagagccc

SEQ ID NO: 7220 - DNA, 5195 bp, Homo sapiens
  SIMILAR (2058)..(4601): 991254mologous to Homo sapiens Homo sapiens clone CS278_1 secreted protein,accession number AAW29677,Smith-Waterman Score= 4469.
gaactggcccagaatcactctcgccctgctccggcgtctgcgccgggcggcggtggcggcggagacccgaacatggcgaccgcgcgcaccttcgggcccgagcgggaagccgagccggccaaggaagcgcgcgtcgtgggctcggagcttgtggacacttatacggtttacatcatccaggtcactgatggcagccatgagtggacagtaaagcaccgctacagcgacttccatgacctgcatgaaaagctcgttgcagagagaaagattgataaaaacctgcttccgcccaaaaagataattgggaaaaactcaagaagcttggtggagaagagggagaaggatctggaggtctacctccagaagctcctggctgccttccctggcgtgacccccagagtactggcccacttcttgcattttcacttctatgagataaatggcatcaccgcggcactggctgaagagctctttgagaaaggagaacagctcctgggggccggcgaggtctttgccattggacccctgcagctgtatgccgtcacggagcagctgcagcagggaaagcccacgtgcgccagtggggatgccaagaccgacctcgggcacatcctggacttcacctgtcgccttaagtaccttaaggtttctggcacagaaggaccttttgggaccagcaacattcaggagcagctcctgccgttcgacctatcaatattcaagtccctgcatcaggtggagataagtcactgtgatgctaagcacatcagagggctggtcgcatcgaagcccaccttagccacgctgagtgtccgcttctcagcaacctcgatgaaggaagtccttgttcctgaagccttattaatttgatgagcgggagcctgaaggcacaaccctagaaggccctgtgactgccgtcatccccacttggcaggcattgaccacgcttgacctgagccacaacagcatctccgagatcgacgagtctgtgaaactgatcccaaagattgagttcctggacctgagtcacaatggattgctggttgtggacaatctgcagtacctgtataaccttgtgcatctggacctgtcctacaacaagctctcctccttggaagggcttcacaccaagctggggaacatcaagaccttaaacctgggcagggcaacctcctaggagagtctgagtgggcctgcacaagctcttactcactggttcaacctgggatctccggggacaacagggattcgaacagatgggagggaggttccggagcatagggcagcctcccgtgtctggagcacgtgtctctgctgaacaaccctctgagcatcatccccgactaccggaccaaggtgctggctcagttcggagagagggcctcagaggtctgtctggatgacacagtgaccacagagaaggagctggacactgtggaagtgctgaaagcaattcagaaagccaaggaggtcaagtccaaactgagcaacccagagaagaagggtggtgaagactcccggctctcagctgccccctgcatcagacccagcagctcccctcccactgtggctcccgcatctgcctccctgtccccagcccattcctctctaaccaaggaatcatgttcgttcaggaggaggccctggccagcagcctctcgtccactgacagtctgactcccgagcaccagcccattgcccagggatgttctgattccttggagtccatccctgcgggacaggcagcttccgatgatttaagggacgtgccaggagctgttggtggtgcaagcccagaacatgccgagccggaggtccaggtggtgccggggtctggccagatcatcttcctgcccttcacctgcattggctacacggccaccaatcaggacttcatccagcgcctgagcacactgatccggcaggccatcgagcggcagctgcctgcctggatcgaggctgccaaccagcgggaggagggccagggtgaacagggcgaggaggaggatgaggaggaggaagaagaggaggacgtggctgagaaccgctactttgaaatggggcccccagacgtggaggaggaggagggaggaggccagggggaggaagaggaggaggaagaggaggatgaagaggccgaggaggagcgcctggctctggaatgggccctgggcgcggacgaggacttcctgctggagcacatccgcatcctcaaggtgctgtggtgcttcctgatccatgtgcagggcagtatccgccagttcgccgcctgccttgtgctcaccgacttcggcatcgcagtcttcgagatcccgcaccaggagtctcggggcagcagccagcacatcctctcctccctgcgctttgtcttttgcttcccgcatggcgacctcaccgagtttggcttcctcatgccggagctgtgtctggtgctcaaggtacggcacagtgagaacacgctcttcattatctcggacgccgccaacctgcacgagttccacgcggacctgcgctcatgctttgcaccccagcacatggccatgctgtgtagccccatcctctacggcagccacaccagcctgcaggagttcctgcgccagctgctcaccttctacaaggtggctggcggctgccaggagcgcagccagggctgcttccccgtctacctggtctacagtgacaagcgcatggtgcagacggccgccggggactactcaggcaacatcgagtgggccagctgcacactctgttcagccgtgcggcgctcctgctgcgcgccctctgaggccgtcaagtccgccgccatcccctactggctgttgctcacgccccagcacctcaacgtcatcaaggccgacttcaaccccatgcccaaccgtggcacccacaactgtcgcaaccgcaacagcttcaagctcagccgtgtgccgctctccaccgtgctgctggaccccacacgcagctgtacccagcctcggggcgcctttgctgatggccacgtgctagagctgctcgtggggtaccgctttgtcactgccatcttcgtgctgccccacgagaagttccacttcctgcgcgtctacaaccagctgcgggcctcgctgcaggacctgaagactgtggtcatcgccaagacccccgggacgggaggcagcccccagggctcctttgcggatggccagcctgccgagcgcagggccagcaatgaccagcgtccccaggaggtcccagcagaggctctggccccggccccagtggaagtcccagctccagcccctgcagcagcctcagcctcaggcccagcgaagactccggccccagcagaggcctcaacttcagctttggtcccagaggagacgccagtggaagctccagccccacccccagccgaggcccctgcccagtacccgagtgagcacctcatccaggccacctcggaggagaatcagatcccctcgcacttgcctgcctgcccgtcgctccggcacgtcgccagcctgcggggcagcgccatcatcgagctcttccacagcagcattgctgaggttgaaaacgaggagctgaggcacctcatgtggtcctcggtggtgttctaccagaccccagggctggaggtgactgcctgcgtgctgctctccaccaaggctgtgtactttgtgctccacgacggcctccgccgctacttctcagagccactgcaggatttctggcatcagaaaaacaccgactacaacaacagccctttccacatctcccagtgcttcgtgctaaagcttagtgacctgcagtcagtcaatgtggggcttttcgaccagcatttccggctgacgggttccaccccgatgcaggtggtcacgtgcttgacgcgggacagctacctgacgcactgcttcctccagcacctcatggtcgtgctgtcctctctggaacgcacgccctcgccggagcctgttgacaaggacttctactccgagtttgggaacaagaccacagggaagatggagaactacgagctgatccactctagtcgcgtcaagtttacctaccccagtgaggaggagattggggacctgacgttcactgtggcccaaaagatggctgagccagagaaggccccagccctcagcatcctgctgtacgtgcaggccttccaggtgggcatgccaccccctgggtgctgcaggggccccctgcgccccaagacactcctgctcaccagctccgagatcttcctcctggatgaggactgtgtccactacccactgcccgagtttgccaaagagccgccgcagagagacaggtaccggctggacgatggccgccgcgtccgggacctggaccgagtgctcatgggctaccagacctacccgcaggccctcaccctcgtcttcgatgacgtgcaaggtcatgacctcatgggcagtgtcaccctggaccactttggggaggtgccaggtggcccggctagagccagccagggccgtgaagtccagtggcaggtgtttgtccccagtgctgagagcagagagaagctcatctcgctgttggctcgccagtgggaggccctgtgtggccgtgagctgcctgtcgagctcaccggctagcccaggccacagccagcctgtcgtgtccagcctgacgcctactggggcagggcagcaggcttttgtgttctctaaaaatgttttatcctccctttggtaccttaatttgactgtcctcgcagagaatgtgaacatgtgtgtgtgttgtgttaattctttctcatgttgggagtgagaatgccgggcccctcagggctgtcggtgtgctgtcagcctcccacaggtggtacagccgtgcacaccagtgtcgtgtctgctgttgtgggaccgttgttaacacgtgacactgtgggtctgactttctcttctacacgtcctttcctgaagtgtcgagtccagtcctttgttgctgttgctgttgctgttgctgttgctgttggcatcttgctgctaatcctgaggctggtagcagaatgcacattggaagctcccaccccatattgttcttcaaagtggaggtctcccctgatccagacaagtgggagagcccgtgggggcaggggacctggagctgccagcaccaagcgtgattcctgctgcctgtattctctattccaataaagcagagtttgacaccgtcttaaaaaaaaa

SEQ ID NO: 7221 - DNA, 1129 bp, Homo sapiens
tcccctcccactgtggttcccgcatctgcctccctgccccagcccatcctctctaaccaaggcatcctcggagatgagtgagtgattttggtctcatgagcgtgtctgctggcccggcccgcacggaagaggggagggtgtgccgtcccgagtggagccgaggctcgggacacgcaggaaaggacgccgcctgcccgggctcctggagacgcagaacttggtgtgaggtcttgggaaaacagttcaacccgatgttttaagagccagaaaaacattcccaccccttgacctggtaaccccactggtggggattttctcttagagggataagataccgggaaggggaggtgaaatgctcaccactgccaaaacacgggctgcaactgcaacatcggaggatgagagggagagtcggctgtggtgcagaatgctcagcagcccttcccagcagggacaggaagactgggcaggaagaggggagaagcattcaagttaaggcaaaaggcccaacgcagagcagcacactgaggtcacacctgtgagatgtggaagagaattcctgagcgtggagcgatggggttaggtgccaggatgattgcccattttgcttctgtcagactcttgactaaggatttctggttgcattttattacataaaagccagggaggttatatcacgttaagaaagcttcccctgacgccgccctcctgtagcgcagccaaagcgagcctgtggaggtaccatatgactgtaaggccctctggggacacaggagctgcatctgccttcctcaaaggcccagggacacagcccatttctgcccagcatctgttgaatcagtgaagtgaagtgagtgggcaggtagagcaggagcccagtgaagagcaggccctggatgggtggggatgcaccatgtcccccagggctgcacgtgcaggcagccccccacattgtcggagaagcctctgcaccagctcagccccctcctcactccccttgtgccctggggacactctgcagaggggcactctgcagtctgtccccgccatcgctggacttctggacatggcctccagatttgcacctcttaaataaaactgcagtggatgtcaaaaaaaaaaaaaaaaa

SEQ ID NO: 7222 - DNA, 417 bp, Homo sapiens
agccaccaccactctggttcaatcaggatccacatgttgaaagcaaaggcctggcggcagggaggcctgtaccaagcaccagccaaggacgaacacaattcagaggttctgcgcctcccccgaaagaccctctaccgaggactgggccgtcagccaaccgacgggttccacacacattccaacccgacatctcgttcccgggatctccaaaacctccgtcttaagaccgcccgcatcccaaccctagcctcaggtccccactggtgtcacacagcgttcacaatcaagcagggaggtgggcaaaggtgcaagctacggccagagagagaaaaagtgacacaaaaagtatctggctctggagatggagaaggattctcaagaggaccagaagcaactcactctacaccctccatggtt

SEQ ID NO: 7223 - DNA, 1243 bp, Homo sapiens
  SIMILAR (1237)..(1094): 641254mologous to Homo sapiens neuronal thread protein AD7c- NTP,accession number AF010144,Smith-Waterman Score=157.
aaaaaaaagtaatctcagaatgttggccgagcatggtggctcacacctgtagtcccagttatgcaggaggctgaggcaggagaatcacttgatctcaggaggcggaggttgcagtgagtcgacatcacaccactgcactccagcctgggggacagagtgagacttcgtctcggaaaaaaaaaaaaaaaagttgacaggatggccagacccaagtgggcgtattaagtggtggtgctaggattggaacccaagcgtgattaaaaccctattgcaggccctttcctctatattgtactgcctccttaacaaaggaagattgattaagcccctactttgtgccagtctctgttatcaagtccgttaaatgcatttaacgttaaattttttcttttttggtttaaaaaactctagtttcttaaactactagtttttagtgtcttgctaaaactatgtgctcttgaataggctacaacttatttcacactatctcattggaactctcctggtatgtgatagtgttataatgaaaaattgcataccaggacagctaagtctattttgcaaccatacagcgtttcataatttagcatttaaaatacagacagtccccgacttttggtggtttgatgtgggatttttggtggaaaagcagtatacattcagaatgcacctctacttatgatggggctacttcctggtaaacccattgtaatgtgcaaattacgggtttatcaggaggtgaccccatcggtaatggagaagtgctgggattataggcgtgagccactgtgcccagcctcacagctgcatcttaaccttacctttgcctctgcctctcaagctggtacctcctaatttacatcctaagagtggaaccatgtgacaaggactggagtgccattggctgtggactgttcaggcagggaagtacaagaccactcttgtattcaggggcaacaaaaggagagaattacgtacttgttgagtacaaactgcaccaagccctggagacccattaccaccgttaaccctcaatacagctctgctagtaagggattcgtctccccaaatgaaaaaaaagtaatctcagaatgttggccgagcatggtggctcacacctgtagtcccagttatgcgggaggctgaggcaggagaatcgcttgatctcaggaggcggaggttgcagtgagtcgacatcgcaccactgcactccagcctgggggacaggagttgattcgtctcg

SEQ ID NO: 7224 - DNA, 765 bp, Homo sapiens
  SIMILAR (3)..(236): 601254mologous to Homo sapiens transformation-related protein,accession number L24521,Smith-Waterman Score=216.
ggctggagtgcaatggcacaatctcggctcactgcaacctccgcctcatggtttcaggttgattctcccgcctcagccttccaagtagctgagattacaggcgcccgcgactacgcccagctaatttttgtattttagtagagatggggtttcaccatgttggtcaagctggtctcaaactccagacctcgggtgatctgcccctcagccttccaaagtgctgggattacaggcgtgcgcacccgctggcttaaattcttgtactctctgatggtcttcccctttggaagatcttaacaattatcactgccttaggagctctgatcttccttttaacttctgacccaaggatggacacttactttttcctcttaagcttaagactttatcaaggataatagctggaattaaaatagagaaaaaaattagctagctcaccagatattctgaaaacactgttcctgagaaacccttatacgtttttataggttgacgtcttccttggtctataatttccatgggacaaagacatttctctacctgggagtgcccttaaattcaagctctggaaatcaaggtctagggaaaaattcattcaccagtctgagacctaccttccaggtccccattttctgtcccagttgtcttttctctagattataaacactaaacaaacatgtgtgagtctctttagaggggatcccaaaacccagccctggtggtttgcctcgtgccaagctggcgtatgatgttacaaggtttagt

SEQ ID NO: 7225 - DNA, 623 bp, Homo sapiens
  SIMILAR (1)..(78): 801254mologous to Homo sapiens Human secreted protein, SEQ ID NO: 7870,accession number AAG03789,Smith-Waterman Score=102.
agacagagtcttgctctgtcacccaggctagaatgcagtggtgccatcatagctcactgcagtcttgaacccctggggctcaggcagctctgctgcctcagcctcccaaaatgctaggattacaggcatgagccactgagcctggcctgcttatttcttttctatcccccagaacacctaacatagggtacctataaaatacagatgtagcatcaatgtggataactgatgaaaggtattagggcatagtaaaaagaacatggactttgttgtcagaggtgccagggttcaagtactatttattccatttaataaatatgtgtccaaaacatatttggacatatatgtgaacaaaacatccttcacagggcttttgtgaggggcaagagctttcatgtgcaagaggcaaggaaactgattatcttgagtaaatgccagcctttgggctaagtacttaccacagagtgaatcttcaaaaaatgatcataattatttcagtcaataaaaatagagttattttattaaataaaatattgataattattgtattattactttaaacacacttccccctcacaaaagccctgtgaaggatgttttgttcacatatttggacatatatg

SEQ ID NO: 7226 - DNA, 410 bp, Homo sapiens
  SIMILAR (1)..(114): 841254mologous to Rattus norvegicus glomerular mesangial cell receptor protein-tyrosine phosphatase precursor,accession number AF063249,Smith-Waterman Score=160.
aaacttgttggactggaaccagtcagcacctactctatccgtgtatctgcgttcaccatagttggaaatggcaatcaatttagtaatgtagtaaaattcacaacccaagaatcaggttagatacagtttttgagcctaaaatgtttctttttatatttaacacctttcttttccttttcttagtttatatgataaagtatcattacttaagagtctactcaaagggaaattgcatttcagtgctttacgtttagtcttggtcttgtgtgaaatcatatgctgtatgtgtgtttatacatatattttcacacatggtttttccttttgaacagaggaagttgaaataaaatagtagtttgggaacaaaatagccttctagatatctgtgaaaattacctaattcttagaac

SEQ ID NO: 7227 - DNA, 461 bp, Homo sapiens
  misc_feature (1)...(461): n = a,t,c or g
ngggcaggtgaggggggcttgcaagccttgattctgagggatggggcttggcctcagcctccctcaggtgactgacaggtgaagggtctagagcctcttaccccagcacccgcggggtcctcacaggggccggggccaggcccccccattgccagcagccctgtaggacagagcaagactgacacagccactaccaccaaagtgggccctgtgggtggagggcagccggcacccatgcaccagcagcttcctccctcacccggggaccccgccgctgaggacgcccatacctggggagagaggagcctgtcagggatgaagggcaaggnnnnnnnnnnnnnnnnnnnnnnnnnnnnnnnnnnnnnnnnnnnnnnnnnnnnnnnnnnnnnnnnnnnnnnnnnnnnnnnnnnnnnnnnnnnnnnnnnnnnnnnnnnnnnnnnnnnnnnnnnnnnnnnnnnnnn

SEQ ID NO: 7228 - DNA, 408 bp, Homo sapiens
tcttcccatcagggccagtgtggtggtcaagaagctacggggtattcatgggcccatgccctaggcgcggggcaggagggcccagagcctcctggccccttgtcaggagcttagcattggaaggaaagagggagcctgtatccagcctaaacccaggggtctgcatgtgtcctgcctggccagggccaccttcccagacctcaagccaccccacctaccactgcccacctggtgccaccccagcactgccgcagacctggcccagcagctcctgctccttagcaggggatgagcacgcccaccacagccaccctcttctccaggctgcagggcaggctccagctccccatgggggccccatcaggccagggcccctggctttactgcaggggagagggtcctcgtgcc

SEQ ID NO: 7229 - DNA, 390 bp, Homo sapiens
cccaccccttctccagactgtgggcggctccccttcctctttagaatccctcagatggaggaggcagtacagtagtctgtgccatcgtgtctggcactgtgctggcgtggtctgcaggatcccacttatgaactctccagattgggagctgtggcaggataacagcccccaagacagctgtgtcctaatccccagaacctgtgaccacgctgcctcacgtggcagaagggactcgtcaggtgtgattgagtgaaggatcttttttttttttttctttgagatgaagaatcgcttggacccgggaggcggaggttgcagtgaaccgagattcgccactgcgctccagcctgggtgagatagaacaagactgtgtctcaaaaaacaaaacaa

SEQ ID NO: 7230 - DNA, 1327 bp, Homo sapiens
  SIMILAR (547)..(98): 691254mologous to Homo sapiens amino acid transporter system A1,accession number AF271070,Smith-Waterman Score=455.
cgctcatccaccagaattagtttcaagttatgtaaagaaaagcatgttctttttacctccagtgttctgtagagaggtggctccaaagattacgaactttccctgtggtgccaaagacttgttcccccagcttttcatacaccatgcagcctgtttcttttgaacagatcaataggaggtttattgaatatatagacagcaatgtcactgaagtcaaaagtaccagaaaaagtaggattccagtgtttgccagggcaaaggcgagtcccaaaatcccactgcccataatggcgttgcttaggttaaaaacagacatgcctaaggaggttgtacctggaatatactcatcacacttcttttttttccaaatggctgtttgtgagacttcttctactttcacgatcagaaataaacttgctatttatctgaccattttctacttcggtgaaatcattgggagtcattggttaatgttaatccatccctcgggcactgtccatgttttgcaactccagttaattcgagtcccacttttgaaatgcatcatgaatagaaagtgtctggtagtttgaaaattaagtccaaatttcctcctgttctgagtgtatttagaaagtagataccaaaaattggaaagcttgacacccctgttaggctcagcaaggcagagacgatcactctatatatattgttgtatgggccttccggggtttttctatggcacataggatataggtgcctgggcacacagtaggacactccaataaatatctccggaaataaagggaaaggtggcaaaaggcgatgtggaggtgtccgcccttccggggtttttaccctcggcagtttgatgtcctttgtgtcaaggtctggctgcggaggccgggaaaatgtggcccccgtcagtaagggttgggcagggagcttggcgtggcctggcggatttccgaggaaggtgaagggcggaggctcctggcgaccttctggcggagtggcgtggccgccccagtccgcgctcgcctggctctcctcctttccgggccgattgcatcagaatctcccctcaccaccaacccccactcacactttgctcgccggcctcgcacttacatcgacatgcaccggcgctgagggtcacgaatcggagtcattctcctactgggggacgcgtggcccttccgcaaccatggcttgtgatggtttaacgcggacaggccattcctccccgtcccgcgcgcggtctcctcccctcctgtgcgcccgctctttaaccaaagctgcgtgtcagtgagccgtgccggtcacatggtgtcactgctggcggccg

SEQ ID NO: 7231 - DNA, 276 bp, Homo sapiens
  SIMILAR (262)..(26): 771254mologous to Mus musculus putative,accession number AK002234,Smith-Waterman Score=336.
gtcagattctctgatagcttatggatggatcaatgaggataacctcaaaaaatttgtatgtggaatctcaccacccagtaagaattcaggactgaaggcttcgagcaaactttagctggttaacaccatgatggacaggcttgccgtaagttgcacccttaggaactgggcgttttcggccaccacggcgaacacgaatcctatatataacgtaaccttgcttggccttgtagcccagtcggcgcgctttatcaggccgggtggcgtccagctcgc

SEQ ID NO: 7232 - DNA, 1071 bp, Homo sapiens
  SIMILAR (832)..(1071): 721254mologous to Homo sapiens PRO2550,accession number AF130089,Smith-Waterman Score=271.
agactgtgtctcaaaaaacaaaacaaaacaaaacaaaacaaaaaaaaccaaaccactttggaagttactcaggcctctgctctggctggacatagtttagtctataactttcaacccttaacaataattaaattcatctttgtttaatttcataaatttaaaagtagggtccttttcagttagggattctcagccctgattcacattaaatttttaaacacgggggattctctgcccggctggaagaaaatgactgggatggggacaggggtcactatttgaaacattcctctgtgcggccaaggtcgcaaaatgctgtcctcgcagggggaacaaaaagagtttgatttcccataatttggatgctgtggatttggtttcctcaggatgtgaactgtagaacattccagttactggccttgaatggttctgggaatataagaatccctgtctgtcttttcaaatagttttcatggaaccttgtcctgtttgaacttggctgaaaatggaagtaaagatgccctcttgggggcccagagatgacagatgtggctccccctgctgcccccaccccttctccagactgtgggcggctccccttcctgctttagaatccctcagatggaggaggcagtacagtagtcactgtgccatcgtgtctggcactgtgctggcgtggtctgcaggatcccacttatgaactctccagattgggagctgtggcaggataacagcccccaagacagctgtgtcctaaatccccagaacctgtgaccacgctgcctcacgtggcagaagggactcgggcaggtgtgattgagtgaaggatcttttttttttttttctttgagatgaagtttcgctcttgttgcccaggctggagttcaatggcatgatctcggctcactgcagcctctgcctcccaggttcaagtgattttcccacctcagcctcccgagtagctgggatttcaggtgtccagaaccatactggctaatttttgtatttttagtagagacagggtttcaccatgttgaccaggctggtctcgaacttctgacctcaggtgat

SEQ ID NO: 7233 - DNA, 438 bp, Homo sapiens
  misc_feature (1)...(438): n = a,t,c or g
gggcgcctggttacagaattaccccccaagacctttaaaaaacccccttttccaaaatttttaaaaaatcccaaaaaaaaaaataaaggtcgggggggggggttcccccccgtaatcccccccctttggggggccgagggggggggtttccccaggggccggggtttcaaataaccctttcccccaaggggaaaccccttttttttttaaaaagccaaaatttcccgggttagtgggccccgccccttaaacccccctttaaaggggggtaaaccaaaaaaatttttttaaccttggaggggggggttccaataaacggaaattttcccccccccccccccccgggggggaaaaattttttttcaaaaaaaaaaaaaaaaaaaaaaaagaagnaatanaacagtgtatgaggggaatgccatgtaaaatctgaaataa

SEQ ID NO: 7234 - DNA, 403 bp, Homo sapiens
gttggagctgtctgtgattgggtttgaggagggaccatctatgggaactgtgttgttccagctacagtacctgctggatctcctggggtcccggctgtgggtggccagccagggcccttgcctgtcctgtgaaggacatccccagagacctgtccccctcttggagttactacagggagcttgtgcttggcaccctaccacagcctgagctttggaggacatgggctcccaggtacacccagagaggctgggtagagagagggagggaatagtcttcagctccaactgccaaaccctaagccttttcttccctctaggccagaggaccccacctggagccctagtagccaaggggaagagttaagaaggaggaaagtaaggtgcgatctgaagtctctgacct

SEQ ID NO: 7235 - DNA, 609 bp, Homo sapiens
  SIMILAR (311)..(607): 761254mologous to Homo sapiens M96A protein,accession number AJ010014,Smith-Waterman Score=373.
  misc_feature (1)...(609): n = a,t,c or g
agtcataaaaccaatgtccagcagtgttactgctattgtggaggccctggagactggtatttgaagatgctacagtgctgcaaatgtaagcagtggtttcatgaggcttgtgtgcaatgccttcaaaagccaatgctatttggagacagattttatacgtttatatgctctgtctgcagttctggaccagattaccctcaaacgtctacccattacagtgggtagatatagcacacctatgcctttaccaacctaagtgttattcataagaagaaatactttgattctgaacttgagcttatgacatacgattaatgaaaactgggatagattgcaccctggagagctggcagacacaccaaaatctgaaagatatgagcatgttctggagggcattaaatgattacaagaccatgtttatgtctgggaaagaaataaagaagaagtaagcatttgtttgggttgcgtaattcgtgttcctcctgtgccaccaaatgtggctttcaaagcagagaaagaacctgaaggaacatctcatgaatttaaanttaaaggcagaaaggcatccaaacctatatctgattcaagggaagtaagcaatggcataga

SEQ ID NO: 7236 - DNA, 739 bp, Homo sapiens
gtttatgcttaatgttagaggtactggaaaatggtatgtttcttactactttttgtacttcctattgatatctgttaggaacttttatagtaaatattaaaataattctaatgtattatttccctaggttaaagaatttttgaaaaatttaataactaataatacagtcccatttttgtggtgttttacagtttgtagttccttcataaacatatcgttggattaatgtaatgaacaagtaactagtgtaggatttaaacttcattttttataagtgagaaaataagccttgagaggttaaatggccctaggtcacataatagtcagtgaggacttggaattagaacttagatcttctgactaccaatcagtacacttttcctctgcatcacattgcctctatctagcacctgtatattactaattgatgaaattgtagtgcgttaaattgtttcttgatacttcacagctggcagacacaccaaaatctgaaagatatgagcatgttctggaggcattaaatgattacaagaccatgtaagttgatttattttatgtatccctatgagggagacatttagtaagtataaggaataatggcattgtttaagaattgtgggattgatgtacagaagaagtctataccattttaaactttataatgtcctattctattttagttagattaaagcagtgattctcaaggattggaggagggaggagtaatccttctcctggg

SEQ ID NO: 7237 - DNA, 898 bp, Homo sapiens
cattttccttatatggaaaaaaaatatgaaaggtgttcatgaggctgatcacatttcatatattttttgaccatttggatttcatctttggtgaatgaagtgtgttaaagttctcccatttttctcatgaatttgcaggtggttctttatatattctggctactactcctttatgagttgtgttgcagaatcttttctcactttgtggtttgtcttttcacaatgtttataaatatagtaacattttaattttaatatcttcaaataatagttttcctttatggttagctcggttttttttatggttatgttaaaaatatagttaatattctcttgttacatgctttgtagttttgcctctcacattttggtttcatcccacttggaacaatcttcaacatatagtatgaggtaatttttttgctgctatagggctagtctgttgtgccagcactgtttattgaaaaaaaacaaaaacaaaaaaccttccttttcctattgctttgaagtgccttttctgttgtatattggcaatatatgcaaagatcttttatgggctctttattatattggtttttttcctgtgctaatgtacactctcttcattacttcatgatcttcaaaaaaatttttgatatataatatcaaagtcctttcacatccttgttattcatcaacagcttgtggctcttcttggttctctgctcttctttatatattttagaaatagcttatcacgtttcactaaaaaaagccgaacacattgaaaatttgattggagttgcgatgaatctataagctattttgggagaatttatatcatagtgggcctttcaatccatgaacatgatatattgctaagtccttttaatgtcttaataaaattttattaatcacc

SEQ ID NO: 7238 - DNA, 1363 bp, Homo sapiens
  SIMILAR (293)..(901): 451254mologous to Homo sapiens NPD017,accession number AF271783,Smith-Waterman Score=361.
  misc_feature (1)...(1363): n = a,t,c or g
agtacataccgaattccctggtcgactccacgcgtccggatctaggcaccggtccgagtgcctgccctctgtccccgcggctgggtctcgtctgctccggttcctgggctcctaattctcggtccagcttcttccaggtctgcgcgtctgttgttcccagcgctctgcgaagcctgaaaaggaggagcaacctgtccagaatccccgcaggacaggaaaaggaggggaaatctcgacatggaaaaactctacagtgaaaatgaaggaatggcttcaaaccacggaaagatggaaaatgaatagcagccacaagaccagagaaagccacaagtaactttgtactctgggagacaagaagttagaaaacgagggaaagacagaaaacaagggcaaaacaggagatgaggaaatgtttaaaggataaaaggaaagccagagagtgagggagaggcaaaagaaggaaagtcagagagggagggagagtcagagatggagggaggatcagagagagagggaaaaccagagatagagggaaagccagagagtgaaggagagccattggagtgaaacaaagggctgcaggaaagcgcccagctgacggatgatgtacccaggaaagccaaaaggaaaaactaataaggggctggctcattacctcaaggagtataaagaggcccatacacgatatgaatttcaggcaatgaggacatgataaggggaattttacaatatggctaaggtgcaggatgaggaagagaaaaagcaaacagaaaattggggggcgtttttgtgggatgcaaagaaatttaccaggacccctttttaccctagagggtccaagggaaattcagggggtggctgcaggggccccaccgaagggacatttaaaaacattccttatggtgtagtgtcccctggcaggcatttaccaggcccatgtgcttttaacgttacggtaaatacttttacttttagggcatcccctccctggttgctaagcnagccctttttgaccttatcctgcaaatgccaggtgttcctccagtagggaaatggtccatcctgttaccatgggaaaaaatggttgatgggtgcattgtaaaattaaaaaaacacaacttgcagaacccaaatatatggcatcagtacatttttgtaaaactacaaagatacttaccctagtaatatagtatagaaaacaattctgaaagctgtgtccactaaaagattaacagtggttatctctgggtgattttttctgttcttttttgttcatctgtccatttttctcctaaaaacagatttctttagtcataaaaataataaaatataaagtattggaaaacagtgaaaaaaaaaaaaa

SEQ ID NO: 7239 - DNA, 413 bp, Homo sapiens
  SIMILAR (3)..(413): 931254mologous to Homo sapiens Similar to Zink transporter 2,accession number BC006251,Smith-Waterman Score=642.
  misc_feature (1)...(413): n = a,t,c or g
tcgtgacgggggtactggtgtacctggctgtggagcgtttgatctctggggactatgaaattgacggggggaccatgctgagcacgtcgggctgcgctgaggctgagaacatcataatggggtagacccttcaccagtctggccatgggcacagtcacggtaccaccaaccagtaggaggagaaccccagcgtccgagctgtcttcatccatgtgatcggcgactttatgcagagcatgggtgtcctagtggcagcctatattttatacttcaagccagaatacaagtatgtagaccccatctgcaccttcgtcttctccatcctgngcctggggacaaccttgaccatcctgagagatgtgatcctggtgttgatggaagggacccctcagggcgtttacttcacagctgtt

SEQ ID NO: 7240 - DNA, 427 bp, Homo sapiens
  SIMILAR (131)..(400): 531254mologous to Homo sapiens p40,accession number U93564,Smith-Waterman Score=248.
  misc_feature (1)...(427): n = a,t,c or g
cccatnnnnnnnnnnnnnnnnnnnnnnnnnnnnnnnnnnnnnnnnnnnnnnnnnnnnnnnnnnnnnnnnnnnnnnnnnnnnnnnnnnnnnnnnnnnnnnnnnnnnnnnnnnnnnnngcctggaaagtttatcccataaaagatcatctcctaggcacatagtcatcagattatctaaagcgaagacaaagaaaagcgtcctaagagctgtgaggcaaaagtatcaaataacctataaaagaacacctattagtttatcagtagattgctcagcacaaaccctacaagcaagaagggatttgggtcctaccttttgcctccttaaagaaaacaataatcagccaataattttgtatccagtgaaataaagcttcataaatgaaggaaagatagtctttttcagagaaataagtcctgagaggatttgc

SEQ ID NO: 7241 - DNA, 545 bp, Homo sapiens
  SIMILAR (430)..(543): 761254mologous to Mus musculus putative,accession number AK019386,Smith-Waterman Score=136.
gagtctgatgtcaggcgctttctctggagggtccgtctgtgcaataccgccagctctcgcctctccaacagcttcccgctccacccggccgtataaagcgcgccgacttggctacaaggccaagcaaggttattcgtgttcgccgtggtggccgaaaacgcccagttcctaagggtgcaactttacgcaagcctgtccatcatggtgttaaccagctaaagtttgcccgaagccttcagtccgttgcagaggagcgagctggacgccactgtggggctctgagagtcctgaattcttactgggttggtgaagattccacataccagtggatcaccaaaccagtccacaagcacagggagatgcgtgggctgacatctgcaggccgaaagagccgtggccttggaaagggccacaagttccaccacactattggatgtctcgccgggcagcttggagaaggcgcaatactctccagctccaccgttaccgctaatataagtaaagtttgtaaaattcatacttaataaacaatttaggacagtcaa

SEQ ID NO: 7242 - DNA, 412 bp, Homo sapiens
  SIMILAR (16)..(234): 601254mologous to Rattus sp. reverse transcriptase homolog,accession number S80119,Smith-Waterman Score=214.
  misc_feature (1)...(412): n = a,t,c or g
caaaaaccctaagatctgataaacaaaatcagtaaagctgcaggatacaaaatcaacacagaaaaatcagtagcatttctatatacaaacagcaatcaaactgaaaaagaaatcaagaaagcaatcccatttacaataactaccaaaaacaaaacaaaatacctaggaataaatttaaccaaagaagtgtaagagctataccaggaaaattttgaaacactgatgaaaggaattgnnnnnnnnnnnnnnnnnnnnnnnnnnnnnnnnnnnnnnnnnnnnnnnnnnnnnnnnnnnnnnnnnnnnnnnnnnnnnnnnnnnnnnnnnnnnnnnnnnnnnnnnnnnnnnnnnnnnnnnnnnnnnnnnnnnnnnnnnnnnatttttttaaatcctacaatttataaaaggtataaca

SEQ ID NO: 7243 - DNA, 412 bp, Homo sapiens
  misc_feature (1)...(412): n = a,t,c or g
aaaaaatatgacagacataaaaccaactgtattgataattaagtataaggggtctaaatattataattaaaaggcagagattataagactggataaaacagcaagattcaactctatgctgtccctaagaaatacacnnnnnnnnnnnnnnnnnnnnnnnnnnnnnnnnnnnnnnnnnnnnnnnnnnnnnnnnnnnnnnnnnnnnnnnnnnnnnnnnnnnnnnnnnnnnnnnnnnnnnnnnnnnnnnnnnnnnnnnnnnnnnnnnnnnnnnnnnnnnnnctttaaacataaaaatacagataagatacaccacgcaaacattaatcgtaagaaagctggaatggctatatcagaaaaagtagacttcaggacaagaaattngaccagcgatanagacaggtatttataatta

SEQ ID NO: 7244 - DNA, 396 bp, Homo sapiens
  SIMILAR (1)..(66): 1001254mologous to Homo sapiens Unknown (protein for IMAGE:2907142),accession number BC005847,Smith-Waterman Score=132.
cagcaacggcggcctccaggcctcaggccccctcaccatcctagaggtcaagatcagctctggctaggtaaggggtggggggcggcacagctataggaaggaccgagcggagggagtagggggaggggagtggagagagagcgcgggaggaggaggaagggaaggaaagggagggcgtgaagaggcacccggaaggcaggaggagagggcaggagggaaactgcactcgcctccctcccgctccgtggccacaggtccccgcaagaaagaccccgtcccactctctgaggtctcctcccagctccagaaaaggggacattccacctagtctgcccaacaagtaggtctcagccactgtgccaggagctcgggactcccttccttcaaaaggtcctg

SEQ ID NO: 7245 - DNA, 452 bp, Homo sapiens
  SIMILAR (52)..(450): 931254mologous to Homo sapiens Similar to protein interacting with guanine nucleotide exchange factor,accession number BC004270,Smith-Waterman Score=631.
  misc_feature (1)...(452): n = a,t,c or g
actgctaagactacctttttcagaaatgcgcatagcaaacatctttcatagaatgtctgcaaacctgtggaggagacacagcgcccgcccacactgcaggagatcaagcagaagatcgacagctacaacacgcgagagaagaactgcctgggcatgaaactgagagaagacggcacctacacgggtttcatcaaagtgcatctgaaactccggcggcctgggacggtgcctgctgggatccggccccagtccatctatgatgccatcaaggaggcgaacctggcggttaccacggacaagcggacatccttctacctgcccctagatgccatcaagcagctgcacatcagcagcaccaccaccgtcagtgagggcatccaggggctggtcaagaagttcaatggtgtggacaatccccagaaggttgcactatttaagcggatacacaaggn

SEQ ID NO: 7246 - DNA, 549 bp, Homo sapiens
aatgtgctctgtggaaataatcaaatatctgacttaggcatactgcttccagaggtgtgtatggccccagaggaaaagggagataaagacgaccaactcaacaaagaaacagaagactatttgaacagcctttttgaaggattgtttaaaggttactgaggattccctttcctatgaagataaccaagacgacgactccgatctccttcaagatctctctcctgaagaagcatcctatagtctccaggagaatctgccttctgatgagagctgtctttctcttgatgatcttgccaaaaggatagagattgcagaggttgttcctactgaaggattggtctccatattaaagaagaggaatgatactgtaggagatcatcctgcccaaatgcaacacaaaccatctaagcgaagagtgagattccaagaaatagacgatagcttggatcaagaatcacttggatttggagacggcgcactttaaatgaatgcagttatgtacataagtcatacctcaataaagttgttaaaaataaaaaaaaaaaaaaa

SEQ ID NO: 7247 - DNA, 1228 bp, Homo sapiens
acactattatgcaacagacagatttccatttgaaagggttagaatattgctgtattacacatattcatatgtcccttcttttccttcctatacaaagtgttgttttgaatttttaacaatttatttttcttcatctttagagagtaaaacttgtctcggcacagagtcaagtaaagaaagccaacatacagtggagcccctggggagcagtccctgctgtcatcagatggacgtgcaaacagattccccaagcctttcggtaactgcaggaaaggaccacatggaggagctgctctgcagcgctgaagccacgttagcgctccacacccagtcctccgagacagcagggagcccgtctgggccagactcttctgaggatgcttgtgaggatgacagtcgcttgcagctggctcaaacagaggcctgccaggatgtggccagaatagagggcattgctgaagaccctaaggtgtttctttccagcaagtcaaagacagagccgttgatttcaccaggctgtgaccgtatacctcctgcattgatttctgagggtaaatattcacaggctcagaggaaagaactccgtttgccacttcgggatgcttctgaggcgttgcccacagaccaacttgagaacaatgaattaaatgagctgcagcagcctgatcttacagacagtgatggaaaatcaccacaggcgcaggctgactcaaacggttctgagaatgtgctctgtggaaataatcaaatatctgacttaggcatactgcttccagaggtgtgtatggccccagaggaaaagggagataaagacgaccaactcaacaaagaaacagaagactatttgaacagccttttaaaaggatgtttaaaagatactgaagattccctttcctatgaagataaccaagacgacgactccgatctccttcaagatctctctcctgaagaagcatcctatagtctccaggagaatctgccttctgatgagagctgtctttctcttgatgatcttgccaaaaggatagagattgcagaggtaaatcagagatgaagtacaattaaaagtaaaatggcatttaaaaaacatatatatgtattaaatattgccttgtttttgtaagttttcccttgtctcaaacatgagggaaaattctagttaacgtaagcttttaattattagtagtttttacatttgtatgtattgaataaaataaattttaatcat

SEQ ID NO: 7248 - DNA, 674 bp, Homo sapiens
gtccgattctcgggagacacgcgtcgttattaacctaaaagattctgtgttttgtctatattgcaaactctttggggaaggaaaaaatcaagtgaaaaatgaaaatgggtgcaaagattggcaacatttatcacatattcttagtaaacatgaagaaagtgaaatgcacatcaacaatagtgttaagtactcaaaattaaaatctgatctgaaaaaaaataaagctattgatgctgccgaacgcagattatatgaaaatgaggaaaaatgatggtgtgctgttgttgtacacgtaatatacctgagttgttttttgggcatgatgatcaggaatcttacattactcaggaaaacatctgtcctggcaatagtcagtactattgtgttgtaagtctcctctacagagttaacttgcagcagttccttagcaataagtatgatagcaaataaatagcaaagaatgtttccattctaaatctaaaactaattagattcaatcatcattaggcaatgacttcattaggcaatgaagattaacaataggtaattgttaatcttcaaaatctatcaatttacacctatttaaaaattggcatttaatgactgccatttgatgggtttggttaaatattccggttccttgggccgggcgccaatgggcttcacggcctggt

SEQ ID NO: 7249 - DNA, 432 bp, Homo sapiens
  SIMILAR (1)..(213): 601254mologous to Homo sapiens SP100-B,accession number U36501,Smith-Waterman Score=214.
aagcgtggagagaaggctcctgagacttctaaaactacatctacttggagaataccctgcaggaagagacgtctcagcaatagagactttccagacctgagtactggagaagagcttcctgaaacctgcggctcatgcctaagaagagggtcaggtagagaaaattaggatgccgagacttggcctgcacaatgcccggaatgtgaatcaaaagctgctgtttccacacgctttttattctgagcaccttcactaccttggatccagttcatgggggaactcctttttgcattttataaaatggaaagaggcccgaaattatgacaaactcatgcctaacataacgagcctccctgactaactggacgtacctatattttgctgttgcagaagaaacatagagcaaaattgtggcattcttttgtttaaacg

SEQ ID NO: 7250 - DNA, 420 bp, Homo sapiens
atgagccactgagctcgcccctattttgcccttagaatcaatccaaaatccacccgcctcccatcttcttggcccctacctggccccacccacatcatttcccaccaggaccagggcagccaccttttcccttgtctactggatcccacctggtcctctaacagaagccaaagggtgcccatgagcacctgagtgggatccctccctccttggctcaaaatcctacatgggttccacctcacccaggaaaaaggtccagtcctcactcagccacaaggccctgtaaaatctgccctcgtctccttgcaccctctactttgctaactccctctaaccttactgggccctgacccctccttcccggagcccttcctgggctccttggcccacctgagaacttttgcactggctgttttctct

SEQ ID NO: 7251 - DNA, 405 bp, Homo sapiens
  SIMILAR (2)..(115): 971254mologous to Homo sapiens KIAA0792 protein,accession number AB018335,Smith-Waterman Score=183.
aagattctgggactatggccgcattgccctggtgtcataagcagacagcgagtccagatttcagagattgtcatcgacttcctcctcaggtcaacaagactttgaaaatgagctggttggtatctaaggcccagttgtggtcatggccagggggtggggactggcagtcatggttttggggagggagcagggcggatcttgagcggcaagtgctggagaaagtgcttttctgcatcgacgaaggcacctgaacttgggaaataccacaggagggatggcagctggatgacccgggaccttgagactggatgaatttgcaggcaggaaggggtacggaatcccttgggcttccccagcacttctctctcttacacctatggctttgtatgacagttaattatggcg

SEQ ID NO: 7252 - DNA, 753 bp, Homo sapiens
  SIMILAR (753)..(325): 621254mologous to Homo sapiens 60S ribosomal protein L15,accession number AF279903,Smith-Waterman Score=398.
ggtcgacgttttttttttttttttttttttgacggtcctaaattgtttattaagtatgaattttacaaactttacttatattagcggtagcggtggagctggagagtattgcgccttctccaagctgcccggcgagagccaccgaatagtgtggtggaacttgtggccctttccaaggccacggcttctttcggcctgcagatgtcagccccaacgccatctcccctgtgccttgtgggaactggttttggtgaatcccactgggtgttcaaggatttcttctgaatagcttttatggaaatggatcaaatgaggataacctcaaaaaaatttgtatgtggaatcttcaccaacccagtaaagaatttcaggactctcaagagccccacagtggcgtccagctccgctcctctgcaacggactgaaggcttcgagcaaacctttagctggttaacaccatgaatggacaggcttgccgtaagtttgcaccccttaggaactgggacgtttttcgccaccaacggcgaacatgaatcctatatataacggcgaacacgaatcctatatataacgtaaccttgcttggccttgtttgtagcccagtcggtgcactttatcaggccgggtggggcggggagccctgtggagagcagatagctggcggtactgccagcagcggaccctcagaagaaagcgcatgacatcagactgcttctttctccatagctccaggatgtacttgtatgcacccat

SEQ ID NO: 7253 - DNA, 1018 bp, Homo sapiens
gactcacgcagccccagtcccgccagtccgccaacacagtagtgccggccctcctctttccctggccctgccccccctccccgcctttggctcgctccgcctttctgccccccacccccacctcacgggtacgggccattcccggccaggaaacgccgtggcgccgcgttgggcctaactcgagtcctgccgcctcccgggagtgccgtgcgccgcagcccgggcccaggccccggcagcgcctgggacaagacactgaaaatgaagcagaaaaaatttggccgttctgttgggttatggagagagttgatcagagattgctccttggctgagttgctgtctgcataggctgttaacaattgtttctctggcagcagatcttgttcatcaggattgcatcatttctgggagaatggccaaggtccacagcctcaatacaaagactgtctgaagcatatgaggcctgttctctttctgaagcggcactcctcttcctgccagtcctcttcacaggattactgaagcagacttgttctgaatttctttcgttggattggttgtttattggacttttgtctgccagctgcttccgcctcacctgtctgatgcaatttcttcttctgaaatctgttggaattgttcataaaacactttttgtttgtcttctctgtgagtgaccagggagatcatacaggtcttgtgctttcagcaagtcatatagagaagagactgtcagaatgatgatacagagactgttggccatttctgaaaccaattaaaaagatggggtaattaagaaacatttctggcatgttctatttaacatccttttccctagaaactgtatgtaaatggcacctcctaaagagagtactcggtactactggaagatacaggctgtgtctgtttctgaatccaagaacttactagtgttcctgtggattctgatggattgttctggaaatagttaaattaataataaattgaaactgtgatgcattcatttaccccctactgt

SEQ ID NO: 7254 - DNA, 336 bp, Homo sapiens
taggtcccataggacacaggaaaaaaagcaacatgttgcgacacaagtgtcaagataaagcactgaattagtctttaagccttgctaaccactaattgaagtagctttgataaaaactatttgaggccagcacagtggctcagacctgcaatcccaccacttaggggcaagcagtgaggctaaggcagatcacttgaggcctcccaaagtgccggcattacaggtgtgagccacagcacccggccaattgatatacttttgattaaagctgtttacattagtctctcccactaaactgggttcccaggcttacaagggcaatgactggggatctca

SEQ ID NO: 7255 - DNA, 755 bp, Homo sapiens
  SIMILAR (484)..(753): 521254mologous to Homo sapiens Human myelin oligodendrocyte glycoprotein gene,accession number AAZ29204,Smith-Waterman Score= 180.
cccacgcgtccgggcaggcttgagtttataatgaaagcttactcagttcctcttcatgtcctatgtatttaagagaggacagttttccctcagtttttttccccttccttacccctacccccatcaaatacagcccaaccaaataactgtgttctttaatttaaaggaaagtggcagacttgatacctgctgaatatttcgtgtagacagagtatgacaatgaatgagatccccagtcattgcccttgtaagcctgggaacccagtttagtgggagagactaatgtaaacagctttaatcaaaagtatatcaattggccgggtgctgtggctcacacctataatgccggcactttgggaggccaaggtgggtggatcacttgaggtcaggagtttgagaccaccctggccaacatggtgaaaccctctccctatttaaagaaaaaaaagtaaggcatatcaatttatggttatcaaataggtttttttttttttttttgagactgagtgtcgctctatagcccaggctggagtgtagtgctcattgcgacttccgcctcctgggtcaagtgattctcgtgcctcagtctcccgagtagctgggattgtaggcgcctgccaccacgcccagctaatttttgtatttgtagtagcgatggggtttcatcatgttggcgaagctggtcttgaacacctgacctcaagtgatctgccttagcctcactgcttgcccctgagtggtgggattgcaggtgt

SEQ ID NO: 7256 - DNA, 423 bp, Homo sapiens
  SIMILAR (421)..(149): 1001254mologous to Homo sapiens Human secreted protein, SEQ ID NO: 8154,accession number AAG04073,Smith-Waterman Score=458.
  misc_feature (1)...(423): n = a,t,c or g
naagtggcaagagagcgacgtctcccaggcccgcaagaaggtcctcatggtagagctgcaggaagcgcatcgcccctggctccatcaatagcaccatctccaccaggccctcctgccctgccagcttcacacatcctgggctcacaggccctgccttctccagagaccccatggtgatctccatgggacccaccagcccctcttgctctggtgagtccatggcaatttccaccaggccctcctgccccagcaaccccttagaggtctccactgggcctgcagaccccacaggccccaggctcatgggcccctcctgttcctgcaaccccacaggcctcaggcttaccagcccctcatgttccagagaccccatgggcatcgagctgacttgctctgcctgtcccagagaccccatgggacctg

SEQ ID NO: 7257 - DNA, 436 bp, Homo sapiens; identical to SEQ ID NO: 4344
  SIMILAR (350)..(436): 1001254mologous to Homo sapiens HSPC057,accession number AF161542,Smith-Waterman Score=154.

SEQ ID NO: 7258 - DNA, 640 bp, Homo sapiens
  SIMILAR (596)..(640): 801254mologous to Homo sapiens Familial Cylindromatosis Gene,accession number AJ250014,Smith-Waterman Score=62.
aagtgctcgctggactggaactggaagatgagtgtgcaggctgtacggatggaaccttcagaggcactcggtatttcacctgtgccctgaagaaggcgctgtttgtgaaactgaagagctgcaggcctgactctaggtttgcattattgcagccggtttccaatcagattgagcgctgtaactctttagcatttggaggctacttaagtgaagtagtagaagaaaatactccaccaaaaatggaaaaagaaggcttggagataatgattgggaagaagaaaggcatccagggtcattacaattcttgttacttagactcaaccttattctgcttatttgcttttagttctgttctggacactgtgttacttagacccaaagaaaagaacgatgtagaatattatagtgaaacccaagagctactgaggacagaaattgttaatcctctgagaattaattgatactggaacaagacaggtcaaacccgaaactctaaggcatgttaacacctccttcctagaagagaggaagaataaacattctttggatcctattgttcagccagttaagaatcatagttaatcacactttcttaccctgtccacgatatggatatgtgtgtgccacaaaaattatgaaa

SEQ ID NO: 7259 - DNA, 426 bp, Homo sapiens
  misc_feature (1)...(426): n = a,t,c or g
tgaaaactagaaaatggtgttgaaagaaatcaaagaagatctaaataaacagacagatatactgttttcatgacttcaaagactcatcacagtaaggatgtcaattctccctaaattaatatacaagtttagtgcaattcctatccaaatcccagcatgatttttgtaaataaagattattataaaatgtatgaggaaaggcaaataaactagaatagctgaaacaannnnnnnnnnnnnnnnnnngagccaaagttttattttgtcacccaaattggaccacaggggggggatcacagctaattgcactccaccctgggcaataaaagggaaactccttttnnnnnnnnnnnnnnnncccccaaaaaccaaaccagaaaaattttttatacaaaaagccaccggggctgagggtggggttcaccc

SEQ ID NO: 7260 - DNA, 963 bp, Homo sapiens
  SIMILAR (1)..(504): 441254mologous to Homo sapiens hNBL4,accession number AB030240,Smith-Waterman Score=341.
ttttatcatgcagaccatgctgctctgaaagacgaaatgacagagtattaagtcttcttgcagatcaaaaggtatctctaccatggcagactcctctgtaaacatccggatgctgcattgttagcagcttacatcattcaagcggagattgggaatcatgactcagggtaacaccctgaaggctacagctccaagttccagtttttccctaaacattcagagaagctggaaaggaaaattgctgagattcacaagacggaactgagtggtcaaacaccagcaacatcagagctgaacttcttaagaaaagcacagacattggaaacatatggagtggatcctcacccatgtaaggacgtgtcaggaaatgctgcatttctggccttcactccttttgggtttgttgttcttcaaggaaacaagagggtccacttcattaaatggaatgaggtgaccaagctgaaatttgaaggaaagactttctatttatacgtaagccagaagaagaaagggataggctcatgccctgtctaaacaaactgggaaaactcattttcttcagaagttatttcaagaaaggctcagcgactctgtttctcatctttccaatttgcaggataatttttggttttgaattttgatttttcatagatgtatattattttgaagtatcaaataaaaataatttgttttcctattcctgattaatgcagtagtatcccctagcagaggggaccctagtttaaaactagagagccgctgtcctgtgtattccgcaggagcttttcatgctggtgccgctgggttccagtagactcatcactgcagcctcagcagggcaggccagggatctggacaatggggactgtttagttttccgtttgtttttttagccagccagaccttttaaaaaagtaaacatccttgtagaatgattaaatggaaaggtgcttcttatgatgg

SEQ ID NO: 7261 - DNA, 363 bp, Homo sapiens
ccaagatcctgtgatctagatggcaggtatatttaatgacagaacaaactatcccagcaataataaaggatgagaaccacatgactctttggctagaggcttctctctctttaaaagagttgcctgaacatctttggccttaagcagaccacatcctctcttagatggaatagagttaagaaataggcccacacatatggctgacagttgattttcaacaaaggtgccaaaataattcactggataaagtataatcctgcaaatggtatctgctattggatatccatatgcaaaaaagtgaatctcgatccttacctcataccatacacaataatccaaaatggatcatagaccccaaatgga

SEQ ID NO: 7262 - DNA, 430 bp, Homo sapiens
  misc_feature (1)...(430): n = a,t,c or g
ngggcgtggctctcagccctaaacagctccttgccagccacgtggtcctgctgcccctcgctgggtgccagccataagctccagtgggaggcgacctcacccaccgtcccaccgagggccccctcacaggtcaagtgtgctgcctgtgaaccgactcccccgactctcccttgtctgccctttcagccccctcccaggtcactctcgagccaggcccaggtgctgctgacgggccaccctgggtgaggtcctctcaggcgccagggtgaaggtcttctccggagtaaaggctgccaagcgaggctgacacagccgaacagcggtgagggcggggccgtctcctgaactgggcggcctggagacggcgctgtcggggaggcggccccggagaccacccgccgggactgcccaacggcgccgcccgcctcgg

SEQ ID NO: 7263 - DNA, 637 bp, Homo sapiens; identical to SEQ ID NO: 490
  SIMILAR (47)..(412): 991254mologous to Homo sapiens gamma-G globin,accession number X55656,Smith-Waterman Score=637.
  misc_feature (1)...(637): n = a,t,c or g

SEQ ID NO: 7264 - DNA, 380 bp, Homo sapiens
  SIMILAR (10)..(378): 801254mologous to synthetic construct Human serum albumin,accession number A00279,Smith-Waterman Score=507.
ggcacgaggctattagttcgttacaccccgaaagaaccccaagtgtggactccaacttttgtagaggtctttggagacctaggacaagtgggccccgaatgatgttaacatcctgaagcaaaaagaatgccctgtgcacaagactatctatccgtggtcctgaaccagttatgtgtgttgtatgaaaaaacgcctctaagtgacagagataccaaatgctgcacagaatccttggtgaacaggcgaccatgcttttcagctctggagggcgatgaagcatacgatccccaagagcttaatgctgaaacattgaccttccatgcggatatatgcacactttctgaaaaggagagacaaatctacaaacaaactgtgcttgt

SEQ ID NO: 7265 - DNA, 388 bp, Homo sapiens
  SIMILAR (2)..(379): 701254mologous to Homo sapiens putative p150,accession number U93574,Smith-Waterman Score=462.
caatgtacaaaaatcgctagcgttcctatacaccaacaacagtcaagttgaaagccaaatcaggaatgcaatcccattcacacctgccacaaaaagaataaaatacctaggaatacccctaaccagagaggtgaaaggtctctataatgagaattacaaaaccctgctcaaagaattcagagaagacccaaacaaatggaaaaactttccatgctcatgggtaggaagaatcaacatcattaagatggcgatgctatccaaagcaatgtaaagattcccgcgtgttcatatcaaaataccagggacattcttcacagaactaggaaagcctattttaaaattcatatggaaccaaaaaagagcccaaatacccagggctactcgtgcc

SEQ ID NO: 7266 - DNA, 374 bp, Homo sapiens
  SIMILAR (72)..(365): 421254mologous to Rattus norvegicus L1 retroposon, a portion of its ORF2 sequence,accession number X61294,Smith-Waterman Score= 161.
  misc_feature (1)...(374): n = a,t,c or g
cacatcaaaacttgtgaaatgcagctaaaacagtgcttggagagagaaaagttctaaaattactaatataaacttctaccttaaaaaagctagaagaaaagcaaactcaaagtagaaggaaagaaataaagatanctgcagaaatcaatgcgatagaaaataagcaaatagagaaaattagtaaaaccaaaagttgctcctttaaatgatcaataaaaattacaaacccctaactaaagcaatgaacaaaagagaagatataaattaacaatattaagaacaaaagaggacaagtgactatggcttttgtagccattaaaaggatatcaagggaatactgtcaataactttataccaataaattcaacatttag

SEQ ID NO: 7267 - DNA, 378 bp, Homo sapiens
  misc_feature (1)...(378): n = a,t,c or g
gaagcagtggaagccggctcccccaggtcctgcaaaccccctcccccggggggnnnnngggcccgaatagaaaggcccccactcagacaaagcgaagccattttctcctttttttaagaaaaggcaatgggggggggccccttcaaggtcaaaaaaagcccgggggaagggccaaccaccaaagggtggccacttaaagggccccttgagggtggtcaacggggtttaacgggcccctttaaatcgaacggccgccnnnnnnnnnnnnnnnnnnnnnnnnnnnnnnnnnnnnnnnnnnnnnnnnnnnnnnnnnnnnnnnnnnnnnnnnnnnnnnnnnnnnnnnnnnnnnnnnnnnnnnnnnnnnnnnnnnnnnnnngg

SEQ ID NO: 7268 - DNA, 375 bp, Homo sapiens
gacaaataaagccacctaggctgagggatacccctcactccttcactccatatcacccagtgaggagagggctagtctatttccccagtgccccttcccctgccaagggtgagcagctgcatactagaaccaggcacaatgttttgggcagccaccctcgtcgccgccttccaagaagctcctagtctagccacagagtcacaaggggaagcttgggctcagtccctcctgccaggtccacctcttatgggccttctaggcagtgggatctggcctgccccctcacaccagaaggcgtgtggagaaccaagaacaataagcccgaggcattgtaggagacagagcatatctgataaacaggactaacgatgctca

SEQ ID NO: 7269 - DNA, 344 bp, Homo sapiens
tcgggcccctcactgggggcaggtgtagccatttaagggccatctccttacactgaccccacacccacctacccatgactcaccctgctcctcactaacccccgaactaactcaaccctgcctcccacactgcacctgccctcacgaccgaccccatcctcacccccatcaacatctctgcctccctccttggtcctaaggttttttttaaaaattcaatcaggaaaacggagggcatacccagaacacttctgggggcaaaatggggagagaaaggtttaaccatccgtccatgcccctgtgaattcatccaccgcttatgtcgactcggggcgcaaatttca

SEQ ID NO: 7270 - DNA, 387 bp, Homo sapiens
  SIMILAR (16)..(234): 601254mologous to Rattus sp. reverse transcriptase homolog,accession number S80119,Smith-Waterman Score=214.
  misc_feature (1)...(387): n = a,t,c or g
caaaaaccctaagatctgataaacaaaatcagtaaagctgcaggatacaaaatcaacacagaaaaatcagtagcatttctatatacaaacagcaatcaaactgaaaaagaaatcaagaaagcaatcccatttacaataactaccaaaaacaaaacaaaatacctaggaataaatttaaccaaagaagtgtaagagctataccaggaaaattttgaaacactgatgaaaggaattgnnnnnnnnnnnnnnnnnnnnnnnnnnnnnnnnnnnnnnnnnnnnnnnnnnnnnnnnnnnnnnnnnnnnnnnnnnnnnnnnnnnnnnnnnnnnnnnnnnnnnnnnnnnnnnnnnnnnnnnnnnnnnnnnnnnnnnnnnnnnatttttttaaat

SEQ ID NO: 7271 - DNA, 426 bp, Homo sapiens
  SIMILAR (3)..(410): 771254mologous to Homo sapiens KIAA0372,accession number AB002370,Smith-Waterman Score=491.
ctgtacttgaagaactaccaatttcagtcctgttcaactcatcctctgttccagcgtgtcagtggctggcgcatgtgtatcactcccatggaatgatgagagctgcacagatgtgttacataaaaactctacaattggcatcccaacggcgcagttgttgggcaaagctctcaagtctgtggagactagcactacttgcattaaaaggctgtatggctaacatttccaatgattactggccatctttggttcaagaggctacaactgaggccttgaagctttgcttttgtccactggctgttcttttacttgctttgttacaattcaaacgcaaaatggtgtcaacatagacactgtgtcttttggaaagagtggtatatcaccctgggccttccaaatttattggatccaactggccggcggttc

SEQ ID NO: 7272 - DNA, 393 bp, Homo sapiens
  misc_feature (1)...(393): n = a,t,c or g
nnnnnnnnnnnnnnnnnnnnnnnnnnnnnnnnnnnnnnnnnnnnnnnnnnnnnnnnnnnnnnnnnnnnnnnnnnnnnnnnntatcctgatttctactgtcatgcctcacatcagtccnnnnnnnnnnnnnngaaacaaattctctttttgggccccaggttaaacggcaggggaatgatttgggttaattgaaccctccccctcgggggtttaagaaattttccggcctcaccctccggagaagcgggaattataggcccagccccccccgggtttttggtttttaagggaaaagggggttaaactgggtggctaaggggggtttggatctcttgagctaaaacaatccccccccttggccctcccaaggggctaggataatgggcgagagct

SEQ ID NO: 7273 - DNA, 395 bp, Homo sapiens
  SIMILAR (393)..(181): 941254mologous to Mus musculus ODZ3,accession number AF195418,Smith-Waterman Score=386.
  misc_feature (1)...(395): n = a,t,c or g
ntcaaaataaaccccccgaacctcagtgttttagtaaaaaagaaaagttcctagttaccccccttgtccaaaaaatcccgaagaaccaccactttggtaggctatgtccggccatttctcctaaacatgcaagttggaggccnnnnnnnnnnnnctttccttctctggaatgtatcttggtgcttcttcacaactttctcctttgtatcctgagttgcaagcacaagagcccatgatacaaatcccacgtcccccgcactgtgggtcaatacactgggtagtcggcacatcacactcggtgcccttacagccgctgaaacacaggcaacggcccttggagtactgcccgttgcccctacataacactggacaggcggctcttgatcaatccggac

SEQ ID NO: 7274 - DNA, 768 bp, Homo sapiens
  SIMILAR (419)..(54): 421254mologous to Homo sapiens PRO2987,accession number AF116719,Smith-Waterman Score=146.
  misc_feature (1)...(768): n = a,t,c or g
gacactcgctttttggaacgtctgaggttatcaataagctcctagtccagacgcccatgggtcatttcacagaggaggacaaggctactatcgacaagcctctggtgcaaggtgaatgtggaaagatgctggaggagaaaccctgggaaggctcctggttgtctacccatggacccagaggttctttgaccagctttggcaacctgtcctctgcctctgccatccatgggcaacccccaaagtcaaggcacatggcaagaaggtgctgacgatccttgggagatgccataaaagcacctggatgatctcaaagggcacctttgcccaagcctgaagtgaactgcacttgtgacaaagctgcaatgtggattcctgagaacttcaaagctcctggggaaatgtgctggtgacccgttttgggcaatcccattttcggcaaaagaatttcacccctgaaggttgcaaggcttcctgggcagaaagatgggtgacttgcagttggccagtggccctgttcctccaggataccactgaagctcaattgcccatgaatgcagagcttttcaaggataaggcttttattcttgcaagcaattacaaataataaatctatttctgctaagagatcaccaaannnnnatnntnnnnnnncccccggattttttatttagcgggccgcacctttttccccttttagggggggtaaatttatattgggccttgggccggggttttcaaaagcggggggannnnnnnnnnaaagagccc

SEQ ID NO: 7275 - DNA, 379 bp, Homo sapiens
  misc_feature (1)...(379): n = a,t,c or g
nnnnnnnnnnnnnnnnnnnnnnnnnnnnnnnnnnnnnnnnnnnnnnnnnnnnntcatgcctgtttattccttagtacttaacnnnnnnnnnnnnnnggaaacatagcccccttttgtggcccagcttggggggaaggggggcaatttgggttaattgaaccctccccctcgggggtaaaggcaattttcttccctgggccccccaattagtgggaactacgggccccccccaccttcccgggttatttttggttttttaagaaaaaagggggtttccccttctggcccgggtggttttggaatcccggacctcaaaattggcccttttaaccctcccaaggggctgggataacgggggggaccctgggggccaaaccaa

SEQ ID NO: 7276 - DNA, 409 bp, Homo sapiens
  SIMILAR (86)..(367): 461254mologous to Rattus norvegicus open reading frame 2,accession number X61296,Smith-Waterman Score=181.
  misc_feature (1)...(409): n = a,t,c or g
nnnnnnnnnnnnnnnnnnnnnnnnnnnnnnnnnnnnnnnnnnnnnnnnnnnaactcctaaaacttnnnnnnnnnnnnnnnnncctgaaatcatatcaggttttttctttgaccaccatggaataaaactagaaaccccaaaaaggaactttggaaattatccaaatacctggaaattaagtaataccctcctgaatgaccagggggtcattgaaggaattnnnnnnnnnnnnttaaaatggcttaaaacaaatgaaaagggaaacccaacttaccaaagcttatgagatacagcaaaagcagtcctaaaaggaaatcttacagcaatcagcgcctacatcaaaaacagagaaaaacttcaaataaacaaacaatgcatctttaattaccccgaaaagcaagagcaaatg

SEQ ID NO: 7277 - DNA, 374 bp, Homo sapiens
agattatgagatgacaacacttttgggagaacttccatgtgacaaaagatagaataaacacaggtgagagacaagaaacagattggaagatttttgcaacatacctaatgaaaaaagtataaatatccagaaaatgctacaactcctacaaattagtaaggaaaaaacaactcaatagaaaatgggcaaaagaaaagaacaagcaatcacagaaaaagaaacaaagtggccagtagacaaaaactgttcaacctcagtaaaataagaggaatgcagactaaaggtactatctctcacccatcagtttagcaaaaagcaataaattaaattattaatcagtacgtattagcaaggatatggaagaataagtactt

SEQ ID NO: 7278 - DNA, 400 bp, Homo sapiens
  SIMILAR (1)..(396): 951254mologous to Homo sapiens zinc finger protein 268,accession number AF317549,Smith-Waterman Score=711.
gaatcgcggcttatttgccaacaaatgtatatgggcgaaaaaccctttggatgcagctgttgtgagaaagccttcagcaacaagtcataccttctagtgcatcagcaaactcatgccgaagagaaaccctatggttgtaatgaatgtgggaaagacttcagtagtaaatcatacctcattgtacatcagagaattcatacaggagagaaactacatgaatgcagtgaatgcaggaaaacattcagtttccattcacagcttgttatacatcagagaattcacacaggtgagaatccctatgagtgctgtgaatgtgggaaagtcttcagtaggatagaccagcttgtttcacaccagaaaactcattcatgacagaaaccatatgtgtgtaatgaatggg

SEQ ID NO: 7279 - DNA, 373 bp, Homo sapiens
ttcaggccctacccatctctcattcgaatacttgcagtaggctaatcccacctacccaattcctcctttgaacaaaaatacgcatatgagtttgttccaggttatcaaaagcactacactctatcaaaatttccatggcctttttttgcagaaatggagaagctgatccttaaattcaaatggaaaagttgatcccacataaccgaagcaatcttgagaagaaagaacaaagtgggagatctcacactttcagatgtaaaaagctcactataaagatatgataatcagcttttgtcagtgtgatactagtataagcatagacgtatagggccatgggaccatggaaggccagacatacatttatgaacaattg

SEQ ID NO: 7280 - DNA, 487 bp, Homo sapiens
  SIMILAR (481)..(425): 941254mologous to Homo sapiens Human ORFX ORF649 polypeptide sequence SEQ ID NO:1298,accession number AAB40885,Smith-Waterman Score=100.
gagtctgcccatgctcccagctgaataaagccattacttctacaactcggtgtctgaggggttttgtctgcagctcctcctgctacagaaggagagcaagggagagagggatggagaaacaaacccagagggagagagagagacagcgatagagagagagacagagaaggggggaggagagacagagaggggggaagagagagccccacagtagagcgcgaggtggagggggaagtagagaaagggagagggtgagggagttgtagagcgacagcgacagatccttggagagggaggctctgctcaggtagacagggcacctttcagcaggccggggtggggtggagggtgcttgagccgggctagaacagggggtcagggccccccacccgggaaaaccaacggagccctgcgacgtgttttttttttcttgaattggttggttgctttgggggtgcgtttcataaggtccttcctttgtttgctt

SEQ ID NO: 7281 - DNA, 720 bp, Homo sapiens
cagcggtcttttgggcgagcagatatgcacacacacccacttgttccttctggtgtgggatatatgcccagagtacttgttgagaatctggggtgctctgtgagcagccgccctgcccttgccccagtaatagccccttaaaaccctaccagcgctgcccaagcctcatcttaggactctgcccccaaagctggtgctgccagtcagcctgtctgcccaagtagggtctggctcacagcgctgtgaggcacagcagcttctggggacatctccaggactcaggacccttggtgccacctggtgcaggtcagggatccctgggcctgctggcagcagagtgggtggggaaggcaagtccgtggggtccagcccctgcctgccccactccacacagtgaagcactggtctgcagtttccgcacctcgccaccctccaccccccacgctcacccaggtccagtctcaggccctgcctcagtgcttgcggctctcagactgggtctacacctcctcaggggttgtgggggtggcacgccaacttctccccaaaccctccaagatgaggaagcaaattaggggcatagaggacatggggataggctgctgaggctgacccaggctccaaccgcccaacccctctggcacaggccttggcaaaaggactggccaaacctgctgcccaggcccctttctttctggtgcagacccccacctcgtccgg

SEQ ID NO: 7282 - DNA, 418 bp, Homo sapiens
  SIMILAR (82)..(210): 831254mologous to Xenopus laevis small Rho-like GTPase Rnd1,accession number AF151014,Smith-Waterman Score=195.
ctcagggattgaggatggtattcccagggctttagggcttaggcctattggggaaggaaaacaccatggctcaccatcagctctttctggcctacaccaggatctccctactacgataatggccgtccactctgctacagcgactcggatgcagtattactatgttttgacatcagccgtccagagacaggggacagcgcactcaagaaggtaagactagatcaactctctaatctctaactcagcatgaggaccaagaaggaatcgggaccttgtcatgaatgcctcttgttaacatcaagaaatggaagccagggaaggaagagatttgcccaaggccacaccattagctacagctctgggactggaacttgggtctccttaccccactgcctcccgccctttttgttatcccatg

SEQ ID NO: 7283 - DNA, 241 bp, Homo sapiens
  SIMILAR (2)..(223): 771254mologous to Homo sapiens KIAA0898 protein,accession number AB020705,Smith-Waterman Score=281.
  misc_feature (1)...(241): n = a,t,c or g
tgcaggacccggagggagtccccatggttatgtgggttcccctttgagaatatccacaagaactcatttatgcttcgctgctaccaggagtttactacacattgatccattaattgtactacctttggtggaccttaaggaccggatcattatataaaatttgtggggcttacagcctctcccacctgcttcacttctgcagcccacagcattatattctcgnnnnnnnnnnnnntggggg

SEQ ID NO: 7284 - DNA, 409 bp, Homo sapiens
  SIMILAR (82)..(408): 671254mologous to Mus musculus putative,accession number AK002737,Smith-Waterman Score=369.
tcccctgggacctgtggccgccgcccacagaccatgctcctggggcgcctgacttcccagctgttgagggccgttccttgggcctctctccctcgcaagggggcccagctggagctggaggagatgctggtccccaggaagatgtccgtcagccccctggagagctggctcacggcccgctgcttcctgcccagactggataccgggaccgcagggactgtggctccaccgcaatcctaccagtgtccgcccagccagataggggaaggggccgagcagggggatgaaggcgtcgcggatgcgcctcaaattcagtgcaaaaacgtgctgaagatccgccggcggaagatgaaccaccacaagtaccggaagctggtgaagaagacgcggttcctgcggaggaaggtcc

SEQ ID NO: 7285 - DNA, 614 bp, Homo sapiens
  SIMILAR (94)..(8): 961254mologous to Homo sapiens PRO2987,accession number AF116719,Smith-Waterman Score=145.
  misc_feature (1)...(614): n = a,t,c or g
ggcacgaggagggtatcaataagctcctagtccagacgccatgggtcatttcacagaggaggacaaggctactatcacaagcctgtggggccagtgccctgtcctccagataccactgagctcactgcccatgatgcagagctttcaaggataggctttattctgcaagcaatcaaataataaatctattctgctaagaanaaacacccacccacgccnaacnccaaacaacataataaaaaaggggttttaattaaagggcccgagaggttaacccccttaagggggggtaaattttaaggtgggcccgggggcggggttttaaacaaggtcggaaccttggagacagggtnnnttttgccccgggcccctgggacgctttataatatccgcctcaataaggagaacgttaggtctggttctttttttatactcgggaaaacctctaaagggtgggaaaaaaactcaggggtcccttatattacgcgtcaccctttatatctggggagatcggaaaaatagcttttgggctatttantcatgcaaaccggctattatatttagtaacagattaagacaactctgaagagacaaccattagacgtgagaagcgg

SEQ ID NO: 7286 - DNA, 361 bp, Homo sapiens
  SIMILAR (217)..(330): 781254mologous to Mus musculus putative,accession number AK002737,Smith-Waterman Score=157.
ttacagcacatcgccggccggccaggtagggcggctctctccctcgcaagggggcccagctggagctggaggagatgctggtccccaggaagatgtccgtcagccccctggagagctggctcacggcccgctgcttcctgcccagactggataccgggaccgcaggacatgtggctccaccgcaatcctaccagtgtccgcccagccagataggggaaggtccaggagggacgcctgagacgcaagcagatcaagttcgagaaagacctgaggcgcatctggctgaaggcggggctaaaggaagcccccgaagggctggcagacccccaagatctacctgcggggcaaatgagtctggcgc

SEQ ID NO: 7287 - DNA, 1160 bp, Homo sapiens
  SIMILAR (742)..(170): 391254mologous to Mus musculus putative,accession number AK003442,Smith-Waterman Score=189.
tttttttttttttttttctgagtcctctgagaatttattactacggatcacagcagcaacgggcgggaagggcggcgcatgacatcatttgccccgcatgtaagatcttgggggttttaccaagctttcgggggcttccctttagcccccgccttcaaccaaaatgcgccttcaggtctttctcgaaacttgaatctgcttgcgttctccaggcgtcccttcttggaaccttccctccgcaaggaaccggggtcttcttcaaccaagcttccggtaacttgtgggtggttcaatctttcagccggcgggatctttcagcaacgtttttgcacttgaaatttgaaggcgcatccgcgacggcctttcaatccccccctggcttcgggcccctttcccctaatcttggctggggcggacacttggtaaggaattggcggttggaagccaacaagttccctgcgggtccccggtatccagtctggggcaggaagcgagcggggccgtgagccgagctctccagggggctgacggacatcttcctggggaccagcatctcctccagctccagctgggcccccttgcgagggagagagaccgcgcctacctgggccggccggcgatgtgctgtaaagggagaccgcagacccggctgcccagcactccatgagacaggccaaggcgggcggccgcctgcccaaggaacggccctcaacagctgggaagtcaggcgccccaggagcatggtctgtgggcggcggccacaggtcccaggggagctcgacgcggctcaaattgaccgttctgcggccgccctcgggcacttccggtccgtccccaagtcggccccgatcggcagcggccacccggcggttcctacgcacagcgcccgctggcgtcctcgcggcccccgattctgcattggctcaggccccgccgggcccgaaaggcgacggtttccgggggtgcgggccctggatatacccgcaggtccagaatcgtttccggaccacccaggggccggattcccaacgggccgacggaagtgcgggctcaagactacggaagtgacgtatctggcaacggaagtggagttacgtggaaggcggaagcgtctagagctatttcccccgtttttgctagagaccaaggacccggaataa

SEQ ID NO: 7288 - DNA, 440 bp, Homo sapiens
  misc_feature (1)...(440): n = a,t,c or g
annnnnnnnnnnnnnnnnnnnnnnnnnnnnnnnnnnnnnnnnnnnnnnnnnnnnnnnnnnnnnnnnnnnnnnnnnnnnnnnnnnnnnnnnnnnnnnnnnnnnnnnnnnnnnaaaaaagaaatatgaagtctgagatacacatttctctacactttccccattatattagaacatattatagtgctgatgcaacaaacatgctgtttacatggcttcatttccatttacctcctaatacacacatttatccttcagatacatcctttccacactttattccaacaaacatgttcttcgattcaacaattgtattttttagtttaatatttcgcttatgtttatacttttctttttattctgtatctttcttatccctttttgtattattattaggcttgttttgaaacttttgactccttcaatgaaatcggacgcgtggg

SEQ ID NO: 7289 - DNA, 391 bp, Homo sapiens
  SIMILAR (2)..(319): 1001254mologous to Homo sapiens telethonin,accession number AJ011098,Smith-Waterman Score=574.
  misc_feature (1)...(391): n = a,t,c or g
catggctacctcagagctgagctgcgaggtgtcggaggagaactgtgagcgccgggaggccttctgggcagaatggaaggatctgacactgtccacacggcccgaggagggctgctccctgcatgaggaggacacccagagacatgagacctaccaccagcaggggcagtgccaggtgctggtgcagcgctcgccctggctgatgatgcggatgggcatcctcggccgtgggctgcaggagtaccagctgccctaccagcgggtactgccgctgcccatcttcacccctgccaagatgggcgccaccaaggaggagcgtggggtccccagcaccctctgttagtgccgcaataaatgctcaatcatgtgaannaaaaannnnnnnnnnnnn

SEQ ID NO: 7290 - DNA, 1253 bp, Homo sapiens
  SIMILAR (297)..(800): 831254mologous to Homo sapiens telethonin,accession number AJ011098,Smith-Waterman Score=685.
agggcaagtgccaggggggcacaaggctgggcatgtggctggcatgagacggtgtctgagtaatgtcaggcacctggaggcattgaccccaggaccttggaccccagacctctgaccgtggggcagccagcgtccaggtaccccaacccctgccctgggtccggcgtccccccattagtgagtcttggctctacttatagcatctgacaccagaggggccgaaaatagcccctggagaagggggaggagggggctatttaaagggcctgggaggggagagagaatgaggagtgatcatggctacctcagagctgagctgcgaggtgtcggaggagaactgtgagcgccgggaggccttctgggcagaatggaaggatctgacactgtccacacgggcgagagggagggctgctccctgcatgaagaggacacccagagacatgagacctaccaccatcaagggcaggggcaggtcgctggcgcagcgctcgccctggctgatgatgcggatgggcatcctcggccgcgggctgcaggagtaccaactgccctaccagcgggtactgccgctgcccatcttcacccctgccaagatgggcgccaccaacgaggagcgtgaggacacccccatccagcttcaggagctgctggcgctggagacagccctgggtggccagcgtgtggaccgccaggaggtggctgagatcacaaagcagctgccccctgtggtgcctgtcagcaagcccggtgcccttcgtcgctccctgtcccgctccatgtcccaggaagcacagagaggctgagagggactgtgacttgggctccgctgtgcccgccccctgggctgggcccttcctggctaggacctgtggaggggcagctcgctggcccatggctgctttgtagtttgcccagagttgggggctaggggaggggggagccagaggccaggatgcctgagccccctgagttcccaaagggagggtggcagagacagtgggcactaagggtggagagttgggggccagcacagctgaggaccctcagccccaggagaagggacaaaaggtactggtgagggcaagaggtgcctgggaggagtggccctgatccaggaaaatgtgaggggaatctggaacgctctaggcagaagaagctgggagggagggggaggtgaaaagggcagaggcaaggatggtggggcccccagcaccctctgttagtgccgcaataaatgctcaatcatgtgccag

SEQ ID NO: 7291 - DNA, 488 bp, Homo sapiens
  SIMILAR (371)..(487): 1001254mologous to Homo sapiens The sequence from bp313 to bp1374 is almost identical to human farnesyl pyrophosphate synthetase mRNA,accession number D14697,Smith-Waterman Score=211.
  misc_feature (1)...(488): n = a,t,c or g
gagtnttnnnaggggnnnnccctattgaanaccntttganagtcccacgaccangaccacnccnagcttgncacgaggctgggagcagaatgaacggagaccacaattcagatgttttttcccaagattagcaggatttcgttcagcacttctgccaaatcggtagggtgctgactgaggatgagatggggcacccagagataggagatgctattgcccggctcaaggaggtcctggagtacaatgccattggaggcaagtataaccggggtttgacggtggtagtagcattccgggagctggtggagccaaggaaacaggatgctgatagtctccagcgggcctggactgtgggctggtgtgtggaactgatgacatcatggattcatcccttacccgccggggacagatctgctggtatcagaagccgggcgtgggtttggatgccatcaatgatgctaacctcctggaagcatgtatctaccgcc

SEQ ID NO: 7292 - DNA, 398 bp, Homo sapiens
  SIMILAR (4)..(105): 911254mologous to Homo sapiens farnesyl pyrophosphate synthetase,accession number M29863,Smith-Waterman Score=164.
ggcacgagggtagtagcattccgggagctggtggagccaaggaaacaggatgctgatagtctccagcgggcctggactgtgggctggtgtgtggaactggtgagaggggtagggcaagggagaagaagtttcctgcaatggtggtgacttgggtgggaaggggagggatgggcctgaaacttatttctgggttgtgtttgtgtttctttgtctctagtgtgctacggccaaatttagagtgaatcactccaagggttaactaatgtggggagcctcttttggcattaggtatgaagatggctgtagatagttgtagacagtgtggactggggcctcgagactgggcagagaggtgtcagctctttcctctgagcagaggatggctataaaagtgacag

SEQ ID NO: 7293 - DNA, 1474 bp, Homo sapiens
  SIMILAR (115)..(321): 1001254mologous to Homo sapiens The sequence from bp313 to bp1374 is almost identical to human farnesyl pyrophosphate synthetase mRNA,accession number D14697,Smith-Waterman Score=396.
  misc_feature (1)...(1474): n = a,t,c or g
aggtgagagaggatgtgtgctgggccttggaggaagggggccgagaccgggccttacttctgtaacgatactgtgaggcatcggaaggccagcctgttgtgtccgttttgaaggatgcccctgtcccgctggttgagatctgtgggggtcttcctgctgccagccccctactgggcaccccgggagaggtggctgggttccctacggcggccctccctggtgcacgggtacccagtcctggcctggcacagtgcccgctgctggtgccaagcgtggacagaggaacctcgagccctttgctcctccctcagaatgaacgggagaccagaattcagatgtttatgcccaagaaaagcaggatttcgttcagcacttctcccagatcgttagggtgctgactgaggatgagatggggcacccagagataggagatgctattgcccggctcaaggaggtcctgggagtacaatgccattggaggcaagtataaccggggtttgacggtggtaagtagcattccggggagctggtgggagccaaggaaacaggatgcttgatagtcttccagcggggccctggactgttgggctggtgtgtggaactgctgcaagctttccttcctggtggcagatgacatcatggattcatcccttaccccgccggggaacagatcttgctggtatcagaagccgggcgtgggtttggatgccatcaatgatggtnaacctcctgggaagcatgtatctaccgcctgctgaagctctattgccgggagcagccctattacctgaacctgattcgagctcttcctgcagagttccctatcagactgagattgggcagaccctggacctcctcacagcccccccaagggcaatgtggatctgtcagaattcactgaaaagaggtacaaatctattgtcaagtacaagacagctttctactccttctaccttcctatagctgcagccatgtacatggcaggaattgatggcgagaaggagcacgccaatgccaagaagatcctgctggagatgggggagttctttcagattcaggatgattaccttgacctctttggggaccccagtgtgaccggcaaaattggcactgacatccaggacaacaaatgcagctggctggtggttcagtgtctgcaacgggccactccagaacagtaccagatcctgaaggaaaattacgggcagaaggaggctgagaaagtggcccgggtgaaggcgctatatgaggagctggatctgccagcagtgttcttgcaatatgaggaagacagttacagccacattatggctctcattgaacagtacgcagcacccctgcccccagccgtctttctggggcttgcgcgcaaaatctacaagcggagaaagtgacctagagattgcaagggcggggagaggaggctctcaataaataatcgtgtaaccttaaaaaaaaaaaaaacctcgacgat

SEQ ID NO: 7294 - DNA, 506 bp, Homo sapiens
cagagacgccggtccctgccaccagcgccgccatccgcatcctcgtccttcttccttctctgcgggtgaccagtcccggccggcagggtccttcagtcgatcgcgtcgtttttcctcctttcaaatttcggccggaacgaagccggcacgcagcggcggggccgaatgtggtccgccctcagcccaagccgcatgaagtcgggggtgaaagaagaggccggccgaatgcgcccgctaactcgtttcgcagttgttctaacttatcaccccaatactccctacctaaacaaaacaaatcctcaaccaacccctaaatcccaaacaaaccaacccctcccgcaagcccctccggacggaccgatgggctgagcctcctccagccgctgccagggtccgacgggcaagcgtcaccaacgatgcgctccagcccggcaatctcctcggctttggaaatagaatttggaaaaacgaatccttttcattaaagaaaaatcttcggagaaaaa

SEQ ID NO: 7295 - DNA, 432 bp, Homo sapiens
cttcagggagcagtcgtccgagaggcagcgcccagccccgtcctgggcccggagcttgtggaatggctgccccgacgtcagaatgatcctcccctcctgcctggcaacctcggccgccctgcggtggtcttcaccattgcccagcatgcgtgcatccacaccgagacagcggaggctccgtgccagcccctgcagcatgttgtcacacaccacacggaaggccctggccggaatttgaggggcagcgccctcagacacagccacagccacagggacctgcctgggtgcggccggtgctgacgctttttgcaggccgggtggcttccgtgcccctggtctctctctgtgcctgggcctccggctcccagccaggtcctccgtcaggtggaagcgggcgggctctctgcacagggcttggtgcacctccagcag

SEQ ID NO: 7296 - DNA, 358 bp, Homo sapiens
  SIMILAR (239)..(48): 951254mologous to Homo sapiens PRO2987,accession number AF116719,Smith-Waterman Score=312.
tctggctagggatgaagaataaaaggaagcacccttcaacagatccacacactcgcttctggaacgtccgaggttatcaataagctcctagggcagacgccatgggtcatttcacagaggaggacaaggctactatcacaagcctgtggggcaaggcgaatgtggaagatgctggaggagaagccctgggaaggctcctggttgtctacccatggacccagaggttctttgacagctttgccagctgagtgaactgcactgtgacaagctgcatgtggatcctgagaacttcaagctccttggaaatgtgctggtgacccgttttgccatccatttccgcaaagaattcacccctgag

SEQ ID NO: 7297 - DNA, 331 bp, Homo sapiens
agtttgcaaactccagccccaacctctccctgcccactcagggagccccaacatacatatatcccaactttgcccatcccatgcatggggattactggttttgtcctcggggtgtgtcactttcttgagagaaagcttcttcctttgctttgccctggttctacagaggaaatcatcctctcttggcatcctctcttgccctggttcaattttcactgcacttaatagcactaatttatatattttgggttttttgggagggttttgtttggtttttttttgagacagagtctcgctctgtcacccaggctggagtgaagtggtacaatct

SEQ ID NO: 7298 - DNA, 394 bp, Homo sapiens
aattttaaatcttttttcccataattattttacctatatcatttattattttttgggtttggtctttttctctttttcttgatcaaattaggtagtagtttatttattaacttttccaaaaaatcagtactttgatttactaattggatctatttttctgttctctacttcactgatttctgcttcatatttattatttccttctttgggttttctttgatttactttattattgttggtttcccattaaaatttattggttttattctttcatttatatagataacagtgttttatggacaggcacagtggctcacacctgtaatcccaatactttgggtggctgaggtgagaggatcactttgagcccaagagtcggagaccagcctgggca

SEQ ID NO: 7299 - DNA, 469 bp, Homo sapiens
  SIMILAR (266)..(466): 621254mologous to Homo sapiens Human secreted protein, SEQ ID NO: 7874,accession number AAG03793,Smith-Waterman Score=204.
tattccggtaagcaaactttccaaccgccaggatatgcaggttggtttaccccctttaccccttaaaaatttttattttccccaaaagctttaaattttggggggggggtgggccaatatgtcccccccccaaaaaaaaggttcctttccaaaaatcccaaggagggttttaaaacggccccccataaagaaaaaaatttttcctttccatcccccgtaaaatttgggcccccccagggttcttttaaaaggccccccccttttttttttttttttttttttgacagagtcttgctctgtcgcctagcctggaatgcggtggcacaatcccggcttactgcaacctctgccttctgggttcaagcaattctcctgtctcagcctccctagtagctgggactacaggtgtccgctaccacatccggctaatttttttgttgttgtatttttagtagagacagaattttgc

SEQ ID NO: 7300 - DNA, 2776 bp, Homo sapiens
  SIMILAR (212)..(1354): 951254mologous to Rattus norvegicus nuclear GTPase PIKE,accession number AF280816,Smith-Waterman Score=1832.
aaggggccttctgaggtttgggggctgtagggccatgggcctcagggccagaggtggttgttagcctggcaagacaggtctgggcaacatgcatgcccagaggcagttcgttgtagctgcagtgagagcagaagtcagacgacatgaggtggccaagcaggctctaaaccgcctcaggaagctggcagagagggtggacgaccccgaactccaggacagcatccaggcctcattggacagcattcgagaggctgtgatcaatagccaggaatggactttgagccgctccattcctgaactgcgcctgggtgtgctgggcgatgccaggagtgggaagtcatcgctcatccaccgattcctgactggctcataccaggtgctggagaagacagagagtgagcagtacaagaaagaaatgttggtggatggacagacacatctggtgctaatccgagaggaagctggggcacctgatgccaagttctcaggctgggcagatgctgtgatcttcgtcttcagcctggaggatgagaacagtttccaggctgtgagccgtctccatgggcagctgagttcccttcgcggggagggacgaggaggcctggccttggcactggtggggacacaagacaggatcagtgcttcctcccctcgggtggtgggagatgctcgtgccagagctctgtgcgcggacatgaaacgctgcagctactatgagacttgtgcaacctatgggctcaatgtggatcgggtcttccaggaggtggcccagaaggtggtgaccttgcgcaagcagcaacagcttctggctgcctgcaagtccctgcccagctccccaagccactcagctgcatccactccggtagctggccaggctagtaacgggggccacactagcgactactcttcttccctcccgtcctcaccgaatgttggtcaccgggagctccgagccgaggcagctgcagtggctggattgagcaccccagggtccctgcaccgggcagccaagcgcaggaccagcctttttgcgaatcgtcggggtagtgactccgagaaacgaagcttggatagtcggggagagacaacagggagtgggcgagccatccccatcaaacagagcttcctactaaaacgaagtggcaattccttgaacaaagaatggaagaagaaatatgtaaccctgtccagtaatggctttctactctaccaccccagtattaacgattacatccacagtacccacggcaaggagatggacttgctgcgaacaacagtcaaagtcccgggcaagcggcccccgagggccatctctgcctttggcccctcagccagcattaacgggctcgtcaaggacatgagcactgtccagatgggtgaaggcctggaagccactactcccatgccaagccctagccccagccccagttccctgcagccaccaccagatcagacatccaaacacctgctgaagccagaccggaatttggcccgagccctcagcacggttttgtcaggtcaagattattacccctatttcagagataaagaaactgaggctcagaagattaagtgccttgctcaaggtcttaaggccaactgtaccccatctggagacctgagccccctgagtcgggaaccccctccttctcccatggtgaagaagcagaggaggaaaaaattgacaacaccatccaagactgaaggctcggctgggcaggctgaagaggaaaactttgagttcctgatcgtgtccagcacgggtcagacgtggcactttgaggcagccagttttgaggagcgggatgcctgggtccaggccatcgagagtcagatcctagccagtctgcaatgctgtgagagcagcaaggtcaagctgcgcacagacagccaaagcgaggccgtggccatccaggcgatccggaacgccaaggggaattcaatctgcgtggactgcggggcccccaaccccacgtgggccagcttgaacctgggcgccctcatctgcatcgagtgttctggcatccaccgcaacctgggcacacacctgtcccgcgttcgctcgctggacttggacgactggccacgggagctgaccctggtgctgacggctattggcaacgacacggccaaccgcgtgtgggaaagcgacacgcgaggccgtgccaagccctcgcgggactcttcgcgggaggagcgcgagtcgtggattcgcgccaagtacgagcagctactgttcctggcgccgctgagcacctcggaggagccgctgggccgccagctgtgggccgccgtgcaggcccaggacgtggctaccgttctcctgcttttggcccatgcgcgacacgggccgctcgacaccagcgtagaggacccacagctgcgctccccactccacctggcggccgagctcgcccacgtcgtcatcacgcaactgctgctgtggtacggcgcggacgtggcggcccgtgacgcccaggtccgcacggcgctgttctacgcccgccaggctggaagccatctgtgcgccgacatccttctccagcacgcctgcccgggtgagggcggcagcgcggccaccacgcccagcgcggccaccacgcccagcatcaccgccacgcccagcccccgccgccggagcagcgccgctagcgtgggccgcgccgacgccccggttgcgctgcacagctggggcagaccgaccttcaccatgggagtgctgccgccaaaagccaaaggaaaggaaaaaggaatttcgattgaaagtacaaaatga

SEQ ID NO: 7301 - DNA, 706 bp, Homo sapiens
  SIMILAR (412)..(284): 761254mologous to Homo sapiens Human secreted protein SEQ ID NO: 89,accession number AAB32031,Smith-Waterman Score=151.
  misc_feature (1)...(706): n = a,t,c or g
ttttttagtttaagaaatatttataaagcaggtaacaagtggggagccgggaggggcgctcagctggggtgcagaagggtgggggtgcccccgccattcccctgcatgtgctcgggcttcctgctgccccccaccctctgctttccctacccccactgccccactcccaggggctcgggatggacatcagggaggacggtcttgggaaaggcagcccctgcttgaactctgtcccttaatgaccccatcccatcccccactcagaggaaaactttgagttcctgatcgtgtccagcacgggtcagacgtggcactttgaggcagccagttttgaggagcgggatgcctgggtccaggccatcgagagtcagatcctagccagtctgcaatgctgtgagagcagcaaggtcaaggtaagagtttgaggtggagtggaggactggccgcaggaactgaccctggtgctgacggccattggcaacgacacggccgaagtcgtgtgagaggagagcagaggtgtctgagaaggaggtggggcttggaggcagagtcagtgccaaccccaaccctctctgcagctgcgcacagacagccaaagcgaggccgtggccatccaggcgatccggaacgccaaagggaattctatctgcgcccacgcgtccgcggacgcgtgggtcgaggcgaannnnnggaccggaacggcagg

SEQ ID NO: 7302 - DNA, 368 bp, Homo sapiens
  SIMILAR (3)..(368): 951254mologous to Homo sapiens Protein sequence and annotation available soon via Swiss-Prot; available at present via e-mail from LABEIT@EMBL-Heidelberg.DE,accession number X90568,Smith -Waterman Score=612.
aaccatcagatccagaggttgcaggagatcccatatttccaccggggccaccttcttgcccagaagttaaagataaaacgaagtcaagcatctcactaggatggaaacctccagccaaagatgggggcagcccaatcaaaggatacattgtataaatgcaggaagaaggtactactgactggaaaagagtaaatgaaccatacaaacttataactacctgggaatgtggggggcctaatctgaaagagctcaggaagtacagattcagagtgaaagctgtcaatgaagctggtgaatctgaaccaagagatacaactggggagatccctgccactgatattcaagaggaaccagaagttttcattgac

SEQ ID NO: 7303 - DNA, 374 bp, Homo sapiens
  SIMILAR (3)..(248): 561254mologous to Mus musculus putative,accession number AK019715,Smith-Waterman Score=219.
  misc_feature (1)...(374): n = a,t,c or g
tgttcaagatccagaacctcattgccagcaccgtccgcacggtgatggtggccgactgcagccgcttcgacagccctgacctgctgctggaagccggtgacccggccacgtccccctgccgcatctttgacctgggcagcgacaacgaggaggtggtggctgtncccgacccctcccaccccaaggagggcttgagctattccctgagctgcgtgctgcttgggcggtcgcttcccagatgcctcatctcatgctatataccattgtgtttgtctgttgcctcagggcctcacaaattctactaaccgcactgcctatgcccgataccacctccttctcttacccttggcagtccacctcacttcccctccacg

SEQ ID NO: 7304 - DNA, 376 bp, Homo sapiens
  misc_feature (1)...(376): n = a,t,c or g
tggtggtgcatgcctataannnnnnnnnnnnnnnnnnnnnnnnnnnnnnnnnnnnnnnnnnnnnnnnnnnnnnnnnnnnnnnnnnnnnnnnnnnnnnnnnnnnnnnnnnnnnnnnnnnnnnnnnnnnnnnnnnnnnnntcaactattaaacaggaaattctttgcagaaatgtatcctacacatacaaccttgaaatgatattagtgcaaaccctgcaataaaaaaattctggaaacttcctaagtgtccaaccacagagggctggttaaatacatgattgtatattcatttagtggagtattatgcaactcttaaagtgtgtggagatctatatgtcaggtagatttacatattatatgtaaacctgtacctgtt

SEQ ID NO: 7305 - DNA, 801 bp, Homo sapiens
  SIMILAR (56)..(220): 601254mologous to Homo sapiens Amino acid sequence of a human secreted protein,accession number AAY19566,Smith-Waterman Score= 173.
gtggcggaattcagcggatgtatggtggtattgtggtggacccttactggacactctgccaagtaactggagtggtacttgcactcttgtccaattcgctatcccttttgcccttgcatttcttcaaccagaaaaagaaaagccacaacaccgtaaaataagagaagccccttatgggtcttttgactctcaagtttatttagacgcaactggagtcccacagggagtaccacacaaattcaaagctcaagaccagatagctgcaggatttgaatcaatattttggtgggtaactatcagtaaaaacatagattggataaattacatctattataaccagcagcggtttattaactacactagagatgctgtcaaaggaatagctgaacagttagggcctactagccagatggcttgggaaaacagaatggccctagacatgatattagccaaaaaaggtggagtttgtgttatgatcaaaactcaatgttgtaccttcatcccaaacaatactgcccctagtgggagcataacaagggccttacaaggccttactgctttatccaatgaattagctaaaaattctggagtcaatgaccctttttcaggatggctagaaaggtggtttggtaaatggaaaggaatcatagcctcaattcttacttctcttgcagccagaataggtgtagtcattctttttgggtgttgagtcacaccatgtatccgtgggctagtacagaggcttatagaaacagtacttactaaaacctcccttagctctcctccaccttattcagataa

SEQ ID NO: 7306 - DNA, 376 bp, Homo sapiens
  misc_feature (1)...(376): n = a,t,c or g
ccacaccaggactggtcatgcacagacctgactctagttctagggatgggttctgtgcttttcctggattaagtgcccctttgttctccagctctgggacctgagacgttgatggctccatgcacctgagtgcttctctcaatgcccatcccaaccctccccttcatagctgggatgtcagggaccagagtcagatcctgacccccgctctgtggttgggccaccactgtcacaggcaggctcccctggaaggcctggaggtactgtaatcactctttgttgtctgtggccacatctagctcctctctttcatctgtggtccccaggcaaatgcacctccctcttggtggttcagcactctcancgcacgcgtggt

SEQ ID NO: 7307 - DNA, 506 bp, Homo sapiens
  SIMILAR (375)..(461): 931254mologous to Homo sapiens gamma-G globin,accession number X55656,Smith-Waterman Score=151.
  misc_feature (1)...(506): n = a,t,c or g
gctcctagtccagacgccatgggtcatttcacagaggaggacaaggctactatcacaagcctgtggggcaaggtgaatgtggaagatgctggaggagaaaccctgggaaggctcctggttgtctacccatggacccagaggttctttgacagctttggcaacctgtcctctgcctctgccatcatgggcaaccccaaagtcaaggcacatggcaagaaggtgctgacttccttgggagatgccataaagcacctggatgatctcaagggcacgctgcatgtggatcctgagaacttcaagctcctgggaaatgtgctggtgaccgttttggcaatccatttcggcaaagaattcacccctgaggtgcaggcttcctggcagaagatggtgactggagtggccagtgccctgtcctccagataccactgacctcactgcccatgatgcagagctttcaaggataggcttcattctgcaagcaatncaaattaataaatctattctgc

SEQ ID NO: 7308 - DNA, 1275 bp, Homo sapiens
  SIMILAR (988)..(1272): 1001254mologous to Homo sapiens cytosolic thyroid hormone- binding protein (EC 2.7.1.40),accession number M26252,Smith- Waterman Score=504.
atgactcaacctttcaattattctgcttttgagagaattatcttcgctggctctccagggcacaccgtattcagctctgagcggtctttgctagtgaggccaaggagccaccctgagccaaaaggggagcattatgtcaccggaagcccaaccccagagaaccaaaggacctcagcagccatgtcgaagccccatagtgaagccgggactgccttcattcagacccagcagctgcacgcagccatggctgacacattcctggagcacatgtgccgcctggacattgattcaccacccatcacagcccggaacactggcatcatctgtaccattggcccagcttcccgatcagtggagacgttgaaggagatgattaagtctggaatgaatgtggctcgtctgaacttctctcatggaactcatgagatagctcgtgaggctgaggcagccatgttccaccgcaagctgtttgaagaacttgtgcgagcctcaagtcactccacagacctcatggaagccatggccatgggcagcgtggaggcttcttataagtgtttagcagcagctttgatagttctgacggagtctggcaggagaagacagccaggcccaacctggcatctgggcacagagcctcttctcgtctgtaggaacaccgccagggagattgcccgtgaggcagaggctgccatctaccacttgcaattatttgaggaactccgccgcctggcgcccattaccagcgaccccacagaagccaccgccgtgggtgccgtggaggcctccttcaagtgctgcagtggggccataatcgtcctcaccaagtctggcagatgtcaagagtcaggtgctagtcacgtgctgcttggcttgtcactgtcattggcagcgagaggaatgggtgctggtgacattgggccagggctgcctctctgtgtcagagttcagggtgtaggaggggttctgccaaccatgggctgtgtggggtctgctcaccaggtggccagataccgcccacgtgcccccatcattgctgtgacccggaatccccagacagctcgtcaggcccacctgtaccgtggcatcttccctgtgctgtgcaaggacccagtccaggaggcctgggctgaggacgtggacctccgggtgaactttgccatgaatgttggcaaggcccgaggcttcttcaagaagggagatgtggtcattgtgctgaccggatggcgccctggctccggcttcaccaacaccatgcgtgttgttcctgtgccgtga

SEQ ID NO: 7309 - DNA, 1025 bp, Homo sapiens
  SIMILAR (314)..(27): 941254mologous to Oryctolagus cuniculus muscle pyruvate kinase,accession number U09028,Smith-Waterman Score=481.
tggagaaggggctttggggtccatcccggcacaggaacaacacgcatggtgttggtgaagccggagccagggcgccatccggtcagcacaatgaccacatctcccttcttgaagaagcctcgggccttgccaacattcatggcaaagttcacccggaggtccacgtcctcagcccaggcctcctggactgggtccttgcacagcacagggaagatgccacggtacaggtgggccagacgagctgtctggggattccgggtcacagcaatgatgggggcacgtgggcggtatctggccacctggtgagcagacttgagatgggatgggggtcatacataagagtccatttcacgaggccccaggaagtaccctcagggcgttcaaacagctcaccctctcatccagctcagtgagggctctggcctcttcaacatctgctccgtaggacccctcccgaggctcgggcagcccctcatcctatatccccctcagcatgctaggttaccatttgccctctacccccattccacaggccaagggatcaggatcaccttgccccagcaagatcagcctcacccactgtgccccacacagcccatggttggcagaacccctcctacaccctgaactctgacacagagaggcagccctggcccaatgtcaccagcacccattcctctcgctgccaatgacagtgacaagccaagcagcacgtgactagcacctgactcttgacatctgcaaggagcagtagcagagctgaccagccccctgggaatcaacatcaggcttctctacttttgtgccctctccctgccccacatggcccctagctcctgaaacagtcccagcaactgggctataaaggcccagaatcaaatctgagtatctagatgaggcttagaaatttaggtgctactcagcaggcaagaacaggaaatgggagtgttgctgcaggagcagctctgcctgccaaagctcctttggaaggcaggggacccttctaaagcccctctgccaggccc

SEQ ID NO: 7310 - DNA, 1511 bp, Homo sapiens
  SIMILAR (280)..(1188): 901254mologous to Mus sp. Elk-3=Ets transcription factor,accession number S82864,Smith-Waterman Score=1395.
gggcggaaaagcctgtttacacagactgcacaccgcctggggaataatgcagtaaaggaagtgagccggctcggcctgactgctccaacttcctgctctcacacacaccagaggggaaaaaaaaagaggagcgagagaaagaaaaaaagggggaaaaatcaggatctcattacaagagccacagaccgtctgcagacgcctgtcagcatggaaagtcgggggctttcgcccgggtcctcctagaaattccccccgaagaagactcccccacatctgggtatggagagtgcaatcacgctgtggcagttcctgttgcagttgctgctggatcagaaacatgagcatttgatctgctggacctcgaacgatggtgaattcaagctcctcaaagcagaagaagtggccaagctgtggggactccgaaaaaacaaaacaaatatgaactatgataagctgagcagagccctgcgatactattatgacaagaacatcatcaagaaggtgatcgggcagaagtttgtgtacaagtttgtctctttcccggagatcctgaagatggatcctcacgcggtggagatcagccgggagagccttctgctgcaggacagcgactgcaaggtgtctccggagggccgcgaggcccacaaacacggcctggccgtcctcagaagcacgagccgcaacgaatacatccactcaggcctgtactcgtccttcaccattaattccctggagaacccaccagacgccttcaaggccatcaagagggagaagctggaggagccgcccgaagacagcccccccgtggaagaagtcaggactgtgatcaggtttgtgaccaataaaaccgacaagcacgtcaccaggccggtggtgtccctgccttccacgtcagaggctgcggcggcgtccgccttcctggcctcgtccgtctcggccaagatctcctctttaatgttgccaaacgctgccagtatttcatccgcctcacccttctcatctcggtccccgtccctgtcccccaagtcacccctcccttctgaacacagaagcctcttcctggaggccgcctgccatgactccgattccctggagcccttgaacctgtcatcgggctccaagaccaagtctccatctcttcccccaaaggccaaaaaaacccaaaggcttggaaatctcagcgcccccgctggtgctctccggcaccgacatcggctccatcgccctcaacagcccagccctcccctcgggatccctcaccccagccttcttcaccgcacagacaccaaatggattgcttcttgactccgagttccactgctcttccagcatacatttctggaggaagcctttagtccaagtttgttccgctgagtcctgccaggctgcaagggccaagcacgctgttccagttccccacactgcttaatggccacatgccagtgccaatccccagtctggacagagctgcttctccagtactgctttcttcaaactctcagaaatcctga

SEQ ID NO: 7311 - DNA, 1233 bp, Homo sapiens
  SIMILAR (64)..(1065): 981254mologous to Homo sapiens Net,accession number Z36715,Smith-Waterman Score=1674.
atgggagaaattgcttttcccatctgtgcatctgtgatggtgggctttgacctgcagcatggtatggagagtgcaatcacgctgtggcagttcctgttgcagttgctgctggatcagaaacatgagcatttgatctgctggacctcgaacgatggtgaattcaagctcctcaaagcagaagaagtggccaagctgtggggactccgaaaaaacaaaacaaatatgaactatgataagctgagcagagccctgcgatactattatgacaagaacatcatcaagaaggtgatcgggcagaagtttgtgtacaagtttgtctctttcccggagatcctgaagatggatcctcacgcggtggagatcagccgggagagccttctgctgcaggacagcgactgcaaggcgtctccggagggccgcgaggcccacaaacacggcctggccgccctcagaagcacgagccgcaacgaatacatccactcaggcctgtactcgtccttcaccattaattccctgcagaacccaccagacgccttcaaggccatcaagacggagaagctggaggagccgcccgaagacagcccccccgtggaagaagtcaggactgtgatcaggtttgtgaccaataaaaccgacaagcacgtcaccaggccggtggtgtccctgccttccacgtcagaggctgcggcggcgtccgccttcctggcctcgtccgtctcggccaagatctcctctttaatgttgccaaacgctgccagtatttcatccgcctcacccttctcatctcggtccccgtccctgtcccccaactcacccctcccttctgaacacagaagcctcttcctggaggccgcctgccatgactccgattccctggagcccttgaacctgtcatcgggctccaagaccaagtctccatctcttcccccaaaggccaaaaaacccaaaggcttggaaatctcagcgcccccgctggtgctctccggcaccgacatcggctccatcgccctcaacagcccagccctcccctcgggatccctcaccccagccttcttcaccgcacaggaaatgatggttcatgtctacagtgattcgacacgttatcaggatctctgggagttgggatacgtgcatccgctcgtttcttcagtcctcagtcactactgtagaccaatggttctcaaagttagcatgcaaaataatctcctagaggatgcacacctgcacatctag

SEQ ID NO: 7312 - DNA, 358 bp, Homo sapiens
  misc_feature (1)...(358): n = a,t,c or g
gcttgcctgccccaggtgccaggccagagtggctgctgtttccagcgcctgttgtgggcccggtgctgtgctggacacctcaaagcatcatctcacttcactttttcctgaatcctgtagggcaaacattgnnnnnnnnnnnnnnnnnnnnnnnnnnnnnttgaagaacctgattgcccatgacactcagctaggtgggggcagtatcaggattcaaacccatcagtaggcctccagagccccactctggccacaacagccccagcctctcccaacccagcctcaccattctggtgtccagtaactctcctggcagcggcaaggccaggggcccacagtgtccacaggcatggctcgc

SEQ ID NO: 7313 - DNA, 372 bp, Homo sapiens
  misc_feature (1)...(372): n = a,t,c or g
aaatgaatggcttaaggcaaaaaattcttttattagtacccaaaagtgtagactttgttattactttaaatttagaaaagtaaattttcaatagttagtggctagcaaaactggtattttttttctttttcnnnnnnnnnnnnnnnngaaaacggagtcaccctttgtccccaaggttgaannnnnnnnnnccctttttggttaattgaaagctccccctccggggttaaaacaattttctggtttaagcctccgaagaagtgggaactacgggccccccccacccccgccggtttatttttttgtttttttaaaaaaaaacgggtttccccttgttacccaaggagggctaaatctccggacctggggacc

SEQ ID NO: 7314 - DNA, 461 bp, Homo sapiens
  misc_feature (1)...(461): n = a,t,c or g
acagggctatagtttaagggtgtcccaggccttggctggttggtgcggcccagctcctgggggctgggcagggcagggcagggccgggtccacttccattgttagcagttgtttgcagaattttctcttttaccattcctctctttttgttctcgcccagagtgggtggttttttgttgttgttttagattttcatgtgaaggcagttttttttcttttttaactccccatccccctatgcagggtgtcatttcaccatccacatccacatccttgtttgtgtttctggccctcgtcctccctgcctctcatntgcctccccaacccccacccctccctgggcccccaagtgagattgcacatttaactactgtaaggagaggagcggcgttggcaaatgtgaaccatgagaatatcagtgatactgatgagaataaactaaacgcctttgtaacagcaaa

SEQ ID NO: 7315 - DNA, 505 bp, Homo sapiens
  SIMILAR (13)..(438): 371254mologous to Rattus rattus N-WASP,accession number D88461,Smith-Waterman Score=167.
  misc_feature (1)...(505): n = a,t,c or g
gcagggggtgcaggggaggaaactcctcaccaggagagccaaagacagggttgtgccttaccccaggagccacccctgtaccccccttgccctgccattcaccctccacccctacccctgggcggcctgctgctttttccttctcttccttccntggccctgagctgcatggttcccccaccctgggnagcccaggaaggaatctgaatggagaatcaccaaccaccagagaaaaaaagactgtggggccctccccctgccaactcccctttccctgcccgcccactcaacccacacctttttcaagcaggaacaggttgcccaccctgtccacgtgaagtgccaacgccctccccaccctgggccgagcccccacccctccctgggcccccaagtgagattgcacatttaactactgtaaggagaggagcggcgttggcaaatgtgaaccatgagaatatcagtgatactgatgagaataaactaaacgcctttgtaacagcaa

SEQ ID NO: 7316 - DNA, 379 bp, Homo sapiens
  misc_feature (1)...(379): n = a,t,c or g
aaaaaatatgacagacataaaaccaactgtattgataattaagtataaggggtctaaatattataattaaaaggcagagattataagactggataaaacagcaagattcaactctatgctgtccctaagaaatacacnnnnnnnnnnnnnnnnnnnnnnnnnnnnnnnnnnnnnnnnnnnnnnnnnnnnnnnnnnnnnnnnnnnnnnnnnnnnnnnnnnnnnnnnnnnnnnnnnnnnnnnnnnnnnnnnnnnnnnnnnnnnnnnnnnnnnnnnnnnnnnctttaaacataaaaatacagataagatacaccacgcaaacattaatcgtaagaaagctggaatggctatatcagaaaaagtagacttcaggacaagaaat

SEQ ID NO: 7317 - DNA, 532 bp, Homo sapiens
acgctgattcaactatttattaaaattcaaaattcggaggcccccacatgcatttcaaatgttccccatgagcagccagggcaaggagggtcctgaaactgccgagagcgagctgtctcatcacgggtgcctttcactgtgacgctgagaaatcagctgggcccctcccacctgcggtgcgttcccttcctctgcagccacgctgggcgcctcccctgtgctgggagcttcagtccctttgggcgctgcagggatgcaaagagggaggcgtggacaccgcattcccggggacacatgggggctcctgctgccgggggctggagggaccgatgctgagtctcctgcccacaactgggaaccttgaacttctgttcctccctcccgccctggccatccctcaggcccttctgctgggctgcagagcgggaggccccctctatgaggagactgcgaatggggaaggaaggcagggaagggacatgcctactaagtgccaggccctgagctccacacgctgcctctcagtgacccc

SEQ ID NO: 7318 - DNA, 565 bp, Homo sapiens
  SIMILAR (2)..(172): 1001254mologous to Homo sapiens gamma-G globin,accession number X55656,Smith-Waterman Score=293.
ggtgaatgtggaagatgctggaggagaaaccctgggaaggctcctggttgtctacccatggacccagaggttctttgacagctttggcaacctgtcctctgcctctgccatcatgggcaaccccaaagtcaaggcacatggcaagaaggtgctgacttccttgggagatgctcctctgcctctgccatcatgggcaaccccaaagtcaaggcacatggcaagaaggtgctgacttccttgggagatgccataaagcacctggatgatctcaagggcacctttgcccagctgagtgaactgcactgtgacaagctgcatgtggatcctgagaacttcaagctcctgggaaatgtgctggtgaccgttttggcaatccatttcggcaaagaattcacccctgaggtgcaggcttcctggcagaagatggcagaagatggtgactggagtggccagtgccctgtcctccagataccactgagctcactgcccatgatgcagagctttcaaggataggctttattctgcaagcaatacaaataataaatctattctgctaagagatcac

SEQ ID NO: 7319 - DNA, 10089 bp, Homo sapiens
  SIMILAR (1)..(9786): 1001254mologous to Homo sapiens apolipoprotein B- 100,accession number M15421,Smith-Waterman Score=16666.
gatggccgggtcaaatataccttgaacaagaacagtttgaaaattgagattcctttgccttttggtggcaaatcctccagagatctaaagatgttagagactgttaggacaccagccctccacttcaagtctgtgggattccatctgccatctcgagagttccaagtccctacttttaccattcccaagttgtatcaactgcaagtgcctctcctgggtgttctagacctctccacgaatgtctacagcaacttgtacaactggtccgcctcctacagtggtggcaacaccagcacagaccatttcagccttcgggctcgttaccacatgaaggctgactctgtggttgacctgctttcctacaatgtgcaaggatctggagaaacaacatatgaccacaagaatacgttcacactatcatgtgatgggtctctacgccacaaatttctagattcgaatatcaaattcagtcatgtagaaaaacttggaaacaacccagtctcaaaaggtttactaatattcgatgcatctagttcctggggaccacagatgtctgcttcagttcatttggactccaaaaagaaacagcatttgtttgtcaaagaagtcaagattgatgggcagttcagagtctcttcgttctatgctaaaggcacatatggcctgtcttgtcagagggatcctaacactggccggctcaatggagagtccaacctgaggtttaactcctcctacctccaaggcaccaaccagataacaggaagatatgaagatggaaccctctccctcacctccacctctgatctgcaaagtggcatcattaaaaatactgcttccctaaagtatgagaactacgagctgactttaaaatctgacaccaatgggaagtataagaactttgccacttctaacaagatggatatgaccttctctaagcaaaatgcactgctgcgttctgaatatcaggctgattacgagtcattgaggttcttcagcctgctttctggatcactaaattcccatggtcttgagttaaatgctgacatcttaggcactgacaaaattaatagtggtgctcacaaggcgacactaaggattggccaagatggaatatctaccagtgcaacgaccaacttgaagtgtagtctcctggtgctggagaatgagctgaatgcagagcttggcctctctggggcatctatgaaattaacaacaaatggccgcttcagggaacacaatgcaaaattcagtctggatgggaaagccgccctcacagagctatcactgggaagtgcttatcaggccatgattctgggtgtcgacagcaaaaacattttcaacttcaaggtcagtcaagaaggacttaagctctcaaatgacatgatgggctcatatgctgaaatgaaatttgaccacacaaacagtctgaacattgcaggcttatcactggacttctcttcaaaacttgacaacatttacagctctgacaagttttataagcaaactgttaatttacagctacagccctattctctggtaactactttaaacagtgacctgaaatacaatgctctggatctcaccaacaatgggaaactacggctagaacccctgaagctgcatgtggctggtaacctaaaaggagcctaccaaaataatgaaataaaacacatctatgccatctcttctgctgccttatcagcaagctataaagcagacactgttgctaaggttcagggtgtggagtttagccatcggctcaacacagacatcgctgggctggcttcagccattgacatgagcacaaactataattcagactcactgcatttcagcaatgtcttccgttctgtaatggccccgtttaccatgaccatcgatgcacatacaaatggcaatgggaaactcgctctctggggagaacatactgggcagctgtatagcaaattcctgttgaaagcagaacctctggcatttactttctctcatgattacaaaggctccacaagtcatcatctcgtgtctaggaaaagcatcagtgcagctcttgaacacaaagtcagtgccctgcttactccagctgagcagacaggcacctggaaactcaagacccaatttaacaacaatgaatacagccaggacttggatgcttacaacactaaagataaaattggcgtggagcttactggacgaactctggctgacctaactctactagactccccaattaaagtgccacttttactcagtgagcccatcaatatcattgatgctttagagatgagagatgccgttgagaagccccaagaatttacaattgttgcttttgtaaagtatgataaaaaccaagatgttcactccattaacctcccattttttgagaccttgcaagaatattttgagaggaatcgacaaaccattatagttgtactggaaaacgtacagagaaacctgaagcacatcaatattgatcaatttgtaagaaaatacagagcagccctgggaaaactcccacagcaagctaatgattatctgaattcattcaattgggagagacaagtttcacatgccaaggagaaactgactgctctcacaaaaaagtatagaattacagaaaatgatatacaaattgcattagatgatgccaaaatcaactttaatgaaaaactatctcaactgcagacatatatgatacaatttgatcagtatattaaagatagttatgatttacatgatttgaaaatagctattgctaatattattgatgaaatcattgaaaaattaaaaagtcttgatgagcactatcatatccgtgtaaatttagtaaaaacaatccatgatctacatttgtttattgaaaatattgattttaacaaaagtggaagtagtactgcatcctggattcaaaatgtggatactaagtaccaaatcagaatccagatacaagaaaaactgcagcagcttaagagacacatacagaatatagacatccagcacctagctggaaagttaaaacaacacattgaggctattgatgttagagtgcttttagatcaattgggaactacaatttcatttgaaagaataaatgatgttcttgagcatgtcaaacactttgttataaatcttattggggattttgaagtagctgagaaaatcaatgccttcagagccaaagtccatgagttaatcgagaggtatgaagtagaccaacaaatccaggttttaatggataaattagtagagttggcccaccaatacaagttgaaggagactattcagaagctaagcaatgtcctacaacaagttaagataaaagattactttgagaaattggttggatttattgatgatgctgtcaagaagcttaatgaattatcttttaaaacattcattgaagatgttaacaaattccttgacatgttgataaagaaattaaagtcatttgattaccaccagtttgtagatgaaaccaatgacaaaatccgtgaggtgactcagagactcaatggtgaaattcaggctctggaactaccacaaaaagctgaagcattaaaactgtttttagaggaaaccaaggccacagttgcagtgtatctggaaagcctacaggacaccaaaataaccttaatcatcaattggttacaggaggctttaagttcagcatctttggctcacatgaaggccaaattccgagagactctagaagatacacgagaccgaatgtatcaaatggacattcagcaggaacttcaacgatacctgtctctggtaggccaggtttatagcacacttgtcacctacatttctgattggtggactcttgctgctaagaaccttactgactttgcagagcaatattctatccaagattgggctaaacgtatgaaagcattggtagagcaagggttcactgttcctgaaatcaagaccatccttgggaccatgcctgcctttgaagtcagtcttcaggctcttcagaaagctaccttccagacacctgattttatagtccccctaacagatttgaggattccatcagttcagataaacttcaaagacttaaaaaatataaaaatcccatccaggttttccacaccagaatttaccatccttaacaccttccacattccttcctttacaattgactttgtagaaatgaaagtaaagatcatcagaaccattgaccagatgctgaacagtgagctgcagtggcccgttccagatatatatctcagggatctgaaggtggaggacattcctctagcgagaatcaccctgccagacttccgtttaccagaaatcgcaattccagaattccagcttccccacatctcacacacaattgaagtacctacttttggcaagctatacagtattctgaaaatccaatctcctcttttcacattagatgcaaatgctgacatagggaatggaaccacctcagcaaacgaagcaggtatcgcagcttccatcactgccaaaggagagtccaaattagaagttctcaattttgattttcaagcaaatgcacaactctcaaaccctaagattaatccgctggctctgaaggagtcagtgaagttctccagcaagtacctgagaacggagcatgggagtgaaatgctgttttttggaaatgctattgagggaaaatcaaacacagtggcaagtttacacacagaaaaaaatacactggagcttagtaatggagtgattgtcaagataaacaatcagcttaccctggatagcaacactaaatacttccacaaattgaacatccccaaactggacttctctagtcaggctgacctgcgcaacgagatcaagacactgttgaaagctggccacatagcatggacttcttctggaaaagggtcatggaaatgggcctgccccagattctcagatgagggaacacatgaatcacaaattagtttcaccatagaaggacccctcacttcctttggactgtccaataagatcaatagcaaacacctaagagtaaaccaaaacttggtttatgaatctggctccctcaacttttctaaacttgaaattcaatcacaagtcgattcccagcatgtgggccacagtgttctaactgctaaaggcatggcactgtttggagaagggaaggcagagtttactgggaggcatgatgctcatttaaatggaaaggttattggaactttgaaaaattctcttttcttttcagcccagccatttgagatcacggcatccacaaacaatgaagggaatttgaaagttcgttttccattaaggttaacagggaagatagacttcctgaataactatgcactgtttctgagtcccagtgcccagcaagcaagttggcaagtaagtgctaggttcaatcagtataagtacaaccaaaatttctctgctggaaacaacgagaacattatggaggcccatgtaggaataaatggagaagcaaatctggatttcttaaacattcctttaacaattcctgaaatgcgtctaccttacacaataatcacaactcctccactgaaagatttctctctatgggaaaaaacaggcttgaaggaattcttgaaaacgacaaagcaatcatttgatttaagtgtaaaagctcagtataagaaaaacaaacacaggcattccatcacaaatcctttggctgtgctttgtgagtttatcagtcagagcatcaaatcctttgacaggcattttgaaaaaaacagaaacaatgcattagattttgtcaccaaatcctataatgaaacaaaaattaagtttgataagtacaaagctgaaaaatctcacgacgagctccccaggacctttcaaattcctggatacactgttccagttgtcaatgttgaagtgtctccattcaccatagagatgtcggcattcggctatgtgttcccaaaagcagtcagcatgcctagtttctccatcctaggttctgacgtcctggtgccttcatacacattaatcctgccatcattagagctgccagtccttcatgtccctagaaatctcaagctttctcttccacatttcaaggaattgtgtaccataagccatatttttattcctgccatgggcaataatacctatgatttctcctttaaatcaagtgtcatcacactgaataccaatgctgaactttttaaccagtcagatattgttgctcatctcctttcttcatcttcatctgtcattgatgcactgcagtacaaattagagggcaccacaagattgacaagaaaaaggggattgaagttagccacagctctgtctctgagcaacaaatttgtggagggtagtcataacagtactgtgagcttaaccacgaaaaatatggaagtgtcagtggcaaaaaccacaaaagccgaaattccaattttgagaatgaatttcaagcaagaacttaatggaaataccaagtcaaaacctactgtctcttcctccatggaatttaagtatgatttcaattcttcaatgctgtactctacggctaaaggagcagttgaccacaagcttagcttggaaagcctcacctcttacttttccattgagtcatctaccaaaggagatgtcaagggttcggttctttctcgggaatattcaggaactattgctagtgaggccaacacttacttgaattccaagagcacacggtcttcagtgaagctgcagggcacttccaaaattgatgatatctggaaccttgaagtaaaagaaaattttgctggagaagccacactccaacgcatatattccctctgggagcacagtacgaaaaaccacttacagctagagggcctctttttcaccaacggagaacatacaagcaaagccaccctggaactctctccatggcaaatgtcagctcttgttcaggtccatgcaagtcagcccagttccttccatgatttccctgaccttggccaggaagtggccctgaatgctaacactaagaaccagaagatcagatggaaaaatgaagtccggattcattctgggtctttccagagccaggtcgagctttccaatgaccaagaaaaggcacaccttgacattgcaggatccttagaaggacacctaaggttcctcaaaaatatcatcctaccagtctatgacaagagcttatgggatttcctaaagctggatgtaaccaccagcattggtaggagacagcatcttcgtgtttcaactgcctttgtgtacaccaaaaaccccaatggctattcattctccatccctgtaaaagttttggctgataaattcattactcctgggctgaaactaaatgatctaaattcagttcttgtcatgcctacgttccatgtcccatttacagatcttcaggttccatcgtgcaaacttgacttcagagaaatacaaatctataagaagctgagaacttcatcatttgccctcaacctaccaacactccccgaggtaaaattccctgaagttgatgtgttaacaaaatattctcaaccagaagactccttgattcccttttttgagataaccgtgcctgaatctcagttaactgtgtcccagttcacgcttccaaaaagtgtttcagatggcattgctgctttggatctaaatgcagtagccaacaagatcgcagactttgagttgcccaccatcatcgtgcctgagcagaccattgagattccctccattaagttctctgtacctgctggaattgtcattccttcctttcaagcactgactgcacgctttgaggtagactctcccgtgtataatgccacttggagtgccagtttgaaaaacaaagcagattatgttgaaacagtcctggattccacatgcagctcaaccgtacagttcctagaatatgaactaaatgttttgggaacacacaaaatcgaagatggtacgttagcctctaagactaaaggaacatttgcacaccgtgacttcagtgcagaatatgaagaagatggcaaatatgaaggacttcaggaatgggaaggaaaagcgcacctcaatatcaaaagcccagcgttcaccgatctccatctgcgctaccagaaagacaagaaaggcatctccacctcagcagcctccccagccgtaggcaccgtgggcatggatatggatgaagatgacgacttttctaaatggaacttctactacagccctcagtcctctccagataaaaaactcaccatattcaaaactgagttgagggtccgggaatctgatgaggaaactcagatcaaagttaattgggaagaagaggcagcttctggcttgctaacctctctgaaagacaacgtgcccaaggccacaggggtcctttatgattatgtcaacaagtaccactgggaacacacagggctcaccctgagagaagtgtcttcaaagctgagaagaaatctgcagaacaatgctgagtgggtttatcaaggggccattaggcaaattgatgatatcgacgtgaggttccagaaagcagccagtggcaccactgggacctaccaagagtggaaggacaaggcccagaatctgtaccaggaactgttgactcaggaaggccaagccagtttccagggactcaaggataacgtgtttgatggcttggtacgagttactcaagaattccatatgaaagtcaagcatctgattgactcactcattgattttctgaacttccccagattccagtttccggggaaacctgggatatacactagggaggaactttgcactatgttcataagggaggtagggacggtactgtcccaggtatattcgaaagtccataatggttcagaaatactgttttcctatttccaagacctagtgattacacttcctttcgagttaaggaaacataaactaatagatgtaatctcgatgtatagggaactgttgaaagatttatcaaaagaagcccaagaggtatttaaagccattcagtctctcaagaccacagaggtgctacgtaatcttcaggaccttttacaattcattttccaactaatagaagataacattaaacagctgaaagagatgaaatttacttatcttattaattatatccaagatgagatcaacacaatcttcaatgattatatcccatatgtttttaaattgttgaaagaaaacctatgccttaatcttcataagttcaatgaatttattcaaaacgagcttcaggaagcttctcaagagttacagcagatccatcaatacattatggcccttcgtgaagaatattttgatccaagtatagttggctggacagtgaaatattatgaacttgaagaaaagatagtcagtctgatcaagaacctgttagttgctcttaaggacttccattctgaatatattgtcagtgcctctaactttacttcccaactctcaagtcaagttgagcaatttctgcacagaaatattcaggaatatcttagcatccttaccgatccagatggaaaagggaaagagaagattgcagagctttctgccactgctcaggaaataattaaaagccaggccattgcgacgaagaaaataatttctgattaccaccagcagtttagatataaactgcaagatttttcagaccaactctctgattactatgaaaaatttattgctgaatccaaaagattgattgacctgtccattcaaaactaccacacatttctgatatacatcacggagttactgaaaaagctgcaatcaaccacagtcatgaacccctacatgaagcttgctccaggagaacttactatcatcctctaattttttaaaagaaatcttcatttattcttcttttccaattgaactttcacatagcacagaaaaaattcaaactgcctatattgataaaaccatacagtgagccagccttgcagtaggcagtagactataagcagaagcacatatgaactggacctgcaccaaagctggcaccagggctcggaaggtctctgaactcagaaggatggcattttttgcaagttaaagaaaatcaggatctgagttattttgctaaacttgggggaggaggaacaaataaatggagtctttattgtgtatcat

SEQ ID NO: 7320 - DNA, 14147 bp, Homo sapiens
  SIMILAR (129)..(13586): 991254mologous to Homo sapiens precursor,accession number X04506,Smith-Waterman Score=22782.
attcccaccgggacctgcggggctgagtgcccttctcggttgctgccgctgaggagcccgcccagccagccagggccgcgaggccgaggccaggccgcagcccaggagccgccccaccgcagctggcgatggacccgccgaggcccgcgctgctggcgctgctggcgctgcctgcgctgctgctgctgctgctggcgggcgccagggccgaagaggaaatgctggaaaatgtcagcctggtctgtccaaaagatgcgacccgattcaagcacctccggaagtacacatacaactatgaggctgagagttccagtggagtccctgggactgctgattcaagaagtgccaccaggatcaactgcaaggttgagctggaggttccccagctctgcagcttcatcctgaagaccagccagtgcatcctgaaagaggtgtatggcttcaaccctgagggcaaagccttgctgaagaaaaccaagaactctgaggagtttgctgcagccatgtccaggtatgagctcaagctggccattccagaagggaagcaggttttcctttacccggagaaagatgaacctacttacatcctgaacatcaagaggggcatcatttctgccctcctggttcccccagagacagaagaagccaagcaagtgttgtttctggataccgtgtatggaaactgctccactcactttaccgtcaagacgaggaagggcaatgtggcaacagaaatatccactgaaagagacctggggcagtgtgatcgcttcaagcccatccgcacaggcatcagcccacttgctctcatcaaaggcatgacccgccccttgtcaactctgatcagcagcagccagtcctgtcagtacacactggacgctaagaggaagcatgtggcagaagccatctgcaaggagcaacacctcttcctgcctttctcctacaagaataagtatgggatggtagcacaagtgacacagactttgaaacttgaagacacaccaaagatcaacagccgcttctttggtgaaggtactaagaagatgggcctcgcatttgagagcaccaaatccacatcacctccaaagcaggccgaagctgttttgaagactgtccaggaactgaaaaaactaaccatctctgagcaaaatatccagagagctaatctcttcaataagctggttactgagctgagaggcctcagtgatgaagcagtcacatctctcttgccacagctgattgaggtgtccagccccatcactttacaagccttggttcagtgtggacagcctcagtgctccactcacatcctccagtggctgaaacgtgtgcatgccaacccccttctgatagatgtggtcacctacctggtggccctgatccccgagccctcagcacagcagctgcgagagatcttcaacatggcgagggatcagcgcagccgagccaccttgtatgcgctgagccacgcggtcaacaactatcataagacaaaccctacagggacccaggagctgctggacattgctaattacctgatggaacagattcaagatgactgcactggggatgaagattacacctatttgattctgcgggtcattggaaatatgggccaaaccatggagcagttaactccagaactcaagtcttcaatcctgaaatgtgtccaaagtacaaagccatcactgatgatccagaaagctgccatccaggctctgcggaaaatggagcctaaagacaaggaccaggaggttcttcttcagactttccttgatgatgcttctccgggagataagcgactggctgcctatcttatgttgatgaggagtccttcacaggcagatattaacaaaattgtccaaattctaccatgggaacagaatgagcaagtgaagaactttgtggcttcccatattgccaatatcttgaactcagaagaattggatatccaagatctgaaaaagttagtgaaagaagttctgaaagaatctcaacttccaactgtcatggacttcagaaaattctctcggaactatcaactctacaaatctgtttctattccatcacttgacccagcctcagccaaaatagaagggaatcttatatttgatccaaataactaccttcctaaagaaagcatgctgaaaactaccctcactgcctttggatttgcttcagctgacctcatcgagattggcttggaaggaaaaggctttgagccaacattggaagctctttttgggaagcaaggatttttcccagacagtgtcaacaaagctttgtactgggttaatggtcaagttcctgatggtgtctctaaggtcttagtggaccactttggctataccaaagatgataaacatgagcaggatatggtaaatggaataatgctcagtgttgagaagctgattaaagatttgaaatccaaagaagtcccggaagccagagcctacctccgcatcttgggagaggagcttggttttgccagtctccatgacctccagctcctgggaaagctgcttctgatgggtgcccgcactctgcaggggatcccccagatgattggagaggtcatcaggaagggctcaaagaatgacttttttcttcactacatcttcatggagaatgcctttgaactccccactggagctggattacagttgcaaatatcttcatctggagtcattgctcccggagccaaggctggagtaaaactggaagtagccaacatgcaggctgaactggtggcaaaaccctccgtgtctgtggagtttgtgacaaatatgggcatcatcattccggacttcgctaggagtggggtccagatgaacaccaacttcttccacgagtcgggtctggaggctcatgttgccctaaaacctgggaagctgaagtttatcattccttccccaaagagaccagtcaagctgctcagtggaggcaacacattacatttggtctctaccaccaaaacggaggtgatcccacctctcattgagaacaggcagtcctggtcagtttgcaagcaagtctttcctggcctgaattactgcacctcaggcgcttactccaacgccagctccacagactccgcctcctactatccgctgaccggggacaccagattagagctggaactgaggcctacaggagagattgagcagtattctgtcagcgcaacctatgagctccagagagaggacagagccttggtggataccctgaagtttgtaactcaagcagaaggtgcgaagcagactgaggctaccatgacattcaaatataatcggcagagtatgaccttgtccagtgaagtccaaattccggattttgatgttgacctcggaacaatcctcagagttaatgatgaatctactgagggcaaaacgtcttacagactcaccctggacattcagaacaagaaaattactgaggtcgccctcatgggccacctaagttgtgacacaaaggaagaaagaaaaatcaagggtgttatttccataccccgtttgcaagcagaagccagaagtgagatcctcgcccactggtcgcctgccaaactgcttctccaaatggactcatctgctacagcttatggctccacagtttccaagagggtggcatggcattatgatgaagagaagattgaatttgaatggaacacaggcaccaatgtagataccaaaaaaatgacttccaatttccctgtggatctctccgattatcctaagagcttgcatatgtatgctaatagactcctggatcacagagtccctcaaacagacatgactttccggcacgtgggttccaaattaatagttgcaatgagctcatggcttcagaaggcatctgggagtcttccttatacccagactttgcaagaccacctcaatagcctgaaggagttcaacctccagaacatgggattgccagacttccacatcccagaaaacctcttcttaaaaagcgatggccgggtcaaatataccttgaacaagaacagtttgaaaattgagattcctttgccttttggtggcaaatcctccagagatctaaagatgttagagactgttaggacaccagccctccacttcaagtctgtgggattccatctgccatctcgagagttccaagtccctacttttaccattcccaagttgtatcaactgcaagtgcctctcctgggtgttctagacctctccacgaatgtctacagcaacttgtacaactggtccgcctcctacagtggtggcaacaccagcacagaccatttcagccttcgggctcgttaccacatgaaggctgactctgtggttgacctgctttcctacaatgtgcaaggatctggagaaacaacatatgaccacaagaatacgttcacactatcatgtgatgggtctctacgccacaaatttctagattcgaatatcaaattcagtcatgtagaaaaacttggaaacaacccagtctcaaaaggtttactaatattcgatgcatctagttcctggggaccacagatgtctgcttcagttcatttggactccaaaaagaaacagcatttgtttgtcaaagaagtcaagattgatgggcagttcagagtctcttcgttctatgctaaaggcacatatggcctgtcttgtcagagggatcctaacactggccggctcaatggagagtccaacctgaggtttaactcctcctacctccaaggcaccaaccagataacaggaagatatgaagatggaaccctctccctcacctccacctctgatctgcaaagtggcatcattaaaaatactgcttccctaaagtatgagaactacgagctgactttaaaatctgacaccaatgggaagtataagaactttgccacttctaacaagatggatatgaccttctctaagcaaaatgcactgctgcgttctgaatatcaggctgattacgagtcattgaggttcttcagcctgctttctggatcactaaattcccatggtcttgagttaaatgctgacatcttaggcactgacaaaattaatagtggtgctcacaaggcgacactaaggattggccaagatggaatatctaccagtgcaacgaccaacttgaagtgtagtctcctggtgctggagaatgagctgaatgcagagcttggcctctctggggcatctatgaaattaacaacaaatggccgcttcagggaacacaatgcaaaattcagtctggatgggaaagccgccctcacagagctatcactgggaagtgcttatcaggccatgattctgggtgtcgacagcaaaaacattttcaacttcaaggtcagtcaagaaggacttaagctctcaaatgacatgatgggctcatatgctgaaatgaaatttgaccacacaaacagtctgaacattgcaggcttatcactggacttctcttcaaaacttgacaacatttacagctctgacaagttttataagcaaactgttaatttacagctacagccctattctctggtaactactttaaacagtgacctgaaatacaatgctctggatctcaccaacaatgggaaactacggctagaacccctgaagctgcatgtggctggtaacctaaaaggagcctaccaaaataatgaaataaaacacatctatgccatctcttctgctgccttatcagcaagctataaagcagacactgttgctaaggttcagggtgtggagtttagccatcggctcaacacagacatcgctgggctggcttcagccattgacatgagcacaaactataattcagactcactgcatttcagcaatgtcttccgttctgtaatggccccgtttaccatgaccatcgatgcacatacaaatggcaatgggaaactcgctctctggggagaacatactgggcagctgtatagcaaattcctgttgaaagcagaacctctggcatttactttctctcatgattacaaaggctccacaagtcatcatctcgtgtctaggaaaagcatcagtgcagctcttgaacacaaagtcagtgccctgcttactccagctgagcagacaggcacctggaaactcaagacccaatttaacaacaatgaatacagccaggacttggatgcttacaacactaaagataaaattggcgtggagcttactggacgaactctggctgacctaactctactagactccccaattaaagtgccacttttactcagtgagcccatcaatatcattgatgctttagagatgagagatgccgttgagaagccccaagaatttacaattgttgcttttgtaaagtatgataaaaaccaagatgttcactccattaacctcccattttttgagaccttgcaagaatattttgagaggaatcgacaaaccattatagttgtactggaaaacgtacagagaaacctgaagcacatcaatattgatcaatttgtaagaaaatacagagcagccctgggaaaactcccacagcaagctaatgattatctgaattcattcaattgggagagacaagtttcacatgccaaggagaaactgactgctctcacaaaaaagtatagaattacagaaaatgatatacaaattgcattagatgatgccaaaatcaactttaatgaaaaactatctcaactgcagacatatatgatacaatttgatcagtatattaaagatagttatgatttacatgatttgaaaatagctattgctaatattattgatgaaatcattgaaaaattaaaaagtcttgatgagcactatcatatccgtgtaaatttagtaaaaacaatccatgatctacatttgtttattgaaaatattgattttaacaaaagtggaagtagtactgcatcctggattcaaaatgtggatactaagtaccaaatcagaatccagatacaagaaaaactgcagcagcttaagagacacatacagaatatagacatccagcacctagctggaaagttaaaacaacacattgaggctattgatgttagagtgcttttagatcaattgggaactacaatttcatttgaaagaataaatgatgttcttgagcatgtcaaacactttgttataaatcttattggggattttgaagtagctgagaaaatcaatgccttcagagccaaagtccatgagttaatcgagaggtatgaagtagaccaacaaatccaggttttaatggataaattagtagagttggcccaccaatacaagttgaaggagactattcagaagctaagcaatgtcctacaacaagttaagataaaagattactttgagaaattggttggatttattgatgatgctgtcaagaagcttaatgaattatcttttaaaacattcattgaagatgttaacaaattccttgacatgttgataaagaaattaaagtcatttgattaccaccagtttgtagatgaaaccaatgacaaaatccgtgaggtgactcagagactcaatggtgaaattcaggctctggaactaccacaaaaagctgaagcattaaaactgtttttagaggaaaccaaggccacagttgcagtgtatctggaaagcctacaggacaccaaaataaccttaatcatcaattggttacaggaggctttaagttcagcatctttggctcacatgaaggccaaattccgagagactctagaagatacacgagaccgaatgtatcaaatggacattcagcaggaacttcaacgatacctgtctctggtaggccaggtttatagcacacttgtcacctacatttctgattggtggactcttgctgctaagaaccttactgactttgcagagcaatattctatccaagattgggctaaacgtatgaaagcattggtagagcaagggttcactgttcctgaaatcaagaccatccttgggaccatgcctgcctttgaagtcagtcttcaggctcttcagaaagctaccttccagacacctgattttatagtccccctaacagatttgaggattccatcagttcagataaacttcaaagacttaaaaaatataaaaatcccatccaggttttccacaccagaatttaccatccttaacaccttccacattccttcctttacaattgactttgtagaaatgaaagtaaagatcatcagaaccattgaccagatgctgaacagtgagctgcagtggcccgttccagatatatatctcagggatctgaaggtggaggacattcctctagcgagaatcaccctgccagacttccgtttaccagaaatcgcaattccagaattcataatcccaactctcaaccttaatgattttcaagttcctgaccttcacataccagaattccagcttccccacatctcacacacaattgaagtacctacttttggcaagctatacagtattctgaaaatccaatctcctcttttcacattagatgcaaatgctgacatagggaatggaaccacctcagcaaacgaagcaggtatcgcagcttccatcactgccaaaggagagtccaaattagaagttctcaattttgattttcaagcaaatgcacaactctcaaaccctaagattaatccgctggctctgaaggagtcagtgaagttctccagcaagtacctgagaacggagcatgggagtgaaatgctgttttttggaaatgctattgagggaaaatcaaacacagtggcaagtttacacacagaaaaaaatacactggagcttagtaatggagtgattgtcaagataaacaatcagcttaccctggatagcaacactaaatacttccacaaattgaacatccccaaactggacttctctagtcaggctgacctgcgcaacgagatcaagacactgttgaaagctggccacatagcatggacttcttctggaaaagggtcatggaaatgggcctgccccagattctcagatgagggaacacatgaatcacaaattagtttcaccatagaaggacccctcacttcctttggactgtccaataagatcaatagcaaacacctaagagtaaaccaaaacttggtttatgaatctggctccctcaacttttctaaacttgaaattcaatcacaagtcgattcccagcatgtgggccacagtgttctaactgctaaaggcatggcactgtttggagaagggaaggcagagtttactgggaggcatgatgctcatttaaatggaaaggttattggaactttgaaaaattctcttttcttttcagcccagccatttgagatcacggcatccacaaacaatgaagggaatttgaaagttcgttttccattaaggttaacagggaagatagacttcctgaataactatgcactgtttctgagtcccagtgcccagcaagcaagttggcaagtaagtgctaggttcaatcagtataagtacaaccaaaatttctctgctggaaacaacgagaacattatggaggcccatgtaggaataaatggagaagcaaatctggatttcttaaacattcctttaacaattcctgaaatgcgtctaccttacacaataatcacaactcctccactgaaagatttctctctatgggaaaaaacaggcttgaaggaattcttgaaaacgacaaagcaatcatttgatttaagtgtaaaagctcagtataagaaaaacaaacacaggcattccatcacaaatcctttggctgtgctttgtgagtttatcagtcagagcatcaaatcctttgacaggcattttgaaaaaaacagaaacaatgcattagattttgtcaccaaatcctataatgaaacaaaaattaagtttgataagtacaaagctgaaaaatctcacgacgagctccccaggacctttcaaattcctggatacactgttccagttgtcaatgttgaagtgtctccattcaccatagagatgtcggcattcggctatgtgttcccaaaagcagtcagcatgcctagtttctccatcctaggttctgacgtccgtgtgccttcatacacattaatcctgccatcattagagctgccagtccttcatgtccctagaaatctcaagctttctcttccagatttcaaggaattgtgtaccataagccatatttttattcctgccatgggcaatattacctatgatttctcctttaaatcaagtgtcatcacactgaataccaatgctgaactttttaaccagtcagatattgttgctcatctcctttcttcatcttcatctgtcattgatgcactgcagtacaaattagagggcaccacaagattgacaagaaaaaggggattgaagttagccacagctctgtctctgagcaacaaatttgtggagggtagtcataacagtactgtgagcttaaccacgaaaaatatggaagtgtcagtggcaacaaccacaaaagcccaaattccaattttgagaatgaatttcaagcaagaacttaatggaaataccaagtcaaaacctactgtctcttcctccatggaatttaagtatgatttcaattcttcaatgctgtactctaccgctaaaggagcagttgaccacaagcttagcttggaaagcctcacctcttacttttccattgagtcatctaccaaaggagatgtcaagggttcggttctttctcgggaatattcaggaactattgctagtgaggccaacacttacttgaattccaagagcacacggtcttcagtgaagctgcagggcacttccaaaattgatgatatctggaaccttgaagtaaaagaaaattttgctggagaagccacactccaacgcatatattccctctgggagcacagtacgaaaaaccacttacagctagagggcctctttttcaccaacggagaacatacaagcaaagccaccctggaactctctccatggcaaatgtcagctcttgttcaggtccatgcaagtcagcccagttccttccatgatttccctgaccttggccaggaagtggccctgaatgctaacactaagaaccagaagatcagatggaaaaatgaagtccggattcattctgggtctttccagagccaggtcgagctttccaatgaccaagaaaaggcacaccttgacattgcaggatccttagaaggacacctaaggttcctcaaaaatatcatcctaccagtctatgacaagagcttatgggatttcctaaagctggatgtaaccaccagcattggtaggagacagcatcttcgtgtttcaactgcctttgtgtacaccaaaaaccccaatggctattcattctccatccctgtaaaagttttggctgataaattcattattcctgggctgaaactaaatgatctaaattcagttcttgtcatgcctacgttccatgtcccatttacagatcttcaggttccatcgtgcaaacttgacttcagagaaatacaaatctataagaagctgagaacttcatcatttgccctcaacctaccaacactccccgaggtaaaattccctgaagttgatgtgttaacaaaatattctcaaccagaagactccttgattcccttttttgagataaccgtgcctgaatctcagttaactgtgtcccagttcacgcttccaaaaagtgtttcagatggcattgctgctttggatctaaatgcagtagccaacaagatcgcagactttgagttgcccaccatcatcgtgcctgagcagaccattgagattccctccattaagttctctgtacctgctggaattgccattccttcctttcaagcactgactgcacgctttgaggtagactctcccgtgtataatgccacttggagtgccagtttgaaaaacaaagcagattatgttgaaacagtcctggattccacatgcagctcaaccgtacagttcctagaatatgaacttaatgttttgggaacacacaaaatcgaagatggtacgttagcctctaagactaaaggaacatttgcacaccgtgacttcagtgcagaatatgaagaagatggcaaatatgaaggacttcaggaatgggaaggaaaagcgcacctcaatatcaaaagcccagcgttcaccgatctccatctgcgctaccagaaagacaagaaaggcatctccacctcagcagcctccccagccgtaggcaccgtgggcatggatatggatgaagatgacgacttttctaaatggaacttctactacagccctcagtcctctccagataaaaaactcaccatattcaaaactgagttgagggtccgggaatctgatgaggaaactcagatcaaagttaattgggaagaagaggcagcttctggcttgctaacctctctgaaagacaacgtgcccaaggccacaggggtcctttatgattatgtcaacaagtaccactgggaacacacagggctcaccctgagagaagtgtcttcaaagctgagaagaaatctgcaggaccatgctgagtgggtttatcaaggggccattagggaaattgatgatatcgacgagaggttccagaaaggagccagtgggaccactgggacctaccaagagtggaaggacaaggcccagaatctgtaccaggaactgttgactcaggaaggccaagccagtttccagggactcaaggataacgtgtttgatggcttggtacgagttactcaagaattccatatgaaagtcaagcatctgattgactcactcattgattttctgaacttccccagattccagtttccggggaaacctgggatatacactagggaggaactttgcactatgttcataagggaggtagggacggtactgtcccaggtatattcgaaagtccataatggttcagaaatactgttttcctatttccaagacctagtgattacacttcctttcgagttaaggaaacataaactaatagatgtaatctcgatgtatagggaactgttgaaagatttatcaaaagaagcccaagaggtatttaaagccattcagtctctcaagaccacagaggtgctacgtaatcttcaggaccttttacaattcattttccaactaatagaagataacattaaacagctgaaagagatgaaatttacttatcttattaattatatccaagatgagatcaacacaatcttcaatgattatatcccatatgtttttaaattgttgaaagaaaacctatgccttaatcttcataagttcaatgaatttattcaaaacgagcttcaggaagcttctcaagagttacagcagatccatcaatacattatggcccttcgtgaagaatattttgatccaagtatagttggctggacagtgaaatattatgaacttgaagaaaagatagtcagtctgatcaagaacctgttagttgctcttaaggacttccattctgaatatattgtcagtgcctctaactttacttcccaactctcaagtcaagttgagcaatttctgcacagaaatattcaggaatatcttagcatccttaccgatccagatggaaaagggaaagagaagattgcagagctttctgccactgctcaggaaataattaaaagccaggccattggcgacgaagaaaataatttctgattaccaccagcagtttagatataaactgcaagatttttcagaccaactctctgattactatgaaaaatttattgctgaatccaaaagattgattgacctgtccattcaaaactaccacacatattctgatatacatcacggagttactgaaaaagctgcaatcaaccacacgtcatgaacccctacatgaagcttgctccaggagaacttactatcatcctctaatttttttaaaagaaatcttcaatttattcttcttttccaatttgaacttttcacataggcacagaaaaaattgcaaactgcctatattgataaaaccatacagtgagccagccttgcagtaggcagtatgactataggcagaagcacatatgagctggacctgcaccaaagctggcaccagggctcggaaggtctctgaactcagaaggatggccttttttgcaagttaaagaaaatcaggatctgagatattttgctaaacttgggggaggaggaacaaataaatgggagtctttattgtgtatcataaaaaaaaaaaaaaaa

SEQ ID NO: 7321 - DNA, 400 bp, Homo sapiens
  SIMILAR (161)..(400): 961254mologous to Homo sapiens SURF-4,accession number AF078866,Smith-Waterman Score=383.
tgcgtgcgggaattccgacgaggtccccaccatgcgtgagagctctttggaatcatagctctgcagacgattgcctacagcattttatgggacttgaagtttttgatgaggaacctggccctgggaggaggcctgttgctgctcctagcagaatcccgttctgaagggaagagcatgtttgctggttctgatgttcatgaccctccttcactttgacgccagcttcttttctattgtccagaacatcgtgggcacagctctgatgattttagtggccattggttttaaaaccaagctggctgctttgactcttgttgtgtggctctttgccatcaacgtatatttcaacgccttctggaccattccagtctacaagcccatgcatgacttcctgaaatac

SEQ ID NO: 7322 - DNA, 903 bp, Homo sapiens
  SIMILAR (492)..(869): 531254mologous to Homo sapiens SURF-4,accession number AF078866,Smith-Waterman Score=251.
tttcgtgcagcgggtgcgggcgccgacgggcgagagccagcgagcgagcgagcgagccgagccgagcctcccgccgtcgccatgggccagaacgacctgatgggcatggccgaggacttcgccgaccagttcctccgtgtcacaaagcagtacctgccccacgtggcgcgcctctgtctgatcagcaccttcctggaggacggcatccgtatgtggttccagtggagcgagcagcgcgactacatcgacaccacctggaactgcggctacctgctggcctcgtccttcgtcttcctcaacttgctgggacagctgactggctgcgtcctggtgttgagcaggaacttcgtgcagtacgcctgcttcgggctctttggaatcatatttctttattacgattgcctacagcattttatgggacttgaagtttttgatgaggaacctggccctgggaggaggcctgttgctgctcctagcagaatcccgttctgaagggaagagcatgtttgcggggcgtccccaccatgcgtgagagctcccccaaacagtacatgcagctcggaggcagggtcttgctggttctgatgttcatgaccctccttcacttttgacgccagctttctttttctatttgtccagaacatcgttgggcacagctctgatgatttttagtggccattggttttaaaaccaagcttggctgctttgactcttgttgtgtggctctttgccatcaacgtatatttcaacgccttctggaccattccagtctacaaagcccatgcatgacttcctgaaatacgactttcttccagaccatgtcggtgattgggggcttgctcctggtgggtggccctgggccctgggggtgtctccatggatgagaagaagaaggagtggtaa

SEQ ID NO: 7323 - DNA, 397 bp, Homo sapiens
  misc_feature (1)...(397): n = a,t,c or g
cggacgcgtgggtcgacccacgcgtccgcccacgcgtccgcccacgcgtccgcccacgcgtccnnnnnnnnnnnnnnnnnnnnnnnnnnnnnnnnnnnnnnnnnnnnnnnnnnnnnnnnnnnnnnnnnnnnnnnnnnnnnnnnnnnnnnnnnnnnnnnnnnnnnnnnnnnnnnnnnnnnnnnnnnnnnnnnnnnnnnnnnnnnnnnnnnnnnnnnnnnnnnnnnnnnnnnnnnnnnnnnnnnnnnnnnnnnnnnnnnnnnnnnnnnnnnnnntnnnnnnnnnnnnnnnnggccccttttttggtgtttccccttgtgtaccggaaattttaaaannnnnnnnnnnaaggattggatgcccgagaaattgagctttcccctttaagcggggaaacctg

SEQ ID NO: 7324 - DNA, 352 bp, Homo sapiens
  misc_feature (1)...(352): n = a,t,c or g
ttaaattggaaattttaagaatgttttctcaatagttaatataacaactagacaaaataccagcacggacatagaaaatctaaagaataatacacatgtctagaacactgtatcaaacagctaatacacagtgttttcgagtgcatgtggtacattcaccaagataagccatttactaaggcattaaacaagtctcgataaattttaaaagcttgatgttctttggtcatagtaggagaaaaagcatttgacaacattgaacatcagttcataaaaaatcccagcaaattgggattggaagggaattcttgtctgataaggagcttctacaaaaacctatagcttacgtcan

SEQ ID NO: 7325 - DNA, 381 bp, Homo sapiens
  misc_feature (1)...(381): n = a,t,c or g
aatcccagcatagtaggtggtcaagatctctgcaaggggaattacaaaacacagattaaagatctgctagctgacagnnnnnnnnnnnnnnnnnnnnnnnnnnnnnnnnnnnnnnnnnnnnnnnnnnnnnnnnnnnnnnnnnnnnnnnnnnnnnnnnnnnnnnnnnnagcaggccctatgaaaacaccaacgtcatttctcatagaattgggaaaaacaatcgtacaatttttatgaaaccaaaagagagtatgaataactaaagtaatcctaagcaagaaaccccaaaaaacagaaaacaaaacaaaactagaggcttttcacagtacattatgttacttgccctcaaattatgcgacgaggctatagtaacgaaaacag

SEQ ID NO: 7326 - DNA, 361 bp, Homo sapiens
ttatttcaaaaaaaaaattttttttaaaaggttttttttttttgggttttttttgaaaaaaacccccctttttttttttcccccccccccccccgggttaaagggggaaaaaaaaaatttttttttttttttgggtaaaaaaaaacccccttgaaaaaaattttttttccctttttttaaaaaaggggggcccccccacccccccggggggtttttttttttttaaaaaaaaaaaaagggctccccaagggggggggcccccaaaaattttttttttttttttttttttttttttttttttttttttttttttttttggagacggagtcttgctctgttgcccaggctggagtgcagtggc

SEQ ID NO: 7327 - DNA, 359 bp, Homo sapiens
gggccttccctcataacactacagcccccctcagctcccccactaatcacattcccacacgattgcccccaaagcagaagagaaggcaaataggaaggaaacacatttttctagaagcccgcaacagatatctggaaggtgcccacctcaggacaaatcactagcaaaggtggatttcctggaccagctcagacccatggtgggtcattctctgggaagggggcctggccaccttcctaaacatatgccgactcctgaacaaatccaggaagaaccagaggctcacattcatctccctttggtgtgtgagcagctgcctctccttccctgggaggattttgtctatggctcgagccggg

SEQ ID NO: 7328 - DNA, 587 bp, Homo sapiens
  SIMILAR (150)..(1): 681254mologous to Homo sapiens Secreted protein encoded by gene 94 clone HPMBQ32,accession number AAW88627,Smith-Waterman Score=177.
tggtggccggcgcctgtagtcccagctactagggaggctgagacacacgaatcccttgggcccgggaagcggaggttgcagtgagcctcgattgtaccactgcactccagcctgggcgacagagcaagactctgtctcaaaacaaacacaaatacagtatccaaacattggagattagtgactcacctgcagttgggagccagctacaacccaaatcattttaaaattttcaattctttgatctcatgcaatgcacactttcttctgaattagcaaactgaataaactacagaaattttttagaatcaagaagtcttgcttacaattaaacgggcaaactcctgtgactctaacatttttcctttctcacagcaccattctgaaatttgcattgttgcttctggattttgaagccttgttttccaagtatttgtgggcagctcctaaaagactttgtcccttaagtaagggcagctgctttcaggatgaaaccatgcgactgagactggcagatcctgggagcttgcacctgggtcagctccacagatggagtgcgcttcttctctgcctcagatgcccaagctcta

SEQ ID NO: 7329 - DNA, 739 bp, Homo sapiens
  SIMILAR (236)..(634): 771254mologous to Homo sapiens gamma-G globin,accession number X55656,Smith-Waterman Score=540.
ggcacgaggaggttatcaataagctcctagtccagacgccatgggtcatttcacagaggaggacaaggctactatcacaagcctgtggggcaaggtgaatgtggaagatgctggaggagaaaccctgggaaggctcctggttgtctacccatggacccagaggttctttgacagctttggcaacctgtcctctgcctctgccatcatgggcaaccccaaagtcaaggcacatggcaagaaggtgctgacttccttgggagatgcgtggggcaaggtgaatgtggaagatgctggaggagaaaccctgggaaggctcctggttgtctacccatggacccagaggttctttgacagctttggcaacctgtcctctgcctctgccatcatgggcaaccccaaagtcaaggcacatggcaagaaggtgctgacttccttgggagatgccacaaagcacctggatgatctcaagggcacctttgcccagctgagtgaactgcactgtgacaagctgcatgtggatcctgagaacttcaagctcctgggaaatgtgcaacctgtcctctgcctctgccatcatgggcaaccccaaagtcaaggcacatggcaagaaggtgctgacttccttgggagatgccataaagcacctggatgatctcaagggcacctttgcccagctgagtgaactgcactgtgacaagctgcatgtggatcctgagaacttcaagctcctgggaaatgt

SEQ ID NO: 7330 - DNA, 345 bp, Homo sapiens
  misc_feature (1)...(345): n = a,t,c or g
cagcccggccccgaaggaaaaatccggttttttctgaaaatcccaaatttaaccccgagtgggggcaaaagccttaaattcccgctatttaaaagggttaaaccggaaaattgccttagcctaagagggtgagggtgcaattaaccagtattaaatccccgcaagcccacctagggaactccctttccnnnnnnnnnnnnngttaaaagatacagatagggctctggggaaaatcaaagcaaaataagatagaaaatattgatcccatcctactttatgactctgcataacttgaaagtgccttttaaatagttaaatgggccaggcgcagcagctcatgcctga

SEQ ID NO: 7331 - DNA, 380 bp, Homo sapiens
  misc_feature (1)...(380): n = a,t,c or g
nagcaatccaaccttggcactgcatagctaagtttttgtataaggatttagactaccttcctaggaagcaaaaacttaatactcaatttccaattatgtggattcctttttctaaattcttggtttnnnnnnnnnnnnnnnnnnnnnnnnnnnnnnnnnnnnnnnnnnnnnnnnnnnnnnnnnnnnnnnnnnnnnnnnnnnnnnnnnnnnnnnnnnnnnnnnnnnnnnnnnnnnnnnnnnnnnnnnnnnnnnnnnnnnnnnnnnnnnnnnnnnnnnnnnnnnnnnnnnnnnnnnnnnnnnnnnnnnnnnnnnnnnnnnnnnnnnnnnnnnnnnnnnnnnnnnnnnnnnnnnnnnnnnnnnnnnnnnnnnnnnnnngtttc

SEQ ID NO: 7332 - DNA, 499 bp, Homo sapiens
  SIMILAR (215)..(343): 721254mologous to Homo sapiens Human secreted protein, SEQ ID NO: 7870,accession number AAG03789,Smith-Waterman Score=145.
gttctttttcttttccaagtatgtttaaatattcaagtcttgattcagaataactgataggttacagagcatgcaaacccattcacaagcaatccaaccttggcactgcatagctaagtttttgtataaggatttagactaccttcctaggaagcaaaaacttaatactcaatttccaattatgtggattcctttttctaaattcttggttttgtgcagtggcacgatcatagctcaccgcagcctaaaactcctgggctcaagcaatcctcctgcctcaatttcctgagtagctaggacaacaggcacatgccaccaggcctggctaattttttcatttttgtagagatggggtcttgctatgttgctcaggcttgtcttgaactcctgggctcaagcaatccactcgcttcggtctcccaaaatgctgggattacaagcatgagccaatgcacccagctgtttctgttacttttaaataggtttcctgcatttcttt

SEQ ID NO: 7333 - DNA, 359 bp, Homo sapiens
aacagcagtgtcttcctgcatctccaggccctgggaatcccactgcacttggcctacgtgagtgtgttccctccaaccccaggctgaggctctggccatgggaggtccctactgtccatctctgtgggtcagggtctcccaccccagcggcccagccctgcttctccctttcatcttgacattattcaccagggtcctgcctggtgaagccaatggtctctaccagagagaacccagagggcaccaggactacagtaaagagtctagaccaagaggtgggagtcaggttgatgtgcagccctggccaactctgatcctctgcataggctcagtttgcctctctgtccagtgggacaact

SEQ ID NO: 7334 - DNA, 357 bp, Homo sapiens
cacctgtcacagaaaaagaaaaaaaagaaacccgcgccacggagaggtggggcttgggtaccccacggatgaaagtgccttcccatcagcccctgcactgggccccggggaacctagagtccctggttcaagctcagggagagcctcgggccactagtggtaccccaacgcggtggaaagcccatgagaggaaggtgagctgtgagggaggagaggtgagacacttgtggcagaaaagaaaaagaaaccgcgccacggagaagtggggcctgggtctcccatggaaaaaaagtgccttcccatcagtccctgagctgggccccgtggacccaggcgaccctggttctaggcctgggt

SEQ ID NO: 7335 - DNA, 364 bp, Homo sapiens
attaagttagggccacccaactgaaaatctactgaactgggaccgtaattacatctgcaaaaaccccttcacttttggcatataatactaatcatgggagtgacatcttggcgcattctgatgggtgaaagcaaggctcataggtcccactcacgctcgaagggagagactacacctccccttgccgagaacgtggagtttgaatacacggtgtggggggcattatatagactgcgcgctatggatcacttttgtatacatgccataggggcatttatcagcaatcggacaccctttcccctaaatgagttttaatcatggacggaagacgagaacttggaattacctcggatctgaagaacaa

SEQ ID NO: 7336 - DNA, 401 bp, Homo sapiens
ccatcccgttcttttatttccaatcactgaccacaccaggatgtttagccccgattcttcaatggtatacacctttaatattcccatactcctgggatcaatcatgtagaaccagaaccgaacagtacacgttccaaggcttgctgggaaggatttggaagtagtaattctggcaacggatccttccttggagccagatgagttgacgtacaggaagtgctgaccactacctggcgtgtgatcagagtctggaattaatgctttggcaggaattctgctccaatggcccagtccaagtcatcctcagagtcttgagtaagactgcaggctgtggtccagtttcctgaacttgtttcaaaattgcagcttcctgttgtgcttgtatactgtgcacagtgagc

SEQ ID NO: 7337 - DNA, 354 bp, Homo sapiens
  misc_feature (1)...(354): n = a,t,c or g
nnnnnnnnnnnnnnnnnnnnnnnnnnnnnnnnnnnnnnnnnnnnnnnnnnnnnnnnnnnnnnnctacttctattacattttcagcatatatcacttcattgctcctccatattatttttcactggtcttcttacatcttgtgtgcccatatttaagtagttttctttccaggtaaaaaatacatgtgtgcctaaaagattttaaagtcaacttttcataaaccatacctaaattatcaaagttattagaattattagaaagtattagcttattctttttataaaatgtagactttattattttagaaatattgattcctctctattcagctatcttaaagagggtatattttaa

SEQ ID NO: 7338 - DNA, 960 bp, Homo sapiens
  SIMILAR (157)..(441): 971254mologous to Homo sapiens RES4-22D,accession number AB001563,Smith-Waterman Score=456.
atgggactgctgctcaaagctagcagtttggcatctgtcacgggcttctgccttttacaagaaggtcctcaagaccaagaagtcttctacttgttactttttgtcaattacttctcagcaaagcagctcttagcttatcgctgctttgtagaaatggggagtgaaatattagggccaacactctcagaaacaagaccggaagcccttccacctccatctagcaatgaaacacctgcagtctcggatagtaaagagaaaaagaatgctgcaaaaaagaaatgtttatacaatttccaagatgctttcatggaagcaaataaagttgtcatggccacgtcatcagccacgtcctctgtgtcctgcacagctaccacagtgcagtccagcaacagccagttcagagtgtcatccaagagacctccttcagtagccagaggtgaccctgactgcgaagggcaccgctgcgagaatggtgtctacgacccacagcaggatgatggggacgagagtgcagatgaggacagctgctctgagcacagctccagcacctcgacctccaccaaccagaaggagggcaagtactgcgactgctgctactgcgaattctttgggcacggcgggaatgggtttgttcttgtgctggccatcatgagggcagcagcagacactccagctttatctgctggagaaccttcttttcgaagaaaggagccgtcaactgtagagatgatagaagaaaggcccagctgttgtgattgttctaccctcaagagctctgctcatacctcgcagtcctacagtagatttagactgactattgggcctgattgggaggctttgggggagaagccttgtcccgtgccccagaagactagagactgctggagtgcagagaacacagtgtgtcctccattcaggagcgtccagcatcggggtacccacgatggtccaaggccctga

SEQ ID NO: 7339 - DNA, 4833 bp, Homo sapiens
  SIMILAR (790)..(2775): 1001254mologous to Homo sapiens RES4-22D,accession number AB001563,Smith-Waterman Score=3575.
cacaatgacatgcagacctgcatattggagctggacggagaaactgggctaatgtgacagacagcaacaagagtaaggcagttgcttcgctattgagagaaagaaccatatgaagaaatttcggcagaggcggaccgggaacctcagcagctgcagaactactggtcagaagtgcgctacacggtgcgctgcatctaccgccaggcaggaaccccgctggcagatgaccaggaccagtctctggtgcctgacaaggagggagtgaaggagctcgtggataggctctgcgagagggacccctaccagctgtaccagcgtctggaacagcaagctcgagagtatgtgctggagatgaaggtccgcctgctccggcagctgtcggctgcggccaaggtgaaggcaccatctggcctgcagggcccgccgcaagcgcaccagttcatctccctcctgcttgaggagtacggcgccctctgccaggccgcacgctccatcagcaccttccttggcactctggaaaatgaacacttgaaaaagttccaagtgacgtgggaactgcataataaacacctgtttgaaaatctggtcttttcggagccacttcttcagagcaacttgcccgcactggtgtcacagatcaggctaggaaccaccacacacgacacctgcagtgaggacacatacagtaccttgctgcagaggtaccagcgttccgaggaggagctgcgcagagtcgccgaggagtggctggagtgccagaagaggatcgacgcctatgtcgacgagcagatgacaatgaaaaccaagcagcgcatgttaacagaagactgggagctttttaaacaaagaagattcattgaagaacagttaaccaataagaaagcagttactggcgagaacaacttcacagacaccatgaggcacgtgttatcgtcccggctgagcatgcccgactgccccaactgcaactacaggagaagatgtgcttgcgatgactgcagtctctcacacatcctcacgtgtggtatcatggacccccccgtcactgatgacatccacattcaccagctcccacttcaagtggatcctgctcctgactatcttgctgagaggagcccgcccagtgtgtcatctgcaagctcggggtccggctccagctctcccatcacaattcagcagcaccccaggctcatcctcacagacagtggctcggcaccaactttttgtagtgatgatgaagatgttgcaccattgtcagccaaatttgctgatatttatccattgagtaattatgatgataccgaggtggtggccaacatgaatggaatccacagcgaattgaatggtggcggggaaaacatggccctgaaggatgagtctcctcagataagcagtaccagcagtagttcctcagaagctgatgatgaagaagcggacggcgagagtagtggggagcccccaggggccccgaaggaagatggagtgctgggaagcaggagccccaggacagaggagagcaaagcagacagtccacccccatcctacccaacacagcaggctgaacaagctccaaacacttgtgaatgtcatgtttgtaagcaagaagcttctggactgacaccatctgcaatgacagccggagcccttcctcctggccatcagttcttgagcccagagaagcccacacaccctgcactgcacctttaccctcacatccatggacatgtgcctttgcacactgttccacacctgccacgccctctcatccaccccaccttgtatgcaacgccccccttcacacacagtaaggctttaccgccagcacctgttcagaatcacacaaataagcatcaggtattcaatgcatctcttcaagaccatatttatccgagctgttttgggaatactccagagtggaatagttctaaatttataagtctttggggatcagaagtgatgaatgataagaactggaatcctggcactttcttgccagatacaatttctgggagtgaaatattagggccaacactctcagaaacaagaccggaagcccttccacctccatctagcaatgaaacacctgcagtctcggatagtaaagagaaaaagaatgctgcaaaaaagaaatgtttatacaatttccaagatgctttcatggaagcaaataaagttgtcatggccacgtcatcagccacgtcctctgtgtcctgcacagctaccacagtgcagtccagcaacagccagttcagagtgtcatccaagagacctccttcagtaggtgacgtgtttcatggcatcagcaaggaggaccacagacactcggccccagccgccccgaggaatagccccacgggcttggcccccctcccagcgctctcgcctgctgcgctgtcacctgctgcgctctcacctgcctccacacctcaccttgcaaatcttgcagccccatcattccccaaaacagcaaccacaactcctgggtttgtggacacacgcaagagtttctgtcctgcacccctacccccggccacagatggctccattagcgcccctccaagtgtctgcagtgaccctgactgcgaagggcaccgctgcgagaatggtgtctacgacccacagcaggatgatggggacgagagtgcagatgaggacagctgctctgagcacagctccagcacctcgacctccaccaaccagaaggagggcaagtactgcgactgctgctactgcgaattctttgggcacggcgggcctccagctgcaccaacaagtagaaattatgcagaaatgagggaaaagcttcgcttacggctgaccaagaggaaagaggagcaacctaaaaaaatggaccagatctcagaaagggaaagcgtcgttgaccatcggagggtggaggatttgttgcagtttataaatagctccgaaaccaaaccagtgagcagcacgcgtgcagcgaagcgagcaaggcataagcaaaggaagctggaggagaaagctcgcctagaagcagaggccagggcccgggagcacctgcacctccaggaggagcagaggcggcgggaggaggaggaggatgaggaagaagaggaggatcgtttcaaggaggaatttcagcggcttcaggagcttcagaagctaagagctgtaaaaaagaagaagaaggagaggccaagtaaagactgccccaagttggacatgctcactagaaatttccaggcagcaacagagtctgttcctaactctggaaacatccacaatggctcactagagcaaactgaagaaccagaaacctcttctcactccccatccaggcatatgaaccactcagagcccaggccagggctaggggctgatggggatgctgcagaccccgtcgacaccagagactccaaatttctcctccccaaggaggtgaatgggaagcagcatgagccactctcttttttcttcgacatcatgcagcaccataaagaaggaaatggcaagcagaagctgaggcagaccagcaaggccagcagcgagccagcgaggaggcccacagagccccccaaggccacagaggggcagtccaagccccgggcccagactgagtcaaaggctaaggtggtcgacctcatgtccatcacagagcagaaaagagaggagagaaaagtcaacagtaataacaataacaaaaagcagctgaaccacatcaaggacgaaaagtcaaacccaacccctatggagcccacctctcccggtgagcatcagcagaacagcaagctggtgctggcagagtcccctcagccaaagggcaagaacaagaaaaataagaagaagaaaggagacagagtcaacaattcaattgatggagtttcgctcttgttgcccagtctggggtacaatggtgcaatcttggctcactgcaaccttcgcctcccaggttcaagcgattgtgctgcctcagcctcccaagtagttggaattacagatgatgtctttctacctaaagatattgacctagacagtgtggatatggatgagacagagagggaagtggaatatttcaaaaggttctgcttggattctgctagacagacccgacaaagactgtctatcaactggtccaattttagcttgaaaaaagccacctttgctgcccactgaatgaggactccctggagagggacacgcgagaggcaggccaggctgcaccaccccaagagccacgcccctcgctggcgccccagagccgtggtgcttgccaagggctgtgcggagctggtgctgcctgaaaccccagaccgagaagttgatgctcggcccacgccgttagctcgtgtgcgtgtagtctgtgcgtgagactccttcgattgtagctctgtgctgtcggattggaacagtagttcccgccaagtcctcccaccaccgcggcctcggaggcctgggccgtggccagataggagtttgcatcatccacgtggctccgttgcctctgcattgcgccctgtcctgtcatgtgtcctcaccggggtatcggccgtcactcagctctcctgtgcccctgcgtctcaccctaggcgggctgggcggggcaggcctcctttgttctccacaatctactgtctccgagtgtacacgttgcgctgtttgtgtttgatccccctgacttgtagccagcttgtgtaagatcccttgcagaacgagaaagttaaaaacaagcccacccagtactcacaccatcaagtctgttatagagtgtacgactgtattaacacggaggcctgcctggctacttttttaacatattgttaagtaatattaaaatcatgtctttctttttgaaagatg

SEQ ID NO: 7340 - DNA, 696 bp, Homo sapiens
  SIMILAR (696)..(553): 1001254mologous to Homo sapiens Secreted protein 33-58-3-C8- FL1,accession number AAY59707,Smith-Waterman Score=235.
tcagcccttgagtggtagatgagactgggcgccgtggagcagggggtggcgctcatcggggaagcttgggcggcacaggagcccacggaggcagggggtaggcttaggcatggagggctgcaggtcccgagccttctgtgggttccaaatgtggatctcagaatcaagaaaacctcctaggttctgtaaacgagaatgattcacatcaccagtgtttactcgcaccctcaccaggcacaactccggggctgtgaggttctcaggcacaaggcacaccttgtcctgcctgcctgtccacgtcatgctcagggatcccaaggggccagcaaacagctcagcagggctacagcaggtgcttcctcgcttggtctttggaggcctgagaccctcgtcctgggccagggcctcccaagtctcccgctccttccagcgcctcagctgctcctcccgcattttgtagaagaggatgtgcttctgcacatcgctgagctcggcaaggagctcggggtcgatgtacatgtcgtgcaggatctgctgcagcatgatgccacccttctccagtgttttcaggtctatatcctccaggtactccagggccgctttctggggcttggacagaaacacgtctgtgttggcaagcagcaatgccaaggcagcagcccccagggctcctgcaccaatggaccacatccccat

SEQ ID NO: 7341 - DNA, 377 bp, Homo sapiens
accacgcgtgcgaactaattttgttttagcattaaactgttgaactttttttttgtacttagaaaacctaaatactgcagtcagattttggaaactgccgtatattcactgttttaaaaaccccggaggggctggattaatttgtattgccccatggctgacaaaagcctttgtttttggttccgattattcttgtctagtaaccgtccgggtgaaataggttttcaagccatttttgaaagatgttgaaattcgtagatcacatggacaatccgtcagccttgggatgctgtttttctgagggtaccggattatcacgcgcttataaaacagcctatggacctggaaactgattagatgagacttgcaaactctcg

SEQ ID NO: 7342 - DNA, 602 bp, Homo sapiens
  SIMILAR (56)..(322): 971254mologous to Homo sapiens gamma-G globin,accession number X55656,Smith-Waterman Score=453.
ctgaggttatcaataagctcctagtccagacgccatgggtcatttcacagaggaggacaaggctactatcacaagcctgtggggcaaggtgaatgtggaagatgctggaggagaaaccctgggaaggctcctggttgtctacccatggacccagaggttctttgacagctttggcaacctgtcctctgcctctgccatcatgggcaaccccaaagtcaaggcacatggcaagaaggtgctgacttccttgggagatgccacaaagcacctggatgatctcaagggcacctttgcccagctgagtgaactgcactgtcataaagcacctggatgatctcaagggcacctttgcccagctgagtgaactgcactgtgacaagctgcatgtggatcctgagaacttcaagctcctgggaaatgtgctggtgaccgttttggcaatccatttcggcaaagaattcacccctgaggtgcaggcttcctggcagaagatggtgactggagtggccagtgccctgtcctccagataccactgagctcactgcccatgatgcagagctttcaaggataggctttattctgcaagcaatcaaataataaat

SEQ ID NO: 7343 - DNA, 4663 bp, Homo sapiens
  SIMILAR (790)..(2718): 991254mologous to Homo sapiens RES4-22D,accession number AB001563,Smith-Waterman Score=3434.
cacaatgacatgcagacctgcatattggagctggacggagaaactgggctaatgtgacagacagcaacaagagtaaggcagttgcttcgctattgagagaaagaaccatatgaagaaatttcggcagaggcggaccgggaacctcagcagctgcagaactactggtcagaagtgcgctacacggtgcgctgcatctaccgccaggcaggaaccccgctggcagatgaccaggaccagtctctggtgcctgacaaggagggagtgaaggagctcgtggataggctctgcgagagggacccctaccagctgtaccagcgtctggaacagcaagctcgagagtatgtgctggagatgaaggtccgcctgctccggcagctgtcggctgcggccaaggtgaaggcaccatctggcctgcagggcccgccgcaagcgcaccagttcatctccctcctgcttgaggagtacggcgccctctgccaggccgcacgctccatcagcaccttccttggcactctggaaaatgaacacttgaaaaagttccaagtgacgtgggaactgcataataaacacctgtttgaaaatctggtcttttcggagccacttcttcagagcaacttgcccgcactggtgtcacagatcaggctaggaaccaccacacacgacacctgcagtgaggacacatacagtaccttgctgcagaggtaccagcgttccgaggaggagctgcgcagagtcgccgaggagtggctggagtgccagaagaggatcgacgcctatgtcgacgagcagatgacaatgaaaaccaagcagcgcatgttaacagaagactgggagctttttaaacaaagaagattcattgaagaacagttaaccaataagaaagcagttactggcgagaacaacttcacagacaccatgaggcacgtgttatcgtcccggctgagcatgcccgactgccccaactgcaactacaggagaagatgtgcttgcgatgactgcagtctctcacacatcctcacgtgtggtatcatggacccccccgtcactgatgacatccacattcaccagctcccacttcaagtggatcctgctcctgactatcttgctgagaggagcccgcccagtgtgtcatctgcaagctcggggtccggctccagctctcccatcacaattcagcagcaccccaggctcatcctcacagacagtggctcggcaccaactttttgtagtgatgatgaagatgttgcaccattgtcagccaaatttgctgatatttatccattgagtaattatgatgataccgaggtggtggccaacatgaatggaatccacagcgaattgaatggtggcggggaaaacatggccctgaaggatgagtctcctcagataagcagtaccagcagtagttcctcagaagctgatgatgaagaagcggacggcgagagtagtggggagcccccaggggccccgaaggaagatggagtgctgggaagcaggagccccaggacagaggagagcaaagcagacagtccacccccatcctacccaacacagcaggctgaacaagctccaaacacttgtgaatgtcatgtttgtaagcaagaagcttctggactgacaccatctgcaatgacagccggagcccttcctcctggccatcagttcttgagcccagagaagcccacacaccctgcactgcacctttaccctcacatccatggacatgtgcctttgcacactgttccacacctgccacgccctctcatccaccccaccttgtatgcaacgccccccttcacacacagtaaggctttaccgccagcacctgttcagaatcacacaaataagcatcaggtattcaatgcatctcttcaagaccatatttatccgagctgttttgggaatactccagagtggaatagttctaaatttataagtctttggggatcagaagtgatgaatgataagaactggaatcctggcactttcttgccagatacaatttctgggagtgaaatattagggccaacactctcagaaacaagaccggaagcccttccacctccatctagcaatgaaacacctgcagtctcggatagtaaagagaaaaagaatgctgcaaaaaagaaatgtttatacaatttccaagatgctttcatggaagcaaataaagttgtcatggccacgtcatcagccacgtcctctgtgtcctgcacagctaccacagtgcagtccagcaacagccagttcagagtgtcatccaagagacctccttcagtaggtgacgtgtttcatggcatcagcaaggaggaccacagacactcggccccagccgccccgaggaatagccccacgggcttggcccccctcccagcgctctcgcctgctgcgctgtcacctgctgcgctctcacctgcctccacacctcaccttgcaaatcttgcagccccatcattccccaaaacagcaaccacaactcctgggtttgtggacacacgcaagagtttctgtcctgcacccctacccccggccacagatggctccattagcgcccctccaagtgtctgcagtgaccctgactgcgaagggcaccgctgcgagaatggtgtctacgacccacagcaggatgatggggacgagagtgcagatgaggacagctgctctgagcacagctccagcacctcgacctccaccaaccagaaggaggcctccagctgcaccaacaagtagaaattatgcagaaatgagggaaaagcttcgcttacggctgaccaagaggaaagaggagcaacctaaaaaaatggaccagatctcagaaagggaaagcgtcgttgaccatcggagggtggaggatttgttgcagtttataaatagctccgaaaccaaaccagtgagcagcacgcgtgcagcgaagcgagcaaggcataagcaaaggaagctggaggagaaagctcgcctagaagcagaggccagggcccgggagcacctgcacctccaggaggagcagaggcggcgggaggaggaggaggatgaggaagaagaggaggatcgtttcaaggaggaatttcagcggcttcaggagcttcagaagctaagagctgtaaaaaagaagaagaaggagaggccaagtaaagactgccccaagttggacatgctcactagaaatttccaggcagcaacagagtctgttcctaactctggaaacatccacaatggctcactagagcaaactgaagaaccagaaacctcttctcactccccatccaggcatatgaaccactcagagcccaggccagggctaggggctgatggggatgctgcagaccccgtcgacaccagagactccaaatttctcctccccaaggaggtgaatgggaagcagcatgagccactctcttttttcttcgacatcatgcagcaccataaagaaggaaatggcaagcagaagctgaggcagaccagcaaggccagcagcgagccagcgaggaggcccacagagccccccaaggccacagaggggcagtccaagccccgggcccagactgagtcaaaggctaaggtggtcgacctcatgtccatcacagagcagaaaagagaggagagaaaagtcaacagtaataacaataacaaaaagcagctgaaccacatcaaggacgaaaagtcaaacccaacccctatggagcccacctctcccggtgagcatcagcagaacagcaagctggtgctggcagagtcccctcagccaaagggcaagaacaagaaaaataagaagaagaaaggagacagagtcaacaattcaattgatgatgtctttctacctaaagatattgacctagacagtgtggatatggatgagacagagagggaagtggaatatttcaaaaggttctgcttggattctgctagacagacccgacaaagactgtctatcaactggtccaattttagcttgaaaaaagccacctttgctgcccactgaatgaggactccctggagagggacacgcgagaggcaggccaggctgcaccaccccaagagccacgcccctcgctggcgccccagagccgtggtgcttgccaagggctgtgcggagctggtgctgcctgaaaccccagaccgagaagttgatgctcggcccacgccgttagctcgtgtgcgtgtagtctgtgcgtgagactccttcgattgtagctctgtgctgtcggattggaacagtagttcccgccaagtcctcccaccaccgcggcctcggaggcctgggccgtggccagataggagtttgcatcatccacgtggctccgttgcctctgcattgcgccctgtcctgtcatgtgtcctcaccggggtatcggccgtcactcagctctcctgtgcccctgcgtctcaccctaggcgggctgggcggggcaggcctcctttgttctccacaatctactgtctccgagtgtacacgttgcgctgtttgtgtttgatccccctgacttgtagccagcttgtgtaagatcccttgcagaacgagaaagttaaaaacaagcccacccagtactcacaccatcaagtctgttatagagtgtacgactgtattaacacggaggcctgcctggctacttttttaacatattgttaagtaatattaaaatcatgtctttctttttgaaagatg

SEQ ID NO: 7344 - DNA, 2295 bp, Homo sapiens
  SIMILAR (157)..(924): 1001254mologous to Homo sapiens RES4-22D,accession number AB001563,Smith-Waterman Score=1368.
atgggactgctgctcaaagctagcagtttggcatctgtcacgggcttctgccttttacaagaaggtcctcaagaccaagaagtcttctacttgttactttttgtcaattacttctcagcaaagcagctcttagcttatcgctgctttgtagaaatggggagtgaaatattagggccaacactctcagaaacaagaccggaagcccttccacctccatctagcaatgaaacacctgcagtctcggatagtaaagagaaaaagaatgctgcaaaaaagaaatgtttatacaatttccaagatgctttcatggaagcaaataaagttgtcatggccacgtcatcagccacgtcctctgtgtcctgcacagctaccacagtgcagtccagcaacagccagttcagagtgtcatccaagagacctccttcagtaggtgacgtgtttcatggcatcagcaaggaggaccacagacactcggccccagccgccccgaggaatagccccacgggcttggcccccctcccagcgctctcgcctgctgcgctgtcacctgctgcgctctcacctgcctccacacctcaccttgcaaatcttgcagccccatcattccccaaaacagcaaccacaactcctgggtttgtggacacacgcaagagtttctgtcctgcacccctacccccggccacagatggctccattagcgcccctccaagtgtctgcagtgaccctgactgcgaagggcaccgctgcgagaatggtgtctacgacccacagcaggatgatggggacgagagtgcagatgaggacagctgctctgagcacagctccagcacctcgacctccaccaaccagaaggagggcaagtactgcgactgctgctactgcgaattctttgggcacggcgggcctccagctgcaccaacaagtagaaattatgcagaaatgagggaaaagcttcgcttacggctgaccaagaggaaagaggagcaacctaaaaaaatggaccagatctcagaaagggaaagcgtcgttgaccatcggagggtggaggatttgttgcagtttataaatagctccgaaaccaaaccaaatgggtttgttcttgtgctggccatcatgagggcagcagcagacactccagctttatctgctggagaaccttcttttcgaagaaaggagccgtcaactgtagagatgatagaagaaaggcccagctgttgtgattgttctaccctcaagagctctgctcatacctcgcagtcctacagtagatttagactgactattgggcctgattgggaggctttgggggagaagccttgtcccgtgccccagaagactagagactgctggagtgcagagaacacactggaggagaaagctcgcctagaagcagaggccagggcccgggagcacctgcacctccaggaggagcagaggcggcgggaggaggaggaggatgaggaagaagaggaggatcgtttcaaggaggaatttcagcggcttcaggagcttcagaagctaagagctgtaaaaaagaagaagaaggagaggccaagtaaagactgccccaagttggacatgctcactagaaatttccaggcagcaacagagtctgttcctaactctggaaacatccacaatggctcactagagcaaactgaagaaccagaaacctcttctcactccccatccaggcatatgaaccactcagagcccaggccagggctaggggctgatggggatgctgcagaccccgtcgacaccagagactccaaatttctcctccccaaggaggtgaatgggaagcagcatgagccactctcttttttcttcgacatcatgcagcaccataaagaaggaaatggcaagcagaagctgaggcagaccagcaaggccagcagcgagccagcgaggaggcccacagagccccccaaggccacagaggggcagtccaagccccgggcccagactgagtcaaaggctaaggtggtcgacctcatgtccatcacagagcagaaaagagaggagagaaaagtcaacagtaataacaataacaaaaagcagctgaaccacatcaaggacgaaaagtcaaacccaacccctatggagcccacctctcccggtgagcatcagcagaacagcaagctggtgctggcagagtcccctcagccaaagggcaagaacaagaaaaataagaagaagaaaggagacagagtcaacaattcaattgacagtaagaacctggaccccatcatccatggtgcctttactgacttgctgagtcctacaacacag

SEQ ID NO: 7345 - DNA, 4712 bp, Homo sapiens
  SIMILAR (790)..(1005): 1001254mologous to Homo sapiens RES4-22D,accession number AB001563,Smith-Waterman Score=394.
cacaatgacatgcagacctgcatattggagctggacggagaaactgggctaatgtgacagacagcaacaagagtaaggcagttgcttcgctattgagagaaagaaccatatgaagaaatttcggcagaggcggaccgggaacctcagcagctgcagaactactggtcagaagtgcgctacacggtgcgctgcatctaccgccaggcaggaaccccgctggcagatgaccaggaccagtctctggtgcctgacaaggagggagtgaaggagctcgtggataggctctgcgagagggacccctaccagctgtaccagcgtctggaacagcaagctcgagagtatgtgctggagatgaaggtccgcctgctccggcagctgtcggctgcggccaaggtgaaggcaccatctggcctgcagggcccgccgcaagcgcaccagttcatctccctcctgcttgaggagtacggcgccctctgccaggccgcacgctccatcagcaccttccttggcactctggaaaatgaacacttgaaaaagttccaagtgacgtgggaactgcataataaacacctgtttgaaaatctggtcttttcggagccacttcttcagagcaacttgcccgcactggtgtcacagatcaggctaggaaccaccacacacgacacctgcagtgaggacacatacagtaccttgctgcagaggtaccagcgttccgaggaggagctgcgcagagtcgccgaggagtggctggagtgccagaagaggatcgacgcctatgtcgacgagcagatgacaatgaaaaccaagcagcgcatgttaacagaagactgggagctttttaaacaaagaagattcattgaagaacagttaaccaataagaaagcagttactggcgagaacaacttcacagacaccatgaggcacgtgttatcgtcccggctgagcatgcccgactgccccaactgcaactacaggagaagatgtgcttgcgatgactgcagtctctcacacatcctcacgtgtggtatcatggacccccccgtcactgatgacatccacattcaccagctcccacttcaagtggatcctgctcctgactatcttgctgagaggagcccgcccagtgtgtcatctgcaagctcggggtccggctccagctctcccatcacaattcagcagcaccccaggctcatcctcacagacagtggctcggcaccaactttttgtagtgatgatgaagatgttgcaccattgtcagccaaatttgctgatatttatccattgagtaattatgatgataccgaggtggtggccaacatgaatggaatccacagcgaattgaatggtggcggggaaaacatggccctgaaggatgagtctcctcagataagcagtaccagcagtagttcctcagaagctgatgatgaagaagcggacggcgagagtagtggggagcccccaggggccccgaaggaagatggagtgctgggaagcaggagccccaggacagaggagagcaaagcagacagtccacccccatcctacccaacacagcaggctgaacaagctccaaacacttgtgaatgtcatgtttgtaagcaagaagcttctggactgacaccatctgcaatgacagccggagcccttcctcctggccatcagttcttgagcccagagaagcccacacaccctgcactgcacctttaccctcacatccatggacatgtgcctttgcacactgttccacacctgccacgccctctcatccaccccaccttgtatgcaacgccccccttcacacacagtaaggctttaccgccagcacctgttcagaatcacacaaataagcatcaggtattcaatgcatctcttcaagaccatatttatccgagctgttttgggaatactccagagtggaatagttctaaatttataagtctttggggatcagaagtgatgaatgataagaactggaatcctggcactttcttgccagatacaatttctgggagtgaaatattagggccaacactctcagaaacaagaccggaagcccttccacctccatctagcaatgaaacacctgcagtctcggatagtaaagagaaaaagaatgctgcaaaaaagaaatgtttatacaatttccaagatgctttcatggaagcaaataaaagttgtcatggccacgtcatcagccacgtcctctgtgtcctggacagctaacacagtgcagtccagcaacagccagttcagagtgtcatccaagagacctccttcagtaggtgacgtgtttcatggcatcagcttgggggatccaaaaaaattcggccccagccgccccgagaaatagccccacgggcttggcccccctcccagcgctctcgcctgctgcgctgtcacctgctgcgctctcacctgcctccacacctcaccttgcaaatcttgcagccccatcattccccaaaacagcaaccacaactcctgggtttgtggacacacgcaagagtttctgtcctgcacccctacccccggccacagatggctccattagcgcccctccaagtgtctgcagtgaccctgactgcgaagggcaccgctgcgagaatggtgtctacgacccacagcaggatgatggggacgagagtgcagatgaggacagctgctctgagcacagctccagcacctcgacctccaccaaccagaaggagggcaagtactgcgactgctgctactgcgaattctttgggcacggcgggcctccagctgcaccaacaagtagaaattatgcagaaatgagggaaaagcttcgcttacggctgaccaagaggaaagaggagcaacctaaaaaaatggaccagatctcagaaagggaaagcgtcgttgaccatcggagggtggaggatttgttgcagtttataaatagctccgaaaccaaaccagtgagcagcacgcgtgcagcgaagcgagcaaggcataagcaaaggaagctggaggagaaagctcgcctagaagcagaggccagggcccgggagcacctgcacctccaggaggagcagaggcggcgggaggaggaggaggatgaggaagaagaggaggatcgtttcaaggaggaatttcagcggcttcaggagcttcagaagctaagagctgtaaaaaagaagaagaaggagaggccaagtaaagactgccccaagttggacatgctcactagaaatttccaggcagcaacagagtctgttcctaactctggaaacatccacaatggctcactagagcaaactgaagaaccagaaacctcttctcactccccatccaggcatatgaaccactcagagcccaggccagggctaggggctgatggggatgctgcagaccccgtcgacaccagagactccaaatttctcctccccaaggaggtgaatgggaagcagcatgagccactctcttttttcttcgacatcatgcagcaccataaagaaggaaatggcaagcagaagctgaggcagaccagcaaggccagcagcgagccagcgaggaggcccacagagccccccaaggccacagaggggcagtccaagccccgggcccagactgagtcaaaggctaaggtggtcgacctcatgtccatcacagagcagaaaagagaggagagaaaagtcaacagtaataacaataacaaaaagcagctgaaccacatcaaggacgaaaagtcaaacccaacccctatggagcccacctctcccggtgagcatcagcagaacagcaagctggtgctggcagagtcccctcagccaaagggcaagaacaagaaaaataagaagaagaaaggagacagagtcaacaattcaattgatgatgtctttctacctaaagatattgacctagacagtgtggatatggatgagacagagagggaagtggaatatttcaaaaggttctgcttggattctgctagacagacccgacaaagactgtctatcaactggtccaattttagcttgaaaaaagccacctttgctgcccactgaatgaggactccctggagagggacacgcgagaggcaggccaggctgcaccaccccaagagccacgcccctcgctggcgccccagagccgtggtgcttgccaagggctgtgcggagctggtgctgcctgaaaccccagaccgagaagttgatgctcggcccacgccgttagctcgtgtgcgtgtagtctgtgcgtgagactccttcgattgtagctctgtgctgtcggattggaacagtagttcccgccaagtcctcccaccaccgcggcctcggaggcctgggccgtggccagataggagtttgcatcatccacgtggctccgttgcctctgcattgcgccctgtcctgtcatgtgtcctcaccggggtatcggccgtcactcagctctcctgtgcccctgcgtctcaccctaggcgggctgggcggggcaggcctcctttgttctccacaatctactgtctccgagtgtacacgttgcgctgtttgtgtttgatccccctgacttgtagccagcttgtgtaagatcccttgcagaacgagaaagttaaaaacaagcccacccagtactcacaccatcaagtctgttatagagtgtacgactgtattaacacggaggcctgcctggctacttttttaacatattgttaagtaatattaaaatcatgtctttctttttgaaagatg

SEQ ID NO: 7346 - DNA, 450 bp, Homo sapiens
  misc_feature (1)...(450): n = a,t,c or g
ggggtgccatataaaagacacatcgagggtttctaaccgggtttaaacgggccccttaaattcaacggcccccnnnnnnnnnnnnnnnnngatggcttactacgtttattttctggcggttctggaggccagagtccaaactgggtcccactgggctcatatcaaggcaggagcaggccggtccctcccgggggctccagtgcggaaccgttcccgccttccccagcatctggaggcacccacgtccctcagcttagggcccttcctccccttcacggccacagcgcggcccatccccatctctctctggctctcaccgtcccgcctcctgtcgtgaggaccctgtgaggacactggggccctggaccccccaccctggatgctcctccatctccgtcccacctgcaggtgcctttgtcctcgcaaggcggaattccaccgcactggact

SEQ ID NO: 7347 - DNA, 375 bp, Homo sapiens
  misc_feature (1)...(375): n = a,t,c or g
cacatcttgaactagggtgagaaccccttaatgaggtggccagaggcacttccaggagtctttaagacctgtttctccccacccacctaggggtatggtgggggcctcatgtttctttgccaccatgctgacagcattaacttttctgccttccagccaatcaacaatgctgacttcatagtgcctatagagattgaggggaccactcaccaggtgagctgccagccagaccacacccagcccagagggtggggggtctgccttctgcctcacctgtactggggtcctccacccatctcagggnctgggttctgtcagttgatcccttttctataactccagcctcccctttttattggtatctttcactcaagg

SEQ ID NO: 7348 - DNA, 808 bp, Homo sapiens
ccgctcccattcccgcttcttctctctttccaacagtccgctaacgaaccaggtactgtaggcgctgtctataactttgcttttcgatggttcagtcattattagcattatgattggtttttacaaaacgcaactggaatcttaaagaatcttttccctttgctctgctgccctttcaaaaaaacatggaaacccccaggactgctcccgaagggcccctgggaatgtgccggctgcaatctcaagggctccctcacttgtcttgggtctgagggcgcgaacggtgacgagaaaggggggactacggcccaggaaaggggagcagggcccaatcccctcccctagcgatcccgcagtgaagggcccgggcgccgagccaggacaggcgcgattcgctcccgtttatcaaatccttatcggtgccccgaggtgggaaccgctgctttcgaccggaggatacacggtttctggctccagtcccgtagtggaagttggaacaagagcaaatcaacctcggcagtgagccctcccggccagtcacctccctcccttagcgagtcggtcctcctcatcctcgcacctctataccgccgctccgccgctggtttcccgcggctcaggcggttcagccggccgcgcgttggattccagcttcccgcagcatagcctcgccaagccgcggccaagcgcggggctggaagctccaggccactggggccgcacgggtggagacaggaggagaaaggggacaggcggcgagccgcacacatttgcagaagttgaggccctgcctgcttctgcgcggccg

SEQ ID NO: 7349 - DNA, 369 bp, Homo sapiens
  misc_feature (1)...(369): n = a,t,c or g
nnnnnnnnnnnnnnnnnnnnnnnnnnnnnnnnnnnnnnnnnnnnnnnnnnnnnnnnnnnnnnnnnnnnnnnnnnnnnnnnnnnnnnnnnnnnnnnnnnnnnnnnnnnnnttttggcccaggcccccccctttaatccccccttttttaggggccnnnnnnnnnnnactccggggtcgggaaataaaacccttcttttttacccgggggaacccccgttttttttaaaaatccaaaatttcccccgccgtggggggggccccctgtttccccccttttttgggggggtgaaacaggaaattggggtaaccccgggggggggactttggaagggcccggatatccccccttggccctccccggggggaaag

SEQ ID NO: 7350 - DNA, 394 bp, Homo sapiens
  SIMILAR (97)..(393): 661254mologous to Homo sapiens SRcyp protein,accession number X99717,Smith-Waterman Score=298.
tggacgcgtgggcaggaatacaggagaagaggtcggtcacgatgccgagagatttgaactccaccgggaagatcaagaacttaggattggaggagaaggaggagagactctcggagctcatagagagaagattgtcaaagcacaatctacgtgaggaaaagggccaaatctaattgttggtgttggagcaaagagaaatcaaagagtcatgaaagagattcaatacctattagaattgaagaaaagaggatgaggtcacggagtaaaggaagggatcatgaaaatgttaaagaaaaagaaaagcagtctgattctataggaaatgatcaggaagggagtagaagtagagagaagtctaatcagtttgattcaaagagtaatgagcgtgatcaca

SEQ ID NO: 7351 - DNA, 2257 bp, Homo sapiens
  SIMILAR (47)..(2254): 971254mologous to Homo sapiens ribosomal protein S6 kinase 1,accession number L07597,Smith-Waterman Score=3736.
cgcggcgcagggccgccggagagcgcgggtgacctggcggcggcagatgccgctcgcccagctcaaggagccctggccgctcatggagctagtgccgctggacccggagaatggacagacctcaggggaagaagctggacttcagccgtccaaggatgagggcgtcctcaaggagatctccatcacgcaccacgtcaaggctggctctgagaaggctgatccatcccatttcgagctcctcaaggttctgggccagggatcctttggcaaagtcttcctggtgcggaaagtcacccggcctgacagtgggcacctgtatgctatgaaggtgctgaagaaggcaacgctgaaagtacgtgaccgcgtccggaccaagatggagagagacatcctggctgatgtaaatcacccattcgtggtgaagctgcactatgccttccagaccgagggcaagctctatctcattctggacttcctgcgtggtggggacctcttcacccggctctcaaaagaggtgatgttcacggaggaggatgtgaagttttacctggccgagctggctctgggcctggatcacctgcacagcctgggtatcatttacagagacctcaagcctgagaacatccttctggatgaggagggccacatcaaactcactgactttggcctgagcaaagaggccattgaccacgagaagaaggcctattctttctgcgggacagtggagtacatggcccctgaggtcgtcaaccgccagggccactcccatagtgcggactggtggtcctatggggtgttgatgtttgagatgctgacgggctccctgcccttccaggggaaggaccggaaggagaccatgacactgattctgaaggcgaagctaggcatgccccagtttctgagcactgaagcccagagcctcttgcgggccctgttcaagcggaatcctgccaaccggctcggctccggccctgatggggcagaggaaatcaagcggcatgtcttctactccaccattgactggaataagctataccgtcgtgagatcacgccacccttcaagccagcagtggctcagcctgatgacaccttctactttgacaccgagttcacgtcccggccaccctatgagtcctcctggcaaccccccccagaattggggcccaacacctggttctggggcgtcccatccgtggccaccggcttgatggaagacgacggcaagcctcgtgccccgcaggcacccctgcactcggtggtacagcaactccatgggaagaacctggtttttagtgacggctacgtggtaaaggagacaattggtgtgggctcctactctgagtgcaagcgctgtgtccacaaggccaccaacatggagtatgctgtcaaggtcattgataagagcaagcgggatccttcagaagagattgagattcttctgcggtatggccagcaccccaacatcatcactctgaaagatgtgtatgatgatggcaaacacgtgtacctggtgacagagctgatgcggggtggggagctgctggacaagatcctgcggcagaagttcttctcagagcgggaggccagctttgtcctgcacaccattggcaaaactgtggagtatctgcactcacagggggttgtgcacagggacctgaagcccagcaacatcctgtatgtggacgagtccgggaatcccgagtgcctgcgcatctgtgactttggttttgccaaacagctgcgggctgagaatgggctcctcatgacaccttgctacacagccaactttgtggcgcctgaggtgctgaagcgccagggctacgatgaaggctgcgacatctggagcctgggcattctgctgtacaccatgctggcaggatatactccatttgccaacggtcccagtgacacaccagaggaaatcctaacccggatcggcagtgggaagtttaccctcagtgggggaaattggaacacagtttcagagacagccaaggacctggtgtccaagatgctacacgtggatccccaccagcgcctcacagctaagcaggttctgcagcatccatgggtcacccagaaagacaagcttccccaaagccagctgtcccaccaggacctacagcttgtgaagggagccatggctgccacgtactccgcactcaacagctccaagcccaccccccagctgaagcccatcgagtcatccatcctggcccagcggcgagtgaggaagttgccatccaccaccctgtga

SEQ ID NO: 7352 - DNA, 1848 bp, Homo sapiens
  SIMILAR (871)..(1662): 941254mologous to Mus musculus ribosomal protein S6 kinase,accession number M28489,Smith-Waterman Score=1310.
atggctgaaggggatgctaagggagataaagcaaaggtgaaggacgaaaaacctgctcctccaaagccagagcccaagcctaaaaaggcccctgcaaagaagggagagaaggtacccaaagggaaaaagggaaaagctgatgctggcaaggaggggaataaccctgcagaaaatggagatgccaaaacagaccaggaagggcctgctgcccagctgcagggagtttggacagcagacagcctccagctgtcagctccagggctggcctcagatgcagacagcctcctcgcccaagatcacatccttccacatccttcctcatccttccccagggcggcccccatcagaaagcgcttcaccaccatcacctggttctcgcacataaattgctcattgagaacgggccatgatgacaatggcggttttgtggaacagaaaggggggaaagtacgtgaccgcgtccggaccaagatggagagagacatcctggctgatgtaaatcacccattcgtggtgaagctgcactatgccttccagaccgagggcaagctctatctcattctggacttcctgcgtggtggggacctcttcacccggctctcaaaagaggtgatgttcacggaggaggatgtgaagttttacctggctgagctggctctgggcctggatcacctgcacagcctgggtatcatttacagagacctcaagcctgagaacatccttctggatgaggagggccacatcaaactcactgactttggcctgagcaaagaggccattgaccacgagaagaaggcctattctttctgcgggacagtggagtacatggcccctgagggctcagccttgatgagtcccgggggctgtttcagggcgaagctaggcatgccccagtttctgagcactgaagcccagagcctcttgcgggccctgttcaagcggaatcctgccaaccggctcggctccggccctgatggggcagaggaaatcaagcggcatgtcttctactccaccattgactggaataagctataccgtcgtgagatcaagccacccttcaagccagcagtggctcagcctgatgacaccttctactttgacaccgagttcacgtcccgcacacccaaggattccccaggcatcccccccagcgctggggcccatcagctgttccggggcttcagcttcgtggccaccggcctgatggaagacgacggcaagcctcgtgccccgcaggcacccctgcactcggtggtacagcaactccatgggaagaacctggtttttagtgacggctacgtggtaaaggagacaattggtgtgggctcctactctgagtgcaagcgctgtgtccacaaggccaccaacatggagtatgctgtcaaggtcattgataagagcaagcgggatccttcagaagagattgagattcttctgcggtatggccagcaccccaacatcatcactctgaaagatgtgtatgatgatggcaaacacgtgtacctggtgacagagctgatgcggggtggggagctgctggacaagatcctgcggcagaagttcttctcagagcgggaggccagctttgtcctgcacaccattggcaaaactgtggagtatctgcactcacagggggaatggaagtgggcgctcagacctaactacctgagatcctgctggctgggccgctaccccttatctcttcggggttccaactccgacagcccctcgcaactagaattcccctctaacaagtgctctgcgcccctgcggggctccgagaggggcgtcgggggcgcagctgccgccggggccgtgggaaccagagctgagagacacaagaactga

SEQ ID NO: 7353 - DNA, 1366 bp, Homo sapiens
  SIMILAR (20)..(448): 1001254mologous to Homo sapiens gamma-globin,accession number M15386,Smith-Waterman Score=752.
  misc_feature (1)...(1366): n = a,t,c or g
ggcacgagatcaataagctcctagtccagacgccatgggtcatttcacagaggaggacaaggctactatcacaagcctgtggggcaaggtgaatgtggaagatgctggaggagaaaccctgggaaggctcctggttgtctacccatggacccagaggttctttgacagctttggcaacctgtcctctgcctctgccatcatgggcaaccccaaagtcaaggcacatggcaagaaggtgctgacttccttgggagatgccataaagcacctggatgatctcaagggcacctttgcccagctgagtgaactgcactgtgacaagctgcatgtggatcctgagaacttcaagctcctgggaaatgtgctggtgaccgttttggcaatccatttcggcaaagaattcacccctgaggtgcaggcttcctggcagaagatggtgactggagttgtggggcaaggtgaatgtggaagatgctggaggagaaaccctgggaaggctcctggttgtctacccatggacccagaggttctttgacagctttggcaacctgtcctctgcctctgccatcatgggcaaccccaaagtcaaggcacatggcaagaaggtgctgacttccttgggagatgccatatgagcacctggatgatctcaagggcacctttgcccagctgagtgaactgcactgtgacaagacaagctgcatgtggatcctgagaacttcaagctcctgggaaatgtgctggtgacccgttttgccaatccaatttcggcgcaaaaattctcccctttaagggcaggcttcctggcagaagatggcagaagatggtgactggagtggccagtgccctgtcctccagataccactgagctcacttgcccatgattcagagctttcagggattaggctttatcctgcaagcaatacaaataataaatctattctgctaagaaaaaacacccacccacgccnaacnccaaacaacataataaaaaaggggttttaattaaagggcccgagaggttaacccccttaagggggggtaaattttaaggtgggcccgggggcggggttttaaacaaggtcggaaccttggagacagggtnnnttttgccccgggcccctgggacgctttataatatccgcctcaataaggagaacgttaggtctggttctttttttatactcgggaaaacctctaaagggtgggaaaaaaactcaggggtcccttatattacgcgtcaccctttatatctggggagatcggaaaaatagcttttgggctatttantcatgcaaaccggctattatatttagtaacagattaagacaactctgaagagacaaccattagacgtgagaagcgg

SEQ ID NO: 7354 - DNA, 450 bp, Homo sapiens
  SIMILAR (54)..(449): 1001254mologous to Homo sapiens Human TANGO 234,accession number AAB66037,Smith-Waterman Score=725.
  misc_feature (1)...(450): n = a,t,c or g
nctgattcccntcggaaccgccctgaattacctctgtcgacccacgcgtccggggaaacgcttctacaggatatggaaaaatttggctcgatgatgtttcctgtgatggagatgagtcagatctctggtcatgcaggaacagtgggtggggaaataatgactgcagtcacagtgaagatgttggagtgatctgttctgatgcatcggatatggagctgaggcttgtgggtggaagcagcaggtgtgctggaaaagttgaggtgaatgtccagggtgccgtgggaattctgtgtgctaatggctggggaatgaacattgctgaagttgtttgcaggcaacttgaatgtgggtctgcaatcagggtctccagagagcctcatttcacagaaagaacattacacatcttaatgtcgaattctggctgcactggaggggaagcctctctctggg

SEQ ID NO: 7355 - DNA, 384 bp, Homo sapiens
tttgtatgatagagaaaaaaagttccagtaacggcatactggaagcagcagttttccaattattatgaggagttgacacctctgtgcctgtgtctaggctaatttagtctggactgttaacaaaatgaatcagtagtccatatgaagaccttcctggctgtttttaagctaccgctgaaaatcagacagataaaatgtatttatattttttacaattaggagttgaagttatattctgtaatattaaaatatttttttctttacgattttagaccagtctgcttagttttaagtgaaattccttttatgtctacttggtttttacttgtgtcaacatttaggtaagtcatatcaatttccatatattttcagtataattcttgg

SEQ ID NO: 7356 - DNA, 383 bp, Homo sapiens
  SIMILAR (3)..(380): 511254mologous to Mus musculus Similar to ubiquitin specific protease 16,accession number BC003278,Smith-Waterman Score=336.
ctgaaaaaggaccactttctcctaaagttctttttaatcacctttgtcagaaggcacctcgatttaaagatttccagcaacaggacagccaggagcttcttcattatcttctggatgcagggaggacagaataaacaaagcgaatacaagctagcattctaaaagcatttaacaacccaactactaaaactgctgatgatgaaactagaaaaaaagtcaaaacatatggaaaagaaggtgtgaaaatgaacttcatagatcggatctttattggtgaattaactagcacggtcatgtgtgaagaatgtgcaaatatctccacggtgaaagatccattcattgatatttcacttcctataatagaagaaagggtttcaaaacct

SEQ ID NO: 7357 - DNA, 344 bp, Homo sapiens
  SIMILAR (54)..(239): 961254mologous to Homo sapiens CTCL tumor antigen se89- 1,accession number AF273053,Smith-Waterman Score=307.
tccatactaaattttagaagtgcagatccagaaactgaactgcttaatttcacagattgaatgctaaagctctaagtctgttgacgcttctgaatgtctatcagaagaaacatctggttgaaattttgtcataccacaattgtgattcacaaactcgaaatgctccagaattggattgccttatcagacttcaggctcagaacatacagcaacgacacatagtctttttaacaggtaaagagagcactcctaagctttctactatgaatataggaatgtgaatgaaaggattttatggggctgtggtgggtattgctaagctttgattctgaaaatgtgaagga

SEQ ID NO: 7358 - DNA, 398 bp, Homo sapiens; identical to SEQ ID NO: 7128
  SIMILAR (160)..(225): 811254mologous to Homo sapiens PRO1722,accession number AF119851,Smith-Waterman Score=86.

SEQ ID NO: 7359 - DNA, 1154 bp, Homo sapiens
  SIMILAR (588)..(911): 441254mologous to Homo sapiens Human myelin oligodendrocyte glycoprotein gene,accession number AAZ29204,Smith-Waterman Score= 168.
ttttttttttttttttttgaggtggagtttcactcttgtcgcccaggctggagtgcagtagtatgatcttggctcactgcaacttctacctccagggttcaagtgattctcctagtctacgactccggagtagctaggacatgaggcacataccaccaagcccagctgatgtgtgtatttagaatagagacggggtttcactatgttggccaggctggtctcaaatgcctgaccttgagtgatccacccgcctcggccctccccaaagagctgggattaacaggtgtgagccaccaggcccggcctccctagattaaatcttgacattttttggatcaagtaagaacccactggagcctttccctggaaaaaaagaacacatactccagtctcacacacaatttcttgggggctcacagaccctcttgaagcctatccataaaaccccctgggtgaagtccccctgcccgatagcctgagggaagacatgtgagtggatatatgtgcactaacaggggcgaagacagacctggatggtctgcaatcccagagagcatgaggcaccatgtcccaaagcttggtatgtggccctgggctcctccccctaattttatctctctgaagaagctgagttttttttttttttttttgagacggagtctccctcttgtcgcccaggctggagtgcagtggcatgatgtcagctcactgcaacctccgcctcccgggttcaagcgattctcctgcctcagcctcctgagtagctgggattacaggtgggcaccaccctgcccagctaatttttgtagcttttagtaccagccggggttttgccatgttggccaggctggtcagcaactcctagcctcaggtgatctgcctgcctcagcctcccaaagtgctggggattacaggggcgtgagccaccacgcccggccacgttctgagttttgaggatccagaaacaaaaggctggaaagcgacacttctacaggtttactgatgaagtccggagaaaatccaaaaacaaagccccactgaggggtttgtgaatttggctgttctcagtggccaggcagagtctctgctccactcttctttcccagctagcagggaagtgaaggcaaagaactgtctcagaaacaagtctctag

SEQ ID NO: 7360 - DNA, 346 bp, Homo sapiens
gttatgtagaaagttaacatttggagaatctgagtaaagggtatatacaaattatttgtactattttgcaagtctaaaattatgtcacatttgaaagataagtccatttaatatgcataggtatgtaataattcaatagtttcccccaatttgttatttattagagataggctctcactctgttgttcaggctggagtgcagtggcacagacatagcgcccagtatccttgaattcatgagcacaagcaatcctcatgcgtcagcctcatgagtagctagcactacagccatgtgcccccaagcccaggtaatattttacttttgtagagacgcgggtcttgcgtt

SEQ ID NO: 7361 - DNA, 348 bp, Homo sapiens
cgcaggggtcccccccggtaatccccccctttgggggggggagggggggggttcccctaggggggggggtttaaaaccgggtttcccacaaaggggaaacccctttttttttaaaaaatcccaacctaccccccccggggggggcccccccttaatcccccccccttggggggggggggcagggggttcccctttaccccaggggcaaaggttccaataaaccaaaattgggccctttccctccccccggggcaaaaaaaagaaaccccccttcccaaaaaaaaaaaaaaaaaaaaaaaagagaaaagaaaagagtgagatgcctggatttatggtcttaaatgcagc

SEQ ID NO: 7362 - DNA, 498 bp, Homo sapiens
  misc_feature (1)...(498): n = a,t,c or g
cgganncacananntttgacnnccntnnnnntttgccncgcctgcaggaattcggcacgaggtactttgtatgtgttgagagtttacagagctctttgacatacgcgatcttagtctttacaaataaggaaaacagctcagtttgggaagtatcagagatgggattcaaacccagatcctctggtccaagttgtatgtgcactgaactaatcaggcaggaaaaaagcccagccactgtctcacagattgttttttgtatattgtagcaaaatcctgaaacaatggggtccttccagtctcatcatacaaaatggcaatcttnnnnnnnnnnnnnnnnnnnnnnnnnnnnnnnnnnnnnnnnnnnnnnnnnnnnnnnnnnnnnnnnnnnnnnnnnnnnnnnnnnnnnnnnnnnnnnnnnnnnnnnnnnnnnnnnnnnnnncnnnnnnnnnnnnnnnnnnnnnnnncctgggggggggcccggggcccaatttccccttt

SEQ ID NO: 7363 - DNA, 474 bp, Homo sapiens
  misc_feature (1)...(474): n = a,t,c or g
gtggtntnnnnaattgctcgctcgtcctgcaggaattcggcacgaggtactttgtatgtgttgagagtttacagagctctttgacatacgcgatcttagtctttacaaataaggaaaacagctcagtttgggaagtatcagagatgggattcaaacccagatcctctggtccaagttgtatgtgcactgaactaatcaggcaggaaaaaagcccagccactgtctcacagattgttttttgtatattgtagcaaaatcctgaaacaatggggtccttccagtctcatcatacaaaatggcaatcttnnnnnnnnnnnnnnnnnnnnnnnnnnnnnnnnnnnnnnnnnnnnnnnnnnnnnnnnnnnnnnnnnnnnnnnnnnnnnnnnnnnnnnnnnnnnnnnnnnnnnnnnnnnnnnnnnnnnnncnnnnnnnnnnnnnnnnnnnnnnncactggggggggcccggccccaattc

SEQ ID NO: 7364 - DNA, 434 bp, Homo sapiens
  SIMILAR (197)..(168): 901254mologous to Homo sapiens Human secreted protein, SEQ ID NO: 7870,accession number AAG03789,Smith-Waterman Score=38.
tacaatattatcagtttcattactgatgaatattatatgcctcctgataagatgtactgaggaggacagaatatcacttttgtagatttataccaaaaatgcataatttggatataatgaagaaacagtcaaatccaagtttgaggctgggcacagtagctcatatctgtaatcccagcactttgggaggccaaggcagaggatcacatgaggtcaggagttcaagatcagcctggccaacgtggcaaaaccccatctctacgaaaaatacacagattagccaggcatggtggaatgcacctatagtcccagctacttgggaggctgaagcacaagaatcgcttgaatccaggaggcaaaagttgcagtgagccgagatcacaccactgcagttcagcctgggcaacagaccaagactctgtctcaaaaaaagg

SEQ ID NO: 7365 - DNA, 1127 bp, Homo sapiens
  SIMILAR (1126)..(935): 761254mologous to Homo sapiens Human secreted protein sequence encoded by gene 12 SEQ ID NO:71,accession number AAB64677,Smith-Waterman Score=228.
  misc_feature (1)...(1127): n = a,t,c or g
cgagtttaccctgcaccatgtccccccctgaccctaattttttttttaaagtggttccccaggggattagggaagaaagggatgaaccaggttaagccttggggaggttttaggccagtgaacctattctgtatgattctataattgtagatatcatcatacatttgtctaagcccatacaatgtacaacaccagagtgaatcttcatgtaaagtatggacctttgggtgataatgatgtgtccaatggaggtttattgattgtaacaaatgtacccactctggtgtgggatactgatagtggtgggaggctatgcatgtgtgagggcaggggatatatgaagnaaattcccttttgtcccacttttgcctgtgaacctacaactgatttaaaaaaataattatttaaaataattttttaactacactctgaagatgaaatcaagagtaataggatgggcctctggactcaaaaatgaaatttttttttttttttttttttttttttggagagacaggtatcgtgcaatgttgcccaggctggtcttgaatctcctattcttaatagagccacctgtctctattcttgtaaagcactgggattataggcatgaaccaccgccacccaggccmagattgccattttgtatgatgagactggaaggaccccattgtttcagggattttgctacaatatacaaaaaacaatctgtgagaacagtggctgggcttttttcctgcctgattaagttcagtgcacatacaaacttggaccagaggatctgggatttgaatcccatctctggatacttcccaaactgaggctgttttccttatttggtaaaagactaaggatcgcgtatgtcaaagaggctcctgtaaacttctcaacacatacaaagtactaccctgctggaaaatggatttataaaatggtatctttaaagaatggtcccagatgagtgaatggttgggttatgatggcatggaccacacctttagtgggctcctgggtcagctcctgactttgagaaaacacagataggaaggcccatgtcccacgcacaagacaaccagctcgaagcagggacaggcaatgagaggtgaaagagacctagtactacagct

SEQ ID NO: 7366 - DNA, 818 bp, Homo sapiens
aaacaggaaattgagggaagggagaggcagatacagggaagagaaaataaagttaaccccaccccccaaaagaagaaaaggagagggttcaaggccctcagaggaaggaaagtttcgtaacacagcaagggttcacaggttcagagcccagggcctgagcccagctctgcaggacccaaaccaggtgcccaaccacagccaacttggggactggcggctcctgaggaagggagggagggagggaagtgtggccgccactgcaggaactccaagcccctgtcccagccctgtgctggagtgtggagtggcagaggggcagaggaaggaggagcaggcccagaccatcctgcccgtcctacaggacccccttcctctccctcctgctcagcaggactgcctgacctttagtgaggcctgaagccgcctctggaggcaagcagtatggaccctggttttgtcttagaagggggacccagggtcagggaaggagtgtgtcaggatggaatctgagcatgagagttagaggaggtcccctctcctgggggctcagccacctctggagcagccaccttgtcagacaggagaggtggcaatggggccagccaggcaaggctgccctaaccttcacactggcttccacgggcaaagtaagcccctcagggctgagcttccccaggctccccgacggcttgccccgcccatccacactcatggaaagggggctctgctgggccaggaatgggcaggggcagggtagtaggggacagaggcggtgcttgggggacaggcagccactgcaaccccactccctctagtct

SEQ ID NO: 7367 - DNA, 368 bp, Homo sapiens
ctgaaactagtctttcacatgctgctttcagatgcataccaaacttttgtgccttaacacactttgcaatacttttctctccactggggctttcttcctcattgttttgacttggctatctcctattgctgtcaggcttagtttaaatgtcatttcagagagacctttcttattcatcctgtctgtagtagatccttgtgcccatattctctatctcagccttttgtttgtgtcataggtcttaccacaatatgtaattgctttatttgttccccacaaaagaatgtaagagaccatgtatgcttgtttaccagtgtgtccctagctcttaaccgcatgcctggaacataactgttcaatatttattt

SEQ ID NO: 7368 - DNA, 6162 bp, Homo sapiens
  SIMILAR (2670)..(1033): 761254mologous to Loligo forbesi neurofilament-like protein,accession number X66695,Smith-Waterman Score=1973.
ttactccagacagaagtgctggctggtagggtggtgtgggcagaggagctctgtgtagcctgagggttcctggtagtcgggcttggtgaagtagtcgaggctggcaatgtggtccaggaagaggtggaactctgacggcatgtgcttcagcagcatccggtgctcatacttctccttgatcatccctacctgttccttgtccttgatcttcctccagggcagctggcccactgcaaactccaccagcatgtagaagagggaccacaggtcgtcgtggcggcccatctcccggttcttgtgggcattgactgaggcatagcgaaccgttcctcgaaacccggccacattccgagggggccgcacatcccccgtggtgttggtgtactgccgggccagcccgaagtccagcatatagcacttcctgtaggtggagggcagcctgcccatggcaaagtttgaaggcttgatgtcacggtgcaggaagcccacagagtggatggcctcgatggactccaagatctgcttgcccagccgcaatgtggtgctcagcgtgaaggtgcctcgcggctggctacggcgcaggtcggccaggttccggccctggagctgcatcactacatagttaaacttctcgttcctgccacagccaatgaacctgcacacatggtccttccctctcttagcccctggcttcatcatctcttccttcccatccccctgcccgaggcccgaaccttgcaacttcttgagcacggccacctccatcttgaggacctgcttgggctgctgggctgactccaccttgagggccacattctccctggtcagcaggtccatggcctcgtagatctcaccaaagcccccgcccccgatctttttcagctctttgtttgctgtctgcggaacgttttgccagttgccgttatcctttctccactgtacgtcatagaaaactgcgtacggcactttatcccagctaacaatcatcgtttctacgctcatcccctggacgattctcgactctgaggacactttcacgttttcaggcttagggatctgatctggctcaacgatgcttgtcggtcggtcgtcgatgttaaccccgtaatcaatttcatcgtacttattaggatcgtactccaccgccgtgattttgtaggtaaattcctcatcatcatcgcccttgtcgatttttgtaactacgtactgctgcaacgcaaggtcggtgcggtcgattgcgaataccgtgttaggcttcacaggaaagccaaagccgatgttaatctctatggtcttaccatccgcactaacacttgagattgtgcgcttcacgggcttgccatctggcttatttacgataataaagtcacctgcgcgcgcatcaacgcggaacggcaggaaaatctgactacctgacacttcgagcaatcgccctgacaggttcatcgtcaagttacttgaccagaagttatcagatattgccaccacgtctccgattgtcggaatcatcccttccagtccggtagcgaagtttaccgtagtgctgcggaggttggttttcagaatccatctcccgcgtcggttggcctcgcttcgacgtgtgcacccgatcgctgtaatgctcgttacgttgttcccgaaccgtagagtggcctcacgatcgaatactggctcaacgtcctgttgatacatgttttgctcatcatcaaacatcacgttgcacgtcgtgtacatgctcttctcgcttgcgaaagtatatgagaagtcaccattaactacgttgtcgttagtgaagatgtacgcaggttcacgcggcctgtcgatgattacagaaatgctttcaccattccaaaaactcattccacggaagattgagcaaatatctcgaaccaccttgtacgcatcagtctgagactggattatcacgtcacaaaggtagcgaggttccgtgccgcctttgccgtcagggaccatctggtcgcaatattgcgccgcctcatagagcgcccatttgtctacggagattccaagctctttctgatccagaccataacgctgattaatcatgaggtcataaagaacccatgccggattattagtccatgcttttttgaaagtgccatcccaattgccgttgtatgttcgcgattctggatcgtagttcgacggaacgtttacaatcttccagcgcttacgaattgagatcgtaggtaactggttggggaacatcttcgaatcgaactctacgaaaagaagaccagtcagaggatatcggaacttggcatcaatgacctcagcatagcttcttacctggattgcatcaacgacattcgagtcattggaatcaggcgtctttcgaacaactctgaatattacctgattgttgaagttaggcaggtttacgcgacggcttcgatcataacctgacattgttttaccttcgattacgtcagtaagaacagtctcaaacgaaccgccatcaaccgcttgctgcacctcgtactcaactcgaacgccatttttatcaccgttactttcaattcgtacgccgcgaggcatgaacattttgatacggattgccgacagcgttttgttggttactgagatcgtgtatgggttatcggtagtaacctcacgatttacagttacctcactagagctatcttccattcccttgatgtattcctgcgtctgagttcccggcctgaattcagcctttaccccttcgaagttgaacgatccatcctcgttttgcaccgggactgagttaaacatcaactgctttaggctgaatgtttcgtcaatttcaccatcagatacagctggcacgagctgattgtcattcggagaagctctaggtgggaggcagtggcccttcctccactccctctgctggacccagagggcagtagagggccttgggagggcctcaagttgacaaggagggctctgtccggagaagtttcctgagtgttctgggagcttctgcatcagcgtggggtggacgtcaaaggctgtccacccaggagtcctcccctcagctggtctgctggtgatggctgtgtccaatgctggggccgcgccatgggatctgctggcgggctgctgggctgcaacaggcatgggcatgcggaggccaatggggcggggaatccggctcctggtggcggctgccctcccgctcttcctgggcaaggccgctgccggctcagaggcgggcgtgtcctcctcagagcccgtgcctgagagggtctcagaggcacggcgctgctcctcactggaggaggacgaggcccctgaggccagccgcaacagcaggcggccctgcctcttctccatcaccagccgcgccaggtcctgctgcggccgagcccgcttgctccaccgctctttggccgacagtgagcctgagggctccgagcccgtgtcctcctcagagagcaggacagggatacggctcctggggcgagagcctggcatagcatggcgtctgggggagatggtggccactttctcagggcttggctccagcggggacaccggggctggcccgtctgcaagggccgggccattgggcagtgagtttgtggccatctctgagggggtttcccggggggccccagacagggcagagccctctatctcagccccattcagccctgacagggcgaggccgttctccaggggcgctcgggccccctcctccacagcgcccccatcagaggccagctccagacccagctcgcccccagcgctgaactcctcagaccgcaaggcttgtccaccggaagacatgacgttgaggtgggttttctccgcaatgtgcacaaaggtcctctcaactttggtgaagggtgaggaggtgactgccacgcccccgacccctgtggtcactgtcccggcccccagccctgccccaggccccgggggcttgggctcagacttgaggacagaggacagggtgcctggctcagatacgtccagctggctgcccgtgggctggggccgctcatgctgaggagtgagggcagccagggtgcccaggtcggggtcgggggccagttcggcagtgacgggcgacttcttcatgtcgccaggagagacaagcaccagcgttttggagccctcctcaggctccaggtccccatcggccatggaggcccggcccctggactccttctgatcgtctgccagcagcgtggacggggcaccctcctggctccggtcagtgctcctctcactcccctcactgctggagccactacgaggccccagcacctcccccaaggcaactgccgctgcagcctcctcctcctcttcctcctcctcctcttcttcctcctcctcttcctcttcctcctcttcttcttcctcatcctcttcttcctcttcctcatcttcctcctcctcctcctcttcctccttcccattagcctgaggctgaacaggagccagtgggacctggggggtggtgagcagcatgtgcgagaagcccaccctccggaccctgttgagcaaccgcgcccgttctcggtaatcggagaggtctcttttgaagtcctggtagggcagactcagaggcacagctcgtgggaggccattcacctcaaatgggggcgccacggagaacaccttggtttggaggtcattggccccctccccaaccccagaaaagcctggatgccacacctgctgcagctgggaccgcgagatgcggagcaccgagggcatgagtctgtggttgccagcagcgaggggcgcgtggcgccggtggggcgcccgcacagggctgctctcagccgagcggctgcgctgaatgagggaaccggaggagcccgaggagccgccgccgccggggtgagggtaatgctccgtctccagcgtggaggaggagaacacggaggacgccagtcgtcgcagggggctgtaccgcgggagggagtgccccgagagtctgtcctcctccaactgtctctgtgggcctgtggggtccgactctctccgtcgagggcggggtcccgagtgcaggggtgagtgggaagggctgccaggcgtggggggctgtgacgtctcggaacggccatcgccctggctcagctggggtggcaggggctggggcggcaaatgctgcaggtcctcctccgccagcgcctgcatgctgcgtccccggggccggacggtgggctctgcccccagccgccgccgctcttcgccctcctcgggcagtggccgcagctcctcgggctcctcatccgtggtgcccgatgtgctgggctcagcccctggagggaagtccttgagctccgtctccttgtcgatgatgacccactctttgctgtcgaaatcctcctcctcagccagcggcaccgagcggaaggcgttgctcagggcctcctgctccacagaggctgacacgtccatgcggccactggcctgtcggtcagcgtggcctgtgtccactgacagcatctgggctggctgagaggagcaggcctggcgcgagggcgagccaggcagatccatccgtgacctcctctcaggtagctccactcgcccgtccgccgtggacagcctttctgactcagggctgttcaccctccggtagcgcagagaacggactggggttgtgggggagtctgggggggcacgcactggggagctggggacccccatgcctcggctctgttcctcctccacacaggggctgcccttcgccctggcggcagttactttgccgatgttgatccggagtttgttccggttgacatctgtctcctcccagacttcagcctcaggacccccggggtgggggacaaggtggggactggggcccagcccctcagagggcctcccgggcagaattgggggtgcattctcctggtcactcaggtgctctccctgtagcacatcctcggtgttctcccggagcaggtccccaggcactggcgtcacattgaccaccccaaacatggctgccgtctgccgggtgttctgctggggcggggtagaggtgctcgtggacaggagggcatcggtgcctgccttctcccagtcaaaggcctcattctcggcaatgcccctctccttcatgctgttctcaaacactgacatgatcaactccgtcccctgtccccatggcttcacccctggctctcctgtcat

SEQ ID NO: 7369 - DNA, 567 bp, Homo sapiens
gaagaaaggccttagtgtgccccagcagtctggctgcgtccagccaccatcacccggaaggatgcccacaaggcagctgaccctgaaagcagcctccccctcatggagagtcagcagcttgggcagccacttccaggccagggtggtggcttctctgcagaccagctgaggggaggactcctgggtggacagcctttgacgtccaccccacgctgatgcagaagctcccagaacactcaggaaacttctccggacagagccctccttgtcaacttgaggccctcccaaggccctctacttgccctctgggttccagcagagggagtgggagggaagggccactgcctcccacctaggagctttttccgaatggacaatcagttcgttgccaggttgggggaccaggatatgactcctggtgcccaggccctgggcctgctccttgcccgccaaccgaaccgtgaatgtagggcccccaagccctcacctctgccccaggaccaaacaaacaccctggtttggagctgggaggaagaagggggcctgagagagccccaggtccattct

SEQ ID NO: 7370 - DNA, 347 bp, Homo sapiens
caaagccctggcctgtccccccacatgctgtgttctgggggtgcaccatgcagtcagtgcaggcggcttccctggccaccgtcccctggtcaggaggcacatagcccctgctggtcaccaagtaaccctaagctttctgcatccaaccctctgctgccacccgaaaagcaattgcactccttgtggttcaagaagggcagtccctactcccacacctttgccagccccagggccgcaggctttctgtcctgtgccagggtcccactggctggcctggagcccaagaggacgctcaccacccacctctgttgcccccactcaaccatattgacagccacccagctgca

SEQ ID NO: 7371 - DNA, 359 bp, Homo sapiens
  SIMILAR (6)..(356): 771254mologous to Homo sapiens CCG1 protein,accession number D90359,Smith-Waterman Score=464.
ggcacgagggaactgttcaacagcctcaagccaggggcctgtatgaggatttgcttatgtctgaaggagaaaatgatgaggatgatgctgggagtgatgataatggagacaatattttctctgctatacacctgagtgaaagtggaagggactctgatgcgtgatttggcggaataagacccaaacaatcccgcatgcttaaggagaacactaggatggttatggataatgaagaacgcctgttgttctatgagggagactgtggtgaggcttcccatggtttggaggatagctgccttagttatgggagctatgaggatcctgatcccaagtggaacacccaaaacacaagcttttgt

SEQ ID NO: 7372 - DNA, 534 bp, Homo sapiens; identical to SEQ ID NO: 1
  SIMILAR (38)..(421): 1001254mologous to Homo sapiens alpha globin,accession number V00489,Smith-Waterman Score=657.

SEQ ID NO: 7373 - DNA, 464 bp, Homo sapiens
  SIMILAR (316)..(399): 1001254mologous to Homo sapiens alpha globin,accession number V00488,Smith-Waterman Score=145.
ccccacagactcagagagaacccaccatggtgctgtctcctgccgacaagaccaacgtcaaggccgcctggggtaaggtcggcgcgcacgctggcgagtatggtgcggaggccctggagaggatgttcctgtccttccccaccaccaagaactacttcccgcacttcgacctgagccacggctctgcccaggttaagggccacggcaagaaggtggccgacgcgctgaccaacgccgtggcgcacgtggacgacatgcccaacgcgctgtccgccctgagcgacctgcacgcgcacaagcttcgggtggaccgcggtcaacttcaagctcctaagccactgcctgctggtgaccctggccgcccacctccccgccgagttcacccctgcggtgcacgccctccctggacaagatcctggcttctgtgagcaccgtgctgacctccaaataccggtaagctggag

SEQ ID NO: 7374 - DNA, 526 bp, Homo sapiens
  SIMILAR (7)..(183): 611254mologous to Homo sapiens Human secreted protein, SEQ ID NO: 7871,accession number AAG03790,Smith-Waterman Score=162.
ttagacaagggtcttgctctgtcacccagcctggagtgcaatggaacaatctgggcttgctgtagccttgacctcctgggctcaagcaatcctcctacctcagctccccgagtagctgggactataggtgcgtgccaacacgcttggctaattcatactttaaatttatataatatgttttcttctgtctcttctaatttcagagaccctagacaaacaataataaaatacttgtacagaatgtgagactttaatagcaaaataaatctagacctgatatcataattggttttctaaagcttctcaaaatcctttaagggctaaaagggtaaaggaacctctggaaggatggtctatttttggataaagtgcagtgaaggaggaagtacctgtgttataagttgtcacatctgttagtgctcagcgctgtcctcagattgtaatgactggagtatgtcccctcacccactgaccccgaatctaatcaaatatgtcgccccataggatttactcagcgcctcgtgcc

SEQ ID NO: 7375 - DNA, 1338 bp, Homo sapiens; identical to SEQ ID NO: 1779
  SIMILAR (706)..(1179): 461254mologous to Homo sapiens gag,accession number AF156961,Smith-Waterman Score=344.

SEQ ID NO: 7376 - DNA, 346 bp, Homo sapiens
ctctttgcacagccaaatccagtcacttttaaaatcagaatctattgtatgtctaaggacattatcgataaagtgagagcccgccccccagaatgtgagaaaatatgtgcgaaccatgtatataataagggtctaggatccagaatatataaagtccttctattagagtaaaaaaatattgtcagattaaatcaaaaagcaaatgctcaattttatgctggatataagttaaggtgttacagaaagtttagtaataaaagtatagtcaatgaataaaaggttcttctcttcatgcgttaggagtatatcccagtaagtacacacttcatatgttgtgtgattttac

SEQ ID NO: 7377 - DNA, 523 bp, Homo sapiens
  SIMILAR (219)..(521): 971254mologous to Oryctolagus cuniculus elongation factor 1 alpha,accession number U09823,Smith-Waterman Score=509.
  misc_feature (1)...(523): n = a,t,c or g
nggtggcattgccgcctgaggaatccggcacgagtgccgccagaacacatgtgtcgtgaaaactacccctaaaagccaaaatgggaaaggaaaagactcatatcaacattgtcgtcattggacacgtagattcgggcaagtccaccactactggccatctgatctataaatgcggtggcatcgacaaaagaaccattgaaaaatttgagaaggaggctgctgaagctgactgtgctgtcctgattgttgctgctggtgttggtgaatttgaagctggtatctgcaagaatgggcagacccgagagcatgcccttctggcttacacactgggtgtgaaacaactaattgtcggtgttaacaaaatggattccactgagccaccctacagccagaagagatatgaggaaattgttaaggaagtcagcacttacattaagaaaattggctacaaccccgacacagtagcatttgtgccaatctctggttggaatggtgacaacatgctggagccaagtgctaacaa

SEQ ID NO: 7378 - DNA, 706 bp, Homo sapiens
  SIMILAR (68)..(640): 821254mologous to Rattus norvegicus elongation factor-1 alpha,accession number L10339,Smith-Waterman Score=818.
  misc_feature (1)...(706): n = a,t,c or g
ttttttttttngcaagggttttgccgccagaacacaggtgttgtgaaaactacccttaaaagccaaaatgggaaaggaaaagantcatatcaacattgtcgtcattggacacgtagattcgggcaagtccaccactactggccatctgatctataaatgcggtggcatcgacaaaagaaccattgaaaaatttgagaaggaggctgctgagatgggaaagggctccttcaagtatgcctgggtcttggataaactgaaagctgagcgtgaacgtggtatcaccattgatatctccttgtggaaatttgagaccagcaagtactatgtgactatcattgatgccccaggacacagagactttatcaaaaacatgattacagggacatctcaggctgactgtgctgtcctgattgttgctgctggtgttggtgaatttgaagctggtatctccaagaatgggcagacccgagagcatgcccttctggcttacacactgggtgtgaaacaactaattgtcggtgttaacaaaatggattccactggcattgccatccttacgggtgactttccatcccttgaaccaaggcatgttagcacttggctccagcatgttgtcaccattccaaccagaaattggcacaaatgctactgtgtcggggttgtagccaattttcttaatgtaagtgctgacttccttaacaatttc

SEQ ID NO: 7379 - DNA, 1789 bp, Homo sapiens
  SIMILAR (470)..(1120): 401254mologous to Rattus norvegicus elongation factor-1 alpha,accession number L10339,Smith-Waterman Score=250.
gcttttttttttttttcgcaacgggtttgccgccagaacacaggtgtcgtgaaaactacccctaaaagccaaaatgggaaaggaaaagacctatatcaacctttgccgtcattggacacgtagattcgggcaagtccaccactactggccatctgatctataaatgcggcggcatcgacaaaagaaccattgaaaaatttgagaaggaggctgctgagatgggaaagggctccttcaagtatgcctgggtcttggataaactgaaagctgagcgtgaacgtggtatcaccattgatatctccttgtggaatatttgagaccagcaagtactatgtgactatcattggtgccccaggacacagagactttatcaaaaacatgattacagggacatctcaggctgactggtgctgtcctgaattgttgctgctgggtgttggtgaatttgaagctggtatctccaagaatgggcagaccccgagagcatgcccttctggcttacacactgggtgtgaaacaactaatatgccggtgctaacaaaatggattccactgagccaccctacagccagaagagatatgaggaaattgttaaggaagtcaagcacttacattaagaaaattggctacaaaccccgccacagtagcattttgtgccaatttctggttggaatggttgacaacatgctggagcccaagtgctaacatgccttggttcaagggatggaaagtctccccgtaaggattggcaatgccagttgggaaccacgctgcttgaggctctggactgcatcctaccaccaactcgtccaactgacaagctcttgcgcctggcttttcaagaatgcctaacaaaatggtgggattgggactgttcctggttggcccgagtggagactggtgttctcaaacccgggtatgggggtcaccttttgctccagtcaacgtttacaacgggaagtaaaaatctgtcgaaatgcaccatgaagcttttgagtgtaagctctttcctgggggacaaatgtggggctttcaatgtcaagaaatgtgtctgtcaaggatgttccgtcgtggcaacgttgctggtgacagcaaaaatgacccaccaatggaagccagctggcttcactgctcaggtgattatcctgaaccattcaggccaaataagcgccggctatgcccctgtattggattgccacacggctcacattgcatgcaagtttgctgagctgaaggaaaagattgatcgccgttctggtaaaaagctggaagatggccctaaattcttgaagtctggtgatgctgccattgttgatatggttcctggcaagcccatgtgtgttgagagcttctcagactatccacctttgggctgctttgctgttcgtgatatgagacagacagttgcggtgggtgtcatcaaagcagtggacaagaaggctgctggagctggcaaggtcaccaagtctgcccagaaagctcagaaggctaaatgaatattatccctaatacctgccacccaactcttaatcagtggtggaagaacggtctcagaactgtttgtttcaattggccatttaagtttagtagtaaaagactggttaatgataacaatgcatcgtaaaacctttcagaaggaaaggagaatgttttgtggaccactttggttttcttttttgcgtgtggcagttttaagttattagtttttaaaatcagtactttttaatggaaacaacttgacccccaaatttgtcacagaattttgggacccattaaaaggttaactggg

SEQ ID NO: 7380 - DNA, 358 bp, Homo sapiens
  SIMILAR (15)..(302): 591254mologous to Homo sapiens BC37295_1,accession number AC007228,Smith-Waterman Score=310.
cacgtttcactgggcattatcgaatgctctctggggagaaaccttatgaatggatagagtggggaaaacgattaagctccaacacagccttgactcagcatcagcgaattcacactggggagaacccctttgaatgtaaggagtgtgggaaggcattcaatcaaaaaataaccctgattcagcaccagcgagttcacactggcgagaaaccttatgagtgctaagcgtgtggcaaaaccttccgctggggtggaagattcattctgcatcagaatctccccactcaaaagacacctgtccaagcgtagggctatccatagttaggcccactgtgcctctccttttttctctttatttt

SEQ ID NO: 7381 - DNA, 440 bp, Homo sapiens; identical to SEQ ID NO: 4076
  SIMILAR (3)..(125): 971254mologous to Homo sapiens uncharacterized hypothalamus protein HARP11,accession number AF220190,Smith-Waterman Score=196.

SEQ ID NO: 7382 - DNA, 1190 bp, Homo sapiens
  SIMILAR (101)..(220): 921254mologous to Mus musculus actin-related protein 11,accession number AF190797,Smith-Waterman Score=186.
ggaattaattctgccatggtcctagattgtggatatagggaaagcctggtgttacccatatatgaaggaatcccagttctaaattgttggggagcactaccccctaggaggaaaagctcttcacaaagagttggaaactcaactattggaacaatgtactgttgacacaagtgttgctaaagaacagagccttccctcagtgatgggttcagttccggaacgtcgtcttagaggacattaaagcgcgtacttgctttgtaagtgatctgaagcgaggactaaaaatccaagcagcaaaatttaatattgatgggaataatgagcgtccctccccacccccaaaatgttgactatccattagatggagagaagattttacatatccttggattcaatccagagattcagttgtgggaaattctttttgaacaagataatggaagagccatcagttggccacttttaatattgggattccctttatacagtgtcccgataggacaccagggaaggcaactaggcaggaggaatttgggtaggtcatagggtgggcacttctatgttgccagggatttctccacaggattgcttgcaggaaataaggtatttgggtaggaaaaacccaaaatattaaaaaagcactttggcactaaagacatttccgaattccatactcccaccttggcaaaaagcctaattgtggtggcctgggtttggggagggggctatttttgggggcctttccaggatatacttggggagccgttctggtttccaaagggatattataatccagacggggccgtatacctggattggtggtcctctcaataacccacctttgggaaatgatggttgaatggccgggggaaaacccaaccacctctggatggaagagagcattttcccactggagaaattagaagttttggatttaaaaatccaaccttggctttcatatcaaatattttaacccaatttataagcaaattgtacaaagtatgtaggatgttttgttatagaggactatagtggaagtgaaagcattctgtgtttactctttgcattaatatataattcttttgactttgtttctcttgtgtagtggtaaaatggtagctggtgcttattcccctctctgctgtatttatatcaataaagaaaaataaagcaaaaaaaaaaaaaaaaaa

SEQ ID NO: 7383 - DNA, 333 bp, Homo sapiens
ttttttttttttttttttttttttttttttttttttttgggtttataacaggaatgaaaggtttatttataatttgaatcaatcaatataacttaacacagaataagaccaatctgttcacctcaatacatggaaaaagtatatgtgaccaaaaacaataattatagaatattagaaattgatatgaacttttttttcccccccgagacagagggtgtggggggccaggtcctggaagtcatgccacatgaagagcttaagcctagcatttttttttttttttgagacagagtctcactctgtcacccaggctggagtgcagtggtgcagtca

SEQ ID NO: 7384 - DNA, 378 bp, Homo sapiens
  misc_feature (1)...(378): n = a,t,c or g
atccctgaagaatgtagatgcaaaagttctatactaacaaatgtnnnnnnnnnnnnnnnnnnnnnnnnnnnnnnnnnnnnnnnnnnnnnnnnnnnnnnnnnnnnnnnnnnnnnnnnnnnnnnnnnnnnnnnnnnnnnnnnnnnnnnnnnnnnnnnnnnnnnnnnnnnnnnnnnnnnnnnnnnnnnnnnnnnnnnnnnnnnnnnnnnnnnnnnnnnnnnnnnnnnnnnnnnnnnnnnnnnnnnnnnnnccacagaaagtctgtaccttaatacaataaaggccacctatgaaaagttcactgctaacattacactcaacaatgaaatgctgaaagctttttctctaagattagacacccgataagaacactcactctcg

SEQ ID NO: 7385 - DNA, 759 bp, Homo sapiens
gcacgaggttgtttttcattttcttttttttttcttaaaaaggacttatccaaataatctggataataaatcgtttgcgtttcctaagaaactgggtttttcttttcccttgtggttttggtgtttttcttcttctttgagccttactagcggtctgaagctttctttctttcctttgcctttttgcttttgggacaggagaaagcagtttgtctgaattgtacttgactcttcaaagaggaaaagggcgtggaagcataatggggccttcgggagtaaggatatatcaataacggaggaagaaaacgaagaacggaactaaaacccacggaacccagaagttgccgggctgagggtggcggggtggagggagggcctcctgcctgcccgcccccaaccaactgcctccagaggcttcagccccatcttggttcctgcacagagatctcaggccaagagagagagagcgggggtggagaaggaaactctgggccctctaacaacagagtacatggattttctaaggctggtcatggtctgggggttggggaagaggaggaggagaggcaactctggctgtgaactgggaggaagcagaggccaaacatccccatcaggaggctgccccaggcctccctgcacctgcctcctgccagtccctgccagcccgctgtcccaggggcgctcagcagtccccgtcggtggccacagccaccagcatctcactcttgcccatctcctccaaggcacacgaaatcc

SEQ ID NO: 7386 - DNA, 1354 bp, Homo sapiens
  SIMILAR (431)..(198): 1001254mologous to Homo sapiens Homo sapiens clone DN1120_2 secreted protein,accession number AAW29679,Smith-Waterman Score= 409.
tttttttttttttttttgacagtacaggagataactttattgaaacgcaaatggcattgaacagatgaatctttgctgggagggagacatgccagatggacagagggcccagattgggggtggcctcagtggtgatgaaggaaggcctcttcagctggctctggcatgaattttatttttaaataatttgttatttaaaatgaattactgaggggacagcccggctctctcttcatgattgttaccgcaactatatacaacagtttgctttccagattcaatttcgctttttctacattagatataaaagggggtaggttgaaagaggggagggtcaaataaaaaacataaacacacagacatacacatatcctggtttgggattttgcacccaataacttaaaaaaaaagtgttgcaaaaacttctgacccactctccacctgaggaacaccatgcatttgagaaacacggactctgtcacataaacggtgctgcctaaaacagtatggaggcggggaaggaagctagcaggggttggaattcattttgaaaaaagattgttttgttagaaaaagcaaaaacaaaaaagcattagaaagtgggagccactgcacagcagtagcctagagactggctgcgatatggtagctctgccttgatatcatcttcgtgtcttcaggcatagagaaatggcagaggagcagtaagaccccacaggagatggccagaggatccaccatcagccttctggggactgaggaggtgatcttagtggaattattttatactcacctcccccggggtttagtccttcctccaaacacctagttccagggcgcaggagacctgttactagcactgtatgtttctttgtgctttacccaagttctcatacagggaaaattgacaaacttgaaacaaaaccagttctaaacagcctcatctcctccatggcccaatcagctattttatgagtttgtaaagatatgaagcttttttcagatattttttaaaaaggatcttatttggcagggtgctgtggctcacgcctgtaatcccagcactttgggaggctgtggcaggtgaatcacctgaggtcaggagctccagcacagcctggccaacaaggcaaaactccgtatctactaaaaatacaaaaattagctgggcgtgatggcgcacgtctgtaatcccagctactcaggaggctgagacaggagaatcgcttgaacctgggaggcggaggttgcagtgagccgagatcgtgccactgcacaccagcctgggtgacaaagcgagactccttctccaaaacaaacaaacaaacagaaaacaacaaaaaaaggattttat

SEQ ID NO: 7387 - DNA, 401 bp, Homo sapiens
attttggtgctcgaccctccacctcagcctccaaaactgctctccgtcaaagggaatccagaagacttcatcttcagacaatttttcttctctccctaccctttattcccatttccacccttttcttatgccaaaccccctgttagcaatgagaccccatttccaccccatccccgcttctcaaaactcctttcccaaggtccagctgacatgccacctcttcctggaagcctcccctgacttcttcactattctgcctgcatgctgcatcatttgctcttctgttctcttgctcactgtgcattccggcttcttagctgtcagggatgtcaatatctgcatggactgatgcacatgttcaggtctgggcatatgcacatatatgcagccggacgcgtggg

SEQ ID NO: 7388 - DNA, 378 bp, Homo sapiens
  misc_feature (1)...(378): n = a,t,c or g
caatatttacattgtttggatattctaatagtgtgtttatacattcatctgctgagaaataagcggattgtttccagtttggggctaatacagaaaataaagnnnnnnnnnnnnnnnnnnnnnnnnnnnnnnnnnnnnnnnnnnnnnnnnnnattttaataaatacagtagttgtatgtttaactttttctaaaattgctaaactgtcttgcagagtggttgtaccatattacttttgcaccactggtgtatgagagttttaagtcctccatagtgtcagcaacacttggcagtttttttttcaattatagctattttattaagtgtttagttacatctcactgtaattttcatttgcattccacaaatcactagtaa

SEQ ID NO: 7389 - DNA, 434 bp, Homo sapiens
  SIMILAR (102)..(431): 701254mologous to Homo sapiens mariner transposase,accession number U49974,Smith-Waterman Score=381.
tttttttttttttttttttttttttttgagacggctcctcgctctgtcgcccaggctggagtgcagaacaagactgtgtctcaagcgggggggaaaagaaaaagaagggacgagacaatattgaagatgaagcctgcagcagcagaccatccagataattgtttgaggaaaatattcatcttgttcatgccctcattgaagaggaccaactagccaatatcatagacatctctgctggttcagcttacacaatcctggatgaaaaattaacactgagcaaacgttttactagatgggtgccaaaaccattgccctcagatcagctgcagacaagagcagagtttctaatggaaattttaaacgggtgggatcaagatcctgaagcatttcttcaaagaattgtaacaggtgatgaaacatagttttaccagcgc

SEQ ID NO: 7390 - DNA, 340 bp, Homo sapiens
  SIMILAR (3)..(338): 691254mologous to Homo sapiens MER receptor tyrosine kinase,accession number AF260529,Smith-Waterman Score=381.
gcatcccaaagcccatggcaaaattacctttcatgaaatacagagacctgcatactaacttactttattcccgaatggagacaggaccaaagcatattcctatgaagacactattgaagatcatggaggatattgccctgggaatggacaatctgagcctcatgaattatctttatctagaattaactgctagaaactgcatggagcgagatgacatgactgactgcgaagcggacttcggcctctctaggaagaggtacagcggcgagaattacctgcattgccgaattgctaacaggcctgtttaagggagcgccatagaaagtcttgcacaccgagt

SEQ ID NO: 7391 - DNA, 378 bp, Homo sapiens
  SIMILAR (3)..(374): 821254mologous to Homo sapiens alpha II spectrin,accession number U83867,Smith-Waterman Score=504.
ctctgatcaaaaaacatgttgactttgacttagcgactaacgtccaggaagagaaaattgctgctctggaagactttgccgaccaactcatcactgccggccattatgccaagggagacatttttagccggcgcaatgaggtcttggacaggtggcgacgtgtgaaaacccaaatgattgagaaaagggcataggtatgaaaatctcaaaccctccaacagttcaaccgggatgtggatgaaaacgaggcttggatcagtgaaaaattgcacacagcgagtgatgattcgtacaaggatcccaccaacatccagctttgcaagctgctgagcaagcaccaaaagcaccaggctttttgaacagaactgcctgccaccg

SEQ ID NO: 7392 - DNA, 375 bp, Homo sapiens
  misc_feature (1)...(375): n = a,t,c or g
aggagaaccctttttccttcacgcatattaacggaaaccactataacccccaacatgcatatttgttattccagaaacactcctttnnnnnnnnnnnnncttcataaatctcttactttaaaggccagcaccctgtcttcatcatctaattgatcagccattttgtagtccagtagtagcctccctttacacatcaccaacaacccccttcaccaacaaccccttccaccccagctcccagcatacactggtgcagagggagatccctgtgctttactttcctaatactgtctcatacatcttctcaacacagaggctgtcaacaatatcatcacatttctgggcaagcagccatgtaagaggtacgataaagtc

SEQ ID NO: 7393 - DNA, 310 bp, Homo sapiens
  SIMILAR (310)..(131): 1001254mologous to Homo sapiens dJ885L7.2 (novel protein similar to D. melanogaster CG13746 (Tr:Q9V4Z2)),accession number AL035669,Smith-Waterman Score=318.
acttttcctgtggaggagacagctgacgctcaccgaaaacccacggtggtggccgacgctgggggatggtcaggccagggactgctccgacgcttgctgcccacacaggcctcagcttccgtccagccacttctcggacctcctgaatgatctcttctggaaggacgaagttcctctctggattcgggaatggaagaatctcagactcatgcagcgcctgcatgtcgtacatggtgctcagatggtcccagatgaccttggatgggacctgccgcccgatgttctggctgaacttgtcccgaatacaaat

SEQ ID NO: 7394 - DNA, 462 bp, Homo sapiens
  SIMILAR (396)..(310): 961254mologous to Homo sapiens dJ885L7.2 (novel protein similar to D. melanogaster CG13746 (Tr:Q9V4Z2)),accession number AL035669,Smith-Waterman Score=149.
cacttttcctgtggaggagacagctgacgctcaccgaaaacccacggtggtggccgacgctgggggatggtcaggccagggactgctccgacgcttgctgcccacacaggcctcagcttccgtccagccactgctctcaaacaaagtcctctccaatcccggaggttccaagaccacccaagcacaggtagggcggggtctgcgctggaccctcacacctccctggaggcccggggtcctcaccctcacctccctgcccttggccagggtctggccttttctgaatcgcaagcccaacctttcccgagcctcaccttctcggacctcctgaatgatctcttctggaaggacgaagttcctctctggattcgggaatggaagaatctcagactcatgctgatatcaaatagagagttttgtttaagaaacaagggtgaagatgcagtttcaagaagtcactag

SEQ ID NO: 7395 - DNA, 1330 bp, Homo sapiens
  SIMILAR (658)..(981): 1001254mologous to Homo sapiens dJ885L7.2 (novel protein similar to D. melanogaster CG13746 (Tr:Q9V4Z2)),accession number AL035669,Smith-Waterman Score=587.
atgaggctcctctcccccagcagattggaaaaagacaatgagaagcagctcagcccgcaccccccagcccataccctaaggagcacccggcagggagagcaccgcccaccctgcccctcagtcatgcagctcacatcgggcagaggtgacgctgtggacctgggtgggccccacgtttcaagtcaaatcaagctgctgaccaggaggggacatcgtgggaacaataattgtccaagtctagtgctgggggcatcatgggcgctgccccagagccacaaccagcccgcctttcagtcagcatgtgtctggggtctcaggtatgagtggcagagggagcagtcccatcagccatgtcagcctcgttgcaatggaattccacttctgtcccagacactcagccagacaggaggaaactgtgaccacaggcatgtggacacgcaaggaggaacacgttttaagaacccccgcgcggggcggagcagggcggagtccccggcgggaagggacccgagacctcggctgcgcctgcgccgacgccggcgcgtgagcccgagcgcgtacccggcggagcgcgcgcccgcccccgagtgcgcctgcgcggagctcgtggccgcgcctgctcccgccgggggctccttgctcggccgggccgcggccatgggagaggccgaggtgggcggcgggggcgccgcaggcgacaagggcccgggggaggcggccaccagcccggcggaggagacagtggtgtggagccccgaggtggaggtgtgcctcttccacgccatgctgggccacaagcccgtcggtgtgaaccgacacttccacatgatttgtattcgggacaagttcagccagaacatcgggcggcaggtcccatccaaggtcatctgggaccatctgagcaccatgtacgacatgcaggcgctgcatgagtctgagattcttccattcccgaatccagagaggaacttcgtccttccaagaagagatcattcaggaggtccgagaaggaaaagtgatgatagaagaggagatgaaagaggagatgaaggaagacgtggacccccacaatggggctgacgatgttttttcatcttcagggagtttggggaaagcatcagaaaaatccagcaaagacaaagagaagaactcctcagacttggggtgcaaagaaggcgcagacaagcggaagcgcagccgggtcaccgacaaagtcctgaccgcaaacagcaacccttccagtcccagtgctgccaagcggcgccgcacgtagaccctcagccctggtggcggcagagaagcgggcgaggcactgtggtcgctgatgggg

SEQ ID NO: 7396 - DNA, 417 bp, Homo sapiens
  SIMILAR (3)..(407): 631254mologous to Homo sapiens DNA binding protein,accession number M27878,Smith-Waterman Score=468.
gggttacatgtggaaaagcctttgctcagaaggcacaactcattgtgcatcaaataattcatactggaaagaaaccatatgactgtggtgcatgcggaaaagactttagggagaaggttcatcttgttcgacatcagagaactcatactggggagaaaccttatgatcgttctgaacgtggaaaagccttctctcacaaatcggaccttattatacatcatagagttcacactggggaaaaaccctatgaatgttgtgaatgcgggatagccttctcccagaaatcacccctcattatacattgcagaatacatactggggaaagaccctatgaatgtataaagtgtgggaaggccttttaccacaagtgacagctgagtattgcccacagagctcatactggagatatagcaggtg

SEQ ID NO: 7397 - DNA, 1082 bp, Homo sapiens
  SIMILAR (1080)..(805): 701254mologous to Homo sapiens Human secreted protein, SEQ ID NO: 7870,accession number AAG03789,Smith-Waterman Score=318.
cagcgtggtggaattcgactccttttgcataagccagaagagcagtgccttgcttcctgtgaaaaatgcttggcagttagcctgtgtaattatttagcaatcatgttaatagatgtttaagaatatatgtaactggagctgtactgagccaaggatggaaatgaagacatgtgagactattttttcttcatccaccgatactcttcagttacaaggatttaatttaaaagggttttaattaaatggaatccagaagctttggacgctccagtttttcttcttagagacaaaccctagctcagtttcctgggagcttgactcaagaatgcagcatggtactcccggactgacagtgtgccagctttattcacttatctctctaccttttggcttgcatttatttcagggctggctgacattttgaccttatgtacaaagatggccgatacgattatttttcatcatatattacagaaaatactactcttgaaaaatactctgagaaatatgttctatgggtcagataagtttggggaaacagtgaattattgttcctcctttgcaggaatcacaatgcactgttaggctaattaaagactctcaggatgtcccactgggaaaggaatccatgtttaggctttgtttaacctaggcctttccccaaacttattagagcataaaactttgtttttgttttttttttaataagataggtagctatttccttagaacacagtttgggaaaactttttgttcatttgttttaataagaataccttaggtagctatttccttaaaacacgagccgggtgcatgtgtcacgcctgtaatcccagcactttgggaggcccaggcgggcggatcacctgaggtcaggagatcgagatcatccggcccaacatggtgaaaccccgtctctactaaaaagacaaaaattagccagccatggtggcaggcacctgtagtcctagctactgtggaggctgaggcaggagaatcacttgaacccgggatggggaggttgcagtgagctgagatggcgccactgtactccagcctgggcgacgagcaaaaactccttc

SEQ ID NO: 7398 - DNA, 411 bp, Homo sapiens
  SIMILAR (225)..(34): 531254mologous to Homo sapiens PRO0117,accession number AF090895,Smith-Waterman Score=149.
agacctgtctctaaaaataagtaaataactaattaaaaagttagccagctgtggtggtgagcacctgtactcctaactactcaagaggctgagatgggagaattgatcaagcctaggagtttgaggctgcggtgaactatgatcacaacactgtactccaacctgggtaatggagtgaggccctgctcaaaaacacaaaaacaaaacaaaaaaacttttataacatgtacctaacaaagatgcagagttaaattttatttgccagtttgtaaaagcctttgatacttcattttaagggcacttagtaattacaatgccattatgtaattaactctatagagaacattactttcaaataatgggtggtcaggccatttaggacagccccagagagcccctacagctatcctt

SEQ ID NO: 7399 - DNA, 372 bp, Homo sapiens
  misc_feature (1)...(372): n = a,t,c or g
gnnnnnnnnnnnnnnnnnnnnnnnnnnnnnnnnnnnnnnnnnnnnnnnnnnnnnnnnnnnnnnnnnnnnnnnnnnnnnnnnnnnnnnnnnnnnnnnnnnnnnnnnnnnnnnnnnnnnnnnnnnnnnnnnnnnnnnnnnnnnnnnnnnnnnnnnnnnnnnnnnnnnnnnnnnnnnnnnnnnnnnnnnnnnnnngatctgtcagccactttccttgtcctctacagctaatcacccagttctgtgcctgtgttttacacacaaaaacctgcacatatttatagcagctttatttataattgccaaaagttggaagcaaccatgatgtacctcagttgatgaatggatttggctgggcctggctcccctctatct

SEQ ID NO: 7400 - DNA, 375 bp, Homo sapiens
  SIMILAR (1)..(162): 741254mologous to Homo sapiens Human myelin oligodendrocyte glycoprotein gene,accession number AAZ29204,Smith-Waterman Score= 204.
tttttttttttttttttgagacagagtttcgctcttgttgcccaagctggagtgcaatggcacgatctcggctcactgcaacctccgcctcccgggttcaagcgattctcctgcctcagcctcttcaagcttttttactatacatgttgcccctctcccccaacttaggcactactgaattttttatgatggcaccaggtcactttatgctgggtgatatagtcaaaatttgcttatttactctgcccctcgtcaaccacagtatcatttcaaggacatgaataaaatacttgacagtatccaaaggagctataccaaaatctaacaagtaaattttggattttgcctctttgtgctttaaagtaccaggatttc

SEQ ID NO: 7401 - DNA, 481 bp, Homo sapiens
  SIMILAR (251)..(415): 741254mologous to Homo sapiens PRO2550,accession number AF130089,Smith-Waterman Score=221.
ccaaattttttatttttcattggtataatattggggatcagaatactttttaaaaaatcaaaaattgtaaaagtatacaaataaaatggaaagattttgatgtattttatctcagaataatgtcctctgtattatgtttttattcatcaggacatattgagatcataccatatagtttcatctttttccaatcaatattatatctcaagaatttccaatgttcttaacaattcttcagaaatacaatttttttttgagacagagtttcgctcttgttgcccaagctggagtgcaatagtgcaatctcagctcaccacaacctctgcctcccgggttcaagcgattctcctgcctcagcctcccgagtagctgggattacaggcacgtgccaccacacccggttacttatttgtatttttagtagaaacagggttttaccatgttagccagtctggtctcgaactcctgacctcaggtgatc

SEQ ID NO: 7402 - DNA, 655 bp, Homo sapiens
  SIMILAR (268)..(390): 801254mologous to Homo sapiens PRO2550,accession number AF130089,Smith-Waterman Score=172.
aggaagccatggccgagatagctttcctgaaataaaccagtagcttttcagattgacgttcttgctacaattgtaccatctggtaattcctgaaaatgtcaatttttttgtgttaatatttttggtttcaaacaataacaaatgtctctagaaagaaattttaagaaagcttaattaatagtaaaaatgcctttcctgaaataatcttggaaaattttttaaatgtcaaaatgatgagtcatgctaatacattgagggtttgtttttttgtttgtttgtttgtttttgagacagagtttcgctcttgttgcccaggctggagtgcaatggcccgatctcagctcaccgcaacctccacctcccggattccagcgattctcctgcctcagcctacattaagggttttgtcagacaattgtcacacgaagaatagtgtcacttatctgctcttgacacacagaactggcctggcatatagctttccagattttactcaaacttggtactccagtttgaaaatttaaattttgactgctgattagctggaaagcctaagttttaatggaaagaaagtttgcttttaaaactgaaaagtagtttctttttgctaacaaatctaacttccatacataattgggccatattaagtaaaaca

SEQ ID NO: 7403 - DNA, 977 bp, Homo sapiens
  SIMILAR (296)..(418): 781254mologous to Homo sapiens Human myelin oligodendrocyte glycoprotein gene,accession number AAZ29204,Smith-Waterman Score= 160.
ttttttttttttttattagtacacccattttatttttaattttaaaacattttttaatagagatagggtctcactatgttgcccaggctggtcttgacctcctgggctcaagtgatcctcctgctgcagcctcccaaagcaccaaggttacagatgtgagccaccgcagccggcccacccatatttattgcagcactattcccaacagccaagagctggaagcaacccaagtgtccatcaacagatgagtggatgaacaaaaggtggtggatacacacaaaggacggctattcagtttattttatttatttatttatttatttattgagacggagtttcgctcttgttgcccaggctggagtgaaatggtgcaatctcggctcactgcaatctccacctcccaggttcaagcgattctcaaaaaaaaacaaaaaagaatttttgtacccagtgaataactgctatgaagaaacctgaaaaagaaaacaaggataagggaaacaatgaggcagcaggggtgagactgcacacagcattgtcaggaaaggcctttctcctaaggtgactgtagggaagagactttaaggaactgaaaaaggaggccatgtgtttttcttggccaagagtgttcaagggaaagcgaacggcatattcaaaggccttgaggaaggagggtgctagaacagctggccagagcacagtgagctgaggacacggggaatagaagagtttagtaaggaaatgtggggcagtttatgttgggactagtaaagcatggccagaattttgaattttatcccgactgacatgtaagagctacaagagaggtttgacttatgaagatccccacacttgctgctatggagaaaagtgaaaggaaaagtggggtgaccagatatagacaccgcaataactagggagagatgatggtggctttgctaggattatagtggtcaagttggtgagcttcaggttct

SEQ ID NO: 7404 - DNA, 1766 bp, Homo sapiens
  SIMILAR (331)..(930): 681254mologous to Homo sapiens neuronal thread protein AD7c- NTP,accession number AF010144,Smith-Waterman Score=661.
ttttttttgatttttctcccctttattaaaaaaagattatacaatttgggctcatattaaaaaattcaaacagtagaacagtgtgtacgtagaaggcattccccactcccactccaggagtttgggtatcattctagaagtgttctgtcaatacataagcatttttcattcaaacacacacacacacacacacacacacacacacacacacacacacacacacgggatcccatattctataatttttgtgttttaaaaaaccaccatatttcatagatatctttccacttaagcacattcggagctccatcatttttttttttttttgagatggagttttcgctcttgttgcccaggctggagtgcaatggcgcaatctcagctcaccgcaacctccgcctcccgggttcaagcgattctcctgcctcagcctccccagtaggctgggattacaggcatgtgcacccacgctcggctaattttgtatttttttttagtagagatggagtttctccatgttggtcaggcttggtctcaaactcccgacctcagatgatccctccgtctcggcctcccaaagtgctagatacaggactggccaccatgcccggcctctgcctggctaatttttgtggtagaaacagggtttcactgatgtgcccaagctggtctcctgagctcaagcagtccacctgcctcagcctcccaaagtgctgggattacaggcgtgcagccgtgcctggcctttttattttattttttttaagacacaggtgtcccactcttacccaggatgaagtgcagtggtgtgatcacagctcactgcagccttcaactcctgagatcaagcatcctcctgcctcagcctcccaaagtagctgggaccaaagacatgcaccactacacctggctaatttttatttttatttttaattttttgagacagagtctcaactctgtcacccaggctggagtgcagtggcgcaatcttggctcactgcaacctctgcctcccgggttcaagttattctcctgccccagcctcctgagtagctgggactacaggcgcccaccacgcctagctaatttttttgtatttttagtagagatggggtttcaccatgttcgccaggttgatgctagatctcttgaccttgtgatctgcctgcctcggcctcccaaagtgctgggattacaggacgtgagccaccaccgcccggcctatttttaatttttgtttgtttgaaatggaatctcactctgttacccaggctggagtgcaatggccaaatctcggctcactgcaacctctgcctcccgggctcaagcgattctcctgtctcagcctcccaagcagctgggattacgggcacctgccaccacaccccgctaatttttgtattttcattagaggcggggtttcaccatatttgtcaggctggtctcaaactcctgacctcaggtgacccacctgcctcagccttccaaagtgctgggattacaggcgtgagccacctcacccagccggctaatttagataaaaaaatatgtagcaatggggggtcttgctatgttgcccaggctggtctcaaacttctggcttcatgcaatccttccaaatgagccacaacacccagccagtcacattttttaaacagttacatctttattttagtatactagaaagtaatacaataaacatgtcaaacctgcaaattcagtagtaacagagttcttttataacttttaaacaaagctttagagca

SEQ ID NO: 7405 - DNA, 730 bp, Homo sapiens
  SIMILAR (248)..(562): 451254mologous to Homo sapiens Human myelin oligodendrocyte glycoprotein gene,accession number AAZ29204,Smith-Waterman Score= 192.
tttttttttcttttttgagagggagtttcgcttttgttgcccaggctggaatgcagtggcgcaatctcggctactgtaacctccacctcccaggttctagcgattctcctgcctcagcctcccaagaagatgggattacaggcgtgcgctaccatgcctggctaattctatatttttagtagagatagggtttcaccatgttggtcaggctgatctcaaaccctgacctcaagtaatccacccacctcttttttttttttttttgagacagagtttcgctcttgttgcccaggctggagtgcaatggtgcgatctcagctcactgcaaactccacctccccgggttcaagggattctcctggctcagcctcccgagtacctggtagctgggtttacaggcatgcgtcaccacacccggctgtttttttttttcgcatttttggtagaaacggggtttcacccgtgttagccaggatggtctctatctcctgaccttaggtgagctgcccgcctcggcctcccaaagtgctgggattacaggtgtgagccaccgcacccggccaatgtcttttaaaaatatataccttttttttttttttttttgagacagagtctcgctcttgttggcccaggctggagtgcaatggcacgcgatctcagcttcactgcaacttccacctccactgcaacccccatctcccaggttcaagcgattctcctgcctcagcct

SEQ ID NO: 7406 - DNA, 351 bp, Homo sapiens
  misc_feature (1)...(351): n = a,t,c or g
gactctggaacctggtcggacatagtcaccaggggaacacttggtgaagggagatgctgctgaacttcagcagttaacaggatctccatcaagtcacaggctgaccaagaggcaacagaacagaaacttcgtgactattcccatcaaggaattcaaattttagcctggcaaaaattcgaatataagcctggaaaagtcactatggacccagaagactgcatccttcaattagcnnnnnnnnnngnnnnnnnnnnnnnnnnnnnnnnnnnnnnngaggaggaagaggaggaagaagaggaagaggaagaagaagaccaagaggnnnnnnnnnnnnnnnnnnnnnnnnnnnnn

SEQ ID NO: 7407 - DNA, 353 bp, Homo sapiens
  misc_feature (1)...(353): n = a,t,c or g
attcatttaacaaatatttaataaaattatactgtgtgccgggtattattttagaaccggagggcgcaatggatcatttgtacaacctnnnnnnnnnnnnnnnnnnnnnnnnnnnnnnnnnnnnnnnnnnnnnnnnnnnnnnnnnnnnnnnnnnnnnnnncgaaattcagtttgnnnnnnnnnnngagagagagagaaacaaaaatcccttccctgctggagatgacattataagcaggggagtcggtcaataaataagcaaataaatgagcagtaagaagaaaactaaagcagggcaaagaggatagggaggaacaggattttatttgatacaaaatatttcatatagaatg

SEQ ID NO: 7408 - DNA, 441 bp, Homo sapiens
  SIMILAR (419)..(3): 971254mologous to Homo sapiens Human secreted protein sequence encoded by gene 32 SEQ ID NO:90,accession number AAB38234,Smith-Waterman Score=706.
agatccaactcgtaacacaacctcacaaaaagcggtccaaatttatactcccccaaagtgaaatttttgttctctgcatggtacctgtaaatgacatttttagccagttccacatggtcccgagactcacacaaatgtagtaaggttatcaactcccccttcaagatgagcttgttctgggtcagtttctttttcaagtttctaaaatacgtttctttagtgccagaaagattacatgcaacagccactttcttttgttgaaattcttttaatttccccacattatctgtaagtaggtatcttttagctccgagagggcagcggcagctgacagagccggagcctcccaccccaggatacaccacaatctgcagcgcctgcaggagaactcgattcgagggccgaaatacagcagccatactgtctcggcggacgcgtggg

SEQ ID NO: 7409 - DNA, 360 bp, Homo sapiens
  misc_feature (1)...(360): n = a,t,c or g
cattctatatgaaatattttgtataaaataaaatcctgttcctccgtatcctctttgccctgctttagttttcttcttactgctcatttatttgcttatttattgaccgtctcccctgcttagaatgtcagctccagcagggaagggatttttgtttctctctctctcnnnnnnnnnnncaaacggannnnnnnnnnnnnnnnnnnnnnnnnnnnnnnnnnnnnnnnnnnnnnnnnnnnnnnnnnnnnnnnnnnnnnnnnnnnnnnnnnnnnnnnnnnnnnnnnnnnnnnnntccggggctaaaatagtacccggcacacagtaaaagcttattaaatattggctaaatgaatgaattaa

SEQ ID NO: 7410 - DNA, 491 bp, Homo sapiens
ttaattcattcattcatttagcaaatatttaataagcttctactgtgtgccgggtactattctagcaccggagggcgcagtggctcatatctacaaccacagcactttgggaagacaaggcaggccggactacttgagtccaggagttcgaggcctagccgaggcaacatagccgaaatccccgtcctgaaaaaaaaaaagagagagaaaaaaaaatccccttcccctgctggagctgacattcctaagcaggggagacggtcaataaataagcaaataaatgagcagtaagaagaaaactaaagcagggcaaagaggatagggaggaacaggattttattttatacaaaatatttcatatagaatggtcttttgttttatataaaatatttcatatagaaaagtctttctggtaaggtgatttttttttttttttaagagacagggtcttactctgtcacccaggctggaatgcagtggtgcaatcctag

SEQ ID NO: 7411 - DNA, 579 bp, Homo sapiens
  SIMILAR (430)..(579): 981254mologous to Homo sapiens MTHSP75,accession number L15189,Smith-Waterman Score=251.
atcgtttgaagccgggctggtggtgcacgctgcagtcccagctacttgggaggctcaggcaggagaatcgcttgaacaagaaagtgggagagtttggacatgtcataggttgtgggtaagagaaaacctaagataatctattcttccttccccgttgtttataccttatgtttgcagtgcctttattatttcttctgttttccctgtcacaattctgatgttacaaaatctagcccaaatctctctcaaagccatcccagactctttcatgccactctgatttctccctcttactctatttttatctgtaactgtatgtaacacatagcttattgtctgagtataggacattcagcaaactttgggttgattgggaaagagctccgatttaaacttctaatttctctaagggaaccgagttgaaggcaggttaatatggctgaaggaatcattcacgacacagaaaccaagatggaagaattcaaggaccaattacctgctgatgagtgcaacaagctggaagaagagatttccaaaatgagggagctcctggctagaaaagacagcgaaacaggagaa

SEQ ID NO: 7412 - DNA, 2542 bp, Homo sapiens
  SIMILAR (1688)..(2137): 611254mologous to Homo sapiens MTHSP75,accession number L15189,Smith-Waterman Score=380.
  misc_feature (1)...(2542): n = a,t,c or g
ggtttccagaagcgctgccgccaccgcatcgcgcagctctttgccgtcggagcgcttgtttgctgcctcgtactcctccatttatccgccatgataagtgccagccgagctgcagcagcccgtctcgtgggcgccgcagcctcccggggccctacggccgcccgccaccaggatagctggaatggccttagtcatgaggcttttagacttgtttcaaggcgggattatgcatcagaagcaatcaagggagcagttgttggtattgatttgggtactaccaactcctgcgtggcagttatggaaggtaaacaagcaaaggtgctggagaatgctgaaggtgccagaaccaccccttcagttgtggcctttacagcagatggtgagcgacttgttggaatgccggccaagcgacaggctgtcaccaacccaaacaatacattttatgctaccaagcgtctcattggccggcgatatgatgatcctgaagtacagaaagacattaaaaatgttccctttaaaattgtccgtgcctccaatggtgatgcctgggttgaggctcatgggaaattgtattctccgagtcagattggagcatttgtgttgatgaagatgaaagagactgcagaaaattacttggggcacacagcaaaaaatgctgtgatcacagtcccagcttatttcaatgactcgcagagacaggccactaaagatgctggccagatatctggactgaatgtgcttcgggtgattaatgagcccacagctgctgctcttgcctatggtctagacaaatcagaagacaaagtcattgctgtatatgatttaggtggtggaacttttgatatttctatcctggaaattcagaaaggagtatttgaggtgaaatccacaaatggggataccttcttaggtggggaagactttgaccaggccttgctacggcacattgtgaaggagttcaagagagagacaggggttgatttgactaaagacaacatggcacttcagagggtacgggaagctgctgaaaaggctaaatgtgaactctcctcatctgtgcagactgacatcaatttgccctatcttacaatggattcttctggacccaagcatttgaatatgaagttgacccgtgctcaatttgaagggattgtcactgatctaatcagaaggactatcgctccatgccaaaaagctatgcaagatgcagaagtcagcaagagtgacataggagaagtgattcttgtgggtggcatgactaggatgcccaaggttcagcagactgtacaggatctttttggcagagccccaagtaaagctgtcaatcctgatgaggctgtggccattggagctgccattcagggaggtgtgttggccggcgatgtcacggatgtgctgctccttgatgtcactcccctgtctctgggtattgaaactctaggaggtgtctttaccaaacttattaataggaataccactattccaaccaagaagagccaggtattctctactgccgctgatggtcaaacgcaagtggaaattaaagtgtgtcagggtgaaagagagatggctggagacaacaaactccttggacagtttactttgattggaattccaccagcccctcgtggagttcctcagattgaagttacatttgacattgatgccaatgggatagtacatgtttctgctaaagataaaggcacaggacgtgagcagcagattgtaaatccagtcttctggtggattaagcaaagatgatattgaaaatatggttaaaaatgcagagaaatatgctgaagaagaccggcgaaagaaggaacgagttgaagcagttaatatggctgaaggaatcattcacgacacagaaaccaagatggaagaattcaaggaccaattaccctgcctgatgagtgcaacaagctgaaagaagagatttccaaaatgagggagctcctgggctagaaaagacagcgaaacaggagaaaatattaggacaggcagcatcctctctttcagcaggcatcatttgaagctgttccggaatggccttaccaaaaagatgggctcttgagccgaggagggctctgggaagttctgggcactgggggaacaaaagggaagattcaaaagggagggaaaaaccagttaattaattaggcaggaattttttgaagccaggaaggacaacatatgaagcttaggagtgaagagacttcctgagcagaaatgggcgaaccttcagtccttttacctgtgtttttgcagtattcctatatataatttccttaatttgtaaatttagtgaccattagctagtgatcatttaatggacagtgattctaacagtataaagttcccaatattctatgtccctagcctgtcatttttcagctgcatgtaaaaggaggtaggatgaattgatcattataaagatttaactattttatgctgaagtgaccatattttcaaggggtgaaaccatctcgcgggttcatgaagtggtctccttgncttgaatgggncccctttgggttggtcc

SEQ ID NO: 7413 - DNA, 752 bp, Homo sapiens
  SIMILAR (481)..(507): 771254mologous to Homo sapiens PRO2550,accession number AF130089,Smith-Waterman Score=45.
ctctctatagggaaaagtgaagctttcgggtaagtatccatgtggctattcctggttctactttccccttgtggaaatgtaatacctggtttacactgctcttttgtgagtacgtatatggtgataggaataaaggagaaagtctggaaagcccccaagcacaaaagcaaggcctgaaggccccagcaaacagtcattcaggaaacaactgccccactttaatacgtaaaagtatgaaaaggaatgccaatgtgagcccatgtcattaggagaggtaaggataatctacaccttgcttaaccatcacttaacctttttattgcacataaatggaaatttaagcccctaaccctaggtctgtacttgtgtaataattatgcactctaaattagcatctgcatttagatagattgcaagcttagaaatcagtcctgcatttgacctcttttgtcagtgcctactatatcaaattttaacagatttttttttttttttttgaaatggagttctcgctcccgctgtccaggctggagtgcaatggcgcgatcccggttcaccaccacctccgcctcctgggttcaagcgattcttctgcctcagcctcctgagtagctgggattatagtcatgcgccaccacgcccagctaattttgtatttctagtagagatgaggtttctccatgttggtcaggctggtcttgaactcccgacttcaggtggtctgcctgccttggcctcccagagtgctggga

SEQ ID NO: 7414 - DNA, 1713 bp, Homo sapiens
  SIMILAR (532)..(771): 821254mologous to Homo sapiens Human secreted protein clone yd73_1 protein sequence SEQ ID NO:92,accession number AAY73435,Smith-Waterman Score=312.
atggcgctgtggcgcggctccgcgtacgcgggcttcctggcgctggccctgacctggcgggaccggaaaaagaaattcccgggcgatgatgaggcaccaggggtgaagcgcacatgggctgctggagcgggaatgagggggcgccagtggctccggaaacgggttgaggttgtctgcactggccgctccgcaaacacagtgtgtgcgggcgtcagggcagcaggtctggtagagaaaagtccaccgccatccctctcccgagtggggcggaggtttcggttctgtggtgatctggactgtcctgaccgggtcctggcagagatcagcacgctggccaagatggttgagtgcacagggtctacactgggtggaggagggtataagaagatcctgaaactcacagctgatgccaagtttgtggaggagcatgagggaaagaaagacattgacagtcccaccttcctgtcctctgccagctcctggtggagcagtagcagtgcctatggctccaggaggcctgggggctttgagctgaagttaatagggcaacagggagagtcaggcgatgtgaaggccacagtggcagtgctgagtttcatcctctccggtgcggccaagcacagtgtcgatggcaaatccttggccagtgaactgcagcagctggggctgcccaaagagcacgcggccagcccgtgctgctgttatgaggagaagcaaagccccttgcagaagcacttgcgggtctgcagcctacgcacgtggtccctggcagcacgagtggcagaagggacagcagagactgtggacccctcagctgcacctaagacctctgtgtggtctagccgtgtgtgctgggggaggcttttggccaccatttccccctctgtaaatgagaccgatacctgtggcatggaggacaggaggctggtggtgtgcaggccctggcgtgcacagtgccacatgaaggcctggggctggcgccaccctgaagaaggtggcacccactctggcgccccctctgctgtcctgcaggctctggcggtggccatccagcttggtggccatctggctgatccactcctccaggtggaccctctgtcctcatgtggtgcagtaagtttggacattctgatctacttggtgttttattatagaactgctagtgtgcccgagacttacattgtgaagacactttttaaaaaacttgagagccaaagcctaatccagagcaatgtcctaactcgctccaattctatgaaggctgagagaggtgaggaagctgcaaaagaaaagtcagaagctagcagaggttggttcatgaggtttaaggaaagaagctgtctccacaacataaaaatgcaaggtgaggcagcaagtgctgatgtagaagctgcagcaagttatccaaaagatctagctaagatcactgatgaacatggctacactaaacaacaggttcgatgtatacaaaacagccttctgttggagggtaatgctgaagaagtacgtaaaattattgtttgttctatgtcccctcccttaaaaccaggtggacctgtgactctggtagaagagttcctatgtgcttctaaggcttccgtgtcagcagtttctggctggattagcaagtggaggaactggcaggagattagaaggcaagaggaaagagaagacagggcttccctccccgaccttcaggcctcagagtcgtag

SEQ ID NO: 7415 - DNA, 3789 bp, Homo sapiens
  SIMILAR (1672)..(3399): 591254mologous to Homo sapiens golgin-like protein,accession number AF263742,Smith-Waterman Score=1456.
atgagaccaggcttcgtggtgtcagtgggaatggtggaaggtgtacctggagagcctgatccatacccagtgctctgctacaccccatggcctggccacgacctccctgcctccagagcagccctggcccagggaagaagctggtctctgcatcgaatgatagggcaggattctgggagacggaggagcagacgccagcatttcgcccccggcacctccagcgggctgcggtccgctcccggcctcactcgagcaggtcccgccccgccagaggccgttagtccaagtcacgtgatcgtcgactcagctgacctggcgggaccggaaaaagaaattcccgggccctggcttcctcgcgcgatgtatgaggcaccaggggtgaagcgggcatgggctgctggagcgggaatgagggggcgccagtggctccggaaacgggttgaggttgtctgcactggccgctccgcaaacacagtgtgtgcgggcgtcagggcagcaggtctggtagagaaaagtccaccgccatccctctcccgaatggggcggaggtttcggttctgtggtgatctggactgtcctgaccgggtcctggcagagatcagcacgctggccaagatggttgagtgcacagggtctacactgggtggaggagggtataagaagatcctgaaactcacagctgatgccaagtttgtggaggagcatgagggaaagaaagacattgacagtcccaccttcctgtcctctgccagctcctggtggagcagtagcagtgcctatggctccaggaggcctgggggctttgagctgaagttaatagggcaacagggagagtcaggcgatgtgaaggccacagtggcagtgctgagtttcatcctctccggtgcggccaagcacagtgtcgatggcaaatccttggccagtgaactgcagcagctggggctgcccaaaggagcccaagcccagcccccacctgctacctccagagcttctccattctacccccagagcacgcggccagcccgtgctgctgttatgaggagaagcaaagcccccttgcagaagcacttgcgggtctgcagcctacgcacgtggtccctggcagcacgagtggcagaagggacagcagagactgtggacccctcagctgcacctaagacctctgtgtggtctagccgtgtgtgctgggggaggcttttggccaccatttccccctctgtaaatgagaccgatacctgtggcatggaggacaggaggctgggtgtgcaggccctggcgtgcacagtgccacatgacggcctgggctggcgccaccctgaagaaggtggcacccactctggcgggtctcccttggagcacctggagcccaagaagctgtccctcacctttgcaatcccagggactcgccccctgatcatgatgaaggtggacccaaacccgctgaggggcctgaaggagcaaagtgagccaattctctcccctgacgcccgtaagggctccagtggtgatggagaagtacagaggaacctggtgccggccgcagtcaacccctatgtgatgatctttctacccgccctctttcgtgtcttggtgctggctgctgtctttggccagctaaaagaatatcagcaaaggaagagccctggtattccagcaggagcaaagacaaaaaagaaaaaaactgacagtagccctgagacaaccacttccggtggttgccactcacctggggatagccagtaccaagaactagcagtagccctggagtcaagctcagtgacaatcaatcagctcaatgaaaacatagaatcattgaaacagcagaagaaacaagtggaacatcagctggaagaagcaaagaaaacaaacaatgaaatacacaaagcacaaatggagcagttagagacaatcaacatcctcacattggaaaaggcagacttgaagaccaccctttaccatactaaacgtgctgcccgacacttcgaagaagagtccaaggatctggctggccgcctgcaatactccttacagcgtattcaagaattggagcgggctctctgtgctgtgtctacacagcagcaggaagaggacagggggcactgcctgagctccccagatcaaaacttctcactcttcaccatccagtcctcgagctgcagagaagcggtcctccagcggcggttacagcagaccataaaggagcgggcgctgctgaacgcacacgtgacacaggtgacagagtcactaaaacaagtccagctagagcgagacgaatatgctaaacacataaaaggagagagggcccggtggcaggagaggatgtggaaaatgtcggtggaggctcgaacattgaaggaagagaagaagcgtgacatacatcggatacaggagctggagaggagcttgtccgaactcaaaaaccagatggctgagcccccatccctggcacccccagcagtgacctctgtggtggaacagctacaagatgaggccaaacacctgaggcaggaggtggaaggtctggagggaaagctccagtcccaggtggaaaacaatcaggccttgagtctccttagcaaggaacaaaagcagagactccaggagcaggaggagatgctccgagagcaggaggcgcagagagtgcgggagcaggagagactgtgtgaacaaaacgagaggcttcgggagcagcagaagatgctacaggagcagggtgagaggctgcgaaagcaggagcagaggctacgcaaacaggaggagaggctgcgaaaggaggaggagaggctgcaaaagcaggaaaagaggctgtgggaccaggaggagaggctgtggaagaaggaggagaggctacaaaagcaggaggagaggctcgcgctctcccagaaccacaagctcgacaagcagctggccgagccacagtgcagcttcgaggatctgaacaacgagaaaaagagcgcactgcagttggagcagcaagtaaaggagctgcaggagaagctagacgaggtgaaggagatgcagtacatggccacctatcagcagctgacctctgagaaggaggcgctgcacaggcagttactgctgcagacccagttcgtggaccagctgcagcagcaggaagcttggggcaaagcggagcacctagaagctgccagccaccagaaccaacagctagagacccagctaagcctcgtggctctccctggagaaggagatggaggacaacatctggacagtgaggaggaggaggcgcctcggcccacgccaaacatcccagaggacctggagagccgggaggccacggagccagaggcagaggccccagccccagggactgggggtgagtttgtgtgtggggagagctaccgggccctgaaggaggccatggtgaagctgaaagggagagagtccttcaccgtatatgaaagccagggggcagtgccaaacacgcggcaccaggagatggaggatgtcatcaggctggcccagaaggaggaggagatgaaggtgaagctgctggagctgcaagagttggtgttgccccttgtgggcaaccatgaggggcatggcaaattcctcatcgctgcccagaaccctgctgatgagcccactccaggggccccagccccccaggaacttggggctgccggtgagcaggatgttttttatgaagtgagcctggacaacaacgtggagcctgcaccaggagcggccagggagggttctccccatgacaaccccactgtacagcagatcgtgcagctgtctcctgtcatgcaggacacctag

SEQ ID NO: 7416 - DNA, 969 bp, Homo sapiens
  SIMILAR (22)..(471): 511254mologous to Homo sapiens prostate antigen PARIS- 1,accession number AY026527,Smith-Waterman Score=412.
atgctgttcagcggacactcggtggaccagcgggtgttcagagaccttatgagtgagaagctgcctcggttgcatggccactttgaacagtacaaagtcgactacactctcatcactttcaactggtttctggtggtatttgtggatagtgtcgttagtgacatcctctttaaaatatgggactctttcctttatgaaggaccaaaggttattttccgttttgctctggcactttttaagtacaaggaagaggagattttgaaattgcaagattcgatgtctatatttaagtatctccgctacttcactcgcactatccttgatgctaggaagctgatcagtatctcctttggggacctgaaccctttccccctacgccagatccggaaccgacgcgcctaccacttggagaaagtccggctggagctgaccgagctggaggccatccgtgaggacttcctgcgtgagcgggacaccagccctgacaagggtgagctggcccacttcttaccccagatagcctcgggcgctgcctgtagtcatgctgacagctgtacagtagccgccaagactgctgacagctggagacggttctggtttcaactacgaagagtcaacagatacaacaggcccagggaggtgcccctgggggccccagtccccatcactccaaggggcagtcctgcaagtgacaaggtgggcccaatccctgtggaacaggtctctgaggaccacagagtggggccccagggaaagctgggagccgagctagaggcaggcagcaaactctctgaaaagatcccagagaccccaggagacccacgatcacactttgagagaggccattctagaagcagttgggactttacccagaagcccacactccagagacccttccacaagggcttcagctgtcttgatgccattccagcagcagagggtctgttcattagcaaaatggatggctga

SEQ ID NO: 7417 - DNA, 393 bp, Homo sapiens
cgccagagtgggtgccaccttcttcagggtggcgccagccccaggccttcatgtggcactgtgcacgccagggcctgcacaccaccagcctcctgtcctccatgccacaggtatcggtctcatttacagagggggaaatggtggccaaaagcctcccccagcacacacggctagaccacacagaggtcttaggtgcagctgaggggtccacagtctctgctgtcccttctgccactcgtgctgccagggaccacgtgcgtaggctgcagacccgcaagtgcttctgcaagggggctttgcttctcctcataacagcagcacgggctggccgcgtgctctgggggtagaatggagaagctctggaggtagcaggtgggggctgggcttgggctc

SEQ ID NO: 7418 - DNA, 4136 bp, Homo sapiens
  SIMILAR (441)..(1115): 951254mologous to unidentified MCSP,accession number A61971,Smith-Waterman Score=1118.
  misc_feature (1)...(4136): n = a,t,c or g
aaacagcagaagaaacaagtggaacatcagctggaagaaataacgtgattttctttgcttacaacatgactgctgggtttggggggcactcagatgcagagaacaatgagaaaaagagcgcactgcagttggagcagcaagtaaaggagctgcaggagaagctagacgaggtgaaggagatgagccagtaccaagaactagcagtagccctggagtcaagctccgtgacaatcaatcaactcaatgaaaacatagaatcattgctggcccttgtagagcatagcgtcaaagtggctgcactggacgtggcggaaggaggggcggccagcggagcaggcctgcaggttgcagaggcggaagcgcttccgctcacccacacagtatctgcctttgtatttgggcctgtggggagaaccggggtgggccccagtgagggcccagcagggggccggcgtggggacttcatctatgtggacatatttgagggccacctgcgggccgtggtggagaagggccagggtacggtattgctccacaacagtgtgcctgtggccgatgggcagccccatgaggtcagtgtccacatcaatgctcaccggctagaaatctccgtggaccagtaccctacgcatacttcgaaccgaggagtcctcagctacctggagccacggggcagtctccttctcggggggctggatgcagaggcctcttgtcacctccaggaacaccgcctgggcctgataccaggggccaccaatgtctccctgctgggctgcatggaagacctcagagtcaatggccagaggcaggggctgcgggaagctttgctgacgcgcaacatggcagccggctgcaggctggaggaggaggagtatgaggacgatgcctatggacattatgaagctttctccaccctggctcctgaggcttggctggccatggagctgcctgagccatgcgtgcctgagccagggctgcctcctgtctttgccaatttcacccagctgctgactatcagcccactggtggtggccaaggggggcacagcctggcttgagtggtggcacgtgcagcccacgctggacctgattggagctgagctgcgcaaatcccagtgctcagccccctgtggcagtggcgtccagcggcgcctagtcaagtgtgtcaacacccagacagggctgcccgaggaagacagtgaccagtgtggccatgaggcctggcctgagagctcccggccgtgtggcaccgaggattgtgagcccatcgagtctccccnagctacacatgtgaacgtctgggtcatcaccaatgtggatggagagggtacagagcagggggaatggtggagctgtgacatggaaacagaaggtgtccttgactgcctccgaggcacgtgccatggccccataggtcacccggccagcctgtacatcatcctagggagagccacgaggctcaaccgggtctctagctgttggttccgctggctggcagcttctaggtgctcccaaggggatgggaaacagagtgagaaggcacggaggttgccaggtcatccccctcggggccccatcctcagcaactccctcccctgggtctcctgcaacttttggcgggccatctcagccaccgctttgccccaagcttcctgctgctgcagctggtccacgagctgggtctgcagcagtaactgcctgtgcagcgcctccttctcagaggacgaaggaaccctagagtttacactcaccacacagagccggcaggcacccttggccttccaggcagggggccggcgtggggacttcatctatgtggacatatttgagggccacctgcgggccgtggtggagaagggccagggtacggtattgctccacaacagtgtgcctgtggccgatgggcagccccatgaggtcagtgtccacatcaatgctcaccggctagaaatctccgtggaccagtaccctacgcatacttcgaaccgaggagtcctcagctacctggagccacggggcagtctccttctcggggggctggatgcagaggcctcttgtcacctccaggaacaccgcctgggcctgataccaggggccaccaatgtctccctgctgggctgcatggaagacctcagagtcaatggccagaggcaggggctgcgggaagctttgctgacgcgcaacatggcagccggctgcaggctggaggaggaggagtatgaggacgatgcctatggacattatgaagctttctccaccctggctcctgaggcttggctggccatggagctgcctgagccatgcgtgcctgagccagggctgcctcctgtctttgccaatttcacccagctgctgactatcagcccactggtgtgctctaccacctgcggcctgggtgtggtctggaggccggtgcgctgtagctctggccgggatgaggactgtacccccgctggccggccccagcctgcccgccactgccacctgcagccctgtgccacctggcactcaggcaactggagtaagctaaaagaatatcagcaaaggaagagccctggtgttccagcaggagcaaagacaaaaaagaaaaaaactggcagtagccctgagacaaccacttctggtggttgccactcacctggggatctaaaagaatatcagcaaaggaagagccctggtgttccagcaggagcaaagacaaaaaagaaaaaaactggcagtagccctgagacaaccacttctggtggttgccactcacctggggatagataccccgtggcagtgctgagtttcatgctctccggaactgccaagcacagtgtcgatggcgaatccttggccagtgaactgcagcagctggggctgcccaaagagcacgcggccagcctgtgccgctgttatgaggagaagcaaagccccttgcagaagcacttgcgggtctgcagcctacgcacgtggtccctggcagcacgagtggcagaagggacagcagagactgtggacccctcagctgcacctaagacctctgtgtggtctagccaaccacctggtcggtcggctctgaccgacatagacctgcagctgcagttctccacgtcccagcccgaagccctccttctcctggcagcaggcccagctgaccacctcctgctgcagctctactctggacgcctgcagactcggaaggtagggagggagcgtggccagggcggctgcctgcaggtgcgtgtcctgctgctccccaactcaacatgctcacctcatttcacaccaacaagccccatcctcagaggaggagcccaaggctctgagaggaagaagctgatcagtatctcctttggggacctgaaccctttccccctacgccagatccggaaccgacgcgcctaccacttggagaaagtccggctggagctgaccgagctggaggccatccgtgaggacttcctgcgtgagcgggacaccagccctgacaagggtgagctgtccatggcagaagtccttgctaaaaaagaagagctagcagatcgtctagaaaaggccaatgaagaagccattgctagtgctattgctgaagaagaacagttaactagagaaattgaagctgaagaaaacaatgatattaacattgaaactgacaacgacagtgatttttctttcacagtgagtacattggatgatgtgaagaattctggcagtattcgagacaattatgttcgaacttctgaaatatctgctgtccacattgatacagagtgtgtttcagttatgctgcaagctggtacacctcctttacaagtaaatgaagaaaaatttccagcagagaaagcaaggatagaaaatgaaatggacccttcagatatttcaaatgtgagtgctgctaacttgttcacagtgagtacattggatgatgtgaagaattctggcagtattcgagacaattatgttcgaacttctgaaatatctgctgtccacattgatacagagtgtgtttcagttatgctgcaagctggtacacctcctttacaagtaaatgaagaaaaatttccagcagagaaagcaaggatagaaaatgaaatggacccttcagatatttcaaatgtgagtgctgctaacttggatatgctggctttgtaa

SEQ ID NO: 7419 - DNA, 1271 bp, Homo sapiens
  SIMILAR (177)..(887): 971254mologous to Homo sapiens Human secreted protein sequence encoded by gene 32 SEQ ID NO:90,accession number AAB38234,Smith-Waterman Score=1169.
tccgagacagtatggctgctgcatttcggccctcgaatcgagttctcctgcaggcgctgcagattttggtgtatcctggggtgggaggctccggctctgtcagctgccgctgccctctcggagagtttggaagcagaggtcttatggagtctcagttctgctaacaatctaaaagacttaacgctaaaagatacctacttacagataatgtggtgaaattaaaagaatttcaacaaaagaaagtggctgttgcatgtaatctttctggcactaaagaaacgtattttagaaacttgaaaaagaaactgacccagaacaagctcatcttgaagggggagttgataaccttactccatttgtgtgagtctcgggaccatgtggaactggctaaaaatgtcatttacaggtaccatgccgagaacaaaaatttcactttgggggagtattaatttggaccgctttttgtgaggttgtgttaccagttggatctcgaggaatctgcaggggagctcatgaaagaccagcatttacgaggtttcttctcagactccacattattcaatattttgatggatatgttatttatcaaaggcaaatataaaagtgctttgcaagtattgatagagatgaaaaaccaagatgtgaagttcaccaaagatacctatgttcttgcttttgcaatttgctacaaactgaatagccctgagtctttcaaaatctgtactacattaagagaagaagctctactcaaaggagaaattctctccaggagagcatcctgtttcgctgtggcattagctctgaatcagaatgagatggcaaaagctgtgtccattttttctcaaatcatgaatccagaaagcatagcctgcattaatttaaatattataatccatatccagtcaaatatgttggaaaacctgataaagactctaaaaaatgctgcagaaggaaatttatcaaaatttgtgaaaagacatgtgttctcggaggaagtgctggccaaagtgagggaaaaagtgaaggatgtgcctgcccttgtggccaaatttgatgagatctatgggacactgcacatcactggccaggtcaccactgattctttggatgctgtgctctgccacacccccagggacaggaaatctcacacgttgctattaaacaagaggatggtcagccgtcgcaccttccagccactcagccagtccctgttggctgagtaaccctggtttcagtccacctatggatctgaggggcctgcttctagtgag

SEQ ID NO: 7420 - DNA, 582 bp, Homo sapiens
  SIMILAR (71)..(469): 911254mologous to Homo sapiens NADP+-dependent malic enzyme,accession number X79440,Smith-Waterman Score=624.
cttctaggtgttgcgccatccagagcctttcaggaagagattttgagggcagggcctccttccacgagcgcctaatctatttgcccttaagcaccccaccagcaaggccgagtgcacggctgaaaagtgctaccgggtcacgaagggccgagggatttttcccagtggaagtccttttaagagtgtgactctggaagatggcaagaccttcattcctgggcagggaaacaatgcttacgtgttccccggggtggcactgggagtcatcgccggcgggatccggcacatcccagatgagatcttcctcctgacagcagagcaaattgcccaggaagtctttgagcagcatctgtcccaggggagactctacccaccactcagcaccatccgagacgtgtctttgagaattgccatcaaagttctcgactacgcgtacaaacacaacctggacagctacacttggcccaaggaagccatgaatgttcagacggtttgaggcagtctcagaggctagtatggggctagatgaagcccagagtaacacccacaatataaatgggttccaaaatggcccaagtgaaa

SEQ ID NO: 7421 - DNA, 449 bp, Homo sapiens
  SIMILAR (261)..(416): 941254mologous to Homo sapiens NADP+-dependent malic enzyme,accession number X79440,Smith-Waterman Score=250.
aaatgcccaggaatgccttcacaggagcagcttaactggcagggacctgaggtggaccagtggtcccttagagatgaaaaggaggtctcaggcagctcaagcaggaagatcattttcccttctgctccttcagtccttgtggcagatgctgggcccaagaccgagtctttcatggtattcctagttcccccaccaccaccagcagaagaggaatgggttgtttatagagagcaggcatccccactacccgccttttccctgtaggtgttgctgccatcgcaggagccttcacggagcagattctgagggacatggcctccttccacgagcgccctatcatctttgccctgagcaaccccaccagcaaggccgagtgcacggctgagaagtgctaccgggtcaccgaggtcagcggggagtccttccttcccccggctgagaggacatag

SEQ ID NO: 7422 - DNA, 1966 bp, Homo sapiens
  SIMILAR (1147)..(1650): 451254mologous to Homo sapiens NADP+-dependent malic enzyme,accession number X79440,Smith-Waterman Score=270.
cggaaggagaggaccgaggtctgccaaggaccatgggtgccgcgctggggacaggcacgcggctggctccctggccgggccgggcctgcggcgccctcccgcgctggacacccaccgcgcccgcccaaggctgccactccaagcctggcccggcgcgccctgtgcccctgaagaagcgcggatacgatgtcaccaggaaccctcatctcaacaaggggatggcctttacccttgaagaaaggctgcagcttggaatccacggcctaatcccgccctgctttctgagccaggacgtccagctcctccgaatcatgagatattacgagcggcagcagagtgacctggacaagtacatcattctcatgacactccaagaccggaacgagaagctcttctaccgagtgctgacttcggatgtggagaagttcatgccaatcgtgtacacgcctaccgtggggctggcctgtcagcactatggcctgactttccgcaggccccgtggactgttcatcaccattcatgacaaaggtcatcttgcaacaatgctgaattcttggccagaagacaatattaaggccgtggtggtgactgatggggagcgcatcctgggcctgggagacctgggctgctacggcatgggcatccctgtgggcaagctggccctgtacacggcatgcggaggggtgaacccgcagcagtgcctccctgtgctgctggacgtcggcaccaacaatgaggagctgctcagagaccctctgtacatcggcctgaaacaccagcgcgtgcacgggaaggcatacgatgacttgctggatgagttcatgcaggctgtgacagacaagtttggaataaattgcctcatccaatttgaagacttcgccaatgccaatgccttccgcctgctcaacaaataccgtaacaagtactgcatgttcaatgatgacatccaaggcacagcctccgttgctgtggcagggatcttggctgctctgcgaatcaccaacaacaagctttccaatcacgtgtttgttttccaaggtgcaggcgaggcagctatgggcattgcccacctccttgtcatggccctagagaaagaaggtgtaccgaaggcagaggccacaagaaagatctggatggtggactctaaagggctcattgtcaaggggaggagccacctgaaccatgaaaaggagatgtttgcccaagacccatcctgagtcaaactccctggatgaggtggtgaggctggtgaagcccacagccatcataggtgttgctgccatcgcagaagcccttcacggagcagattttaaggaacatggcttccttcccgaagggccccaatcatttttgccctgagcaacccacccagaaaggccgagtgcacggcttgagaagtgctaccgggtcaccgaggggccgaggggattttttgccagtgggaagtcctttttaaggagtgttgatttgggagatgggcaagaccttcattcctgggggcaggggaaacaatgcttaacgtgttccccgggggtggcaactggaagtcatcgcccggcgggatccggcacatcccaggatgagatcttcctccttgacagcagagccaaattgccccaggaagtctctgagcagcatctggtcccaggggagactctatccaccactcagcaccatccgagacgtgtctttgagaattgccatcaaagttctcgactacgcgtacaaacacaacctggttttcctactacccagagcctaaggacaaggaggctttttgtaagatccctgggtcttacactccagactatgactccttttacactgggacagctacatttgggcccaagggaaggccatgaatgttcagacggtctgaggcagtctcagaggctagtatggggctagatgaagcccagagtaacacccacaatataaatgggttccaaaatggcccaagtgaaaa

SEQ ID NO: 7423 - DNA, 587 bp, Homo sapiens
ggcacgagggagatcatgtcctagtggaacgtgcggccagatcattctgggtattataggccatggtcaagagtttgtattttatttcacataaaatatattttggggaggtattggagagttttcaggcaaagagaatgacctatctttggggggttgaaatcaacaaagccctaccgaataaatgtaaaactgcccacaagtcaagttccctgcccctgacagacccaagctctcttcccttgatggtgggcaaatttggggttgctcccctattttaaaaccattgcccacccgtagtccccactgtaggaatttccttaggtgggccatattattttactacgtggaactctgggctttccttggttttatacctcatgggctgagttgttaagattcctactcttttccggcattggggttgggggtgttagggaacagggtctcactctgtcacctaggctgaagagcagaggtgtgatcacagctcactgtaaccttgaactgctgggctcaagcagtcctcccgcctcagccttccaaggagctaggattacaggtgtgcaccatgacccagctaatta

SEQ ID NO: 7424 - DNA, 343 bp, Homo sapiens
  SIMILAR (333)..(193): 1001254mologous to Homo sapiens Human secreted protein, SEQ ID NO: 5959,accession number AAG01878,Smith-Waterman Score=252.
acaagagcaactacgaagacctaaatacataatttaccaaagagcaacctgacaatctttccaaacaagcgatagagcattaccagtaagatagctgaaacaaataaatactagacgaattagaatcactttcaacatgactttccaaccacctcagaccaacaacactgtatctctaaccaaccctctccccttcttcaccctcatccctcccagtaccagtgccaagctgcatacccccatcccccacactgcaacgcccacgggaccggtgccaagctgtccccttctccccgtcccccacaactcccacctcagggtcctcttactagaatctcgtgcc

SEQ ID NO: 7425 - DNA, 637 bp, Homo sapiens; identical to SEQ ID NO: 490
  SIMILAR (47)..(412): 991254mologous to Homo sapiens gamma-G globin,accession number X55656,Smith-Waterman Score=637.
  misc_feature (1)...(637): n = a,t,c or g

SEQ ID NO: 7426 - DNA, 700 bp, Homo sapiens
  SIMILAR (424)..(35): 491254mologous to Homo sapiens PRO2987,accession number AF116719,Smith-Waterman Score=205.
aattttgccctcgaggccaagaattcggcgagggcaataagctcctagtcccagacgcccatggggtcatttcacagaggaggaccaaggctactatcgacaagcctgtggggcaaaggtgaatgtggaaagatgctggaggagaaacccctgggaaggctccctggttgtctaccccatggaccccagaggttctttgaccagctttggcaacctgtcctctgcctctgccatccatgggcaacccccaaagtcaaggcacatggccaagaaggtgctgacgatccttgggagatgccaacaaagcaccctggatgatctcaagggcacctttgcccagctgacgtgaactgcactgtgacaaagctgcatgtggatcctgagaacttcaagctcctggggaaatgtgctggtgaccgttttgggcaatccattttcggcaaagatttcacccctgaaggttgcagggcttcctgggcagaagatgggtgacttgcagtggccagtgccctgttcctccaggataccactgaagcctcttggcccatgaattcagaagctttcaaggataaggcttttattcttgcaagcaattacaaataataaatctatttctgctaagagatcacacatgattttcttcagctcttttttttacatctttttaaatatatgagccacaaagggtttatattgagaa

SEQ ID NO: 7427 - DNA, 349 bp, Homo sapiens
  SIMILAR (11)..(346): 761254mologous to Homo sapiens aminopeptidase N precursor (EC 3.4.11.2),accession number M22324,Smith-Waterman Score=438.
  misc_feature (1)...(349): n = a,t,c or g
ggcacgagggaggaagattcagactcatatgccaaaagaccactcggacatccctgacatcaatcgggctcatatcattaacgacgccttcaacctgaccagtgcccatactgtccctgacactctggcactgatcaacaccctcttcctgattgaccagagacagtacatgccctgtgaggccgtcctgagcagcctgagctacttcaagctcatgtttgaccgctcccatgtctatagccccatgaataactacctgaataccctggtcacacccctcttcattcacttcacaaataataccatcaactggatggagatcccagagcacctgatggaccattacaan

SEQ ID NO: 7428 - DNA, 397 bp, Homo sapiens
  SIMILAR (38)..(202): 691254mologous to Homo sapiens Human myelin oligodendrocyte glycoprotein gene,accession number AAZ29204,Smith-Waterman Score= 182.
  misc_feature (1)...(397): n = a,t,c or g
ccaaacttgctcttccngggttcaagtgattctcntgcctcagcctccnaaatagctgatatttttagtagagacagggtttctccatgatggtcaggctggtttcgaactcctgacctcaggtgatctgcccaccttggcctcccaaagtgctgggattacaggtgtgagccaccacgcccggcctatttttttgtatttttttagtagagatgggatttcaccatgttagccaggattgtctcgatctcctgacctcgtgatccacctgccttggtctcccaaagtgctgggattacagcacgagccactgtgccctgacttttgtttttgtttttgttnttgttttttttgagacagagtgttgctcttgttgcccaggctagagtgcaatggc

SEQ ID NO: 7429 - DNA, 1624 bp, Homo sapiens; identical to SEQ ID NO: 5691
  SIMILAR (1458)..(658): 1001254mologous to Homo sapiens C33 antigen=type III integral membrane protein,accession number S48196,Smith-Waterman Score= 1413.

SEQ ID NO: 7430 - DNA, 672 bp, Homo sapiens
  SIMILAR (445)..(618): 751254mologous to Homo sapiens Human myelin oligodendrocyte glycoprotein gene,accession number AAZ29204,Smith-Waterman Score= 203.
cagcgctaagcactggaccgagacacaagatggcgccgatgtaaggtggaaccgtcgaccgcgagcgcttaagggtccatggtagttcattctcagtcagcagacccacagcaactgtggtgtcagaagctataaatggtctggccaagcaagactcagagtattttgtgaaatcctgagctgcaaggttctgcctcacctgtctctccactctgacatcacgaaatcagcaaaaccagatatttattctcctcactcccagcagatacgaggacaccaacaatgcagttgatccctctgggcctgagtctcccatctgaaacatggggaattggggtaggtcaagctttttgaaactgcaaaacctctacctgtttttaaaaatgagatcttttgaccaggcacagtggctcacacctaaaatcccagcactttgggaggctgaagcaggtggatcatctgaggtcaggagtttgagatcagcctggtcaacatggtgaaaccccgtctctactaaaaatacaaacattagctgggcatggtggtgggtgcctgtaatcccaactactcgagaggctgaggcaggagaatcgcttaaacttgggaggttgcagtgagctgagaccacaccactgccctctagcctgggtgacggagtgagactatctcaaa

SEQ ID NO: 7431 - DNA, 314 bp, Homo sapiens
catgccatccctctagtgcccaaggctcagggtcccctcccacccacagctccggattcagatggccagcattggagtgtgcgaacccaggggctctctggctctcattagcagggggctccccgaatgtgttcctgagaacacctgttctgtaagaagctccttggggaagagaagggttccctgtcaaaagagtttgggaagtgctgggttaaaccacgttagaaatggaattctaggccgggcgtggtggctcacacctgtaatcccagcactttgggaggccgaggagggcagatcacgaggtcgggagt

SEQ ID NO: 7432 - DNA, 559 bp, Homo sapiens
  SIMILAR (229)..(167): 801254mologous to Homo sapiens PRO2550,accession number AF130089,Smith-Waterman Score=90.
caaaactcttttgttttttttttttttcagatttgaaccacacaatttattaacaagcatgatttgtggcctcgtttataaccagcccccaccccagcacttggtgcacattctccttaagcgcagaatttggcctcaaggtaatattttaggaataaataaaaagaggccgggcacggtggctcacacctgtaatcccagcactttgggaggccgaggtgggcggatcacgaggtcaggagttcgtgactagcctggccaacatagtgaatcaccgtctctaccaacaatacaaaaaaattacccgggcgtgatggcgggcgcctgtaatcccagctactcgggaggctgaggcaggagaatcgcttgaacccaggaggcagacagttgcagtgaaccgagatcgtgtcattgcactccagcctgggcaacaagagcaaaactctgtgtcaaaaaaaaaagaaagaaagaaagaaagagataaaatttccccttaggtctggaccttttgatacaagccgatgctcagcgggtgttgttgactgacaggtggatgaat

SEQ ID NO: 7433 - DNA, 477 bp, Homo sapiens
  SIMILAR (160)..(5): 711254mologous to Homo sapiens PRO0478,accession number AF090930,Smith-Waterman Score=183.
tttagtagagatggggtttcactgtgttagccaggatggtctcgatctcctgacctcgtgatccgccctcctcggcctcccaaagtgctgggattacaggtgtgagccaccgcgcctggccaaccctgctcttgaaatgtctaaatcttttcctcactagcatatacaattcaaatgcacaggcctccatgacttctttggaatttaaaagaagccttcatttcaaggatacgaaatatgtaaaattttaccaaccatggataagtttgttatgggagtagtggaaggacagtggaaaaaaaaataggttttttcatgatacttttatttttccttttttaaaaataaatttaggggggtacaagtacagttttagatacatgaatatattgtgtagtcgtaaagtctgggcttctagtgtaaccatcacgcaaatatacttggatttttctaattacagttctaccaaacatttgc

SEQ ID NO: 7434 - DNA, 15030 bp, Homo sapiens
  SIMILAR (64)..(5): 701254mologous to Homo sapiens PRO2044,accession number AF118090,Smith-Waterman Score=69.
gttataagcctaaggcagcttgacttgcagcaacaagtttttgaccctgaacacaaagacatgacagatgttaggaaaatattagcattactattaggatacaaaattaacatttatgaagctattgatgattgcaaagtgatttcacgtgcatcatagcctttaattacaatttactactataatctctggatggaagctcacggacatagttgtccccaaatgaataaaaaaaagttactgtcaggccataaagggaaattttaagtgatttagacatttgaatgtaaattctcccactagcctataaaatcaactaaatcacaaaccaccacatttcaagtaaatgtttaaataaattaatattttgatttcatgatcaaaatatttcaggccttacaaatattcctattaatattcataagcatcacaaatttggaaacagaacatgcattataaacattcaacagtatggcacaatagagcaggagataaaaacaaagtgctgttttagtcattttgtaagacaattgtgtgtaaaataagatcccgggcccacatgtacaaagcctcctttgatatataaatccgtaagccctagcctaaccaaacatgcaaaaatgaatactggacatattaaaatgaagagaactgtagtacctcctcggcaaagcaggtctccttatcgtcagccttgcagcacttctctacaaaagctgcgaaatcatccataacaactttcagttgctcttttgttgccttgggcttgtgtttcacgagctcaacaagtgcactgagtttgaatggaaaaagaaaaaaaaaaaacagaaaaaacattactcacgtatagaaaaatggagagagtaaggatggtagtcccatcatttaagattataaatcttggagccaggcaactctgagtacttgggccaggcataccgctataagtctcaatattctcatctgcatgatgaggataataaaatccactttcatggagttggtgggaagaccaactgaaacaatcagtataaaccactcatcacgttatgtagtgtcaacaaatttcttttcagtaaatctctgaaaagaagtatgtcattgcaattatatattattcagattttggaagtgccatattatgtcatattgagttttattgctattaaagagctaaaaatgatccttaaaaatttaattatcttggactttatttaaaatgggtctcatctataaagatgagaaactttatatttggttcttaaactttgctcccttcaaagctaatagtggggaggctatagaaaataaggctatgcaaactcatgggagctgctgggtcgcgttcactgacatctgcaaagacaacaatgccagggagagattggtgtgggcatgacaggttttgcaatattactcttaagcctagacgaggagtacagcccacaagagatgacagcaactttctatagctaaattttatgcaattataacccctgtgatagcaatagggagttgagcttcagggcttgcatttctacatgttttttatccaagtctcattctcaaaagtcacatcttgggggtttgtctcatgtgtggggccaccatagggcaaacttaaaataattatttacatctagaaataaattctcctatggttcccattaactaatttgccatgtgcacaaatttatcagttaattggtcatctttttctactgaatatggtctaacatgttattctattgtggctttaatccacaatattactctgaataattttagcaatattataacagaggattttatctttaaaaagttattcattttattctgggtactcttatcagcataataagggcaacactccaatactttcctctaagaaatataatcactacttcaggaaaaagttgctagcttgaattgacagttcttgctatcaagactacaaacacatgcagtaatgaaatactcctcacgtttgtttcttgatttgtctctccttctcagaaagtgtgcatatatctgcatggaaggtgaatgtttcagcattaaactctttgggaacgtatgtttcatcgacttccagagctgaaaagcatggtcgcctgttcaccaaggattctgtgcagcatttggtgactctgtcacttactggcgttttctcatgcaacacacataactggttcaggaccacggatagctaaagaacaggcaggagagcagaaattcaaaagaggtgaagctgaaaattttctactaaaaatacaaaaaattagccaggcatggtggcatgcacctgtagtcccagctacttgggaggctgaggcaggagaatggcttgaacttgggaggcggaggttgcagtgagccgagatggcaccactgcactccagcctggacaacaaagcgagactccgtctcaaaaaaaaaaaaaaaattatcatcctcggggccttgactgccaatatcacacatacacacacgtgcatgcacacacacatgcacaaaacatgcacacacacacattacttccttctgcttatgaaaggtagcattagcaatatctaaagggaaaattttttcattattaatttattatatgtttttaaagactcacatagtcttctgcacagggcattctttttgcttcaggatgtttacaacatttgctgctgacttttcctaggtttcttgagacctctacaagagttggagttgacacttggggtactttcttggtgtaacgaactaatagcctgaaaaaaagaagtcatgtgttttcagcaaggcaagaaactgtctaacatagtagataaaacagagaacacttggccggaatcaactaagatgttgctatgttccattcatcatattatctccatctgcagagtagtgggttagtggagggtagaaaacattctcctgaacaactagttaaacttggctttgagttccacctgtaccacgggcataatcttgggaaagtgagttgcctaattcagggacagtaataaattgattaatttcttctttcaataaaacctggagagagcttcatatgtatcagcatatgctaaacttgaaagatacaagtagaaaatggaaggaaatatatctgactcaatagggatagttcaagggttaaattaaaaatagtaaagtattataattaatgtgacatagtacctaatatataataatcatgtattaagaatgccagtcaccattaaaagtcaatgtaggactttaatctactcgaggaaagaaactatgtcttgttcactgttattatctctaaaatccataatcagaagagcaccatgtgtatgagccacacaagaaatatctactgtataatatgtctcttcttgtttttaaccttcgtagataagactctattgaattgggacattagtccagcaagccattctgtctctgtctcttctatggagggaaaggtttaaccatcaaagactaggtgcatctcccaaacaacctgaatttaatattcaaatatgtatctaaattcatttgttacatttttgtgttcagcttacatattactttttgagcgacatctattcaaggcctactacttgctgctctacaaaatattgccatgctctatttgcccattaactatttcttaaccgtcaagggacatgctcagttctgatataccaagatttggtatttaccctcccagcctacatacttccaatcttaagagaacaatttttagactacatwcaaatatagacctctccaccccatcaactattttatctctcctctcctatctttcttgacaaagagtgattagaaatatgcaatgtattttcattctgaaaagttctatgctaggtggctctatattaagtcttaaataattacaaattgataaaaaaaatcagtcaataaaaattacttacgcattctggaatttgtactctccaagctgctcaaaaagctcacaattttgtttgattaaatttctgaggctcttccacaagaggtttaaattcatcgaactgaaacataaaagaattgtgttaatagtattatgcctcaggatcagatgcaggttgtttttcaccgctctggtcagaatgatatcctttcttcttcctactcaaagccacatgaatagatgaatatcaatgccgctctgtcacaatacattcgaactatttatttggtcagcttgcatcatgtaagtggttaagaatattcaggctctggagttcaatgaccagtatttgagccaagtcatgtaagtcatgcttcagttgtgcaatttgacttaccatctccacatttcggaatccttatccctaaaataggggcaaagatggcactcatctcatagagctgctctgtaaaccaggtaagctaaggaaattaaacagtgccttgcatagaagaaaagtttaataaatgatggctatgattgtacatagtattattattagttcacctttccagttagattccaggctctccaaaatgagagattttacgttggtcattgtttgtgcatggtgcctggcatacagtagcttcttgaaagcaggaaaaatgagttttctctgattctgaatagttcagaaaccattacatatgctagtgggaaccctaaaaatcctccagaacagatttcctctcctaacttaatttcttgtaaaactattcctaaacatcctcaaaaagatttgaaaatattctaaagggataggttctataatttaccataagatactaattctagtacgtgatgaatcctggaatcaggttaactcactttacatctaagttaaatatcttctaattaacatttaaatttaatttttttttgttctcaggattgtgaaaaagagaaaaaaagatcaaaagtgtgtagagattgctctattcagatctttctattctaactagtctaaattttgttaatcattctaaggctactttttctttcatgtttaagattccagaattgaaacgatctcaagaaaagatctaaattgcactgtatatcattttacattcttgcattatttttctttctcattattggaatcatcagtcaaagaactacattttttgcgaacaataaacctaccactttggcatagcattcatgaggatctgcaccggcacagcacttctctagagtggtttcatatgtcttggcaagtctcagcagcagcacgacagagtaatcaggatgccttcttggatattcatacaaaaagcgaattaagatgaaaataaaatagactttgttggacaaatgagcacaaaaaatatcacaaagctaatctcaaaagtaacgcatattccaaaagtcttaatttgactaaaccccatgcagtaaagcttagtagctaaggacttggggtccagagttaaagttaccaaggctcaattcctagctctgctacttatatcactgcatcaccttaggcaacttatttaaatgatcagagccttagtctccttctcggtagaatggaaataataatagtatctgtcggctgggcacagtggctcatgcctgtaatcccagcactttaggaggctgaggcaggcatatcaccagaggtcaggagtttgagaccagtctgaccaacatggtgaaaccccatctctagtaaaaatacaaaattagccaggcatggtggtgcatgcctgtaatcccaggaggctgaggcaggagaatcgcttgaacctgggaggcgaaggttatagtgagccgagatggcaccattgcactccagcctgggcaacaagagtaaaactctgtctcaaaaaataaatagtatctgtctcggaaggtggattatgagaactatatgacataatctacacaaaacacacactgcttggcacatatgaagtctttgatgaatgatacttgttatttttattaacaggttgtttgatttaaactacatctcaaaaggattctgataaatagatgggcagagatatgttcttaaaatattctctttcttctctgtatgagtgaaatcttgtagggtacataattttaggaaatattatttagtgcattatcataatccaacaacaaaaatgcagtttatcaccacaacttctgacaatacgtaaacatttattttgtaattgagttgcctaccatattgccaggatactgaacttctggtcttttcaccaaatataaagcacctgtgtcagactctatatttctttttatacttctttgctatcattgcatagagtagatagatagactagattagattagattagttagatagacaggcaatacatagtcacacacatatattatagatgttcaagaaatacacttggaatgaatgactgaagtatacataatttatatatacacaaaatgtttctagacgtattttcagaaatacccctaaggagtaaggaatgttgagctttgccgtgaacatgtattatgttatgacaatgtattcaacgaattaacgatgtcaaaaattgggaaagcgtgggaaagggaaggaggaagaaacattgtgggcagcagggaaattgtaggaactccacagaaaagcctaggctatcctcctaagttgtgaggtcatgccaaagctataaaagaataatttcttatctacgtacatgcccaggaagacatcgtttgcctgagcatagtttttgcaaacatccttactttcaacaaaatcagcagctaatgaaggcaagtcagcaggcatctcatcattttccacttcggcaatgcagtgggatttttccaacagaggtttttcacagcattccttcagtttactggagagcgaatcttgattttcacagatatacggggcaaggggcgcctataagtaagttggtggaaattgttcaacacgaagggacattgctacactttctcctcagacctttattaagttggcagaacatgttcattgtattctaagaccatacacatattccttctatgaacatactctgtttgctcctaaacctggagatggagataggactacaaaaacattcccacggaagtaaaatagactaatcagtagcaggtgctcagctcagttatttattaattttatatttctactgttagggcatttaagtttttttcattaaaactcaatgctggttttccaaataatcccccaaaattaagtgcaggccttttgaaaccaaataactaaataaaatatagaagatttttgaaaaatgaatcaagatcatagtcataggccctgcttacatatataaaataaccgccttaaattttccagaaagtgccatgagagattaggattctagtatttgcccataagtttaatcttgaagaaagggagaaagaaaatattataagttttgagaaaagagatatcattccaaatatttgcacatctaacaaacagagtgaatttagggaaggaatatagagaagaaaaatacatcatttccaaaaatctcttcaagtagtgaccttctccaagtccacctacctccctcaaaaaatcttcttaggctgggcaaggtggctcatgcctgtaatcccagcactttgggaggccaaggcgggtggatcacctgaggtcaggagatcgagaccatcctggctgacacggtgaaaccccgtctctactaaaaaatacaaaaacaagattagccgggcgtggtggcgcatgcctgtaatcccagctacttgggaggctgaggcatgaaaatcacttgaacccaggaggcagaggttgcgctgagccaagatcacaccattgcaccccagcctgggaaacaagagcgaaactctgtcttaaaaaaagaaaaaaaaatcttcttagacatctaccttgcaagatgttctgccaagtaaaaccttgtaactgttctacttcagtttaagccttcatttacagttagagcatgactgaaaggagttacaaatcagtgaatgggtttatctggtaatttatagcaggttaaaaacagaaaggtaccaccaccataggcagggaaagattgaagataggacagacgaaagcacagaagacaatccaacccactgtcagctatcaccaatgataccaaacgcatccattctaccaacttgagcatgcaagctaccaaaaagcatatcgacgactctttaccctgtcatcagcacattcaagcagatctccatggcagcattccgtgtggactttggtaagatctgtcactaacttggaaacttctgcaaactcagctttgggaaatctctggctcaggcgagctactgccctaaaaagaaaatcgccaatcaaaatggtattatcatgcgagattttatatgaaaacactaggcaaatactatttctcataagaaaattcaaaatggacatacagaaataatttttaaaattcattagttcgagttgtgaaccaaatggtaatcacttatcctgagggcagaattatccatttaagagtgtgtgtggtaggtagaaatctagcaagtcataaaagcagaaattaaaaaggaactctaaaaggggcaacaggctgagaagcatcaggtttggagtccagatgtgacttccagctcgggctttatcacttgttagcagtaggacttgttagcagagggctcagcgtctctgagcttcagcctctgcagtgtcatgacaacatgctaaattgaagaagttttgaggattaaattagataatacatacaaaagcattttataatctgggaagtactacacaaactccagttatcttttttcgcaagggaaacacattttttctgacttctaaaggtctcttagaaaagaaatcataacttctacagaatgagggagtttttattgatcttacttataaaaagaaagatccagcactatctgcaaagtctatgacaagatgtaaacgtctaattttcggcattctctagtcatttcacagttgcctaaatcaggtaaaggtgactgctttcccaaaaccaatcatagcctgtttatctgtgtagaattgtatggtggggcggtttttttttcataaattgggttgattttggtggtgtagatggtaggaatgatgagcaaatacagttcaattgacagtttctagagagcatacataatgtctattattttcattttatttcctgttgtgttgatttgctgttgactagcaggtgaggagtgtgggtgacggggcagctagtatttttcttgactcggctattaaagtatgctcccagaaccaactaagtaatatgaaaacagaggctcaggcaaaaacatgagatgaagatcagagctggagctatgcaaaaataagaagtaacttcaacttagttggtgactgaatttaactataagacagaaaaggacaagcaaatagttttagatcattggggggaagataaaattaaataaagggattatatatgttgtatacttagatcaaaatatctcatataccccgtaaatatgtatacctactctatatccacaaaaattaaaaataactttaaaaaattaaataaagaaccatgcctacagctctataaaaataatgaaccattagaataagagtccaagattttataaataaatagaacttaaatatgtgtccctttttttaggacaaaaaggacagcgtcctctaaattattcaactatttagaaaagaaaagattaaaaataatgtcaaattgtcattgatattctgattttgacctctattagagtgctacctgttagacaaccaaagaaatgtatttgacagcactttgcaaaatacagaaaaatgtacaatttgtcactgaagcattatcatttacatcgttataaagatgccaactatgtttaaaagtatttaccatgctttgaaagctctttctccaaatttttggagactggcacacttgagtctctgtttggcagacgaagccttcccttcatcccgaagttcatcgagctacaaaaaggaataatttgatgaaaattagaagaaaaattctacatgaaacacccctccataagctcagatgagactgtgccaaattaaattttgaaggcataatttatgcctaaattcccaagtactccctttagcgaataatgattttgctctctaagaaaaggaaagatcattcgatcattctggtcacagcggaattccctatgtagttagaaaccaactggaaacattgccaggaaaaagagccttaaaagtgggagaaaagtcagagaaagagtacgctaatatcccaggggctgcaattttgctaatttttaaattttgtgtataattcatttcagtctctcctccaccaacatcagtaaactcctcagaaaagaaaataaagcattccataatatatatttatggaatgaatgcatgaactcaggcatctagatgcagtaaaattctctactttgaattccctccctactaaaaattatcatgaaaagataaacaagaactgtgtccccttgctgtgcaatttgacaaacaagtttcagtatttcactatagtgatcaccagcagaaaaagtggtgaaatctttaaacacatgcacagtgattacctctgacagatcagcattggcaaatcttaaaagaagaaacgagagtgtaggccttcaaagatgaaagattttcaagacagataaaaggaaggcttttttgaccatgtgggaaagtttgtatcagacactcagggtccctaaatctagccacaaaatggacaaaatcaggttggataataaactctttttttctattcgtgtgcataatacctttggcaacaggcaggcagctttatcagcagcttggcaacattctgtaaaagcagctttataccttttagcaaagaaaaggagttccggggcataaaagtaaggatgtcttctggcaatttcatataagtatctaaattttaaaaaagaaaaacagtcacttttctatagcagacaatattacagaaataattgtaatcgacattctccccagaacctccaaattccaaagatatctaattaaccaattaagctcaatttgcacatgatggtcttgtctctgtcattctttaagtatgtggaaaaaagggttaagtgtgtgtgtgtgtgtgtgtgtgtgcataaatggttaaattttggcaatataatgttgctgactaaaacgaaatcaattataacaaccatatatacatatctgcggaatacattaaagaatttgtctatcttaaatttttgagaaagattgtatcctgtttcaataaacttcaaaatatctttgatcatattttttgctgtgtagaattttgtggtatcaaatactacttctttaaaaaatcatcataacaaaacttccaagtcttaatgttgaaaatatttttgttatggtaatttttatagagtgttggcctatggagttactccatgctttttaattttgaactataaacatctgattacttactttttcaaaaatgtctctccattgtcatgaaaagcagtgcacatcacatcaacctctggtctcaccaatcgggggaggtttgggttgtcatctttgtgttgcaagaagcattcatttctctcaggttcttgttttgcacagcagtcagccatttcaccataggtttcacgaagagttgcaactgtgcataatttgtctccaaaaagggtatgctaaatggaagaaagctaggtttcagttgctggacagtaccttttttctttatagccaaagaacagtacaaaggatttaatatactggttaagcttggtcaggaaatcatttaaaaatccgcttcccctcccaatcgttggtttacagtttctgatgatttaaccatctctatataattttcataagaattaactgtcacactataactcatggtgaataaaacaggacaaaaagacagtcaatagctttaaggaaagttatatgactcctattttgaaacttaaaactaaagggtaagagcaatcattataacagaaatcaagagaaaataagcttctaagcagcaggtgaattcacctaggggagaaaaacattcagagagtttctcatttcatttgccccctttttagagggccatgttttaatatatgccattgaaaactgaggagtaacacaatccatcatagattaagtgactattaagatatagagatttttcttccagaaatgttacctaaaatcactttccaataaatgagtcctttccttatctctaatttttattatgaaagtaatcgtaaccccagggaaaatatactactctagacbgaatttattaatttttatgtatttttaagatttcatatgtagagccatagtattgtgtaaagttaaagtcctgactctgctgtgagggagaggtacataataaaaaggggaaaggctccagtgataaaaactggccttgcccacaagaggtatatatagattgagtggtgagagaaagataaacctgtccttgttttgaagattgatctggaaatactaaaagtttaaagttcttcaacatgactaagtactctgcttttttattgtatgtagaaatacaaagatatctaaaatgaggaatatatagctgtactattattccacccaggtaacaaaattagcatagaaatcagtgggtgttttctgatgataaaaaccatgatatcatctctaagagatagtagctctcctgtgttcattgcaacactattcatgatagtcaagatgtagaaaaccaacctaaatgtctatcaatcaacaaattaatggataaagaaaatgtggtacacacatgcactggaatattattcagccttgaaaagaaggaaattctgcaataggcaacaacatggttggactttgaatgcactatgctaagggaaataagtcagtcataaaaagataaacagtacataataccacttatataaggtagctaaagtagtcaaactcatagaatcaaagagtataatgctggttgccagtggctgggggaggacgaaacgaggggttactaatcaatgggcacaaagttttaatacagcaagatgagtaagctatacaacagtgtacccgtagttaacaataatggattgtacacttaaaaatataacagggtagatctcatgttaagggttcttactataataaaataagataaataaataaataaatacatgctatcatatccctattagcctctacaaaaagaaaccaaacctcaaattttaaaaagaggtgtttataaatgacaaattgccatttaaatacaccatgactgttgtgtttggtctcaataaagaaatgattttaaaactgtggacatagctaaagcatctctatcacaaaagaaacaatggcttatcagtctatgagcaactttttagtgtttcttacaaatcaggacacttaataataattgagaaaacttaaaaaaaattcctttgaaatgcttgggattacttcaaacagaagaaagaatctccacaattagaatgtacttacaagtgatttgtcacaattttcagctgactcatcagcaacacatgtttttgcaaattcagttacttcattcactaatttttacatgatcttcaaatggacactgctgaagatactgagcaaaggcaatcaacaccctgaaacaaaggatgtagaaaaatgtagtataataaaactttaatatgtaacaggttgctacgctagagaacaaatcatgtatgggtataggttctatcttttatacatcttcttcaccattatccagaaagcctattcatatcaggtatgatctgaggcctagataggcatatgtggcttcctacgcaaagagaatggtagttccctaatgtttatatgtatgcgtgtgtcagtagatctatgcacacacatagattaagcaagcaaattgtatgccaaatagatctaattgtcaagactaggcatttttaaagtccttagaattacttaaaactaaaacaaaccccacagatttcctttttcttttttgagacggagtctcactctgttgcccaggctggagtgcagtggcgtgattttggctcactgcaacttctacctcccaggttcaagcgattctcttgcctcagcctcctgagtagctgagattacaggcatgtgccaccatgcccggataatttttgtatttttagtagagacggggtttcaccgtgttggtcaggctggtcttgtactcctgggctcaagcaatcctcctgcatcagccttccaaagtgctgggattacaggtgtgaaccaccgcacctgatccccacacacgtctttaattagcctgtaggattaggtagacttttaaaaaaacaattttctcattttttactagattaaaaaacatttaaataggccgggtgtggtggctcacacctataatcccagcactttgggaggctgaggcaggcggatcacttgaagtcaggagttcgagaccagccttggccaacatagtgaaaccctgtctctactaaaaaatacaaaaaaatattggccgggcgtggtcgcgggcgcctgtaatcccagctactccgggaggttgaggcgggagaatcgcttgaacccaggaggcggagcttgcagtgagccgagattgcgccattgcagtccgcagtccggcctgggcgacagagcgtgagactccatctcaaaaaaaaaataaatagctggatgcaggccgggcgcggtggctcactcctgtaatcccagcactttgggaggccgaggcgggcagatcacctgaggtcgggagtttgagaccagcctggccaatatggtgaaaccccatctctactaaaaatacaaaaattaggcaggcgtggtggcaggcgcctgaaatctcagctacttcgggaggctgaggcaggagaatcgcttgaacctgggaggcagtttgcagtgagccgacatcgtgcaactgcactccagcctggcaacagagcgagacttcatctcaaaaaaa

SEQ ID NO: 7435 - DNA, 340 bp, Homo sapiens
  SIMILAR (10)..(177): 751254mologous to Homo sapiens BAT5,accession number AF129756,Smith-Waterman Score=214.
ggcacgagcttctacttgtacaggaaaggttacttgagtttgtccaaagtggtgccgttttctcactatgctgggacattgctgctacttctggcacgtgtggcctgcctcctaggcattgtccgctgggcctacccccacttcccgcagtttctcgccatctcctctccgatccatctctacctgacgtcataactctatatgcatgttatgcggtccatcttagtcttctaaaaaggccattttagcttacctgccatcaagctatacatgtggaaatatacactgtattattttccctttccaggtgattacttacctcatctgttcttatatctgc

SEQ ID NO: 7436 - DNA, 346 bp, Homo sapiens
gtggcagccgagataccggctctgaactggaaccagaatgggctatgcctcagaccaggccacacagggccccttgagagcccggcttccccacggcccccaggctgtggggacaggcctgccacagacttcctggccagaggtgtggctgggtgccatggtagggaaagacagccagacattgggggccatggtgcggcccggccaccgcagtctaaatcgccttgggggtgcgtttctgccaactgtggtgctggccattcatgccgtctctcaggctgtcgggccctgccctgcctgactcctggctcttggagctggagaaaggactctcagatctcgtgcc

SEQ ID NO: 7437 - DNA, 610 bp, Homo sapiens
  SIMILAR (3)..(518): 991254mologous to Homo sapiens m6A methyltransferase,accession number AF014837,Smith-Waterman Score= 931.
ccctgacagatgatgagatgcgcaggctcaacatacccgtactacaggatgatggctttctcttcctctgggtcacaggcagggccatggagttggggagagaatgtctaaatctctgggggtatgaacgggtagatgaaattatttgggtgaagacaaatcaactgcaacgcatcattcggacaggccgtacaggtcactggttgaaccatgggaaggaacactgcttggttggtgtcaaaggaaatccccaaggcttcaaccagggtctggattgtgatgtgatcgtagctgaggttcgttccaccagtcataaaccagatgaaatctatggcatgattgaaagactatctcctggcactcgcacgattgagttatttggacgaccacacaatgtgcaacccaactggatcacccttggaaaccaactggatgggatccacctactagacccagatgtggttgcacggttcaagcaaaggtacccagatggtatcatctctaaacctaagaatttatagaagcacttccttacagagctaagaatccatagccatggctcttgtagctaaaccctaagagtgatatttgtacaatagctttcttcttt

SEQ ID NO: 7438 - DNA, 975 bp, Homo sapiens
  SIMILAR (347)..(430): 611254mologous to Homo sapiens m6A methyltransferase,accession number AF014837,Smith-Waterman Score= 81.
cacatggaactgccctatgggaccctgacagatgatgagatgcgcaggctcaacatacccgtactacaggatgatggctttctcttcctctgggtcacaggcagggccatggagttggggagagaatgtctaaacctctgggggtatgaacgggtagatgaaattatttgggtgaagacaaatcaactgcaacgcatcattcggacaggccgtacaggtcactggttgaaccatgggaaggaacactgcttggtgagcagcagtggggcccaattcaataggtggagcacaaagaagaatcatttgatttcttactgagaaaaagttcaaaggtgtggtttcataaggtaatctgttatcctgtggtgagcaggttggtgtcaaagaaaatccccaaggcttcaaccagggtctggatttgtgatgtgatcgtagctgaggtatgtgcttctcaggcctccaaagcttccacatttttgttgggtatcagttattcatggttgggtgtattctcatccccagattttttctcatttagatcataaacataataggaaaggggctaggaattgcaatcttgtgtaacttaaaaaagcagctagtttttatttcctaggttcgttccaccagtcataaaccagatgaaatctatgggcatgattgaaagactatctcctgggcactcgcaagattgagttatttggacgaccacacaatgtgcaacccaactggatcacccttggaaaccaactggatgggatccacctactagacccagatgtggttgcacggttcaagcaaaggtacccagatggtatcatctctaaacctaagaatttatagaagcacttccttacagagctaagaatccatagccatggcttctgtaagctaaacctgaagagtgatatttgtacaatagctttcttctttatttaaataaacatttgtattgtaaaaaaaaaaaaaaaaaaa

SEQ ID NO: 7439 - DNA, 323 bp, Homo sapiens
ggcacgagataggctgagagtacctgtccgtattacaacgggactcctggctcaggaaggaggcctcctgtgcctctaccacctttcctatggggtggccccctgtcctccctgaggtcccactaccagcacccctccccatactgcaggcttgctggatctggcaatgcagatgggtggccggttcctgctgtgcctgatcctgggatcaggtggcatgcacaggctctgcggcattcatctccttgtctcacgctgcaaccacagctcctgtacccgctgatcctgtggcaagccacgtacgctcgagacgccctcgccct

SEQ ID NO: 7440 - DNA, 336 bp, Homo sapiens
  SIMILAR (3)..(188): 871254mologous to Homo sapiens gpStaf50,accession number X82200,Smith-Waterman Score=302.
cacaggaggggcagaagagagatgtctgtgagcaccacggaaaaaaactccagatcttctgtaaggaggatggaaaagtcatttgctgggtttgtgaactgtctcaggaacaccaaggtcaccaaacattccgcataaacgaggtggtcaaggaatgtcaggtaggctccaagatagaggaagagagagcagagagcagaagatggtacctaatgtgaaatctccactttttttgtcctgctttattccccttgtcaccatagaacggagagccctgtgatctctttccatactctttgcttagtttctgatgcctgaaggacactgcctcgtgcc

SEQ ID NO: 7441 - DNA, 2100 bp, Homo sapiens
ctcgctgcatgcaattcgacgccatgctcttgtagctgaaggaagacatgtgataagtgattaacctggcctgaggatgatgtgactcttatactgacaggccttcccttaaaacatcttaagacctatatatctatctgtcgaactgaaatttactaacagagggaatttgaattggaatttacttccagctgcactcatgcttgaatttgcgaagtatactaataaataacaataggctcattgaggagagccttgtactcagcaagagtggctaacattagagcatacagactatgtgattgtataaggcatggagagttaaacaacctccagtcagctgcctgtttgaataccactgacttgttaagaatgatcttgcttttagattttaccatattcaaacttattaggtgagccttatatagcatatatacctggctgctattgtggggtttgggaacatgaggggtggggtgaactgttgttgttttaggtttcagtcagacagacatccctgtgcctcagttcccagaagcacagcatgcctctaggagcatccgtgggaacggcgcagtcctgacatcaccaactctcctgctcaggctcatcccatatacagaggtcaaagggtggggtttgagatcgggggaaggaatgagaaagtagaagcaatgtcacttcagtgccactgttgactagtctttggtgcttatgtcagtatttgttttatttcctgatttttttaaagttggcaaaactacatatttttatcttgatgaaggcagtgggagggtggaacaaaaacaagccattactgctatttctagttcatttactggagactgtcccttaatagctaatgtagaataaatttgaaacatagacctagatgacaaaaagaatgggaatagaaatgaatctcagggatttgaacaaacagaagacgtttatgctgtgttgatgcccagttctacaactgctattacatttgtcattctgtctccccttttcccctaattcttttatgtatgtatgtatacagtttgaggaaatgtgcatttatggtcagtcctttttaaaagacttaatgaatttattactcttttgcaaaaaatatacccactgcttatatgggcatacaaaggctaccctatttttaaatgtaggggggcgaatgggtccgtgttttaatgtattcagagccattgggcaataagcagtccagaacatttgaaaactcaagcaggtaaagcacctaacaccccctagtttctagaattactttaaaaaacttttatattgctgcatcttccacagttctttggggtagtctctgaacttaaaatttgtaggagttgtagactacctaaatttttaagttatggtatttgttcataggttgtaggggtaggtaaagaaggaaacagacaagaaaatggcttcttgaggtggcagctgctgagtggctaaatcttaccactttctttctactttttttggaaattttcccagcttagcatgaacatggatcatacagtgtttgattttatgtgattgagattttttgttttttatttttggagggaaggtcttgggagaaacattaaaaagttggtgtatgtgccaaaaatacgaaattgttaaacaaagggaattttttcttatttaatctgaatggttaagcaagaacttttttctatatacccctttctgctgcagcagacaactaaaactgggtaggtgggcagcaggagggaagggaattctttcaggtttgatgggctactgacttaaagtctgcatagggagaagagatagagcctgacatacccaagttgaagccagggggacaaaaatgggaaacaggactaagattcctgcattttgactctaaatggttcttttgaagtaaccagtgatcttttttgcttaccctcatcaacagaatggatgaagatagatttgactgtgtgctttttcaagtggagaatatgaatatacagaacaagaaagcaataactccaacctgtttgattccgtctgttttctaaataaagacactttgcgctggaaataacataaaaaaaaaaaaaaaaa

SEQ ID NO: 7442 - DNA, 332 bp, Homo sapiens
  SIMILAR (9)..(332): 761254mologous to Homo sapiens Mature HSA,accession number A15293,Smith-Waterman Score=420.
ggcacgaggatgaatttaaacctcttgtgggagatcctcataatttaatggatcccaatcgtgagctttttgatcagctcggagagtacaaattccagaatgcgctattatttcattacaccaagacagtaccccacgtgtcgactccaactcttgtagaggtctcaagaaacctacgaaaagtgggcagcacatgttggaaacatcctgaatcaaaaagaatgccctgtgctgaatactatctatccgcggtcctgatccacttatgtgtgctgcatgagaacacgctcttccgtgacagagtcatcaaatgctgcacagaatccttggtg

SEQ ID NO: 7443 - DNA, 1434 bp, Homo sapiens; identical to SEQ ID NO: 1629
  SIMILAR (630)..(668): 921254mologous to Homo sapiens peroxisomal short-chain alcohol dehydrogenase,accession number BC003019,Smith-Waterman Score=60.

SEQ ID NO: 7444 - DNA, 471 bp, Homo sapiens; identical to SEQ ID NO: 1631

SEQ ID NO: 7445 - DNA, 1603 bp, Homo sapiens
  SIMILAR (46)..(333): 1001254mologous to Homo sapiens peroxisomal short-chain alcohol dehydrogenase,accession number BC003019,Smith-Waterman Score=482.
tgcaggaattcggcacgagggaacccatacttgctggtctgatccatgcacaaggcggggctgctaggcctctgtgcccgggcttggaattcggtgcggatggccagctccgggatgacccgccgggacccgctcgcaaataaggtggccctggtaacggcctccaccgacgggatcggcttcgccatcgcccggcgtttggcccaggacggggcccatgtggtcgtcagcagccggaagcagcagaatgtggaccaggcggtggccacgctgcagggggaggggctgagcgtgacgggcaccgtgtgccatgtggggaaggcggaggaccggggagcggctggtggccacggctgtgaagcttcatggaggtatcgatatcctagtctccaatgctgctgtcaaccctttctttggaagcataatggatgtcactgaggaggtgtgggacaagactctggacattaatgtgaaggccccagccctgatgacaaaggcagtggtgccagaaatggagaaacgaggaggcggctcagtggtgatcgtgtcttccatagcagccttcagtccatctcctggcttcagtccttacaatgtcagtaaaacagtcttgctgggcctgaccaagaccctggccatagagctggccccaaggaacattagggtgaactgcctagcacctggacttatcaagactagctttcagcaggatgctctgggatggacaaggaaaaagaggaaagcatgaaagaaaccctgcggagtaagaaggttaggcgagccagaggattgtgctggcatcgtgtctttcctgtgctctgaagatgccagctacatcactggggaaacagtggtgaacttgagcgtgatgttcacgggtggaggtgtctgcagagctgccagctggaaggaaggtggcacgggaactcccaggacgccacgggaatccccgaggcagcgcgagcccggagagaatcaggccaggtcctctccccgcatggccctacgacccgagttccctcccgagtcagcaagtacaagctggatgggtcctgagccggtggggaatagagaaaggccctgcaagccggcaagaaaggtcggcgccagcccgcgggctctcaggaggctcggcagcgcgacgcgcatgctcagtcgggcagctctccgggccggcgtgggagcccgcgctccaaggcccggtggggggaggggcgctcacgcaaccgccactgtctggagcgggctcgcctctgcggcagccctcaccgcccgggctttactgaagcggagtctagcatgtgcggctgctccacagcggtgtgggtggcggcggctcctctgcagcagcctcggcagtaggggtcagggtggccaagcccaccgtggagctcatctgagagttgtaaggtacgggactgcctcggtctttgggacgccccgtctggtagcatcccagatccagcacgttccttccggccctgcaccccggcccggtgcctcacaccccgctaccccaagcatccagactctaaggcagcccctgcatctcagtcctgacatcgctgtccctggagcatcctccgctggagctggagcttga

SEQ ID NO: 7446 - DNA, 357 bp, Homo sapiens
  SIMILAR (8)..(118): 751254mologous to Homo sapiens The KIAA0142 gene is related to human KIAA0006 gene,accession number D63476,Smith-Waterman Score =157.
  misc_feature (1)...(357): n = a,t,c or g
tgcacgagacaaccagcatgatctgcaagaatgggaggagcacctacaggagcatacgaatgtcacgtgggtgggaaaccccaccataaagcctcattcattgccatctcataccgtatggacttggtgcttctcctgctttcatactccatgcgtggcttaccgtggctgaactgtcaacaagttatcaattgctttaaaacctaatcaatatttggataataagtgcagaacacttgcttcacatttctctgcacatctttgtccctcttcatgcagcatcgaatttgtttccaatgagtgttctctagaaacaacccttaattatgcctactcacgcacagttcagaggtgctn

SEQ ID NO: 7447 - DNA, 823 bp, Homo sapiens
  SIMILAR (459)..(821): 331254mologous to Drosophila melanogaster CG2162 gene product,accession number AE003476,Smith-Waterman Score=183.
ataagccatgtatgatggacactacaggtatgtcctgtagtgatcatgtaactgttgatagcccttatgtagttgcagttagaatagctgatgagacctctattaatacacgaagtttctcaaagtttgtaggaatgagtgcagatgcaacccctcttcatgtagctagaagtgggaatgacactgaagatttcagcaacccttctgcttgctcagatatttatggtgagagtatttcatctcattttacagagtcaacaggaaagttgatagagagcttgtcagattgtgcttcctccttacctataaaaaagattgctggtagtaattataacacttttttggactctgaactcagtatgttaaatgggacaaaagttctttcagacagtgccgtgggcattgacctgggtagtactggtgatacaacagaagcattgcacgaactaagaactgccgaagagttcaaaacagaagagcaagatgcctcagggagtatagaatttggtgtatcttttcctgatagggaatcatcatctatggaaacatccatcgaaccaaaagcaactgaaacttctcgcacagagggaattactgccattgaggagagctgggagtctatgtttaacgatgatggtgactgcctggatccacgtcttctacaagagttatcagggaataccaagagcagagagagcatccaggaacctagatctgattactacaatcatgaagttcctgatattgacctcagtgattgtgaattcccacatgtcattgaaatttatgactttccccaagaatttcgtactgaagaccttct

SEQ ID NO: 7448 - DNA, 533 bp, Homo sapiens; identical to SEQ ID NO: 2433
  SIMILAR (346)..(444): 931254mologous to Homo sapiens CGI-07 protein,accession number AF132941,Smith-Waterman Score=161.

SEQ ID NO: 7449 - DNA, 493 bp, Homo sapiens
  SIMILAR (31)..(75): 601254mologous to Homo sapiens Human myelin oligodendrocyte glycoprotein gene,accession number AAZ29204,Smith-Waterman Score= 49.
gagatgggggtctcactgtgttgccaggctggagtgcagtggcgtgatctcagctcactggagccttgacgtccccagctaattttggatttttagtagagatggggtttcgccttgttgcccaggctggtctcaaactcctaagctcaagtgatctgcctacctcagccttccaaagtgttgggattacaggcatgagccaccgtgcctggctgcatgttttctaacctaatgtaattcaaggaaaagtttgtaattaagctttcttccagaaaatacctgaagagttcaacctgggttactactgctcagaggagcccgagggtgaaagccaccagtgagcatgtggtaaaggctttattctttgatatgataactttattagctggtgttcttgttcactgctactgtagctccagatttccaccatttcccatcagcactctcaggcgttagcctccactgaacatccacttagaaattaaacaatggg

SEQ ID NO: 7450 - DNA, 391 bp, Homo sapiens
catatataaaccgctttgcaaaaagagagtgtatggaataaaagagaaaatgaagaagaggagaaaggctggagtgcagtggtgtgatctcggctcactgcagcctcaacctccctggctcaggtgattctcccgcctcagcttcctgattagctgggattacagtaatggtgaaattgccggtaatcgctaagtaaaaactactgaagaacaggacagaagccaatgaccacctcacctccaccgagtgccctgcagaaaaaggaaatggaaatccttcctgttattctccgcgtcccttcgtagaagactgcctgagaggtcagcacaggagtcctctaagtgccctgcagagaacacgggtctcggagcccggacaaacctaaatttt

SEQ ID NO: 7451 - DNA, 1563 bp, Homo sapiens
  SIMILAR (511)..(1560): 1001254mologous to Homo sapiens CGI-07 protein,accession number AF132941,Smith-Waterman Score=1842.
gatcttctctgtggcggagacagccagaacttaaggcatacagaacgatggagtatatggcagaatccaccgaccgcagccctggacacatcttgtgctgtgagtgtggtgttccgataagtccaaatcctgccaatatttgtgtggcctgtttgcgaagtaaagtggacatcagccaaggtattccgaaacaagtctcgatttcgttctgcaaacaatgtcaaaggtattttcaaccaccaggaacttggatacagtgtgctttagaatccagggaacttcttgctttgtgcttgaaaaaaatcaaagcccctctgagtaaggtacggcttgtagatgcaggctttgtttggactgagcctcattctaagagacttaaagttaaactgactattcagaaagaggtgatgaatggtgctatccttcaacaagtgtttgtggtggattatgttgtgcagtcccaaatgtgtggagatggccatgagagtgagaagctgaaggatttctggaaaggctgtgattcaagtgaggcaaaagactttgcataaaaaaactttctactatctggaacagttaattctgaaatatggaatgcatcagaatacacttcgtatcaaagagattcatgatggtctggatttttattattcctcaaaacaacatgctcagaagatggtcgaatttcttcagtgtacagttccctgtagatacaaagcatcacaaagactgatctctcaagatatccatagtaacacatacaattacaaaagcactttttctgtggaaattgttccaatatgcaaggataatgttgtctgtctgtctccaaaactggcacaaagcctgggaaatatgaaccagatttgtgtgtgtattcgagtaaccagtgccattcacctcattgatccaaacaccctacaagtggcagatattgatgggagcactttctggagtcaccctttcaatagtttatgtcatcccaaacagctagaggagtttattgtgatagaatgcagcatagtccaagatataaaacgtgctgcaggtgctggaatgatatcaaaaaagcataccctcggggaagtctgggtacagaagacatctgaaatgaatacagataaacagtatttttgtcgtactcatttgggacatcttctaaatcccggagacctggtgttagggtttgatttggccaactgtaacttaaatgatgagcatgtcaacaaaatgaactcagatagagttccagatgtggtattaatcaagaagagctatgaccggaccaaacgtcagcgtcgtagaaactggaaattgaaagagcttgcaagagagagagaaaacatggatacagatgatgaaaggcaataccaagattttcttgaagatcttgaagaagatgaggcaattcgaaaaaatgtcaacatttacagagattcagccatccctgtggaaagtgacaccgatgatgaaggagcacctcgaattagtctggctgagatgcttgaagaccttcatatttcccaagatgccactggtgaagaaggtgcatcaatgctgacataa

SEQ ID NO: 7452 - DNA, 330 bp, Homo sapiens
  SIMILAR (10)..(165): 861254mologous to Oryctolagus cuniculus RING-finger binding protein,accession number AF236061,Smith-Waterman Score=231.
ggcacgagcattagtaaaaaccgcctcttaagtattaaaacatttctttattggaccatcctgggcttcagtcatgcctttattttcttttttggatcctatttactaatagggaaagatacatctctgcttggaaatggtcagatgttccgaaactgcacatttgacgcttaggggatatcaccgtctggtgtttcatgactagtcattttgcagatacagcggttaattttgtcaatcacatgatcgtttgtcgctgcgcacctcacgtgtctaattttttcgacaactgtagtactgatacccctttaacggcttcttgccgtcacg

SEQ ID NO: 7453 - DNA, 659 bp, Homo sapiens; identical to SEQ ID NO: 5109
  SIMILAR (128)..(3): 831254mologous to Homo sapiens immunoglobulin lambda light chain,accession number X57810,Smith-Waterman Score=171.
  misc_feature (1)...(659): n = a,t,c or g

SEQ ID NO: 7454 - DNA, 777 bp, Homo sapiens
  SIMILAR (125)..(60): 811254mologous to Homo sapiens Human immune system associated protein HISAP-10,accession number AAB36212,Smith-Waterman Score= 94.
  misc_feature (1)...(777): n = a,t,c or g
gtcctccgatcataagtctgaaatcccgggccgcttcaacgggttaaaaccttatgaacatctgtaggggcccctgtcttctccccggtgctcccttcatgcgtgacctggcagctgtagctttgtgggacttccacggtcaggcgtcaggctcaggtagctgctggccgcgtacttgttgttgctttgtttgaagggtgtggtggtctccactncccgccttgacggggctgctatctgccttccaggccactgtcacggctcccgggtagaagtcacttatgagacnccccagtgtggccttgttggcttgaagctcctcagaggagggcgggaacagagtgacgaagggggcagccttgggctgacctaggacgctcagcttggtcccggcgccgaacacccagagattagagccgcctgtgaatgaactgcagtaataatcagcctcgtcctcagcctggagcccagagatggtcagggaggccgtgttgccagactgggagccagagaagcgattggaaacccctgacggccgatcactgacatcaaaaatcaagagtttgggggctttgccggggtgctgttggtgccaggagacatagtgataaccaccaacgccagtgcaggagatggtgatcgactgtccaggagacccagacacggaggcaggctgagtcagggcagactgggcccaggacgctgtgccctgagtgaggagggtgaggaacagcagagcccaggccatggtggagacgtcccgagagcgctgcgtcg

SEQ ID NO: 7455 - DNA, 677 bp, Homo sapiens
  SIMILAR (641)..(3): 831254mologous to Homo sapiens immunoglobulin lambda light chain,accession number X57821,Smith-Waterman Score=920.
tggcagctgaagcttctgtgggacttcactgctcaggcgtcaggctcagatagctgctggccgcgtactttgttgttgctttgtttggagggtgtggtggtctccactcccgccttgacggggctgctatctgccttccaggccactgtcacggctcccgggtagaagtcacttatgagacacaccagtgtggccttgttggcttgaagctcctcagaggagggcgggaacagagtgaccgagggggcagccttgggctgacctaggacggtcagcttggtccctccgccgaagactatacgatcagtagttgcccacacctgacaggaatagtcggcctcatccccggcctcgactccgctgatggtcagggtggccgtgttcccagacttggagccagagaatcggtcagagatacctgagggccggtgactatcatcatagacgaccagcataggggcctggcctgacttctgctggtaccactgcacattctcagttccaagattgtctcccccacaggttatgctggccgtctttcctggggccactgacaccgagggtggctgagtcagcacataagaagtcacagagcctgtgcagtgagagaggagaccgaggaggagaacggtccaggccatggctgaggcacgcgcagtgcgaattacaccacgctc

SEQ ID NO: 7456 - DNA, 684 bp, Homo sapiens
  SIMILAR (18)..(662): 691254mologous to Homo sapiens immunoglobulin lambda light chain,accession number D01059,Smith-Waterman Score=712.
agtgtggtgtaattcccatggcctggaccccactcctcctcctcttccctctcctcctccactgcacagggtctctctcccagcctgtgctgactcagtcatcctctgcctctgcttccctgggatcctcggtcaggctcacctgcactctgagcagtggacacagttggtactacatcgcgtggcatcagcaacaggcaggaaaggcccctcggtacttgatgaggcttgaacgtagtggaagctactacaaggggagcggagttcctgatcgcttctctggctccagctctggggctgactgctacctcaccatctccaacctccagtctgaggatgaggctgattattactgtgagacttgggacactgacactctggtgttcggcggagggaccaagctgaccgtcctaagtcagcccaaggctgccccctcggtcactctgttcccgccctcctctgaggagcttcaagccaacaaggccacactggtgtgtctcataagtgacttctacccgggagccgtgacagtggcctggaaggcagatagcagccccgtcaaggcgggagtggagaccaccacaccctcccaacaaagcaacaacaagtacgcggcgcagcagctatctgagcctgacgccctgaacagtggaaggtcccacaaaaagctacagctgccaagca

SEQ ID NO: 7457 - DNA, 683 bp, Homo sapiens
  SIMILAR (654)..(133): 751254mologous to Homo sapiens immunoglobulin lambda light chain,accession number X57818,Smith-Waterman Score=677.
gggatcccttcaagggttgcctgggcaaagctttagttttggtgggcttccactgctcgggcgtcaggtcagggtagctgctggccgcgtacttgttggttgctctgtttggagggtttggtggtctccactcccgcccttgacggggctgccatctgccttccaggccactgtcacagctcccgggtagaagtcactgatcagacacactagtgtggccttgttggcttggagctcctcagaggagggcgggaacagagtgacagtggggttggccttgggctgactcaggacggtgaccttcgttccacgtccgaagacaaagtctgctgattgacaataatagtcagcctcgtctgctgcctggacttcactgatggtcaatgtgacagttgtgcctgaactggagccagagaatcggtcggggatccctgagggcctctcagtgtctctataaatcaataatataggggcctggcctgacttgtgttgataccacgaaacaaattgctttgacaaaacatctccagagcaaaagatcctggccgtctgtcctggggacactgacaccgagggtggctgtgtcaattcatcggaggcctcagagcctgtgtagagagtgaggagggggagaagtagagggatccaggccatggtgagacacccaggaattccaccacact

SEQ ID NO: 7458 - DNA, 739 bp, Homo sapiens
  SIMILAR (653)..(733): 921254mologous to Homo sapiens lambda-chain precursor (AA -20 to 215),accession number X14583,Smith-Waterman Score=137.
gcgtggaattcctcgggacaatcttcatcatgacctgctcccctctcctcctcacccttctcattcactgcacagggtcctgggcccattctgtattgacgcagccgccctcagtgtctgcggccccaggacagcaaatcaccatctcctgctctggaagtagactcaacgttggaaattattttgtctcctggtaccaacaactcccaggcacagcccccaagattctcatttatgacaatgataagcgaccctcaggtgttcctgcccgattttctggctccaagtccggcacgtcagccaccctggccatcaccggactccagactggggacgaggccaactactactgcggagcatgggacacaagcctggataattgggtgttcggcggggggaccgaggtgaccgtcctaggtcagcccaaggctgccccctcggtcactctgttcccgccctcctctgaggagcttcaggccaacaaggccacactggtgtgtctcataagtgacttctacccgggagccgtgacagtggcctggaaggcagatagcagccccgtcaaggcgggagtggagaccaccacaccctccaaacaaagcaacaacaagtacgcggccagcagctatctgagcctgacgcctgagcagtgaagtcccacagaaactacagctgccaggtcacgcatgaagggagcaccgtggagaagacagtggcccctgcagaatgttcataggtt

SEQ ID NO: 7459 - DNA, 862 bp, Homo sapiens
  SIMILAR (862)..(155): 871254mologous to Homo sapiens immunoglobulin lambda- chain,accession number M87790,Smith-Waterman Score=1074.
cgacttttttttttgattgacaatgagaatatttattgagggtttattgagtgcagggagaagggcttgatgccttggggtgggaggagagacccctcccctgggatcctgcagctctagtctcccgtggtggggggtgagggatgagaacctatgaacattctgtaggggccactgtcttctccacggtgctcccttcatgcgtgacctggcagctgtagcttttgtgggacttccactgctcaggcgtcaggctcaggtagctgctggccgcgtacttgttgttgctctgtttggagggtttggtggtctccactcccgccttgacggggctgccatctgccttccaggccactgtcacagctcccgggtagaagtcactgatcagacacactagtgtggccttgttggcttggagctcctcagaggagggcgggaacagagtgacagtggggttggccttgggctgacctaggacggtgaccttggtcccacttccgaagattcgaagggcgctactaccagcaaacgagcagcagtaataatcagcctcgtcgtcagcctggagcccagagattgtcagggaggccgtgttggcagacatggagccagagaagcgatcataaacccttgagggccgcttagagccctcataatggatgagtttgggggccttgtcggggtgttgctcataccaagagacaagggtatagctcccaacatcactgttggctccagtgcaggagatggtgatcgactgtccaggagacccagacacggaggcaggctgagtcagggcagactgggcccaggaccctgtgccctgagtgaggagggtgaggaatagcagagcccaggccat

SEQ ID NO: 7460 - DNA, 1974 bp, Homo sapiens
  SIMILAR (513)..(965): 681254mologous to Homo sapiens immunoglobulin lambda light chain,accession number X57820,Smith-Waterman Score=491.
ggtggaattcctggggagtctgcaccatggcctggaccccactcctcctcctcttccctctcctcctccactgcacagggtctctctcccagcctgtgctgactcaatcatcctctgcctctgcttccctgggatcctcggtcacgctcacctgcactctgagcagtggacacagtgactacatcatcgcgtggcatcagcagctgccagggaaggcccctcgttctttgatgaaggttgaaggtgacgggagctacaagacggggcgcggagttcctgatcgcttctcaggctccagctctggggctaaccgctacctctccatctccaatttccagtctgaggatgaggctgactattactgtcaggcgtgggacagcagcactgcacacagtgacacaggcagatgcggaatagtgggaagaccccctgtcaggcagtgctggcccctgctgctgctgggtctggccatggtcgcccatggcctgctgcgcccaatggttgcaccgcaaagcggggacccagaccctggagcctcagttggaagcagccgatccagcctgcggagcctgtggggcaggctcctgctccagcccagcccccagagagcagaccccaggtgctggccccgggggttttggtctgagcctcagtcactgtgttatgtcttcggaactgggaccaaggtcaccgtcctaggtcagcccaaggccaaccccactgtcactctgttcccgccctcctctgaggagctccaagccaacaaggccacactagtgtgtctgatcagtgacttctacccgggagctgtgacagtggcctggaaggcagatggcagccccgtcaaggcgggagtggagaccaccaaaccctccaaacagagcaacaacaagtacgcggccagcagctacctgagcctgacgcccgagcagtggaagtcccacagaagctacagctgccagctgcagtgggggctggggctaggggcatcccagggagggtttttgtatgagcctgtgtcacagtgtgtggtattcggcggagggaccaagctgaccgtcctaggtcagcccaaggctgccccctcggtcactctgttcccgccctcctctgaggagcttcaagccaacaaggccacactggtgtgtctcataagtgacttctacccgggagccgtgacagtggcctggaaggcagatagcagccccgtcaaggcgggagtggagaccaccacaccctccaaacaaagcaacaacaagtacgcggccagcagctacctgagcctgacgcctgagcagtggaagcaggcacagaagctacagctgccagaaacctaaccacgcatcacacggcacttctcgcatgccttctgtgtctgctccagtctctgggctaaagagttgctggtccgggacaggggataggtccgctcttggtcagatgccaggtccctgccatggcatccctgaccctatgcaacaagccagtgactctggtcagcccaaggctgccccctcggtcactctgttcccgccctcctctgaggagcttcaagccaacaagggccacactggtgtgtctcataagtgacttctacccgggagccgtgacagtggcctggaaggcagatagcagccccgtcaaggcgggagtggagaccaccacaccctccaaacaaagcaacaacaagtacgcgggcagcagctacctgagcctgacgccctgagcagtggaaagtccacaaaagctacagctgccaggtcacgcatgaagggagcaccgtgggagaagacaggggccccctacagaaaggtcataaggtttaaaaacccttaacccccccccacgggaagaactagaacctgcaggaatccccagggagaggggtctctcctcccaccccaaggcattaaggcccttctccctgcactcaataaaccctcaataaatattctcattgtcaatcaaaaaaaa

SEQ ID NO: 7461 - DNA, 394 bp, Homo sapiens
ggaagtcccctggcagagaaggccttgtctgaaggctacgcccgctttcggtacagggacactttcttgctcatctggcagcagcaacagcataaggtggagtgggtgccacctgggacgtacctgagcaggagccgaagcatgtggtactcacagtatggaaatgaggccatcttggtccgagacaaaaacaagctcgaggtctctagggacacagggcagtccaagttttgcacaattatgtaattccgatgtgagcacctgaacccaggaccacactttgaggaaaacagacctgagtttcattcagttgtcttgttgatttccaatccttgctggaagattttgaataatgaacgtgaagatcaaactgtggtgtaagaacccaagaagc

SEQ ID NO: 7462 - DNA, 412 bp, Homo sapiens
  misc_feature (1)...(412): n = a,t,c or g
ggagaggccacaaaagtgttccaggcggggacttcgccctgttgaccattcccatggagggcgcgcatgaggaatgggcggtgagctccctccttccatctccagctgggggtggagggtgtgagcctgcccgccgagaggaatccagttacagaatcaaaatgactcagnnnnnnnnnnnnnnnnnnnnnnnnnnnnnnnnnnnnnnnnnnnnnnnnnnnnnnnnnnnnnnnnnnnnnnnnnnnnnnnnnnnnnnnnnnnnnnnnnnnnnnnnnnnnnnnnnnnnnnnnnnnnnnnnnnnnnnnnnnnnnnnnnnnnnnnnnnnnntggcctgcaggcaacaggaggacaggctgggtcagtgctgttcactgctccatcttcagtgtctggcacagagcaggtgtcactg

SEQ ID NO: 7463 - DNA, 178 bp, Homo sapiens
ctgagtcattttgattctgtaactggcttcctctcggcgggcaggctcacaccctccacccccagctggagatggaaggaggatgctcaccgcccattcctcatgcaggccatcgatggaaatgtcagacagtgcgagtccacgcctgaacacttctggggtccgctctgggactgac

SEQ ID NO: 7464 - DNA, 2101 bp, Homo sapiens
  SIMILAR (76)..(1404): 1001254mologous to Homo sapiens carboxypeptidase M precursor,accession number J04970,Smith-Waterman Score=2395.
gcatttcttccttctgcgtatgggacaggaccctttctggaatgggggtcttatgacctacaatcaaacaagaacatggacttcccgtgcctctggctagggctgttgctgcctttggtagctgcgctggatttcaactaccaccgccaggaagggatggaagcgtttttgaagactgttgcccaaaactacagttctgtcactcacttacacagtattgggaaatctgtgaaaggtagaaacctgtgggttcttgttgtggggcggtttccaaaggaacacagaattgggattccagagttcaaatacgtggcaaatatgcatggagatgagactgttgggcgggagctgctgctccatctgattgactatctcgtaaccagtgatggcaaagaccctgaaatcacaaatctgatcaatagtacccggatacacatcatgccttccatgaacccagatggatttgaagccgtcaaaaagcctgactgttactacagcatcggaagggaaaattataaccagtatgacttgaatcgaaatttccccgatgcttttgaatataataatgtctcaaggcagcctgaaactgtggcagtcatgaagtggctgaaaacagagacgtttgtcctctctgcaaacctccatggtggtgccctcgtggccagttacccatttgataatggtgttcaagcaactggggcattatactcccgaagcttaacgcctgatgatgatgtttttcaatatcttgcacatacctatgcttcaagaaatcccaacatgaagaaaggagacgagtgtaaaaacaaaatgaactttcctaatggtgttacaaatggatactcttggtatccactccaaggtggaatgcaagattacaactacatctgggcccagtgttttgaaattacgttggagctgtcatgctgtaaatatcctcgtgaggagaagcttccatccttttggaataataacaaagcctcattaattgaatatataaagcaggtgcacctaggtgtaaagggtcaagtttttgatcagaatggaaatccattacccaatgtaattgtggaagtccaagacagaaaacatatctgcccctatagaaccaacaaatatggagagtattatctccttctcttgcctgggtcttatattataaatgttacagtccctggacatgatccacacatcacaaaggtgattattccggagaaatcccagaacttcagtgctcttaaaaaggatattctacttccattccaagggcaattggattctatcccagtatcaaatccttcatgcccaatgattcctctatacagaaatttgccagaccactcagctgcaacaaagcctagtttgttcttatttttagtgagtcttttgcacatattcttcaaataaagtaaaatgtgaaactcaacccacatcaccacctggaatcagggattgctcactccaggttactgcaaccctaactcactctagtgggaccttgactggagaaactccacgatcttcctgaagaagagaaatggatgtttccaaattccacaataagcaatatgtggtgataatgaaaagaatgattcagtcttgacggtgaatggaagccccttcctacccaagtactgttcattaccactcaaaattattcttgaagtagtcttaaattgtgtaagaagttaaaactggagaagcaaaaaaaatgcctgcaaaaaggaggatcattttgtatacagagacccggatgattataagcattgaagatgaacatttatggatcttctacatacaagacttcaccataaggccagggagcagtggctcacaccttgtaatcccagcactttgggaggccaaggtgggcggatcaccttgaggtcaggagttcaaaaccagcctgaccaacatggtgaaaccctgtctctactaaatattagcggggtgtggtggcgggcacctgtaatcgcagcctttcaggaggctgagacaggagaatcgcttgaaccctagaggcggagtttgcagtgagccgagatagtgccattgtactccagcttgggcaacagagtaagactctgtctcaaaaaaaaaa

SEQ ID NO: 7465 - DNA, 1751 bp, Homo sapiens
  SIMILAR (1295)..(1531): 531254mologous to Homo sapiens Human myelin oligodendrocyte glycoprotein gene,accession number AAZ29204,Smith-Waterman Score= 154.
  misc_feature (1)...(1751): n = a,t,c or g
ttgaactgatgaccataggccangcggtggaattccgaagccggccgcctgacctggggcaagtgctttcaactctctgaacttcggttcctcatctgccagttggcagacgctcagcaaatcttcctagactcacggggcgaattgtacagttgggtaaatcgaggcccagagatggcaaaaggaccgtccaaggtcgtacagccacccggaattacaattcttttctgccgggtcacacgctgtcatccacgtgttacctaagagagctttccagcctgtgctaagaaaactgccccacatcatctgcagtaggacgggggagttggagccctggtcaggccactctgctactgaccacagttttctcatctctaaaaaggcgcagtaacaatataattaccgtatgcagtcccccaggatacagggtcaaaggagagcacaaccatcgcagttggaagccccagggggcaaaannnnnnnnnnnnnnnnnnnnnnnnnnnnnnnnnnnnnnnnnnnnnnnnnnnnnnnnnnnnnnnnnnnnnnnnnnnnnnnnnnnnnnnnnnnnnnnnnnnnnnnnnnnnnnnnnnnnnnnnnnnnnnnnnnnnnnnnnnnnnnnnnnnnnnnnnnctgagtcattttgattctgtaactggcttcctctcggcgggcaggctcacaccctccacccccagctggagatggaaggaggatgctcaccgccccattccctcatgcaggccatcgatggaaatgtcagacagtgcgagtccacgcctgaacacttctggggtccgtctctgggactgacactggcagatccatcggtgagctcccgcctgccacctctgggcctgcattgcggtgatagggccaagggcctgggccttcaattctccagacttgccaaaatgctcagcgcaggcctcgtcggcaactgcagacaagcagaggcagcacctgggctctgcctgtgcctggcacagtgaagcgagggtgggggcaggaatgagggtcctctccatgcaaggggggaagatagaagaacaaaatttccccctaatgtagtgtctttagaccgtgcaatgttgtgctcctgttagtctgatatcaggggcttgcagcctggcaaaggaaaaaaaacaggctgaggcacatgatagaagacaggcagggatgccacaatcataaccatggcaaagaccaggatcagaaaggcccaccatctctgaccccaaatccctgggcagatggttccagaactcagaattttcccagttgtagaaagatggggccaggtgcagtggctcacgcctgtaatcccagcattttgggaggccaagggggggcggatcacctgaggtcaggagttcgagaccagcctggccaacatggtgaaacccctgtctctactaaaaaaaaaaaaaaaaaaaaaaaaaaaaaaaaaaaaaaattagccgggcatggtggctcacgcctgtaatcccagcactttgggaggccgaggcaggcggatcacctgaggtcaggagtttgacaccagcctggccaacatggtgaaaccctgtctctactaaaattacaaaattagccggacgttgtggcatacggttgtaatcccagctactcaggaggctgaggcaggagaatcgcttgaacccaggaggtgaaggtttcaatgagccaagactgagccactgcactccagcctgggagacagagcaagaccctggacggctcgcggtcggaac

SEQ ID NO: 7466 - DNA, 399 bp, Homo sapiens
  misc_feature (1)...(399): n = a,t,c or g
aaaaaccacttgagaaaatccagcatgcttattttattaagaccctcagcacaatcagcgtagaannnnnnnnnnnnnnnnnnnnnnnnnnnnnnnnnnnnnnnnnnnnnnnnnnnnnnnnnnnnnnnnnnnnnnnnnnnnnnnnnnnnnnnnnnnnnnnnnnnnnnnnnnnnnnnnnnnnnnnnnnnnnnnnnnnnnnnnnnnnnnnnnnnnnnnnnnnnnnnnnnnnnnnnnnnnnnnnnnnnnnnnnnnnnnnnnnnnnnnagtggtagaagaagaagtctgcctattgctgcttcccaatgatatgactgtatacctagaacaccctaaagactcatccaaaaagcttctagaactggtaaatgcattcagcaaagtttcacgatacatagttac

SEQ ID NO: 7467 - DNA, 361 bp, Homo sapiens
  SIMILAR (39)..(359): 1001254mologous to Homo sapiens Tsg24 protein,accession number AJ278357,Smith-Waterman Score=556.
attagcctttcgcccccgctgcaggaattcggcacgaggtgaacatgggtcagaaacaggaaattctggatctcttttcttcagtactctatgaatgtgttacccaggagaccccagagatgttgcctgcatacatagcaatggatcaggctataagaagacttgggagaagagaaatgtctgagacttctgaactttggcagataaagttggtgttagagtttttcagctcccgaagccatcaggagcggctgcagaaccaccctaagcgggggctctttatgaactcggaattcctccctgttgtgaagtgcaccattgataataccctggaccagtggctacaagtcgggggtgatat

SEQ ID NO: 7468 - DNA, 1127 bp, Homo sapiens
  SIMILAR (599)..(342): 981254mologous to Homo sapiens hypothetical protein,accession number AL109978,Smith-Waterman Score=471.
attgtggtgagtgccttctgtacagtcgactgcaaatgaaacgcagaggatgggtgcccagaagcacctgcggcagaggcgcacgggaagcccggggcccaggctcatgcaacacgacgctcaccgcggctcgggccgtggggccgtcagagaaacctttttaaaaaatggagatgaatgttacagaattggacaacccgaactgcttttcaaaaccagaggaaggaggttcttagccgttactcagataccagtgctggggaggttggcctgacttcagcaacagctgtgggtgggctggaggccggcgcagcttggggccccccgcgccagctgtctcagccaccacctgtgcggcgcttgctccgaggggtcagcaagagcaactgatggctgccacttccaggccccgagagacaggcctcacgtaactttactgcagccgaggtccaggccgtggagggggtcctagctccgctgcattctgcatcccaagtgggcacgtggaggaagggtctgaaggaaggctccggagcacaggccctggtgttcctgtgaggacgctggacctgcaggagcggggagctgcagtgccacctgctgggtaccacgggccgggcctggggtccacgcctttgggttgggtgtgtctgatgtcttgccaagcgcctggtcctgtcctcttgagctgcccttgcccagcactgcactctggaggtgggtggtgcaggcagtggagggacacaggccatctcaagcccgctggtggcagggcgttttcccaccgggatacgggaagccacctgtgtcagggctaggccctgggatcgggagttacactaccctgtcccaagccgagggggccggtggaatgatttgagcagctctgggagtggggaaaaaagacgactaatttccaaacccgtttgttctcagataaaaagcagttttataaacccgcaatctgctccagattcaagcagtaatatttcagcaggaggaggtggtcatgggaagccagcacagcagaggctccctgaccgggaggcctgcctgcttttcaggttgtttcccatgttcagcttggactgcagaagaggctcacgctcctgtggtgagggcagggt

SEQ ID NO: 7469 - DNA, 311 bp, Homo sapiens
  SIMILAR (2)..(265): 791254mologous to Homo sapiens carbonic anhydrase I (EC 4.2.1.1),accession number M33987,Smith-Waterman Score=372.
  misc_feature (1)...(311): n = a,t,c or g
gctgaaaggtggtcctttctctgacagctacaggctctttcagttccattttcactggggcagtacaaatgagcatggttcagaacatacagtggatggagtcaaatattttgccgagcttcacgtanctcactggaattctgcaaagtactccagccttgctgaagctgactcaaaggctgatgggttggcaatcattggtgcaatgaagaaggatgataaggccaacccacctctggatcatgtacaagttggcgtacgtgctgataggaacttttatggtattgaggttctatctgatgcattaatcc

SEQ ID NO: 7470 - DNA, 314 bp, Homo sapiens
  misc_feature (1)...(314): n = a,t,c or g
ccaaaatgccagctgcttttgttggtgttgctgttgttgcagaaattggtgacctgatcctaaaattcatataagaatggaagggatccacaacagtgaaaaagttggaggactcacgcttctgattttaaaacttactacaaatctacaataatcaagatagtatataccggcctaataataggtaaatcaatagaataaaactgagggtcaagaaataaactctnnnnnnnnnnnnnnnnnnnnnnnnnnnnnnnnnnnnnnnnnnnnnnnnnnnnnnnnnnnnnnnnnnnnnnnnnnnnnnnnnnnnnnnn

SEQ ID NO: 7471 - DNA, 365 bp, Homo sapiens
  misc_feature (1)...(365): n = a,t,c or g
ctccaatggcattgttcacagaaataaaacacaaccctaaaattcatatggaaccacaggaacctgagtaactaaagcagtcttgnnnnnnnnnnnnnnnnnnnnnnnnnnnnnnnnnnnnnnnnnnnnnnnnnnnnnnnnnnnnnnnnnnnnnnnnnnnnnnnnnnnnnnnnnnnnnnnnnnnnnnnnnnnnnnnnnnnngatagaaagcccagaagcaaactcatgtattgatggtcagttgctttttgacggtggtatcaggattgcacactgtgcaaaggacagtnnnnnnnnnnnnnnnnnnnnnnnnnnnnnntcatccacatgcaggagaatgaaattagacccttatcatacaccaa

SEQ ID NO: 7472 - DNA, 434 bp, Homo sapiens
ggtggcccacacgccctgacccctgcagagactggcccttgagcacacatcctgccagcgttgcaacgtgacctcagaccccattctgcatgtctgcgctgcctcccatgcttggggccaaccccgccacaacccgtcctcaggggagtctgtggtgcggtgagaaggtggcacacaggcattccagatttgcctctggagtttgctttcttcccaggcaggacttaaactgaagaactgaaaagatgcagacaaaccctacctagcggatgtggagtgcttccttggcgggcccgccttgctgtgggagtgtcagccggcggggcaggtcctccagccccatgctcactccctctgcagctccatgcggcaatcctggaagtctgacttcaaatctcccagctgcaggctgcaaaccctcgtgccaagcttgg

SEQ ID NO: 7473 - DNA, 314 bp, Homo sapiens
  misc_feature (1)...(314): n = a,t,c or g
aaccacaggaacctgagtaactaaannnnnnnnnnnnnnnnnnnnnnnnnnnnnnnnnnnnnnnnnnnnnnnnnnnnnnnnnnnnnnnnnnnnnnnnnnnnnnnnnnnnnnnnnnnnnnnnnnnnnnnnnnnnnnnnnnnnnnnnnnnnngatagaaagcccagaaacaaactcatgtattgatggtcagttgctttttgacggtggtatcaggattacacactgtgcaaaggacagtnnnnnnnnnnnnnnnnnnnnnnnnnnnnnntcatccacatgcaggagaatccaattagacccttatcttacaccaa

SEQ ID NO: 7474 - DNA, 380 bp, Homo sapiens
  SIMILAR (35)..(376): 811254mologous to Homo sapiens LTG9/MLLT3 protein,accession number D16688,Smith-Waterman Score=461.
gttttcctgacggctacaccgtttttttttgggagagtcggaacaacccagtcctgccagctccagctccagctccagctccagcttgacaccatcccagaccaggcaacacggacctttgaggtctataatgaaagatctgcattctgatgactatgaggaggaatcatatgaagtggatgataacgacaatgactctaaaatggagaggcctgcaaatagatgacgcacccgaagtcgcacagttagcttaagtgatggcagcgatagtgaaagcaggacttcttcttgacccctacattacgaacctccaccacccttactatataccaacaacaaccagattcttgaagtggaaagcccaataacgcatagcttag

SEQ ID NO: 7475 - DNA, 3400 bp, Homo sapiens
  SIMILAR (196)..(1923): 821254mologous to Homo sapiens AF-9,accession number L13744,Smith-Waterman Score=2274.
tttggggctgagtttaataagcgagcgagcgagcaagcgagcgcggggggaaaaaggcagagaatgtccgccatctaccctccgctcctgggcgcgctctcattcatagcagcctcttcatgaattacagctgagggggggcggaggaggggggggtaccacacaacaccccagcaaacctccgggcccccaggcatggctagctcgtgttccgtgcaggtgaagctggagctggggcaccgcgcccaggtgaggaaaaaacccaccgtggagggcttcacccacgactggatggtgttcgtacgcggtccggagcacagtaacatacagcactttgtggagaaagtcgtcttccacttgcacgaaagctttcctaggccaaaaagagtgtgcaaagatccaccttacaaagtagaagaatctgggtatgctggtttcattttgccaattgaagtttattttaaaaacaaggaagaacctaggaaagtccgctttgattatgacttattcctgcatcttgaaggccatccaccagtgaatcacctccgctgtgaaaagctaactttcaacaaccccacagaggactttaggagaaagttgctgaaggcaggaggggaccctaataggagtattcataccagcagcagcagcagcagcagcagtagcagcagcagcagcagcagcagcagcagcagtagcagcagcagcagcagcagcagcagcagcagtagcagcagcagtagcagcagcagcagcagcagtagtaccagtttttcaaagcctcacaaattaatgaaggagcacaaggaaaaaccttctaaagactccagagaacataaaagtgccttcaaagaaccttccagggatcacaacaaatcttccaaagaatcctctaagaaacccaaagaaaataaaccactgaaagaagagaaaatagttcctaagatggccttcaaggaacctaaacccatgtcaaaagagccaaaaccagatagtaacttactcaccatcaccagtggacaagataagaaggctcctagtaaaaggccgcccatttcagattctgaagaactctcagccaaaaaaaggaaaaagagtagctcagaggctttatttaaaagtttttctagcgcaccaccactgatactcacttgttctgctgacaaaaaacagataaaagataaatctcatgtcaagatgggaaaggtcaaaattgaaagtgagacatcagagaagaagaaatcaacgttaccgccatttgatgatattgtggatcccaatgattcagatgtggaggagaatatatcctctaaatctgattctgaacaacccagtcctgccagcgtccagctccagctccagctccagctttcacaccatcccaggaccagggcaacaaggtcctttggaggtctataatgaaagatctgcattctgatgacaagcgaggaggaagcagatgaagcggaggatagcgacaatgactctgaaatggagaggcctgttaaatagaggaggcagccgaagtcgcagagtttagcttaagtgatggcagcgatagtgaaagcagttctgcttcttcacccctacatcacgaacctccaccacccttactaaaaaccaacaacaaccaggattcttggaagtggaaaagtccaataaagcaaagcaaattcagattaaggcaaattaaagaatggtgaatgttgacaaggccttacctagatggaactggtaggagctttcacaggaaggtttattgactttgaggaggaaagacacattctgcagcagatcgtgaaccttatagaagaaactggacactttcatatcacaaacacaacatttgattttgatctttgctcgctggacaaaaccacagtccgtaaactacagagttacctggaaacatctggaacatcctgaggatataacaactggatgcatcaagaactattgtgttttttttttttggttttttttttttttggttgtgattttttgttcttgttgtttatatgaaaacactcaaaatgatgcaaccaaaagggaaaaaataaaaatcaaacaaccttcagctttatttttctttaaagccagtcatcatctcttgataaaggagaggttaaagcaaaccagcctcagcggaccactcttctctccaaggaaatccccgggaagagttagcctggatagccttgaaaacaaacaaatcaaacacaacacaagaaaactcaaagaatgtgtatggtatcatgtatctctctgtggtggttcattccacaggacgaatgcatattcaacacactgccttattacataactgatctatttattatcgcatacagatattctaagtcgttgagggaatgacaccatcagacattataagtacttggtcccgtggatgctctttcaatgcagcacccttgccatcccaagcccagtgaccttactcgtataccgtgccactttccaccaactttttccaagtcctttaactcgttgcagtctgtattttccaccttttgtttttccagttccaggacacagattatcaactggggggaccaaatagccaccttgattttcttctttgtggtctttttcctgaaagttggggcccagtccttggctgtatccatgtaatgatcttggaccatggtagaaaatgcaccaaataggatcatatgaattgctgtctagccttagtcaataaacttgtaggacttttaaacaaaagtgtacctgtaaatgtcctgaatccagcattgttgagctgtcatcaacattcttgtgtctgttttactgttacaatattaggtgaatatggaagtaaaggcattccacaggatcatcatttaaaaaaaaagaattctggtcctgttttctaaaaaaaaaaaactgttgtagaaattcttaatttggatctatttattagtcagagtttcagctttcttcagctgccagtgtgttactcatctttatcctaaaaatctggaatcagagatttttgtttgttcacatatgattctcttagacacttttatatttgaaaaaattaaaatctttctttggggaaaaattcttggttattctgccataacagattatgtattaacttgtagattcagtggttcaatacctgtttagttgcttgctaatatttccagaaggatttcttgtattggtgaaagacggttggggatggggggatttttttgttcttgttgtacccttgttttgaaactagaaatctgtcctgtggcatgcaaaagaaagcaaattatttttaaaagaaaaaaaccaaagtacttttggtgtcattattccatcttctccataagtggagaaatgaaaagtaagaacagctcatcttcaaagtttttactagaaattc

SEQ ID NO: 7476 - DNA, 321 bp, Homo sapiens
  SIMILAR (2)..(298): 951254mologous to Mus musculus putative,accession number AK010784,Smith-Waterman Score=534.
  misc_feature (1)...(321): n = a,t,c or g
ggtacctggtgctggactaggaagagtggcctgggaaatagctatgctaggttatgcttgtcaaggaaatgaatggagtttttttatgctcttttcttccaactttgtactcaacagatgttctgaaattaataaatataaactttatccttggatccatcagtttagcaataaccggagatcagctgatcagattcgacccatctttttccctgatgttgacccccacagtcttcctcctggttctaacttttctatgacagcaggagattttcaagagatttattcagaatgcagtaagtccaaatcaagcgtttaaan

SEQ ID NO: 7477 - DNA, 323 bp, Homo sapiens
  SIMILAR (1)..(321): 861254mologous to Homo sapiens cytokine-inducible SH2 protein 6,accession number AF073958,Smith-Waterman Score=526.
gtccactgtcttggggcagacctgctggagatcaataacaacccatgttactggggagtgatggataaatacgcagccgaagcactactggaaggaaaaccagagggtacctttttacttcgagactcagcacaggaagactatttattctctggtagttttagacgctatagtcgttctcttcatgctagaattgaacagtggaatcacaactttagctttgatgcacatgacccctgtgtcttccattctcctgacattactgggctcctagaacattataaggacccaagcgcctgtatgttctttgaaccacttctatc

SEQ ID NO: 7478 - DNA, 118 bp, Homo sapiens
gaatgactagatctaactcatatcctgtaaacgttcttagcgcagaatgttcagctctgttttccctattatcccagcccaggagttctgtttccgaagaaagagccagatgattctg

SEQ ID NO: 7479 - DNA, 4941 bp, Homo sapiens
  SIMILAR (568)..(4875): 991254mologous to Homo sapiens putative protein kinase,accession number AJ296290,Smith-Waterman Score=7153.
atggagaaaaaaatcactggatataccaccgttgatatatcccaatggcatcgtaaagaacattttgaggcatttcagtcagttgctcaatgtacctataaccagaccgttcagctggatattacggcctttttaaagaccgtaaagaaaaataagcacaagttttatccggcctttattcacattcttgcccgcctgatgaatgctcatccggagttccgtatggcaatgaaagacggtgagctggtgatatgggatagtgttcacccttgttacaccgttttccatgagcaaactgaaacgttttcatcgctctggagtgaataccacgacgatttccggcagtttctacacatatattcgcaagatgtggcgtgttacggtgaaaacctggcctatttccctaaagggtttattgagaatatgtttttcgtctcagccaatccctgggtgagtttcaccagttttgatttaaacgtggccaatatggacaacttcttcgcccccgttttcaccatgggcaaatattatacgcaaggcgacaaggtgctgatgccgctggcgattcagcttccagtttcccagccagtaccaactatccaaggcgaacctcagatcccagttgcgacacaaccctcggttgttccagtccactctggtgctcatttccttccagtgggacagccgctccctactcccttgctccctcagtaccctgtctctcagattcccatatcaactcctcatgtgtctacggctcagacaggtttctcatcccttcccatcacaatggcagctggcattactcagcctctgctcacgttggcttcatctgctacaacagctgcgatcccgggggtatcaactgtggttcctagtcagcttccaacccttctgcagcctgtgactcagctgccaagtcaggttcacccacagctcctacaaccagcagttcagtccatgggaataccagctaaccttggacaagctgctgaggttccactttcctctggagatgttctgtaccagggcttcccacctcgactgccaccacagtacccaggagattcaaatattgctccctcttccaacgtggcttctgtttgcatccattctacagtcctatcccctcccatgccgacagaagtactggctacacctgggtactttcccacagtggtgcagccttatgtggaatcaaatcttttagttcctatgggtggtgtaggaggacaggttcaagtgtcccagccaggagggagtttagcacaagcccccactacatcctcccagcaagcagttttggagagtactcagggagtctctcaggttgctcctgcagagccagttgcagtagcacagacccaagctacccagccgaccactttggcttcctctgtagacagtgcacattcagatgttgcttcaggtatgagtgatggcaatgagaacgtcccatcttccagtggaaggcatgaaggaagaactacaaaacggcattaccgaaaatctgtaaggagtcgctctcgacatgaaaaaacttcacgcccaaaattaagaattttgaatgtttcaaataaaggagaccgagtagtagaatgtcaattagagactcataataggaaaatggttacattcaaatttgacctagatggtgacaaccccgaggagatagcaacaattatggtgaacaatgactttattctagcaatagagagagagtcgtttgtggatcaagtgcgagaaattattgaaaaagctgatgaaatgctcagtgaggatgtcagtgtggaaccagagggtgatcagggattggagagtctacaaggaaaggatgactatggcttttcaggttctcagaaattggaaggagagttcaaacaaccaattcctgcgtcttccatgccacagcaaataggcattcctaccagttctttaactcaagttgttcattctgcgggaaggcggtttatagtgagtcctgtgccagaaagccgattacgagaatcaaaagttttccccagtgaaataacagatacagttgctgcctctacagctcagagccctggaatgaacttgtctcactctgcatcatcccttagtctacaacaggccttttctgaacttagacgtgcccaaatgacagaaggacccaacacagcacctccaaactttagtcatacaggaccaacatttccagtagtacctcctttcttaagtagcattgctggagtcccaaccacagcagcagccacagcaccagtccctgcaacaagcagccctcctaatgacatttccacatcagtaattcagtctgaggttacagtgcccactgaagaggggattgctggagttgccaccagcacaggtgtggtaacttcaggtggtctccccataccacctgtgtctgaatcaccagtactttccagcgtagtttcaagtatcacaatacctgcagttgtctcaatatctactacatccccgtcacttcaagtccccacatccacatctgagatcgttgtttctagtacagcactgtatccttcagtaacagtttcagcaacttcagcctctgcagggggcagtactgctaccccaggtcctaagcctccagctgtagtatctcagcaggcagcaggcagcactactgtgggagccacattaacatcagtttctaccaccacttcattcccaagcacagcttcacagctgtgcattcagcttagcagcagtacttctactcctactttagctgaaaccgtggtagttagcgcacactcactagataagacatctcatagcagtacaactggattggctttctccctctctgcaccatcttcctcttcctctcctggagcaggagtgtctagttatatttctcagcctggtgggctgcatcctttggtcattccatcagtgatagcttctactcctattcttccccaagcagcaggacctacttctacacctttattaccccaagtacctagtatcccacccttggtacagcctgttgccaatgtgcctgctgtacagcagacactaattcatagtcagcctcaaccagctttgcttcccaaccagccccatactcattgtcctgaagtagattctgatacacaacccaaagctcctggaattgatgacataaagactctagaagaaaagctgcggtctctgttcagtgaacacagctcatctggagctcagcatgcctctgtctcactggagacctcactagtcatagagagcactgtcacaccaggcatcccaactactgctgttgcaccaagcaaactcctgacttctaccacaagtacttgcttaccaccaaccaatttaccactaggaacagttgctttgccagttacaccagtggtcacacctgggcaagtttctaccccagtcagcactactacatcaggagtgaaacctggaactgctccctccaagccacctctaactaaggctccggtgctgccagtgggtactgaacttccagcaggtactctacccagcgagcagctgccaccttttccaggaccttctctaacccagtcccagcaacctctagaggatcttgatgctcaattgagaagaacacttagtccagagatgatcacagtgacttctgcggttggtcctgtgtccatggcggctccaacagcaatcacagaagcaggaacacagcctcagaagggtgtttctcaagtcaaagaaggccctgtcctagcaactagttcaggagctggtgtttttaagatgggacgatttcaggtttctgttgcagcagacggtgcccagaaagagggtaaaaataagtcagaagatgcaaagtctgttcattttgaatccagcacctcagagtcctcagtgctatcaagtagtagtccagagagtaccttggtgaaaccagagccgaatggcataaccatccctggtatctcttcagatgtgccagagagtgcccacaaaactactgcctcagaggcaaagtcagacactgggcagcctaccaaggttggacgttttcaggtgacaactacagcaaacaaagtgggtcgtttctctgtatcaaaaactgaggacaagatcactgacacaaagaaagaaggaccagtggcatctcctccttttatggatttggaacaagctgttcttcctgctgtgataccaaagaaagagaagcctgaactgtcagagccttcacatctaaatgggccgtcttctgacccggaggccgcttttttaagtagggatgtggatgatggttccggtagtccacactcgccccatcagctgagctcaaagagccttcctagccagaatctaagtcaaagccttagtaattcatttaactcctcttacatgagtagcgacaatgagtcagatatcgaagatgaagacttaaagttagagctgcgacgactacgagataaacatctcaaagagattcaggacctgcagagtcgccagaagcatgaaattgaatctttgtataccaaactgggcaaggtgccccctgctgttattattcccccagctgctcccctttcagggagaagacgacgacccactaaaagcaaaggcagcaaatctagtcgaagcagttccttggggaataaaagcccccagctttcaggtaacctgtctggtcagagtgcagcttcagtcttgcacccccagcagaccctccaccctcctggcaacatcccagagtccgggcagaatcagctgttacagccccttaagccatctccctccagtgacaacctctattcagccttcaccagtgatggtgccatttcagtaccaagcctttctgctccaggtcaaggctgtgcgaagtttaactgtgcatctgaacaggtgacattcaaacctggtggcaggaggacccgatttctgagtacgccctgcttggctctttgtgtgtaa

SEQ ID NO: 7480 - DNA, 5787 bp, Homo sapiens
  SIMILAR (490)..(4374): 981254mologous to Homo sapiens putative protein kinase,accession number AJ296290,Smith-Waterman Score=6399.
catttttctcaagacacttcttcagagaaaaatggttctctcagtattcactgtaagctgattgaatgctagatgtggttaatagtacacctggcaacttttacatatatgggtagaataaatagaatagccaacatggtatcaacaaaaagcttcggggtttagactgggaaaattagcatttcatgatatgactgttatgtggaagaatttttgcatttttccatttaagattggctaggaagaaattgtgttcctcctatttaaatcatctctaggtgaagataaccgacaataaagtagtattgtagagtcctgtctcttctgttggaaccagtctactacttcatttcaagaatgtggtctttatatgccctttagattattagaaagagattggctactattcttctttgctgtgtgcttcttttttttttttttgcatgtcttgctgttttgctaatttattgacccccaacctgctctaactcaccttcctcatttctgtcacagggcttcccacctcgactgccaccacagtacccaggagattcaaatattgctccctcttccaacgtggcttctgtttgcatccattctacagtcctatcccctcccatgccgacagaagtactggctacacctgggtactttcccacagtggtgcagccttatgtggaatcaaatcttttagttcctatgggtggtgtaggaggacaggttcaagtgtcccagccaggagggagtttagcacaagcccccactacatcctcccagcaagcagttttggagagtactcagggagtctctcaggttgctcctgcagagccagttgcagtagcacagccccaagctacccagccgaccactttggcttcctctgtagacagtgcacattcagatgttgcttcaggtatgagtgatggcaatgagaacgtcccatcttccagtggaaggcatgaaggaagaactacaaaacggcattaccgaaaatctgtaaggagtcgctctcgacatgaaaaaacttcacgcccaaaattaagaattttgaatgtttcaaataaaggagaccgagtagtagaatgtcaattagagactcataataggaaaatggttacattcaaatttgacctagatggtgacaaccccgaggagatagcaacaattatggtgaacaatgactttattctagcaatagagagagagtcgtttgtggatcaagtgcgagaaattattgaaaaagctgatgaaatgctcagtgaggatgtcagtgtggaaccagagggtgatcagggattggagagtctacaaggaaaggatgactatggcttttcaggttctcagaaattggaaggagagttcaaacaaccaattcctgcgtcttccatgccacagcaaataggcattcctaccagttctttaactcaagttgttcattctgcgggaaggcggtttatagtgagtcctgtgccagaaagccgattacgagaatcaaaagttttccccagtgaaataacagatacagttgctgcctctacagctcagagccctggaatgaacttgtctcactctgcatcatcccttagtctacaacaggccttttctgaacttagacgtgcccaaatgacagaaggacccaatacagcacctccaaactttagtcatacaggaccaacatttccagtagtacctcctttcttaagtagcattgctggagtcccaaccacagcagcagccacagcaccagtccctgcaacaagcagccctcctaatgacatttccacatcagtaattcagtctgaggttacagtgcccactgaagaggggattgctggagttgccaccagcacaggtgtggtaacttcaggtggtctccccataccacctgtgtctgaatcaccagtactttccagcgtagtttcaagtatcacaatacctgcagttgtctcaatatctactacatccccgtcacttcaagtccccacatccacatctgagatcgttgtttctagtacagcactgtatccttcagtaacagtttcagcaacttcagcctctgcagggggcagtactgctaccccaggtcctaagcctccagctgtagtatctcagcaggcagcaggcagcactactgtgggagccacattaacatcagtttctaccaccacttcattcccaagcacagcttcacagctgtccattcagcttagcagcagtacttctactcctactttagctgaaaccgtggtagttagcgcacactcactagataagacatctcatagcagtacaactggattggctttctccctctctgcaccatcttcctcttcctctcctggagcaggagtgtctagttatatttctcagcctggtgggctgcatcctttggtcattccatcagtgatagcttctactcctattcttccccaagcagcaggacctacttctacacctttattaccccaagtacctagtatcccacccttggtacagcctgttgccaatgtgcctgctgtacagcagacactaattcatagtcagcctcaaccagctttgcttcccaaccagccccatactcattgtcctgaagtagattctgatacacaacccaaagctcctggaattgatgacataaagactctagaagaaaagctgcggtctctgttcagtgaacacagctcatctggagctcagcatgcctctgtctcactggagacctcactagtcatagagagcactgtcacaccaggcatcccaactactgctgttgcaccaagcaaactcctgacttctaccacaagtacttgcttaccaccaaccaatttaccactaggaacagttgctttgccagttacaccagtggtcacacctgggcaagtttctaccccagtcagcactactacatcaggagtgaaacctggaactgctccctccaagccacctctaactaaggctccggtgctgccagtgggtactgaacttccagcaggtactctacccagcgagcagctgccaccttttccaggaccttctctaacccagtcccagcaacctctagaggatcttgatgctcaattgagaagaacacttagtccagagatgatcacagtgacttctgcggttggtcctgtgtccatggcggctccaacagcaatcacagaagcaggaacacagcctcagaagggtgtttctcaagtcaaagaaggccctgtcctagcaactagttcaggagctggtgtttttaagatgggacgatttcaggtttctgttgcagcagacggtgcccagaaagagggtaaaaataagtcagaagatgcaaagtctgttcattttgaatccagcacctcagagtcctcagtgctatcaagtagtagtccagagagtaccttggtgaaaccagagccgaatggcataaccatccctggtatctcttcagatgtgccagagagtgcccacaaaactactgcctcagaggcaaagtcagacactgggcagcctaccaaggttggacgttttcaggtgacaactacagcaaacaaagtgggtcgtttctctgtatcaaaaactgaggacaagatcactgacacaaagaaagaaggaccagtggcatctcctccttttatggatttggaacaagctgttcttcctgctgtgataccaaagaaagagaagcctgaactgtcagagccttcacatctaaatgggccgtcttctgacccggaggccgcttttttaagtagggatgtggatgatggttccggtagtccacactcgccccatcagctgagctcaaagagccttcctagccagaatctaagtcaaagccttagtaattcatttaactcctcttacatgagtagcgacaatgagtcagatatcgaagatgaagacttaaagttagagctgcgacgactacgagataaacatctcaaagagattcaggacctgcagagtcgccagaagcatgaaattgaatctttgtataccaaactgggcaaggtgccccctgctgttattattcccccagctgctcccctttcagggagaagacgacgacccactaaaagcaaaggcagcaaatctagtcgaagcagttccttggggaataaaagcccccagctttcaggtaacctgtctggtcagagtgcagcttcagtcttgcacccccagcagaccctccaccctcctggcaacatcccagagtccgggcagaatcagctgttacagccccttaagccatctccctccagtgacaacctctattcagccttcaccagtgatggtgccatttcagtaccaagcctttctgctccaggtcaaggtaataaagcaaccatcatcgtccaaaaacaataaaatggagatgttgccatacctgggacaaaagcctgttaaggcgggttgggagactagctgaccagaacacagcctgtgtgttgtacactgaagaatctgggtgaaaagggaagtggagtgataatgagaatcggtgggctcactgctcccattaggtgaaattactttttttcaaggaattacagtgaaaagttacatctgtgtggcctatatgacttgctcatttgggatttggaacttaggctttaatattaggctgagatttcctggatgaaattctaaggtgttttagcagtttctgaagctaatacattttcttagccattgtagaattttgttacttttaagtatgggagtggcatactaaaatgaataaccttacaattcagttttttatccataatctactttccaaatatagctctgtttattagtgattgctgaaaaaattcccacagaggaaagagcttttagtcatattagaacaagaattgaaaagacttgggcatctgggtgagaagaatgaaaaaaatataggtactggcttatgtgcctttgccacagtttcacagaaattagagatcagtctcttcacaggaagaatgcacttgattggtaaggagggcaaactagctagcattattcgaactaagaaaagcttccgcattttgcagatgggtagaattaagacctaatatttcatctcttacatatctgaccttccccccagaagcttgttcttctgtgtgccatcttagtgcatttcaccactccagcctcaagtttctaacatcttgtagttgtgttctgtctcttctcctctctctgttctaccctgtttttcccctctcacaggctgtgcgaagtttaactgtgcatctgaacaggtgacattcaaacctggtggcaggaggacccgatttctgagtacgccctgcttggctctttgtgtgtaacacctttactccttccttgtccttgtgtttctgctgcttggatctgatgtttcacgcagtccattttcatttgtctctttttgtatatcatctactcagtggcttggctgaattactgttaccctcagaagtttgggcccccacattaattatgataaaaaatgtcaaaataacaagttatctacaaatttcaatgtaactttctggtagaagtgcttcttcatggatctgtgacagagagtggatatggtatctaggcaatagattgctgggtcatttagaataatgaagactgaactccacagtcgtagtcagtgctgtctgtctgccctagcattagaaatgagagaaatcagccagacacggtggcgtacacctgtaatcccagcactttgggaggccgaggcgggaagattgcttgaggccaggagctcgagaccaaccctgggcaacatggtgataccccatctct

SEQ ID NO: 7481 - DNA, 236 bp, Homo sapiens
  SIMILAR (2)..(235): 841254mologous to Homo sapiens Similar to ATPase, Class I, type 8B, member 1,accession number BC003534,Smith-Waterman Score= 373.
catcagcggccaggaaggattgcaagcagtcttagccagcgactattcatttgcacagtttagatatctccaaaggcttctccttgttcatggaaggtggtcttatttccgaatgtgcaaattcttatgctatttcttctataagaattttgcatttacacttgtgcatttctggtttggtttcttctgtggtttctcagcccagactgtttatgaccagtggttcatcacccttg

SEQ ID NO: 7482 - DNA, 638 bp, Homo sapiens
tgaggcaggagaattgcttgaaccggggaccccaggaggcggaggttgccagtgagctgagatcgcgcccactgcactcccagcccgggctacagagccgagactctgtcctcaaaaaataaataaataaataaatgaaaaagagaaaatattgagaggatttggtcatcattttactgctctcttcatgtgatggaaatcaattttccttctcaaatgggatcagtatcatttcctagtccatacatcccatccagtttttgttacttttttgttggcctacattaggcaaaatagctctgcttcattgaggcatgcagtcctcagactctcggtggaaaggctgtcatactattagtgaccatactaactttttataccaaaggatggttgctggataattttaatatctttaccaataaagtactttttggaaatacaaaatcaggctgcttgctttgctctattcctgtcaacaaaaaggatttagctatagatttagcttctccttttattttcccttttatttcataggagtcttctgtttattcctttcaggcgcctccttggcattataacaaaaaaagatatcctccggcatatggcccagacggcaaaccaagaccccgcttcaatat

SEQ ID NO: 7483 - DNA, 1542 bp, Homo sapiens
atgcaggccttgccagtggtgtgccgggcgcgggtcctgtctggcggcggcctgtcgtctccagagtttcgaaggattaatgacttcctcagcgcccttgctggcgggctgaggagactggcccttgagcacacatcctgccagcgttgcaacgtgacctcagaccccattctgcatgtctgcgctgcctcccatgcttggggccaaccccgccacaacccgtcctcaggggagtctgtggtgcgctccatgcggcaatcctggaagtctgacttcaaatctcccagctgcaggctgcaaacaagccaggactctcgcagaagggactcgggctgtgcaggaggctgctgccgaccaggcctctggcaggacatttggggaatgcactttgacccagcagttccacttctaggacgtttgcgaatgaacttgcacagctgcaaagagaagcacgaacagaagacctcgagcttgtttttgtctcggaccaagatggcctcatttccatactgtgagtaccacatgcttcggctcctgctcaggtacgtcccaggtggcaccgactccaacttctgctgttgctgctgccagatgagcaaggaggtgtccctgtaccggaggcgggcgtaagcctttcagacaaggccttctctgcccagggggaacacggccactcatcccctcccccgtcccgctggactccctgggaaccctgctgttctgagacggcccacgcgcactaaattaacggacagctttcccagctatggggcttaaggatccctcgtttaactgaatggtagaaattaggaattccgcccatttgcaggcaacgtcctcaggagggttgtgtggtgaggaaatgaggcggcctcaccattctgaagacacctgagacccattcaggggaccgcacacaggtcagagcggcgcccggccacagctcttccgggtgcagctgtgtggaattgacagggacgaggcgtcacaccctggggggtgaattctgccaccatggcctggaccactgagcttgaagagatggatccagtgccctgaggaagggacatggtggccccagacgcaagctggaaggaagcttccggttgcaacgcccccgcacgcatctgtcccggccaagctttcagggcaaacggctgttctgaccccaccctggggatccagcaccagcgtttgttcaggtctcgtctctccccaaaggtgcttggtcccgtggggcagccttgggagctgggtggagagtgagacgaggcgcccagtgccagctttttcagtcactgggaggtgctggggaggctgcttgttggggcttcagggtctccatctgtgaaacaggagccagcggcgcttgaaagggcgcgggttcccggagacgccgccaggcgtcagccccgggaccggaaggggcccccaggcccgccttgctgctccgagcatccagctcccgtgagagccccgctcgtcgcgggcctcggagatgcgggcagcggcgcgcctcgtgccaagcttggcgtaatgatg

SEQ ID NO: 7484 - DNA, 2983 bp, Homo sapiens; identical to SEQ ID NO: 7183
  SIMILAR (1684)..(2847): 991254mologous to Homo sapiens ASR2A,accession number AF312032,Smith-Waterman Score=2076.

SEQ ID NO: 7485 - DNA, 433 bp, Homo sapiens
  SIMILAR (2)..(424): 701254mologous to Homo sapiens ASR2B,accession number AF312032,Smith-Waterman Score=486.
ccgactgagggtcttcctgtccctcatggagactggctggtttgataaccttctcctggacatagacaaagctgatgccattgtcaagatgctggatgcagccgtgattaagatggaaggaggcacggagaatgatctccgcatcctggagcaggaggaggaggaggagcaggcaggaaagcctggggagcccagcaagaaagaagaaggacgggctggagcaggcctaggggacggggagcgcaaaaccaacgacaaagactccgagaaggaagccaaaaagagtagcaagaagcggaaccggaagcacagtggtgacgacagctttgacgagggcagcgtgtcagagtctgagtcggagtcagagagcggccaggctgaggaggagaaggaggaggccgaagcgctcaaggagaaggagaagcccaaggaa

SEQ ID NO: 7486 - DNA, 3547 bp, Homo sapiens
  SIMILAR (2372)..(3544): 971254mologous to Mus musculus ASR2D,accession number AF312033,Smith-Waterman Score=2035.
atgaagctttgcttgcccattgctcagctcctgctgtgtggcccagttcctaacaggccatggctggcggctgagggccctggtattacagcatcaggagctagagtaggaccgagcccgattcccaccttccaggtgcccctgagccagcctccagaggatgagctggataggctgacgaagaagctggttcacgacatgaaccacccgcccagcggggagtactttggccagtgtggtggctgcggagaagatgtggttggggatggggctggggttgtggcccttgatcgcgtctttcacgtgggctgctttgtatgttctacatgccgggcccagcttcgcggccagcatttctacgccgtggagaggagggcatattgcgagggctgctacgtggccaccctggagaaatgtgccacgtgctcccagcccatcctggaccggatcctgcgggctatggggaaggcctaccaccctggctgcttcacctgcgtggtgtgtcaccgcggcctcgacggcatccccttcacagtggatgctacgagccagatccactgcattgaggactttcacaggaagtttgccccaagatgctcagtgtgcggtggggccataatgcctgagccaggtcaggaggagactgtgagaattgttgctctggatcgaagttttcacattggctgttacaagtgcgaggagtgtgggctgctgctctcctctgagggcgagtgtcagggctgctacccgctggatgggcacatcttgtgcaaggcctgcagcgcctggcgcatccaggagctctcagccaccgccccctcagaccgtgccatgggtgacagtgatgacgagtacgatcgaaggcgcagggacaagttcagaagagagcgcagcgactacgaccgttcccgcgagagagatgaaagacgtcgaggggacgattggaatgacagagagtgggaccgtggccgtgagcgccgtagtcggggtgaatatcgggactatgaccggaatcggcgagagcgcttctcgccacctcgccacgaactcagcccgccacagaagcgcatgaggagagactgggatgagcacagctctgacccataccacagtggctatgagatgccctatgctgggggggggtgggggcccaacttatggcccccctcagccctggggccaccctgacgtccacatcatgcagcaccatgtcctgcctatccaggccaggctgggcagcattgcagagattgacctgggtgtgccgccgcccgtgatgaagaccttcaaggagtttctcctctccctggatgactcggtggatgagacggaggccgtcaagcgctataatgactacaagctggatttccggaggcaacagatgcaggatttcttcctggcgcacaaagatgaggagtggtttcggtctaagtaccacccagatgaggtggggaagcgtcggcaggagacgccggggggccctgcaaaaccgactgagggtcttcctgtccctcatggagacttggcttggtttgataaccttctccttggacattagacaaagctgattgccattgtcaagatgctggatgcagccgtgattaagatggaaggaggcacggagaatgatcttcgcatcctggagcaggaggaggaggaggagcaggcaggaaagcctggggagcccagcaagaaagaagaaggacgggctggagcaggcctaggggacggggagcgcaaaaccaacgacaaggatgagaagaaggaagacggcaagcaggctgagaatgacagttctaatgatgacaaaacaaagaagtcggagggtgatggggacaaggaagagaagaaagaagactccgagaaggaagccaaaaagagtagcaagaagcggaaccggaagcacagtggtgacgacagctttgacgagggcagcgtgtcagagtctgagtcggagtcagagagcggccaggctgaggaggagaaggaggaggccgaagaagcgctcaaggagaaggagaagcccaaggaagaagaatgggagaagcccaaggacgccgcggggctggagtgcaagccgcggccgctgcataagacctgctccctcttcatgcgcaacatcgcgcccaacatctcccgggccgagatcatctccctttgtaaaaggtacccaggctttatgcgggtggcgctctcagagccccagccagagaggaggtttttccgtcgtggctgggtgaccttcgaccgcagtgttaacattaaagagatctgttggaacctgcagaacatccgtggagctcgcagtctgatcaatcgctggtgctcaagagggaagggtcttagagctgctgtttctctggcaagcgggctccgggagtgtgagctgagccctggtgtgaacagggacctgacccggcgcgttcgcaacatcaacggcatcacccagcacaagcagattgtgcgcaacgacatcaagctggcggccaagctgatccacacgctggatgacaggacacagctttgggcctcagaaccagggacgcctcccctgcccacgagcctgccctcgcaaaacccgatcttgaagaatatcaccgactacctgatcgaggaagtaagcgccgaggaggaggagctgctggggagcagcgggggcgctcctcctgaggagcctcctaaggaagggaacccggcagagatcaacgtggagcgggatgagaagttgattaaggtcttggacaagctcctcctttacctgcgcatcgtgcattccttggattattacaacacctgtgagtaccccaacgaggacgagatgcccaatcgctgtgggatcatccacgttcgggggcccatgccacccaaccgcatcagtcacggggaagtgctggagtggcagaagacttttgaggagaagctcacgccgttgctgagtgtgcgggagtcactctcagaggaagaggcccagaagatggggcgcaaagacccagagcaggaagtggagaagttcgtcacctccaacacgcaggaactgggcaaggataagtggctgtgtcctctcagtggcaagaaattcaagggtcctgagtttgtgcgcaaacatatcttcaacaagcatgcagagaaaattgaggaagtgaaaaaggaagtcgcgttttttaacaacttcctcactgatgctaagcgcccagctctgcctgagatcaagccagcccagccacctggccccgcccagataattcatgtccctgtccgtgttgtactccccccaggtttgaccccaggactcccctacccacaccagactccccagggcctgatgccctatggtcagccccggcccccgatcttgggctatggagtccccacaggaggccctccatacccccatgccccgtatggtgctggtcgagggaactatgatgccttccgaggccagggaggttatcctgggaaacctcgcaacaggatggttcgtggagacccaagggccattgtggaatatcgggacctggatgccccagacgatgtagatttcttttga

SEQ ID NO: 7487 - DNA, 486 bp, Homo sapiens
  SIMILAR (8)..(175): 491254mologous to Mus musculus alpha-2 collagen type VI, subunit,accession number X62332,Smith-Waterman Score=113.
tgatactggacagaaaggcttgcctggccctcctggcccccctggctatggatcacagggaattaaaggggaacaaggaccacaaggcttcccaggcccaaagggcacaatgggccatggcctcccaggccagaagtgtaaagggagagcacggagaacggggcgatgtgggaaagaaaggtgataaaggagaaattggagagcctggatctccaggaaaacagggtttacaaggacccaaaggagacctaggacttacaaaagaagaaattatcaaacttattacagaaatatgtggttgtgggcccaaatgcaaagagactccactagagctggtgtttgtgatcgacagctcagaaagcgtggggccagagaactttcagatcattaaaaattttgtgaagactatggctgaccgggttgctctggaccttgccacggcccgcataggcataatcaactatagccataaggtggagaaggtgg

SEQ ID NO: 7488 - DNA, 1000 bp, Homo sapiens
  SIMILAR (151)..(846): 831254mologous to Homo sapiens putative p150,accession number U93569,Smith-Waterman Score=1011.
atggctgtgatgctgcactctgccaagtggcctctccctgtgctccagcagggcctcaccatgcagcctcctctgccttccaagcacatcagcgagagaagcgaagaagattcccgccagcccctgtactctgtaattctcatcttctatgaagcagggtttgcaatcctagtctttgataaaacagactttcagccaaaaaaggtcaaaagagacaaagaagggcattacataatggtaaagggatcaatgcaacaagaagagctgactatcctaaatatatatgcacccaatacaggagcatccagcttcataaagcaagttcttggagacccacaaagagacttagactcccacacaataatagtgggagactttaacaccccactgtcaatattagacagattaatgagacagaaaattaacaaggatattcaggacttgaactcagctctggaccaagtggacctaatagatatctacagaactcttcaccccaaatcaacagaatatacattcttctcagcaccacatcacacttattctaaaattgaccacataattggaagtaaaacactcctcagcaaatgcaaaagaacagaaatcataacaaacagtctctcagaccacagtgcaattaaattagaactcaggattgagaaattcactcaaaaccacacaactacatggaaattgaacaacctgcccctgaatgactactgggtaaataatgaaattaaggcagaaataaataagttctttgaaacaaatgagaacagagacacaatgtaccagaatctctgggacacagctaaagcagtgtttagagggaaatttatagcactaaaatggccacaggagaaagtaggaaagatctaaaatcaacaccctaacattgcaattaaaagaactagagaagcaagagcaaacacattcgaaagctagcagaagacaagaaataactaagatcagagcagaactgaaggagatagattcatga

SEQ ID NO: 7489 - DNA, 1758 bp, Homo sapiens
  SIMILAR (1)..(348): 791254mologous to Homo sapiens putative p150,accession number U93569,Smith-Waterman Score=487.
atgaactcagctctggaccagctggacctaatagacatctacagaaccttccaccccaaatcagcagaatatgcattcttctcagcactacatcacccttattctaaaattgagcacataattggaagtaaaacactcctcagcaaatgcaaaagaatggaaatcataacaaacaatctctcagaccacagtgaaatcaaattagaactcaggattaagaaactcactcaaaaccgcacatctacatggaaactgaacaacctgctgctgaatgactactgggtaaataacgaaattaaggcagagataaataagttctttgaaaccaaggagaacaaagatacaagctgcgctccttcctccaggttagaagtccttggggccaaagggcatgcacatatgttcctctatgccacactctggatgcatgcaattccagaattctcagttgaaatggccacagcctggtcagagtctgcctccttggaccacagtcccatcctcagtttcctgccccaggaattcccagcagatcgagatggttccttggctctccatagcacttatgaaagtcttcgtttgtctgcttcttcctggactgtgaatcctttgaggggtataaatatgatgccttcatcattggcaccaagtagccaaggttgtgggcccaaatgcaaagagactccactagagctggtgtttgtgatcgacagctcagaaagcgtggggccagagaactttcagatcattaaaaattttgtgaagactatggctgaccgggttgctctggaccttgccacggcccgcataggcataatcaactatagccataaggtggagaaggtggctaatttgaagcagttctccagcaaggatgacttcaagttggctgtggacaacatgcagtatctgggggaaggcacatacacagccactgctctgcaagcagccaacgacatgtttgaagatgcaaggccaggtgtaaaaaaagtggccttggtcatcactgatggacagacagattctcgtgataaagagaaactgacagaggtggtgaagaatgccagtgacaccaatgtggagatatttgtgataggggtggtgaagaaaaatgatcccaactttgaaatattccacaaagaaatgaatctaattgctactgacccagagcatgtttaccagtttgatgatttctttaccctgcaagacaccctgaagcaaaaattgtttcaaaaaatttgtgaggattttgattcctatctcgttcaaatttttggttcatcgtcacctcaacctggatttgggatgtcaggggaagaactcagtgaatctactccagagcctcaaaaagaaatttctgagtcattgagtgtcaccagagaccaggatgaagatgataaggctccagagccaacgtgggctgatgatctgcctgccactacctcatctgaggccaccaccacccccaggccactgctcagcacccctgtggatggggcagaggatcctagatgtttggaagccttgaagcctggaaactgtggtgaatatgtggttcgatggtattatgacaaacaggtcaactcttgtgcccgattttggttcagtggctgtaatggctcaggaaatagattcaacagtgaaaaggaatgtcaagaaacctgcattcaaggatgagcaagtaaattggcctgtctctatcaaaagcatagaactccctaatttccacatattcacccaatacaaatacagcactat

SEQ ID NO: 7490 - DNA, 361 bp, Homo sapiens
  SIMILAR (9)..(359): 611254mologous to Homo sapiens ribokinase,accession number AJ404857,Smith-Waterman Score=329.
ggcacgagggacttaaaatgttgcatactacccccatagctacagcttgcctggatgccgacttgtacttactgacagaagtgcactgcccaaaggaactgggtgcctgtatgccaactggtctgacagttgacagagctactgatgctggggacggtgctttagtgctctcgaaaaggcgcagtcaggccctgatcattaccttacgggctgaaggatgtgtgatgctgccccaaaccgatcctgagcctgagctcattgccacagataatggcaaggctgcggataccacggatgctggtgacagctttgtgggagctctggccttctacctggcttactatccaaatctgtccttgga

SEQ ID NO: 7491 - DNA, 304 bp, Homo sapiens
  SIMILAR (3)..(116): 1001254mologous to Homo sapiens KIAA0476 protein,accession number AB007945,Smith-Waterman Score=195.
  misc_feature (1)...(304): n = a,t,c or g
tcccagagctacgggctgagttgtttgagtctcttcaagagcaacctggggccctgcctgtgccaggcccttcccgtagcgcccccagcagtcctgctcctcgccgtaccaaacaggtaagcagtgggtggaccgcactgagggacccggatcaggctgaaggctgctgcnnnnnnnnnnnnnnnnnnnnnnnnnnnnnnnnnnnnnnnnnnnnnnnnnnnnnnnnnnnnnaggagtttaaatgtgcttggcacataagcaaccctgtataaacattagttgctattatcactgtcattatcac

SEQ ID NO: 7492 - DNA, 326 bp, Homo sapiens
  SIMILAR (27)..(257): 751254mologous to Mus musculus polydom protein,accession number AF206329,Smith-Waterman Score=346.
aaaatacttctcagtaccatggcgtgggatatacaggcttagggtgtgaaacggacatcgatgagtgcaggccactgccttgcctcaacaatggagtttgtaaagacctagttggggaattcatttgtgagtgcccatcaggttacacaggtcagcggtgtgaagaaaatataaatgagtgtagctccactccttgtttaaataaaggaatctgtgctgatggtgtggctggctatcgttgcacatgtgtgaaaggattggcacgtaatatgattcccatgtttctatggtgtcttacaaacttgtacaccaccgcatattattac

SEQ ID NO: 7493 - DNA, 265 bp, Homo sapiens
  misc_feature (1)...(265): n = a,t,c or g
atcagaagtcaactcaatgaaaaggtagcacagctgtatgcagatttggatggaggtttcttccttcccaccctgctcttcccnnnnnnnnnnnnnnnnnnnnnnnnnnnnnnnnnnnnnnnnnnnnnnnnnnnnnnnnnnnnnnnnnnnnnnnnnnnnnnnnnnnnnnnnnnnnnnnnnnnnnnnnnnnnnnnnnnnnnnnnnnnnnnnnnnnnnnnnnnnnnnnnnnnnnnnnnnnnnnnnnnnnnnnnnnnnnnnnnnnnnn

SEQ ID NO: 7494 - DNA, 455 bp, Homo sapiens
  SIMILAR (141)..(317): 611254mologous to Homo sapiens Human myelin oligodendrocyte glycoprotein gene,accession number AAZ29204,Smith-Waterman Score= 160.
  misc_feature (1)...(455): n = a,t,c or g
agtgcctgtagtcccagctgctggggaggctgaggcaggagaatggcgtgaatctgggaggcggagcttgcagtgagccgagatcccaccactgcactccagcctggttaggccgggtgcagtagctcatgcctgtaatcccagcacttttggaggccaaggtaggcggatcacctgaagtcaggagtttgagaccagcctggccaacatggtgaaatcttgtctctactaaaactacaataatttcctgggcgtggtggcgcacacctgtaatcccagctacttgggaggctgaagcaggagaatcacttgaacccaggaggtggaggatgcagtgagccgagattgtgccactggactccagtaagggcgacagtgggagactccgttcaaaaaaaataaaaatctcaagatggtcctcgtgccaagcttggcgtntgaagggcatacgattc

SEQ ID NO: 7495 - DNA, 372 bp, Homo sapiens
  SIMILAR (8)..(367): 781254mologous to Homo sapiens CTCL tumor antigen se89- 1,accession number AF273053,Smith-Waterman Score=469.
gtcagtatcagacaagggggggatttcacccgcagcgattgctaaggagtgtcaggtacagatagcgtaccatgatcagaaaaggcaggtcgtaccagtttcgacaagggggttcaacaataagcatctccgtgagtcactgtgtagtgatcctctgaaagagaccaactctgatgagcagcattccacttcggctttaactgaagtagaaatgaaccagcctcaacatgccacagagttaatggtgacttctgatcatattgtacctggtgatatggcccgggaaccagtagaagaaacaacaaaatcccccagtgatgtaaacatttctgctcaaccagctctttcaaattttataagccagctcgtgcc

SEQ ID NO: 7496 - DNA, 352 bp, Homo sapiens
ggcacgaggggaaacagcgatgagctcgatgagccgatcaagactgtgtttgccgatgtggcttttgtcaagaagcacaatctgatgagcctgaattcgatcaactggtcccgggtcctggtgcagatggcccatcacttctttgcttacttccagtgtacgccatccttggacacacatcccctacccctgctggtcgtatctctcttcttctctacatatctctttcatacctttttcgtcactcctctatttctaatatttttgtcttcctcttctcattttcacttatctatctatctctcttctatcattctttcttctcattcattttcttcgtacaccattcttc

SEQ ID NO: 7497 - DNA, 395 bp, Homo sapiens
  SIMILAR (8)..(394): 971254mologous to synthetic construct Human serum albumin,accession number A00279,Smith-Waterman Score=673.
  misc_feature (1)...(395): n = a,t,c or g
ggcacgaggcagcaaatgttgtaaacatcctgaagcaaaaagaatgccctgtgcagaagactatctatccgtggtcctgaannnnttatgtgtgttgcatgagaaaacgccagtaagtgacagagtcaccaaatgctgcacagaatccttggtgaacaggcgaccatgtttttcagctctggaagtcgatgaaacatacgttcccaaagagtttaatgctgaaacattcacctttcatgcagatatatgcacactttctgagaaggagagacaaatcaagaaacaaactgcacttgttgagctcgtgaaacacaagcccaaggcaacaaaagagcaactgaaagctgttatggatgatttcgcagcttttgtacagaagtgctgcaaggctgaca

SEQ ID NO: 7498 - DNA, 15974 bp, Homo sapiens
  SIMILAR (13210)..(13356): 951254mologous to Homo sapiens HSA,accession number AAR32563,Smith-Waterman Score=250.
gcacaatgaagtgggtaacctttatttcccttctttttctctttagctcggcttattccaggggtgtgtttcgtcgagatgcacgtaagaaatccatttttctattgttcaacttttattctattttcccactaaaataaagttttagtaaactctgcatctttaaagacttattttggcatttatttctaaaatggcatcgtattttgtatttgtgaagtcttacaaggttatcttattaataaaattcaaacatcctaggtaaaaaaaaaaaaaggtcagaattgtttagtgactgtaattttcttttgcgcactaaggaaagtgcaaagtaacttagagtgactgaaacttcacagaatagggttgaagattgaattcataactatcccaaagacctatccattgcactatgctttatttaaaaaccacaaaccctgtgctgttgatctcataaatagaacttgtatttatatttattttcattttagtctgtcttcttggttgctgttgatagacactaaaagagtattagatattatctaagtttgaatataaggctataaatatttaataatttttaaaatagtattcttggtaattgaattattcttctgtttaaaggcagaagaaataattgaacatcatcctgagtttttctgtaggaatcagagcccaatattttgaaacaaatgcataatctaagtcaaatggaaagaaatataaaaagtaacattattacttcttgttttcttcagtatttaacaatccttttttttcttcccttgcccagacaagagtgaggttgctcatcggtttaaagatttgggagaagaaaatttcaaagccttgtaagttaaaatattgatgaatcaaatttaatgtttctaatagtgttgtttattattctaaagtgcttatatttccttgtcatcagggttcagattctaaaacagtgctgcctcgtagagttttctgcgttgaggaagatattctgtatctgggctatccactaaggtcgtcactggtcacatggctattgagtacttcaaatatgaccagtgcaactgagaaacaaaaacttaaattgtatttaattgtagttaatttgaatgtatatagtcacatgtggctaatggctactgtattggacagtacagctctggaacttgcttggtggaaaggactttaatataggtttcctttggtggcttacccactaaatcttctttacatagcaagcattcctgtgcttagttgggaatatttaatttttttttttttttaagacagggtctcgctctgtcgcccaggctggagtgcagtggcgcaatctcggctcactgcaaactccgctcccgggttcacgccattctcctgcctcagcctcccgagtagctgggactacaggcgcccgccatcacgcccggctaatcttttgtatttttagtagagatggggtttcaccgtgtgccaggatggtctcaatctcctgacatcgtgatctgcccacctcggcctcccaaagtgctgggattacaggagtgagtcaccgcgcccggcctatttaaatgttttttaatctagtaaaaaatgagaaaattgtttttttaaaagtctacctaatcctacaggctaattaaagacgtgtgtggggatcaggtgcggtggttcacacctgtaatcccagcactttggaaggctgatgcaggaggattgcttgagcccaggagtacaagaccagcctgggcaagtctctttaaaaaaaacaaaacaaacaaacaaaaaaattaggcatggtggcacatgcctgtagtcctagctacttaggaggctgacgtaggaggatcgtttggacctgagaggtcaaggctacagtgagccatgattgtgccactgcactccagcctgggtgacagagtgagactctgtctcaaaaaagaaaaaggaaatctgtggggtttgttttagttttaagtaattctaaggactttaaaaatgcctagtcttgacaattagatctatttggcatacaatttgcttgcttaatctatgtgtgtgcatagatctactgacacacgcatacatataaacattagggaactaccattctctttgcgtaggaagccacatatgcctatctaggcctcagatcatacctgatatgaataggctttctggataatggtgaagaagatgtataaaagatagaacctatacccatacatgatttgttctctagcgtagcaacctgttacatattaaagttttattatactacatttttctacatcctttgtttcagggtgttgattgcctttgctcagtatcttcagcagtgtccatttgaagatcatgtaaaaattagtgaatgaagtaactgaatttgcaaaaacatgtgttgctgatgagtcagctgaaaattgtgacaaatcacttgtaagtacattctaattgtggagattctttcttctgtttgaagtaatcccaagcatttcaaaggaattttttttaagttttctcaattattattaagtgtcctgatttgtaagaaacactaaaaagttgctcatagactgataagccattgtttcttttgtgatagagatgctttagctatgtccacagttttaaaatcatttctttattgagaccaaacacaacagtcatggtgtatttaaatggcaatttgtcatttataaacacctctttttaaaatttgaggtttggtttctttttgtagaggctaatagggatatgatagcatgtatttatttatttatttatcttattttattatagtaagaacccttaacatgagatctaccctgttatatttttaagtgtacaatccattattgttaactacgggtacactgttgtatagcttactcatcttgctgtattaaaactttgtgcccattgattagtaacccctcgtttcgtcctcccccagccactggcaaccagcattatactctttgattctatgagtttgactactttagctaccttatataagtggtattatgtactgtttatctttttatgactgacttatttcccttagcatagtgcattcaaagtccaaccatgttgttgcctattgcagaatttccttcttttcaaggctgaataatattccagtgcatgtgtgtaccacattttctttatccattaatttgttgattgatagacatttaggttggttttctacatcttgactatcatgaatagtgttgcaatgaacacaggagagctactatctcttagagatgatatcatggtttttatcatcagaaaacacccactgatttctatgctaattttgttacctgggtggaataatagtacagctatatattcctcattttagatatctttgtatttctacatacaataaaaaagcagagtacttagtcatgttgaagaactttaaacttttagtatttccagatcaatcttcaaaacaaggacaggtttatctttctctcaccactcaatctatatatacctcttgtgggcaaggccagtttttatcactggagcctttcccctttttattatgtacctctccctcacagcagagtcaggactttaactttacacaatactatggctctacatatgaaatcttaaaaatacataaaaattaataaattcbgtctagagtagtatattttccctggggttacgattactttcataataaaaattagagataaggaaaggactcatttattggaaagtgattttaggtaacatttctggaagaaaaatctctatatcttaatagtcacttaatctatgatggattgtgttactcctcagttttcaatggcatatattaaaacatggccctctaaaaagggggcaaatgaaatgagaaactctctgaatgtttttctcccctaggtgaattcacctgctgcttagaagcttattttctcttgatttctgttataatgattgctcttaccctttagttttaagtttcaaaataggagtcatataactttccttaaagctattgactgtctttttgtcctgttttattcaccatgagttatagtgtgacagttaattcttatgaaaattatatagagatggttaaatcatcagaaactgtaaaccaacgattgggaggggaagcggatttttaaatgatttcctgaccaagcttaaccagtatattaaatcctttgtactgttctttggctataaagaaaaaaggtactgtccagcaactgaaacctagctttcttccatttagcataccctttttggagacaaattatgcacagttgcaactcttcgtgaaacctatggtgaaatggctgactgctgtgcaaaacaagaacctgagagaaatgaatgcttcttgcaacacaaagatgacaacccaaacctcccccgattggtgagaccagaggttgatgtgatgtgcactgcttttcatgacaatggagagacatttttgaaaaagtaagtaatcagatgtttatagttcaaaattaaaaagcatggagtaactccataggccaacactctataaaaattaccataacaaaaatattttcaacattaagacttggaagttttgttatgatgattttttaaagaagtagtatttgataccacaaaattctacacagcaaaaaatatgatcaaagatattttgaagtttattgaaacaggatacaatctttctcaaaaatttaagatagacaaattctttaatgtattccgcagatatgtatatatggttgttataattgatttcgttttagtcagcaacattatattgccaaaatttaaccatttatgcacacacacacacacacacacacacttaacccttttttccacatacttaaagaatgacagagacaagaccatcatgtgcaaattgagcttaattggttaattagatatctttggaatttggaggttctggggagaatgtcgattacaattatttctgtaatattgtctgctatagaaaagtgactgtttttcttttttaaaatttagatacttatatgaaattgccagaagacatccttacttttatgccccggaactccttttctttgctaaaaggtataaagctgcttttacagaatgttgccaagctgctgataaagctgcctgcctgttgccaaaggtattatgcacacgaatagaaaaaaagagtttattatccaacctgattttgtccattttgtggctagatttagggaccctgagtgtctgatacaaactttcccacatggtcaaaaaagccttccttttatctgtcttgaaaatctttcatctttgaaggcctacactctcgtttcttcttttaagatttgccaatgctgatctgtcagaggtaatcactgtgcatgtgtttaaagatttcaccactttttctgctggtgatcactatagtgaaatactgaaacttgtttgtcaaattgcacagcaaggggacacagttcttgtttatcttttcatgataatttttagtagggagggaattcaaagtagagaattttactgcatctagatgcctgagttcatgcattcattccataaatatatattatggaatgctttattttcttttctgaggagtttactgatgttggtggaggagagactgaaatgaattatacacaaaatttaaaaattagcaaaattgcagcccctgggatattagcgtactctttctctgacttttctcccacttttaaggctctttttcctggcaatgtttccagttggtttctaactacatagggaattccgctgtgaccagaatgatcgaatgatctttccttttcttagagagcaaaatcattattcgctaaagggagtacttgggaatttaggcataaattatgccttcaaaatttaatttggcacagtctcatctgagcttatggaggggtgtttcatgtagaatttttcttctaattttcatcaaattattcctttttgtagctcgatgaacttcgggatgaagggaaggcttcgtctgccaaacagagactcaagtgtgccagtctccaaaaatttggagaaagagctttcaaagcatggtaaatacttttaaacatagttggcatctttataacgatgtaaatgataatgcttcagtgacaaattgtacatttttctgtattttgcaaagtgctgtcaaatacatttctttggttgtctaacaggtagcactctaatagaggtcaaaatcagaatatcaatgacaatttgacattatttttaatcttttcttttctaaatagttgaataatttagaggacgctgtcctttttgtcctaaaaaaagggacacatatttaagttctatttatttataaaatcttggactcttattctaatggttcattatttttatagagctgtaggcatggttctttatttaattttttaaagttatttttaatttttgtggatatagagtaggtatacatatttacggggtatatgagatattttgatctaagtatacaacatatataatccctttatttaattttatcttccccccaatgatctaaaactatttgcttgtccttttctgtcttatagttaaattcagtcaccaactaagttgaagttacttcttatttttgcatagctccagctctgatcttcatctcatgtttttgcctgagcctctgttttcatattacttagttggttctgggagcatactttaatagccgagtcaagaaaaatactagctgccccgtcacccacactcctcacctgctagtcaacagcaaatcaacacaacaggaaataaaatgaaaataatagacattatgtatgctctctagaaactgtcaattgaactgtatttgctcatcattcctaccatctacaccaccaaaatcaacccaatttatgaaaaaaaaaccgccccaccatacaattctacacagataaacaggctatgattggttttgggaaagcagtcacctttacctgatttaggcaactgtgaaatgactagagaatgccgaaaattagacgtttacatcttgtcatagactttgcagatagtgctggatctttctttttataagtaagatcaataaaaactccctcattctgtagaagttatgatttcttttctaagagacctttagaagtcagaaaaaatgtgtttcccttgcgaaaaaagataactggagtttgtgtagtacttcccagattataaaatgcttttgtatgtattatctaatttaatcctcaaaacttcttcaatttagcatgttgtcatgacactgcagaggctgaagctcagagacgctgagccctctgctaacaagtcctactgctaacaagtgataaagcccgagctggaagtcacatctggactccaaacctgatgcttctcagcctgttgccccttttagagttcctttttaatttctgcttttatgacttgctagatttctacctaccacacacactcttaaatggataattctgccctcaggataagtgattaccatttggttcacaactcgaactaatgaattttaaaaattatttctgtatgtccattttgaattttcttatgagaaatagtatttgcctagtgttttcatataaaatctcgcatgataataccattttgattggcgattttctttttagggcagtagctcgcctgagccagagatttcccaaagctgagtttgcagaagtttccaagttagtgacagatcttaccaaagtccacacggaatgctgccatggagatctgcttgaatgtgctgatgacagggtaaagagtcgtcgatatgctttttggtagcttgcatgctcaagttggtagaatggatgcgtttggtatcattggtgatagctgacagtgggttggattgtcttctgtgctttcgtctgtcctatcttcaatctttccctgcctatggtggtggtacctttctgtttttaacctgctataaattaccagataaacccattcactgatttgtaactcctttcagtcatgctctaactgtaaatgaaggcttaaactgaagtagaacagttacaaggttttacttggcagaacatcttgcaaggtagatgtctaagaagatttttttttctttttttaagacagagtttcgctcttgtttcccaggctggggtgcaatggtgtgatcttggctcagcgcaacctctgcctcctgggttcaagtgattttcatgcctcagcctcccaagtagctgggattacaggcatgcgccaccacacctggctaattttgtatttttagtagaggcggggtttcaccatattgtccagactggtctcgaactcctgacctcaggtgatccacccgccttggcctcccaaagtgctgggattacaggcatgagccaccttgcccagcctaagaagattttttgagggaggtaggtggacttggagaaggtcactacttgaagagatttttggaaatgatgtatttttcttctctatattccttccctaaattcactctgtttgttagatgtgcaaatatttggaatgatatctcttttctcaaaacttataatattttctttctccctttcttcaagattaaacttatgggcaaatactagaatcctaatctctcatggcactttctggaaaatttaaggcggttattttatatatgtaagcagggcctatgactatgatcttgattcatttttcaaaaatcttctatattttatttagttatttggtttcaaaaggcctgcacttaattttgggggattatttggaaaaccagcattgagttttaatgaaaaaaacttaaatgccctaacagtagaaatataaaattaataaataactgagctgagcacctgctactgattagtctattttacttccgtgggaatgtttttgtagtcctatctccatctccaggtttaggagcaaacagagtatgttcatagaaggaatatgtgtatggtcttagaatacaatgaacatgttctgccaacttaataaaggtctgaggagaaagtgtagcaatgtcccttcgtgttgaacaatttccaccaacttacttataggcgccccttgccccgtatatctgtgaaaatcaagattcgctctccagtaaactgaaggaatgctgtgaaaaacctctgttggaaaaatcccactgcattgccgaagtggaaaatgatgagatgcctgctgacttgccttcattagctgctgattttgttgaaagtaaggatgtttgcaaaaactatgctcaggcaaacgatgtcttcctgggcatgtacgtagataagaaattattcttttatagctttggcatgacctcacaacttaggaggatagcctaggcttttctgtggagttcctacaatttccctgctgcccacaatgtttcttcctccttccctttcccacgctttcccaatttttgacatcgttaattcgttgaatacattgtcataacataatacatgttcacggcaaagctcaacattccttactccttaggggtatttctgaaaatacgtctagaaacattttgtgtatatataaattatgtatacttcagtcattcattccaagtgtatttcttgaacatctataatatatgtgtgtgactatgtattgcctgtctatctaactaatctaatctaatctagtctatctatctactctatgcaatgatagcaaagaagtataaaaagaaatatagagtctgacacaggtgctttatatttggtgaaaagaccagaagttcagtatcctggcaatatggtaggcaactcaattacaaaataaatgtttacgtattgtcagaagttgtggtgataaactgcatttttgttgttggattatgataatgcactaaataatatttcctaaaattatgtaccctacaagatttcactcatacagagaagaaagagaatattttaagaacatatctctgcccatctatttatcagaatccttttgagatgtagtttaaatcaaacaacctgttaataaaaataacaagtatcattcatcaaagacttcatatgtgccaagcagtgtgtgttttgtgtagattatgtcatatagttctcataatccaccttccgagacagatactatttattttttgagacagagttttactcttgttgcccaggctggagtgcaatggtgccatctcggctcactataaccttcgcctcccaggttcaagcgattctcctgcctcagcctcctgggattacaggcatgcaccaccatgcctggctaattttgtatttttactagagatggggtttcaccatgttggtcagactggtctcaaactcctgacctctggtgatatgcctgcctcagcctcctaaagtgctgggattacaggcatgagccactgtgcccagccgacagatactattattatttccattctaccgagaaggagactaaggctctgatcatttaaataagttgcctaaggtgatgcagtgatataagtagcagagctaggaattgagccttggtaactttaactctggaccccaagtccttagctactaagctttactgcatggggtttagtcaaattaagacttttggaatatgcgttacttttgagattagctttgtgatattttttgtgctcatttgtccaacaaagtctattttattttcatcttaattcgctttttgtatgaatatccaagaaggcatcctgattactctgtcgtgctgctgctgagacttgccaagacatatgaaaccactctagagaagtgctgtgccggtgcagatcctcatgaatgctatgccaaagtggtaggtttattgttcgcaaaaaatgtagttctttgactgatgattccaataatgagaaagaaaaataatgcaagaatgtaaaatgatatacagtgcaatttagatcttttcttgagatcgtttcaattctggaatcttaaacatgaaagaaaaagtagccttagaatgattaacaaaatttagactagttagaatagaaagatctgaatagagcaatctctacacacttttgatctttttttctctttttcacaatcctgagaacaaaaaaaaattaaatttaaatgttaattagaagatatttaacttagatgtaaagtgagttaacctgattccaggattcatcacgtactagaattagtatcttatggtaaattatagaacctatccctttagaatattttcaaatctttttgaggatgtttaggaatagttttacaagaaattaagttaggagaggaaatctgttctggaggatttttagggttcccactagcatatgtaatggtttctgaactattcagaatcagagaaaactcatttttcctgctttcaagaagctactgtatgccaggcaccatgcacaaacaatgaccaacgtaaaatctctcattttggagagcctggaatctaactggaaaggtgaactaataataatactatgtacaatcatagccatcatttattaaacttttcttctatgcaaggcactgtttaatttccttagcttacctggtttacagagcagctctatgagatgagtgccatctttgcccctattttagggataaggattccgaaatgtggagatggtaagtcaaattgcacaactgaagcatgacttacatgacttggctcaaatactggtcattgaactccagagcctgaatattcttaaccacttacatgatgcaagctgaccaaataaatagttcgaatgtattgtgacagagcggcattgatattcatctattcatgtggctttgagtaggaagaagaaaggatatcattctgaccagagcggtgaaaaacaacctgcatctgatcctgaggcataatactattaacacaattcttttatgtttcagttcgatgaatttaaacctcttgtggaagagcctcagaaatttaatcaaacaaaattgtgagctttttgagcagcttggagagtacaaattccagaatgcgtaagtaatttttattgactgattttttttatcaatttgtaattatttaagacttaatatagagccacctagcatagaacttttcagaatgaaaatacattgcatatttctaatcactctttgtcaagaaagataggagaggagagataaaatagttgatggggtggagaggtctatatttgwatgtagtctaaaaattgttctcttaagattggaagtatgtaggctgggagggtaaataccaaatcttggtatatcagaactgagcatgtcccttgacggttaagaaatagttaatgggcaaatagagcatggcaatattttgtagagcagcaagtagtaggccttgaatagatgtcgctcaaaaagtaatatgtaagctgaacacaaaaatgtaacaaatgaatttagatacatatttgaatattaaattcaggttgtttgggagatgcacctagtctttgatggttaaacctttccctccatagaagagacagagacagaatggcttgctggactaatgtcccaattcaatagagtcttatctacgaaggttaaaaacaagaagagacatattatacagtagatatttcttgtgtggctcatacacatggtgctcttctgattatggattttagagataataacagtgaacaagacatagtttctttcctcgagtagattaaagtcctacattgacttttaatggtgactggcattcttaatacatgattattatatattaggtactatgtcacattaattataatactttactatttttaatttaacccttgaactatccctattgagtcagatatatttccttccattttctacttgtatctttcaagtttagcatatgctgatacatatgaagctctctccaggttttattgaaagaagaaattaatcaatttattactgtccctgaattaggcaactcactttcccaagattatgcccgtggtacaggtggaactcaaagccaagtttaactagttgttcaggagaatgttttctaccctccactaacccactactctgcagatggagataatatgatgaatggaacatagcaacatcttagttgattccggccaagtgttctctgttttatctactatgttagacagtttcttgccttgctgaaaacacatgacttctttttttcaggctattagttcgttacaccaagaaagtaccccaagtgtcaactccaactcttgtagaggtctcaagaaacctaggaaaagtcagcagcaaatgttgtaaacatcctgaagcaaaaagaatgccctgtgcagaagactatgtgagtctttaaaaacatataataaattaataatgaaaaaattttccctttagatattgctaatgctacctttcataagcagaaggaagtaatgtgtgtgtgtgcatgttttgtgcatgtgtgtgtgcatgcacgtgtgtgtatgtgtgatattggcagtcaaggccccgaggatgataattttttttttttttttgagacggagtctcgctttgttgtccaggctggagtgcagtggtgccatctcggctcactgcaacctccgcctcccaagttcaagccattctcctgcctcagcctcccaagtagctgggactacaggtgcatgccaccatgcctggctaattttttgtatttttagtagaaaattttcagcttcacctcttttgaatttctgctctcctgcctgttctttagctatccgtggtcctgaaccagttatgtgtgttgcatgagaaaacgccagtaagtgacagagtcaccaaatgctgcgacagaatccttggtgaacaggcgaccatgcttttcagctctggaagtcgatgaaacatacgttcccaaagagtttaatgctgaaacattcaccttccatgcagacatatgcacactttctgagaaggagagacaaatcaagaaacaaacgtgaggagtatttcattactgcatgtgtttgtagtcttgatagcaagaactgtcaattcaagctagcaactttttcctgaagtagtgattatatttcttagaggaaagtattggagtgttgcccttattatgctgataagagtacccagaataaaatgaataactttttaaagataaaatcctctgttataatattgctaaaattattcagagtaatattgtggattaaagccacaatagaataacatgttagaccatattcagtagaaaaagatgaccaattaactgataaatttgtgcacatggcaaattagttaatgggaaccataggagaatttatttctagatgtaaataattattttaagtttgccctatggtggccccacacatgagacaaacccccaagatgtgacttttgagaatgagacttggataaaaaacatgtagaaatgcaagccctgaagctcaactccctattgctatcacaggggttataattgcataaaatttagctatagaaagttgctgtcatctcttgtgggctgtactcctcgtctaggcttaagagtaatattgcaaaacctgtcatgcccacaccaatctctccctggcattgttgtctttgcagatgtcagtgaacgcgacccagcagctcccatgagtttgcatagccttattttctatagcctccccactattagctttgaagggagcaaagtttaagaaccaaatataaagtttctcatctttatagatgagacccattttaaataaagtccaagataattaaatttttaaggatcatttttagctctttaatagcaataaaactcaatatgacataatatggcacttccaaaatctgaataatatataattgcaatgacatacttcttttcagagatttactgaaaagaaatttgttgacactacataacgtgatgagtggtttatactgattgtttcagttggtcttcccaccaactccatgaaagtggattttattatcctcatcatgcagatgagaatattgagacttatagcggtatgcctggcccaagtactcagagttgcctggctccaagatttataatcttaaatgatgggactaccatccttactctctccatttttctatacgtgagtaatgttttttctgttttttttttttctttttccattcaaactcagtgcacttgttgagctcgtgaaacacaagcccaaggcaacaaaagagcaactgaaagttgttatggatgatttcgcagcttttgtagagaagtgctgcaaggctgacgataaggagacctgctttgccgaggaggtactacagttctcttcattttaatatgtccagtattcatttttgcatgtttggttaggctagggcttacggatttatatatcaaaggaggctttgtacatgtgggcccgggatcttattttacacacaattgtcttacaaaatgactaaaacagcactttgtttttatctcctgctctattgtgccatactgttgaatgtttataatgcatgttctgtttccaaatttgtgatgcttatgaatattaataggaatatttgtaaggcctgaaatattttgatcatgaaatcaaaatattaatttatttaaacatttacttgaaatgtggtggtttgtgatttagttgattttataggctagtgggagaatttacattcaaatgtctaaatcacttaaaatttccctttatggcctgacagtaacttttttttattcatttggggacaactatgtccgtgagcttccatccagagattatagtagtaaattgtaattaaaggctatgatgcacgtgaaatcactttgcaatcatcaatagcttcataaatgttaattttgtatcctaatagtaatgctaatattttcctaacatctgtcatgtctttgtgttcagggtcaaaaacttgttgctgcaagtcaagctgccttaggcttataac

SEQ ID NO: 7499 - DNA, 492 bp, Homo sapiens
tcctgctagagatgtgatttagtcttttcatgtttttgcccaacctgatctcaatctcctaagctcaagagatcttcctgctttggcatcccaaagtactggcattactggcatgagccaccaatgcccaggctaatattgattttttttattgcttttactccatttaattttcaagccgtgcttaaattagtattctaaatgtttaaaatacttagatccatttgaatcaaatgaatctaaagaagttcacggcacagggtcaaattgataaagggtgatggaacttgatacaggtttttcttttcacaaaaaatcttgcacggactacaaaaaaaggtagggcaaatccccaaaacagaggaaaatgtgtgtaaaagccacatgatgtgaccacaacacaaagaaaccaagaaattagtaaccaaaaattggataaaatgaatcaaaacacttgaattttaaaaagtcttatattgataaggaaatgcc

SEQ ID NO: 7500 - DNA, 338 bp, Homo sapiens
  SIMILAR (1)..(228): 921254mologous to Homo sapiens HEPATOCYTE GROWTH FACTOR RECEPTOR PRECURSOR (MET PROTO-ONCOGENE TYROSINE KINASE),accession number AC004416,Smith-Waterman Score=350.
ggcacgaggagctgtgagaatatacacttacattctgaagccgttttatgcacggtccccaatgacctgctgaaattgaacagcgagctaaatatagagtggaagcaagcaatttcttcaaccgtccttggaaaagtaatagttcaaccagatcataatttcacaggattgattgctggtgttgtcttaataataacagcactgttattactacttgggtttattctgaggtataacattgaagactaattaattttctgagcttgacctactttgatactatcaagtcgacatttaatatatctgcaagtaattttgcttttcaattttcaaatcag

SEQ ID NO: 7501 - DNA, 385 bp, Homo sapiens
  SIMILAR (3)..(224): 901254mologous to Mus musculus putative,accession number AK009166,Smith-Waterman Score=334.
ccacggctgccggctgtcaactggttgccagctgcgacattgccgtggcgagcgacaagtcctcttttgccactcctggggtgaacgtcgggctcttctgttctacccctggggttgccttggcaagagcagtgcctataaaggtggccttggagatgctctttactggtgagcccatttctgcccaagaagccctgctccacgggctgctcaacaaggtgctgctataagtatatcctatataagacacctagatgatcgctaggtatacgctacacaataatactttaaacgactcgggtattgtatccattctattaccaacaaaatttatactagtgaaaaattctaacgagtcataaatgagcctccaccactcagcaac

SEQ ID NO: 7502 - DNA, 374 bp, Homo sapiens
tctcagtctgcatgccatggccacactagttcagatggtctgaacaaagtggtcagatggcagaaatgataagaagtatggcaaaagttcctattgtctggaaccatggcagtatagtgtcacctcaacctcaaatgatatggctcattgtaggagctaaacataaggatttgtggaaactattaatagctcttaataagatcacaatttgggaatgaattaaaaaagcatctataaagacactctacaaacttgtctttggatattacatgaactaacagagcagatattcaaagcatcccaggcacacctgaccttactgacacaaactggactgcttgagtgaccaagatttcctattaccattctagtcc

SEQ ID NO: 7503 - DNA, 792 bp, Homo sapiens; identical to SEQ ID NO: 4753
  SIMILAR (302)..(487): 381254mologous to Homo sapiens tRNA-guanine transglycosylase,accession number AF302784,Smith-Waterman Score=80.

SEQ ID NO: 7504 - DNA, 523 bp, Homo sapiens
  SIMILAR (235)..(2): 751254mologous to Homo sapiens Human secreted protein, SEQ ID NO: 4718,accession number AAG00637,Smith-Waterman Score=298.
  misc_feature (1)...(523): n = a,t,c or g
ggtcaggagatcgagaccatcctggctaacacagtgaaaccctgtctctactaaaaatacaanaaagtagccgggcgtggtggtgggcgcctgtagtcccggctactcaggaggctgaggcaggagaatggtgtgagcccgggaggtggagcttgcagtgagccaagatcgcaccactgcactccagcctgggagacagagcgagactccgtctcaaaaaaaaaaaaaaaaaaattatagagttggggtcttgctacattgccaggactggtcttgaactcctggggtcaagcatcctcctgtcttggcctcccaaagtgttgggattagaagcatgagccgctgtgcccagcctgacggggccttttagtgggaggagttgccattacactacgtccagtaagctccagactttcggaaaagattggtggacgggaatgctgtcatggatgggatcttgccaagaaccatcacgtgttaatttagttgcttaaacaaaaggtgttctgtttcttaactaaaa

SEQ ID NO: 7505 - DNA, 593 bp, Homo sapiens
  SIMILAR (52)..(591): 761254mologous to Homo sapiens tRNA-guanine transglycosylase,accession number AF302783,Smith-Waterman Score= 637.
cgacagtcaagatggcgggagcagctacccaggctttcctggagacttgtcccacggatcatgcggctggtggccgaatgcggccgctccagggcccgggcaggtgagctgtggctgccgcatgggacagtggccactcctgtgttcatgccagtgggcacgcaggccaccatgaagggcatcacgtttcgaatttttggacgctctgggttgccgcatctgcctggggcaatacctaccatctgggtctaaggccgggacccgagcttgatccagaaagccaacggtctcccacggctttcatgaatttggccttcattaatcttgcttaacgggacagcggcggttttccagatggtgtcgctggtgtctctgtccgaggtgacggaggagggcgtccgcttccgctccccctacgacggcaatgagaccctgctgagcccggagaaatccgtgcagatccagaatgcgctgggctcggacatcatcatgcagctggacgacgtggttagcagtactgtgactgggccacgtgtggaggaggccatgtacaggtcaatccgctggctggaccggtgcatttgcagccatca

SEQ ID NO: 7506 - DNA, 633 bp, Homo sapiens
  SIMILAR (290)..(619): 461254mologous to Mus musculus putative,accession number AK007856,Smith-Waterman Score=243.
  misc_feature (1)...(633): n = a,t,c or g
nntcctccccggnacnggccttgtggtcccccccttccccaaacattcttgaggtaggnnggcctcattgtaaattgtaggtggccnttggaccaacaagtctcctttcttgagcaggtcggccgtaagaagtagacaatcttccacttggcccttgtaggtgaagcaccacatcagctcccagtagcaacatgtggtggactgcttccagtnctgctggcctcacaagcactcctcgaaacnccggatggctgcatcaatgtgcctttaatgacttcaatcctccctgcaaagaacaggaagatggcacccccaggganccctgcccgcggggactcctgagagcagcctccatgaggccctggaccagtgcatgaccgccctggacctcttcctcaccaaccagttctcagaagcactcagctacctcaagcccagaaccaaggaaagcatgtaccactcactgacatatgccaccatcctggagatgcaggccatgatgacctttgaccctcaggacatcctgcttgccggcaacatgatgaaggaggcacagatgctgtgtcagaggcaccggaggaagtcttctgtaacagattccttcagcagcctggtgaaccnccccaggctggc

SEQ ID NO: 7507 - DNA, 6256 bp, Homo sapiens
  SIMILAR (656)..(1129): 341254mologous to Mus musculus putative,accession number AK016184,Smith-Waterman Score=298.
ggtggagacaccgcctcagggctcggtgcacagtggacatttggggagcgttgtgggtgacccccacacaggcactgggaatgcaggggagagggggccaagggggaaaggggccagagtgttggctttggattcaggagggatggattccagtcctagcttgccacttattaggactcctgagagcagcctccatgaggccctggaccagtgcatgaccgccctggacctcttcctcaccaaccagttctcagaagcactcagctacctcaagcccagaaccaaggaaagcatgtaccactcactgacatatgccaccatcctggagatgcaggccatgatgacctttgaccctcaggacatcctgcttgccggcaacatgatgaaggaggcacagatgctgtgtcagaggcaccggaggaagtcttctgtaacagattccttcagcagcctggtgaaccgccccacgctgggccaattcactgaagaggaaatccacgctgaggtctgctatgcagagtgcctgctgcagcgagcagccctgaccttcctgcagggttcctcacacggaggggcagtcaggcccagagccttgcatgatccctctcacgcctgcagctgcccacctgggccaggccgtcagcatcttttcctcctgcaggacgagaacatggtgagcttcatcaaaggcggcatcaaagttcgaaacagctaccagacctacaaggagctggacagccttgttcagtcctcacaatactgcaagggtgagaaccacccgcactttgaaggaggagtgaagcttggtgtaggggccttcaacctgacactgtccatgcttcctactaggatcctgaggctgttggagtttgtggggttttcaggaaacaaggactatgggctgctgcagctggaggagggagcgtcagggcacagcttccgctctgtgctctgtgtcatgctcctgctgtgctaccacaccttcctcaccttcgtgctcggtactgggaacgtcaacatcgaggaggccgagaagctcttgaagccctacctgaaccggtaccctaagggtgccatcttcctgttctttgcagggaggattgaagtcattaaaggcaacattgatgcagtgagtgatgggggtccgggccggggctggggatccctcggggtctcccagaccagcaggaagtcaggcacatgtgacatactcagggacaggatagactgggggcgggggggggggccaagagagaaccaaccagagagcaggggcaggagaggcccttctggcagagcagcctgggaagacaagggaggaggaggcatttgtggtgcctgggattttgactgggagatataggactgcagcattgcagtggagggaggtggagggaggtgcttgagggaggcagaggttaggaaagcccatctgtttagggcatgacgattaggctggagtctggtacctcccctccattatagctctctcctgctctttcattttgttactaaaaaccagagtcctaggcgggggctgtatttgagcccaacgtcatgtaagacttaggaggtaaaaccaggactggaggccagatctcctggctcctggggccccacctgagcctagcacagggctggaccactatgccctggaggagtcccggtctgctgtggtgttgggaggttcggaggatgcagaggggttggggctgggtgggcacccgtcaggctgaccagaaggtgcctgcaggccatccggcgtttcgaggagtgctgtgaggcccagcagcactggaagcagttccaccacatgtgctactgggagctgatgtggtgcttcacctacaagggccagtggaagatgtcctacttctacgccgacctgctcagcaaggagaactgctggtccaaggtgggctgatgccacgtgttaggggcattgggtgaccagggctgactgtgtgcctccagaccacgggccaaatccctaactgaacacagatgtctcagctggaatctaaacataaccttaaattctaataggactcaggcttggaaggaactaaagaccacaagagaaacttctgaaccacaatgtgtcacaaagagatttctagtcacaaaggacagaaacatggctccctctgtccagtagaactgtttctgtggtagaaatgttctacttatgcactgcccaaatatggtagtcaccagccacatgtgcacactgagcacatgaaatgtgcctagtgcaactgggaaactgattgttttcagttttatttaattttaattaactaaatgttaaatttaaatagccatgtagggcttgtggccactatattggactatgcaggtccaaaacacaaaaggctcatataactgaacattcttggcacatccgacttcaggtagggctggatccaggaattcaaatgatgtcgtctggcttggtctttccatttgtggctgtgctctctcctatgacatctttgtttctgctgcatctttgcaggaaggttctctccatgtgacaggcaaggtggccacgggctgcttctactcatatcctccccttggtttcaaccagagtcccacagtttgagcctcactggtctgacttgtcacctgccaatgcctggaacagaggggtgggaagattcctcatgggctgagagtaggagaggggtggttccacagaagaaaatgatgcacccagaaatagtggagggattaacaagatgccatacaggcaaaacaaagccaaacagatgcccgcctaccaaagatgaaatttatcatggtaagtattgaaataagtgttagcttgtaccatcatagtaatgatagtgcagaaattggaaccaagagtcttacaaccacctagctcagcaaacgtctaatctgttatttgtaaatacacaggacatgtgtcttcatggcttcatcccctgcccatggcagacattgctaatcaatcctctgccatgagcctagctgtgaccttagataccttccctgcaaagctccaggcagccgttagaactgacccacattggcacctgttaggagacctgtcatctgcatctggtccctccccctcctctgcatggaggtctcttccgtagccctgcctggggaccaagctgaaggggaattctctgggtctggggcaggtggggctggggaagggagcaggcttctactgagctctcaacatgtctggcacctgtcatgtcctccacaccacacccagtgaggagaagttattatctccattgggcacatgagggccactgatgctaagcgaggactgtgactttcccacccacatggctgttggtgacagacaccggatttgaggacagtcctgtgtgactcagaggcctctgcttctctcttgctcctagagtcctcctgaggagtcggggcttgccctgagcccaccctgctgttgaaggtgcttcctcaggcccagctcccatggcccccacaccccctcctcatcacctcctactcccaaaaaggacaaagcctcagggaaccttttttctttttttagagacggggtcttgctatgttggtcaggctggtcttgaactcctgggcccaggcaatcttcccgcctctgcctcctaaagtgctgggattctgggccttagggaacctttttgaactgaaagtgacgctcgaagccttcctgtagagtgaggtgggtggctggggctaaccatatggggaaggagagacctggtgggggcacacagctgctatatagaggaacagaaggtgggccaggcctcccagctgtcaggaaatctggctcagtccccagaccgctgtgtggctttggggtggccagtccctctctctctgcaacactctcctcatgaggacttctgtgaaaaatgggggttgtaaccctctgagttctggggccccacccatttctaatctccagaacttggccaccacagactccaccaacttctagtcctggggcctgggcctctggccattgccataggcaccacctgctctgtgcaggcagcgcccccctctgccaggatcctccgaggtcagctgctgggtctgacccgcagaccctggctgagcgacggatgaacggagtatgcagacacaggcttgcttgtcagcagatgggggacccctgccagagtcagcagcggcccccataagcctgccacgcttgcatttatttagtacagatgtaatgacaaaggcctaaagcaaactccatttgtgggtaattaacattgtcgcccccccagaaagagcagtcctccgcatgatgattaaaggccaggttccgaggcctaagtaaaccaacttatctagatcaattcccttacttcttgttatctactctgagagaattcagctgccttcagccaaatcctttcccgaagcttttgcaaaacctccgagccttccaaggtttgcttctttctgtaatttttctcaccaccctgacctatctcctgcagtcagccctgtggaggcctttgtgtttcccccagtgctggcagcctagaggctgagatggccagaaacaaggtggtgacagtggcgtgctcagggcttgggaaacccaaggagctaaaggcatgcccaggcaaccaaagaggacaggaaggcttctgaggagagacctctgaggtgggtcttggagaggaaggacttagggaggcagagtggaggaagtgagaggacaccccaagccaagagggcggcaggaccaaaggctcagaagccagggcgctgcagaggggctgtgtgccacagggtgaagagtttgtgtggcagaagggcagggggcttgcatcaggggtgacagctgctcttttgtcccagcatagcccctgtacatccctggagagctggggcgtccacaactctaagtcacagcccccatcctaaccctggtggtgcagtgagggtgagctgtctgtgggcaggagggaagactcttggagatgagcctggtgaagggataatggcatcccgggccgaggagcagcacaggcagaggcctggggagagtttaaggagtgtaggggaggaaatggcagaagatgagccagaaaaagaaaggttagggcaggtcctggaggacatgagtggctgtttgggctttatccagcagtgggggagccttggcaggcttgtggcttagataggtgctttagaaagcccaccagcagttgctgggccaccccgctggctgggtcctgttctaaggcaggaaatacaagaatgagcaggaaaagaccccctcaaggctcacgtcctagtggggagacaagaaacacagatgggcaatataacacgatgtctggttccagtaagtgcagtgaagaacaagcgaggctggatgcagggagtgatgggaggggctttgtaaggggaggtcgggggaagcctgtctcagaggacaccagaatggagcgcaggagcagcacgtggcagtcacatggcaggccgttagggcagagggagctgggcagggcacagcagggcaggagtgtgtttgatgtgtcctgggaaccgccctgaggccgtcgtgtggctggagtgctgcaggtgtcaaggaaattgtaggagatgtctcctgagtgtgatggaatataaccagatttccagaaggaactgacatgatctgacttaaaaaggtcagtgtgcgaaatggcttgcaggggacaggagtgggagcagggagataggagacaatgtgtaccaggacagcagaaagacatcccgggtagcctggaacagggagacggtgtggagatggtggcagtccgataatgagagccgtagggcaaggccagcaggatcctagagtgagacgggaggtaaagtcaccgggacttggtgtctccacgtcaggggcaggggaaagggagaggacaagggtgacccgggaggttaaagatgggaccggggccagacgcagtggctcatgcctgtaatcctagcactttgggaggctgaggcgggcggatggcttgaggtcaggagtttgaaaccggcctggccaacatggtgaaaccccgtctctactaaaatatacaaaaattagcctggcgtggtggtgcatgcctgcagtcccagctattcaggaggctgaggcgacaagaatcgcttgaacctgggaggcggaggttgcagtgagccgagatcgcgccatagcactccagccttagcctgggcgacagagcgagaccacatc

SEQ ID NO: 7508 - DNA, 351 bp, Homo sapiens
  SIMILAR (1)..(195): 631254mologous to Rattus norvegicus SECIS binding protein 2,accession number AJ251245,Smith-Waterman Score=197.
caaaatgaagcctcaagaaagaataagaaaaagaaagaaaaatctacatcaaaatatgaagtcctgacagttcaagagcctccaaggattgaagatgccgaggaatttcccaacctggcaggtgcatctgaaagagaagacagcttagagacacgggacattgaatgtacttgggcttcactggaggatcttaaatttcctgaacttaaggtccatcttgcggaggagaacgggttacttcattcccgaggcttttggggtgctttaacacctttctcactttcataacttggcaaaaatggaccctttcttatccttttggggtatatagaacttcctcattaagttttt

SEQ ID NO: 7509 - DNA, 467 bp, Homo sapiens
cgaacaccaccgcagcaactgtggcccctttcagctctccggttttcactttgagcagcactcctcaaactattcagaggacagtgagcaaagaaagcctcttagtgtctcacccctctgtgcaaaccaaatctccaggagggctttccatccaaaatgagccactcccaccaggcccaacagaaccaacaccaccaccattcacattttccatccccagcggaaaccagtttcagccccgctgtgagtccccaattcctgtctctcctaccatccggattcagaacccagtggctttcctcagctctgttctgccttctattcctgccattccactcacaaatgccatgggtctgcctagaagtgcaccatccatgccatcccatgtgttagcgtatataaatatctagtctgctttacctagttaatgatgattacatgttttgaaactaacgactcattgttct

SEQ ID NO: 7510 - DNA, 390 bp, Homo sapiens
  SIMILAR (1)..(390): 521254mologous to Homo sapiens SMAP-1,accession number AB014729,Smith-Waterman Score=325.
aacctgctccaagccatcattgactccttgtctggggaggacaagcgggagcatcgagggaaggaggaggccctggttctagacaccaagaaggacctgaagcagatcaccagccacctgctggacatgctagtcagcaagaaggtgtctggccagggcagggatcaggcgctgaacctgctcaataagaatgttcccaggaaggaccttgccattcatgacaactcacgtaccatctatgtggtggataatggtctgaggaagatcctgaaggttgtggggcaggttccagatctgccatcctgcctgcccctgactgacaacacccgcatgctggcctctatcctcatcaacaagctctatgatgacctgcgctgtgacccggagcgc

SEQ ID NO: 7511 - DNA, 391 bp, Homo sapiens
  misc_feature (1)...(391): n = a,t,c or g
cgggccaaatttctgagggagtggtcccccccatagcgcccccccaaaaggttggttcttttcccaccattccgagccagagatttgtctgccccctccaaggaacaaggaacttcctctcccccgccggcattctttgggccccccattgtctctttttaaacgccgccccccctattttgtccattttttgtcattccctttttatccttatctttcatnnnnnnnnnnnnnnnnnnnnnnnnnnnnnnnnnnnnnnnnnnnnnnnnnnnnnnnnnnnnnnnnnnnnnnnnnnnnnnnnnnnnnnnnnnnnnnnnnnnnnnnnnnnnnnnnnnnnnnnnnnnnnnnnnnnnnnnnnnnnnnnnnnnnnnnnnnnnnnnnnnnnnnncgt

SEQ ID NO: 7512 - DNA, 366 bp, Homo sapiens
  SIMILAR (80)..(361): 971254mologous to Homo sapiens Human secreted protein, SEQ ID NO: 4932,accession number AAG00851,Smith-Waterman Score=490.
  misc_feature (1)...(366): n = a,t,c or g
caatcagaggcacatgttgggtcaccatgctgaaatggaaatagccaggcttttgaaggcaaacaacactctgctgaagatgggctaccatttggagcttccgggtcccagaatggtggtcactaatctgctcaccaggaatcaggataaacaaaggcagaaacgacaggaagagcaaaaacagcagcaactcaaggaacagaagaagctgatagccatgttagagaatgggttggggctgccccctgggatgtgggagctgttgggaggacccaagccagattccagaatgcaggaattcttccagccaccgccacctcggcctcccaacccccaaaatgtcccctttagtcaacgcagtgaaan

SEQ ID NO: 7513 - DNA, 1878 bp, Homo sapiens
  SIMILAR (1321)..(1635): 451254mologous to Homo sapiens Human myelin oligodendrocyte glycoprotein gene,accession number AAZ29204,Smith-Waterman Score= 181.
gaattgcttgaatcgggagcggaggttgcagtgagccgagatcgtgccactgaactccaacctgccaatagagcgagactccgtctcaaaaaaaaaaaaaaaaaagaaagaaatagcattgaagaaaataccgcacatcagaggaaagcttattttcctgcatggtgtcttttcaaagcatagcaatatttgaagcaggttttctagggattgtgtgaatgagggtgagctggctgaggcatcgctcaagactggggggtggtgtgtaagaagtcacgtggagccacaagaggcacctcctatagctcagctaagggcttccctttctgcgacccagcttttgggtgaagggtgatttctactaagacacatctgtgcttcagtcatagatgttaatagaggaagcagttttcctgctgcagattcctgaatagagttgctgaaagagtctacttctggactcaggggaagttgaaggccagtctgtgtagaaaggctgaggcaacggggaaagacctgacacgctaagttacatacagctctgacatagtactcccatgatggcttccagtggacacatgtgctgatagaattcctaaacctctggaatttccctgctggcgacttctatggccgttgactgtacagggtaacctgaatgccagatgctaatgggcgtgaatgagaacttagagcattgccagcatggaggaaactgtgaggcaccagatccctggtgcttctgcagggccattttctggaaaacccctgttaggaaggttggatttggcgtgacttgcttgagccaagagtcctgggggagagattttgaagttttaatttaacggtatatcccagaggcctaacagtgactcaactcgtctaagttctgccaagtcagatgttacacttagagtctctctgtgaaagggtttgggtctgagctgtgtaagtatgtcaaactgcccagtaagcccagcccctcacccatctgatagatattcctttaatgcaccaggacttcatgtttggataaatggattaatggttgaaatttgtttctctctcttttgtgttttccccagttaaatagatggtcactgtttcccacaatggttttatactttccagctttttgtaacttaactataattacttaattttaattttttttaaagcttgttgtggtctaatgagaagtatttttcagtgcataatgtttttctgagcttctgtaaatgccatcccaatgtggtttggttttgttgaacagaaaccaaaataaatttccaaaatgttaaagcaatggatttaatacatttatttatttatttgttttattttgtttttgagacggagtctcgctctattggcaggttggagttcagtggcacgatctcggctcactgcaacctccgcctcccggattcaagcaattctcctgcctcagcctatctagtagctgggactacaggtgcacgtcaccatgcccggctaatttttgtatttttattagagacggggtttcaccatgttgggccagaatggtctcgatctcttgacctcgtgatccccccgcctcggcctcccaaagcgctgggattacaggggggagccaccgcgcccggcctttcttcagtgcaatttttaaagagaaacttaaatcctgttgtattctttcaacacaagcaatgatacttctcagagtctgctcaaaagctcagctctgtggactccgtgacaaaatgtacgcgtccactgccgaccctcttgggtttctgaaaccaacctttcttcctgctctcctctttaagagcaaaccccaacatgtataaggtcacagcaagtggtagccaggaaaagctgtgggacccctca

SEQ ID NO: 7514 - DNA, 557 bp, Homo sapiens
  SIMILAR (218)..(3): 731254mologous to Mus musculus putative,accession number AK019216,Smith-Waterman Score=279.
gcggccgcgtcgcagctcttcaacatcatgatcaccccattagcctccggcggtggctgcggccccatcgggagcccctccttggggcctttcctgtccacggagaccgcgggcaccgccagcagctgcccccccggaggctctcgggcaggggccgggatcgacgaggggggcggcggaggtggcaggggctgccggaagccgtccaccgcagcctttctatagtgacttccagtcaaggttttgttgtattaagagctgacccatagccagctgcagtcactgtgcaaaaatttagagaaactaaattttgcaaactttactttgcccactttttattaatacatacatagtaaaaagaatatatttctccatgaacttaataatgcaaaagcatccaaagattttaatgccaattcacattatactgtgatgcttttatagggaaagttcttttgtaaaagaatgctctctcccagaaaaagcatttgggtatattattaggatactgaagaatttctccacatttagaaacattccaattttattcctttcag

SEQ ID NO: 7515 - DNA, 4345 bp, Homo sapiens
  SIMILAR (1816)..(2829): 741254mologous to Mus musculus putative,accession number AK004733,Smith-Waterman Score=1312.
cggcgtgtgaatccagggcctgaaaacccagaatgaacttgtgtccatcccagagatcactgcagatgtcatgaggtaccctttgtgtcaccagctcaagcaggcctctggccactttatcatctgtggtggtcctgtcccgtgaccaggaggaaaaattagctctttgaagagaaagtagttctctattgcaggcactggcctcttaaattgttgcaggtggggaatggatgagaatatttgttttgggtgatcagaactgagactcctattgtggattagtaacatgcctcctcctagaacaagggagggcagggatcgccgagaccaccaccgggctcccagcgaggaagaggccttggagaaatgggactggaattgtccagagacgcgtcgcctcttggaagatgccttcttccgtgaagaggattacatccgtcagggttctgaggaatgtcagaagttttggaccttctttgaacgcctgcagagattccagaatctcaagacctccaggaaggaggagaaagaccctggacagcccaagcacagcatcccagcgctggccgacctacctcgcacttacgacccacgttaccgcatcaacctctctgttcttggccctgccacgcggggctctcagggactgggcaggcacttgcccgcggagagagtggctgagttccgccgagccctgttgcactacctggactttggccagaagcaggcatttgggcgtctggccaagctgcagcgtgagcgggcagccctccccatcgcccagtatgggaaccgcatcctgcagacgctgaaggagcaccaggtggtggtagtggccggtgacaccggctgtggcaagtccactcaggtgccccagtacctgctggctgctggcttcagtcatgtggcgtgcacccagccccggcggatcgcctgcatctcactggccaagcgtgtgggctttgagagcctcagtcagtatggctcacaggtcggctaccagatccgctttgagagcacacgttcggcggccaccaagattgtattcctgacagtggggctgctcctgcgacaaatccagcgggaacccagcctgccccagtatgaggtcctgattgtggatgaagtccatgagcggcatctccacaacgatttcctcctgggcgtcctccagcgcctgttgcccacgcggcctgacctcaaggtcatcctcatgtcggccaccatcaacatctcgctcttctccagctatttcagcaatgcccctgtggtacaggtgcctgggaggctgttccccatcacggtatttgatgtggcaccccctggagtccggaaatgcatcctctccaccaacattgctgagacctcagtcaccattgacgggatccgcttcgtagtagattccggaaaggtgaaggagatgagctacgatccgcaggccaagctgcaacggctgcaggagttctggattagtcaggccagcgcagagcagcggaagggccgggcgggccgcacgggccccggagtctgcttccgcctctatgccgaatcggactatgatgccttcgccccctaccccgtcccagaaattcggagggtggccctggactcgttggtgctgcagatgaagagcatgagtgtgggggacccccgaaccttccccttcatcgagcccccaccaccagccagcctggaaaccgccatcctctacctccgggaccagggggccctggacagctcagaggccctcacacccattgggtccctgctagcccagctgcctgtggacgttgtgattgggaagatgctgatcctgggctccatgttcagcctggtggagcctgtgctcaccatcgcagccgcacttagcgtccagtcgcccttcacccgcagcgcccagagcagcccagagtgctgcaccccacctgcgtcttcgctggcagccccgaggtgctgcacgcacaggagctggaggccagcaactgcgacggaagccgagacgacaaggacaagatgagcagcaaacaccagctcctcagcttcgtgtccctgctggagaccaacaagccgtacctggtgaactgcgtccgcatccctgccctccagtccctcctgctttttagccggtctttggacaccaatggtgactgctcccgcctggtggccgatggctggctggagctgcagctagcagacagtgaaagtgccatccgactcctggcggcttccctgcggctccgtgcccgctgggaaagtgccctggaccggcagctggcgcaccaggcccagcagcagctggaggaggaggaggaggatacgccagtcagccccaaggaggtggccaccctgagcaaggaactcctgcaattcacggcatccaagattccttacagcctccggcggctcacagggctagaagtccagaacatgtatgtgggaccccagaccatcccagccaccccccatcttcctggcctctttggcagctccaccctgtccccccaccccacaaaggggggctacgcagtcactgacttcctcacctacaactgcctcacgaatgacacagacctgtacagcgactgtctccgaaccttctggacctgcccccactgtggcctgcatgcgcccctcacgcccctggagcgcatcgcccatgagaacacctgcccccaggccccacaggatgggcccccaggggctgaggaagctgccctcgaaaccctccagaagacatctgtcctgcagaggccctaccactgcgaggcctgcgggaaggacttcctctttacacccacagaggtgctgcgccaccggaagcagcacgtgtgagctgggccaggagccctgcccacctccgtgcagctgacctgccctccagcccaggactaggggcaggactcttgcctgaacccccagcctgggcttagccctgtggtcctgtcccagtgcagagggcctggagcacggattgtgaataaagcctcacatgctgatacacactgttaggcctgcacctgcccatccagaaagcagcagctgccttgttagtcctccccagggtctagctttccttcttcctgctgcagggtgctgcctgaggggtcctgggtaggaggggcgttagagccagcagggacctcccatgtctccagattccaggtgcaggttcttagcacctccgcagccgctctctcttgagtccatcctcagtctctcctaccccttgaagtagggggaccctgaatttgcccatccacctgggtcactttgagagttgtgcaggggggctgggagcactggtgttcacgtgggaccacaggctgcaccataagacccactcacaataaaaaaataaaaggccgagccgggcatggttgctcactcccgtaataaaaaaataaaagaacatgctgggattacaggcgtgagccactgcacccggccgtgaccaacattcttaatctgtcctctagtgctggccactctaaaacttcacaagaatgtgctgtctgtgtctagcttcttttacccaacatgaggttgcatgggcttggttcattcattctgttccatgaattcatcacaatatatccattcttttgtccaggggcatttggcttccagaaacctacccctaacaccagcccttccctccctctgcagaacaaaggccccatcagaggggacgtgctgggtgtcagcgtcagcttctgggaggaggaaggtcagagctaaggcctgaaggatgatgaggtatcaggtgggtggaggggagacgctcaggaggtgggaaaggcggaggtgcacaggcttggttccaggtacaaataacgttactaggagcacacagtacctggattttgatgaatacattgtacatttctgtcctgtatgtatccagggttataggacgtgattataggacacgcatatatgtttggttttagtggactcttaaaaattgttttccaggggccgggcacagtggcttacgcctgtaatcccagcactttgggaggcctaggcgggcagatcacctgaggtcaggagttcaagatcagcctgaccaacatggagaaaccccgtctctattgggaggccgaggcgggaggatcacaaagtcaggagatcgagaccatcctggctaacacggtgaaaccccgtctctactaaaaatgcaaaaaaattggctgggcgtggtggcgggcgcctgtggtcccagctactcgggaggctgaggcaggagaatggagtgagcccgggaggcagagcttgcagtgagccaagatcgtgccactgcactccagcctggttgacagagcaagactccgtctcaaaaaag

SEQ ID NO: 7516 - DNA, 519 bp, Homo sapiens
  SIMILAR (293)..(3): 771254mologous to Mus musculus putative,accession number AK019216,Smith-Waterman Score=394.
gcggccgcgtcgcagctcttcaacatcatgatcaccccattagcctccggcggtggctgcggccccatcgggagcccctccttggggcctttcctgtccacggagaccgcgggcaccgccagcagctgcccccccggaggctctcgggcaggggccgggatcgacgaggggggcggcggaggtggcaggggctgccggaagccgtccaccgcagcctcccagttgttgtggttctggtcgtccatcatcgcctcgtagctgcccccctcctcctcttccatgctttccaccatccttgctgccccccggcacccgcccgcctcacaggcacctgccgcctgtctcaaccccgggccagcgggcacccgctgcctccccgagttacatcgccagcgcgaggaatgggcgcagcggagaaggctgcaagtgcgcgaggtctctcgctctccgcggggccgactagcttgaagacgcggctgacggcggtgggcgctccggggctcctcgtgcggaattcca

SEQ ID NO: 7517 - DNA, 318 bp, Homo sapiens
  SIMILAR (2)..(316): 1001254mologous to Homo sapiens titin,accession number X69490,Smith-Waterman Score=525.
aactgccatctggacaaaagatggaaaggccattacacaaggaggtaaatataaactctctgaagacaagggagggttcttcttagaaattcataagactgatacttctgacagtggactttatacttgtacagtaaaaaattcagctggatctgtgtcctctagctgcaaattaacaataaaagctataaaagatactgaggcacagaaagtctctacacaaaagacttctgaaattacacctcagaagaaagctgttgtccaagaggaaatttcccaaaaagccctaaggtctgaagaaattaagatgtcagaggg

SEQ ID NO: 7518 - DNA, 349 bp, Homo sapiens
aggcggcggctggtggtggtttctggcttcgctgttccattcccttgtcttgaggtaccactactgggttttgcctgggtgcttgggactggcacagctccctcggggtggggagactgggataggatgccaagctggtactcttgccttccatcaatgtggggacagaaggagcaggttctcccgagagcaggttcatggggcttctggccagggtcagtcagaggtgaaaactgcccccctgtcccccaggccccccaacctctcccaccagcccagtttctacactcacgcctgttctgccagagggggaggccgcaccgtgtccctccaggttttgccagggttt

SEQ ID NO: 7519 - DNA, 368 bp, Homo sapiens
  SIMILAR (92)..(367): 921254mologous to Homo sapiens CDA02,accession number AF212241,Smith-Waterman Score=449.
ccgtgacacgccgctcttgacaggccgaggatcataaggactgtacatggtgaatggaccaccacattttacagaaagcacagtgtttccaagagtaaatattatcagtgtcactaacaagggactactgcactccttcgacctcctgaaggcaggtagccttgaattctcacccaaaaatactgtcctggcaacgcggcagccttacactacttgtaaagatggcacagctgggatacccaacctacaactttatgatgtgaaaactgggacatgtttgaaatctttcatccagaaaaaaatgcataattggtgtccatcctggtcagaagatgaaactctttgtgcccgcaatgttaacaatgaag

SEQ ID NO: 7520 - DNA, 376 bp, Homo sapiens
  SIMILAR (1)..(375): 781254mologous to Homo sapiens CDA02,accession number AF212241,Smith-Waterman Score=512.
tcgccgtccaagccggtcttgacagtccgaggatcacaatgactgtccatggcgaatggacccccacattgtacagaatgcacagcgtttccaagggaatctgggaagaattgcaaagtctgtatctttaacaccgacgggaccttggttgcctggcgcaccggacaaaaagcagatattatcagtgtctctagcaagggactactgcactccttctacctcctgaaggcagtttgccttgaattctcgcccaaaaatactgccctgtgaacggggttgccttacagtacttctaaagatgctacagctgggatacccaacctacaactttatgatgtgaaaactgggacatgtttgaaatctttcctccagaaag

SEQ ID NO: 7521 - DNA, 534 bp, Homo sapiens
  SIMILAR (40)..(177): 971254mologous to Homo sapiens CDA02,accession number AF212241,Smith-Waterman Score=245.
cacgcatgaggagacgtgtaggggccgggttcggccctggtgaactctcacccgagcggtttctctttccgggacaacatggcgccgtccacgccgctcttgacagtccgaggatcagaaggactgtacatggtgaatggaccaccacattttacagaaagcacagtgtttccaaggtatgatttattttgttaagtaatgttatagggaacatacagtacaatctaaaatggttttgttggtggtgtattttgaacaagaaaggaaaagaacagatgaactcatttttattgtataatatttaccgaagatgaaaagaatacatattctctatcaaggaaaatgatcttcagatctgaaaatagtaacttaagcctatttataaggtagggggaacaatactaagaaaaagtgtagacactagtgtaattgaatacaagcctttattttacaagagttgtatcttaaggaatgagaaaaacttgcaaatttgatagccaaatcatggccagtaatcttagtgaaatcataatg

SEQ ID NO: 7522 - DNA, 994 bp, Homo sapiens
  SIMILAR (943)..(632): 701254mologous to Homo sapiens CDA02,accession number AF212241,Smith-Waterman Score=353.
  misc_feature (1)...(994): n = a,t,c or g
gcataaancccatataccggcaccaaacctcagtngaactggaattccaaactaccatccataaatggggccattttttggtaattgcactaccagcactttctcccatttgttgcaatgtagtgtagagtttgttctcccatagtaggaagctcctgtcttgtcaacatctgtgctagctattaccaacacagcagtagcttttttattccacagcattgtaactttatctgccttaaagaaacttttattagctaaagctgcatgaggtccagcaaagttggggtactgatataatctaacaaatgaaggtgcacctttacttcctggaacatagacagccaccttgtatggttggggtccaggtgataatacaaaatcattaattttttgcaaatgcaatttcattttgcaattgtgctaaaattgctgctttcaaagaagtgaacttcattgctaacattcgcgggctacaaagagtttcatcttctgacccaggatggacaccaattttgcatttttttctggatgaaagatttcaaacatgtccccagttttcacatcataaagttgtaggttgggtatcccagctgtgccatctttagaagtactgtaaggctgccacgttgcccaggacagtatttttgggtgagaattccaaggcaaactgccttcaggaggtcgaaggagtgcagtagtcccttgttagtgacactgataatatttactttttctccattgcccaggtcaaaacagggtcccatcccttactaaagatacagactttgcaattcttcccagattcccttggaaacactgtgctttctgtaaaatgtggtggtccattcaccatgtacagtccttctgatcctcggactgtcaagagcggcgtggacggcgccatgttgtcccggaaagagaaaccgctcgggtgagagttcaccagggccgaacccggcccctacacgtctcctcatgcgtggagacagcgaat

SEQ ID NO: 7523 - DNA, 424 bp, Homo sapiens
  SIMILAR (37)..(141): 741254mologous to Homo sapiens Human secreted protein, SEQ ID NO: 7795,accession number AAG03714,Smith-Waterman Score=169.
aaccatgtctttttatttatttgttttggagatggggtctcgctttgttgcccaggctggtctcgaactcctgggctcaaacaatcctcctgtcttggcctcccggggtgttgggattacaggtatgagccagcatgcccgttctataagcaggtcttctcaaatgtaacctcctcaagggcagacgtatctgtaaccccctagcaagctgcaccagctctgacacgtacttggtgctcagcgatgcatcacactgatttcctgccactggactgtgataccagactcagggctcccagccatcacatacagctccctcagccacgacaccccaatacagggatttaaaatctgccttcataatttacttgtggccgggcgtggtggctcacacctgtaatcctagcactttgggaggccgagg

SEQ ID NO: 7524 - DNA, 377 bp, Homo sapiens
  SIMILAR (2)..(325): 471254mologous to Homo sapiens reverse transcriptase,accession number L27428,Smith-Waterman Score=256.
  misc_feature (1)...(377): n = a,t,c or g
atctatatgcagagcaatgaaattggaaccttatttcacactgtattcaaaaatcaacttaaaatgggttatagatttaaacattatatccaaaactgtcaaactacaagaaaacaacataagggaaaacaatcttgacatcagtcttggcaaagatatttatttgacctatttgactgcaaaagcacagtcaatgaaagcaaaaatatataaatggtattacaccaaactaaaaatcttctgcacaacaaaaaacagagttaacagaatgaagagacaacctacaaattgggagaagatatttataagccatatgtatgataagaggnnnnnnnnnnnnnnnnnnnnnnnnnnnnnnnnnnnnnntcacaagagag

SEQ ID NO: 7525 - DNA, 281 bp, Homo sapiens
  SIMILAR (1)..(180): 731254mologous to Mus musculus putative,accession number AK002597,Smith-Waterman Score=210.
gcagcttggatcttaaaagcaagagcgctaacagaaatggtatacatagatgaaattgatgtagatcaggaaggaattgcagaaatgatgctggatgaaaatgctatagctcaagttccacgccaatcacacaagctggaagacccattacaggtttcctcaggcccagcacgcagagtggaaggccaggcactatggaacaggctatcagaacacccagaaccgcctacacagcccgccctatcaccagctcctccggaagatttgtcaggctgggaacg

SEQ ID NO: 7526 - DNA, 9234 bp, Homo sapiens; identical to SEQ ID NO: 2481
  SIMILAR (3192)..(3629): 481254mologous to Homo sapiens Human myelin oligodendrocyte glycoprotein gene,accession number AAZ29204,Smith-Waterman Score= 223.

SEQ ID NO: 7527 - DNA, 769 bp, Homo sapiens
  SIMILAR (1)..(195): 961254mologous to Mus musculus putative,accession number AK002597,Smith-Waterman Score=322.
caggcagcttggatcttaaaagcaagagcgctaacagaaatggtatacatagatgaaattgatgtagatcaggaaggaattgcagaaatgatgctggatgaaaatgctatagctcaagttccacgccctggaacgtctttgaaactccctggaactaatcagacaggagggcctagccaggccgttaggccaatcatcacattctgaaaaacccattacagggttcctcaggcccagcacgcagagtggaaggccaggcactatggaacaggctatcagaacacccagaaccgcctacacagcccgtcctatcaccagctcctccggaagattcgtcaggctgggaacggcttccatgcttacaagtcctgatggaccattcataaattaatctaggctgaatttaacaaagtattcccagaaacctaagatggcaaaggctttgcctgagtatatctttcatcatgaaaatgatgttaagactgctttggagctggctgccctctccacagaacattctcagtacaaggactggtggtggaaagtacagattgaaaaacgttactacaggttgggaatgtatcgtgaagcagaaaaacagattaaatcatccctgaagcagcaggaaatggtagatacatttctgtacttggcaaaagtttatgtctcattggatcaacctgtgactgctttaaatcttttcaaacaaggcttacataagtttccaggagaagtaaccctgctctgtggaattgcaagaatctatgag

SEQ ID NO: 7528 - DNA, 3178 bp, Homo sapiens
  SIMILAR (123)..(1649): 1001254mologous to Homo sapiens lanosterol 14- demethylase,accession number D55653,Smith-Waterman Score=2661.
gctgggtttagtaggagacctggggcaaggccccctgtggacgaccatctgccagcttctctcgttccgtcgattgggaggagcggtggcgacctcggccttcagtgtttccgacggagtgaatggcggcggcggctgggatgctgctgctgggcttgctgcaggcgggtgggtcggtgctgggccaggcgatggagaaggtgacaggcggcaacctcttgtccatgctgctgatcgcctgcgccttcaccctcagcctggtctacctgatccgtctggccgccggccacctggtccagctgcccgcaggggtgaaaagtcctccatacattttctccccaattccattccttgggcatgccatagcatttgggaaaagtccaattgaatttctagaaaatgcatatgagaagtatggacctgtatttagttttaccatggtaggcaagacatttacttaccttctggggagtgatgctgctgcactgctttttaatagtaaaaatgaagacctgaatgcagaagatgtctacagtcgcctgacaacacctgtgtttgggaagggagttgcatacgatgtgcctaatccagttttcttggagcagaagaaaatgttaaaaagtggccttaacatagcccactttaaacagcatgtttctataattgaaaaagaaacaaaggaatactttgagagttggggagaaagtggagaaaaaaatgtgtttgaagctctttctgagctcataattttaacagctagccattgtttgcatggaaaggaaatcagaagtcaactcaatgaaaaggtagcacagctgtatgcagatttggatggaggtttcagccatgcagcctggctcttaccaggttggctgcctttgcctagtttcagacgcagggacagagctcatcgggaaatcaaggatattttctataaggcaatccagaaacgcagacagtctcaagaaaaaattgatgacattctccaaactttactagatgctacatacaaggatgggcgtcctttgactgatgatgaagtagcagggatgcttattggattactcttggcagggcagcatacatcctcaactactagtgcttggatgggcttctttttggccagagacaaaacacttcaaaaaaaatgttatttagaacagaaaacagtctgtggagagaatctgcctcctttaacttatgaccagctcaaggatctaaatttacttgatcgctgtataaaagaaacattaagacttagacctcctataatgatcatgatgagaatggccagaactcctcagactgtggcagggtataccattcctccaggacatcaggtgtgtgtttctcccactgtcaatcaaagacttaaagactcatgggtagaacgcctggactttaatcctgatcgctacttacaggataacccagcatcaggggaaaagtttgcctatgtgccatttggagctgggcgtcatcgttgtattggggaaaattttgcctatgttcaaattaagacaatttggtccactatgcttcgtttatatgaatttgatctcattgatggatactttcccactgtgaattatacaactatgattcacacccctgagaacccagttatccgttacaaacgaagatcaaaatgaaaaaggttgcaaggaacgaatatatgtgattatcactgtaagccacaaaggcattcgaagagaatgaagtgtacaaaacaactcttgtagtttactgtttttttaagtgtgtaattctaaaagccagtttatgatttaggattttgttaactgaatggttctatcaaatataatagcatttgacacattttctaatagttatgatacttatacatgtgctttcaggaagttccttggtgaaacaattgttgaggggggatctaggtaattggcagattctaaataatataatttccagatagtaattttaagagtactcatcgctcttgccaaataagttcagggtattcaaatcttggactagtcctgcaaggtataaagaataaaaatcccagtgagatacttggaaaccacagtttattattatttatctgggcaattattgtgtgtgtgaggatggaagggtagggaataatcgaacatctaaagccttgaataagagaatactaattgttttggtatgatgatactcagaaatggaggatattataggaaaaagaaatcctttggaattttaactaaaatcactgcatatgggaaattaagagatccaggaccatatttgataagagttcctaaaaataatgtaattattaatgctaaagactgctcatgtatcttgatctaattactaaataaattacatatttatttacctgataaatatgtatctagttctacaaggtcacatttatgtggaagtccaaagtcaagtccttaggggataattttgttttgggctcagttgttccctgcttccttttttttttttttttttttttgagatggagtctcgctctgttgcccaggctggagtgcagtggtgcgatctcagctcactgcatcctctgcctcccgggttcaagcaatgctcctgcctcagcctcccgagtagctgggactacaggtgcctaccaccaatgcctggctaattttggttttgtatttttagtagagacaggggtttcactatgttggctaggctggtcttgaactcctgacctcaggtgatccacctgcctcggcttcccaaagtgttgggattatgggcatgagccaccgcacctggccttccctgcttcctctctagaatccaattagggatgtttgttactactcatattgattaaaacagttaacaaacttttttctttttaaaatgtgagatcagtgaactctggttttaagataatctgaaacaaggtccttgggagtaataaaattggtcacattctgtaaagcacattctgtttaggaatcaacttatctcaaattgtaactcggggcctaactatatgagatggctgaaaaaataccacatcgtctgttttcactaggtgatgccaaaatattttgctttatgtatattacagttctttttaaaacactggaagactcatgttaaactctaattgtgaaggcagaatctctgctaatttttcagattaaaattctctttgaaaaaa

SEQ ID NO: 7529 - DNA, 1795 bp, Homo sapiens
  SIMILAR (1336)..(1635): 701254mologous to Homo sapiens Human myelin oligodendrocyte glycoprotein gene,accession number AAZ29204,Smith-Waterman Score= 347.
  misc_feature (1)...(1795): n = a,t,c or g
tttttttttttttttttaaccgataactttttttattgcaagcagatctaattaaataacaaagtccaagaaacacctgcctttaaggcactctccctaacaaactgagttatattccttgtaaaatataatagagaaataaaaatctatggggaaagggtcactctaaagatactttttatttaaatattttatgatgatacatatacaaatataatcttccaaaaaacaaatgtaaaactaagtgcaaatccactttttcaggaacaaagaaaatcatttagaaaatgtgattatgctaaaagaggcaggttaggtttcccaaggctgctcaaggtggaagcttaagaccaacttttggtttgagtacacaaatgaaatttaccattttcatatacttagtgatatgcctgttgccatacctgggcaaaataaaactgatagtaagtcctataataataaaagaaacaacaattacctaagtaaacaattcctagatgatggaagagtaaccctcccatttaagcctacagaccttagatgtctaaaaaaatatgtgtcctgatctgtacacagttagtgggagcacacctatataaaatccctttgcatgacaccattcaacaatattttttaaaatcctacaaaaattttaaagtttcacttccctagcaaaatatcttcagtcaagaaattagtcctttgaaaaattnatgaaaattgttgtgggaaatatttatacaaattattactgataatgcacatatattttgaaacattgtttcctagaagcaataaaatataacctatttaggagataacccaaatgatttgtaaaaaaattaacttgtagaaaagggaaggatgttgtgtaaaatcaagtcaattatttgaggtatgttataatattgagtacttatgtactaagtcacacccagccagtcaataactgagaaatcagaataaaataataatttcaaagaattacataaatacagggccttttgagatttttggcaattgtaaacaaaaacgaatggtttttacaattcagtgtaattctacgaatatttatttggcacccatgttaggcactgaggctacacagcagtgaaataggcctagttgttcctcaactagagaacatagttggttaatgtagctgcactgaattgtagctgtttagaagataatataccctgaggctttttaaagtatactattactataagaagtaaaattattttatacttataaattttgttttggattattcaactgaatttggagtgttcagaattttcatggcggttgagacaaggaagaggtataatgctatttttttttccttttctttttttttttgagacggaatctcactctgttgcccagactggagtgcaatggtgcgatctcggctcactgcaacctccacctcccaggtttaagtgattctcctgccttagcctcctcagtatcttggattacagacgtgcgccaccatctctggctaatttttgtatttttagtagagacggggtttcgccatgttggccaggctagtctcaaactcccgacctcaggagatctacccaccttggcctcccaaagtgctgggattacaggcgtgagccactatgcctggctaatttttgtatttttagtagagacagagtttcaccatgttggccaggctggtctcgaactcctggccccaagtgatccacctgcctaggccttccaaagtgctgggattacaggcgtgagccactgcacccggctgacctgtgcccct

SEQ ID NO: 7530 - DNA, 390 bp, Homo sapiens
aatagcacaggtatggggcgccggcagagtaggtggtcaagcgagagcccccttgagtctttgcaactttcgggcggcccttagtaccccatcatcctccagtgcatttcctttctgtccactttaagccctttctcctgaatcccttcattcttcaattatgagcttgcagagtatgacagttgcctgtactaacgcaggggtgagctgctgactaggctggctggattcccatcctactttctccttcctcttctagagtcctggccattgactatccgcgatgaggcacaacctcttaccctgcaagctcagagacccctggtctctgagacggtgctagatgccttctggggctcaaaaccggtcggggcccttttcgtcctttcg

SEQ ID NO: 7531 - DNA, 350 bp, Homo sapiens
gataggtgcaataagtataggctgacacataggaacatttgacctgtttttttgttgattttaaatcattgaataattggtaagcttttaaatctgttaatttgaacaactatatggctgtatttatctccttatattacaaaaactattataattatctttcccacatatcaaactccactggtttttatcccatttttgtttcatacttcataatgacgataattcatgacttgaattgtatattcccactttctgaggactactctggatcatgctttgtctgcggttccggctctggatcatgacctgatattagattctatatggtatttggtacatgattcgag

SEQ ID NO: 7532 - DNA, 383 bp, Homo sapiens
  SIMILAR (3)..(305): 971254mologous to Homo sapiens A variant of human hypoxia inducible factor-1 alpha protein,accession number AAY84166,Smith- Waterman Score=491.
  misc_feature (1)...(383): n = a,t,c or g
aagacattaaaatattgattgcatctccatctgctacccacatacataaagaaactactagggccacatcatcaccatatagagatactcaaagtcggacagcctcaccaaacagagcaggaaaaggagtcatagaacagacagaaaaatctcatccaagaagccctaacgtgttatctgccgctttgagtcaaagaactacagttcctgaggaagaactaaatccaaagatactagctttgcaaaatgctcaaagaaagcgaaaaatggaacatgatggttcactttttcaagcagtaggaattatttagcatgtagactgtggggcaatcaatggatgaaagtggattaccacagctgaccagttatgattgtgaagttan

SEQ ID NO: 7533 - DNA, 885 bp, Homo sapiens
  SIMILAR (2)..(688): 971254mologous to Homo sapiens hypoxia-inducible factor 1 alpha,accession number U22431,Smith-Waterman Score=1131.
cacagttacagtattccagcagactcaaatacaagaacctactgctaatgccaccactaccactgccaccactgatgaattaaaaacagtgacaaaagaccgtatggaagacattaaaatattgattgcatctccatctcctacccacatacataaagaaactactagtgccacatcatcaccatatagagatactcaaagtcggacagcctcaccaaacagagcaggaaaaggagtcatagaacagacagaaaaatctcatccaagaagccctaacgtgttatctgtcgctttgagtcaaagaactacagttcctgaggaagaactaaatccaaagatactagctttgcagaatgctcagagaaagcgaaaaatggaacatgatggttcactttttcaagcagtaggaattggaacattattacagcagccagacgatcatgcagctactacatcactttcttggaaacgtgtaaaagggatgcaatctagtgaacagaatggaatggagcaaaagacaattatgttaataccctctgatttagcatgtagactgctgggggcatcaatggatgaaagtggattaccacagctgaccagtcatgattgtgaagttaatgctcctatacaaggcagcagaaacctactgcagggtgaagaattactcagagctttggatcaagttaactgagctttttcttaatttcattcctttttttggacactggtggctcactacctaaagcagtctatttatattttctacatctaattttagaagcctggctacaatactgcacaaactttggttaagttcaatttttgatcccctttctacttaatttacattaatgctcttttttagtatgttctttaatgctggat

SEQ ID NO: 7534 - DNA, 202 bp, Homo sapiens
  SIMILAR (17)..(187): 821254mologous to Homo sapiens Bat2,accession number Z15025,Smith-Waterman Score=256.
ttcttctcgccgtctccgggcaacctgtggtgacaagctgaggcgattcgatgaaaattttggggcacctgacaagcggcttaaagcagaacctgctgccccacctgctgccccttctaccccagctctaccacctgcagtccctaaacaactccctgcacctccagcttcacctccatcatcagccggcgactcggtcatt

SEQ ID NO: 7535 - DNA, 3943 bp, Homo sapiens
  SIMILAR (3756)..(2440): 1001254mologous to Homo sapiens Human VIP2 receptor gene,accession number AAC85220,Smith-Waterman Score=2343.
tgcagatgtgaagtcaggctttattgaagtatttacacagctcattcccgccacgtggaggagtctgcgacattccacacacaatgacagttaaagacacctgttgaccactgggtcctgcttcccctgctcaccaggcatctgtcaggatacagccggccctctaccaggagaaaccagtcagctccgctgaacagtggcacatgtgcggttgaggggagattgtcccctgagcacacctgatgactgatgactgcccacacccaaccaccgaccatcaacaaccagtgcctggtaaccacctgacatgtccactcacgcccacttcctcagcgtcccctctgggtcacagctcagtgtcggcacctggccactgacccaacaccttcagttaccacaaatctttgtttcctcaaaaacctgagagtaggtgggggatgctcccttttgtcctttgaaagctgggcaaggctgggggtgggtctgtccaaaccctacaggggaggaacagccgaggggccgcactgaacctggggtctgcagcgtccacctgcctccctctcgctccacatgctcagccgtcctttcctgggcacctggcctgggccgtttactccccagtatccgtctgtgatggatcctctgcggcccccagaaatggtgggttgttctgtagatccaaccgcctcacctgtctccccaaaccaacctcgggttcattctcccagaagtccagggatgagcttgttgcagcagaggggtgtggccggcgtggcccagggtgtgcaggacagggtgcggacctttggggattgaggggtctctggacactgctgctttgctgtcctaacagcccctctgtccggcctcattttaccggggatatgggttttgcaaaccaaggtgacactgacaggatgtgtgagcttccctgtggctgcctcccggcacagctgtcccgacctttgacatcgcgccccagctggggtctgtgatgccaccaatgcacaggaacaagacattcatttttaaaggaaaagtggagtcaaatgtgctcagaacaactgagtcccacagtcggggcacctgggccagggctgggcagcttgctgaggtccatcgagcgctgtgggggccagggcttggcacacacatggagactgtgccctgatatccccacccttctgcagccagctcagcaacgtccccagacaccctccccacatctgcaaaccacccttcgcctgaaggagcagccgctagggctgctgagcgccagctctggggaggagggcttgaaacagttttatatgttgttaaaataattcttatcctaagattatttttgttaaaaagagaataggtttccggttcccactcagctgtatcccgcaccccacgtaaccccatcaccaggggcccgcaggcctggccgcagctggcctggggctgagcgtcaggctctgcggctcccacagggcggcaggtgacctcctgaggcagagccagagctgctgagggtcccacggaacacctgtgtggagaggtcccctccttcatgaccttgctctcctgatctggttgtctcctcagcccgccttccgtggggaggcaaaacagccctgtggagttgggtggggcagggctcagccgggccgggtgggcgccccaagagagaggacgggctgccctcctgttgatttctcctggtcctaacgtccgggggggccctgactggcttccctctgtcctgcagatgagggggctacccttatgggacctgggaggccgccctgatgtgggacggatgtcacccggtggtcgcccaggctcgtgctgggccacacaactgcgtttccacatttcctccttggctcccctattctcttgggccgggcgcagtggctcacgccttaatcccagcactttgggaggccgaggcgggcccatcacgaggtcaggagatcgagaccatcctggctaacatggtgaaaccctgtctctactaaaaatacaaaaaattagccaggcgtgttggcgggcgcctgtagtcccagctatgggaggctgaggcaggagaatggcgtgaacccgggaggcggagcttgcagggagcagagatcaggccactgcactccagcctgggcgacagagcaagactccgtctcaaaaaaaaaaaaaaaaaaaagtggatccactatacggctgaaacacattttgcacaagattatctaaatgctggagtttaaatcgagtcaatgacaacacgactccaattccaggtatggggtttagtggacaaccagcttgacggagtcaggaccgcgctgacctgcccgacacggtgctcgggcatctggaaggaggaagccggcgtctcagccccgcagaagccccgaaccgtgggcctcccgccgcgtccgacaggcaggggtggggctagatgaccgaggtctccgtttgcaggaaggactgggcgcgggagccgcggtggaactgcagggcgccctccgagccgttgcgggagaaggaggaaccgcagaccctgtaatcccggctcgcggacggggtcgggcaccggcttcgccattttcgcttcagctcgcactgcacctcactgttcaggaaacagtagaggacggccaccaccaggccctggaacgacccgaggcacagctcaaacagtatctggtatttggaggagatgctgatgggaaacacggcaaacaccatgtagtggacgccgaacagcgggataagcaggagcgtggacttggccagcctcttgtactgagactggtcgttgccgccgacatctggggatgttaacttctgcagcaaaattcgtataatactaatgaaaaggacaaaattgacgatgatggaaattaaaatcggtattcgtatgacccaccagggcacactgtggtcgtttgtatcccagcaaccggtgtcttctaagtagagcctggccgcagtccatgcaccgatgcagacggtggggaggccccatccgatcaggaggtaggccaggaagcaccttctaggggggagcatggccaccaggagggtgtggaggtagagcccctccaccagcagccagaagaagttggccatgatgcagtactgcaggaagaccaggctcagcttgcagcccacccaggaggatggctggtcagggcagtgcaacgtgccagagctggagtagagaacgtcgtccttgaccagcactgagatggctctcaggatgaaggacaggaacaggttcaggtggatgtaattcctggtgcagtgcagcttcctgaagaggcacagaattatgcttcctgttgcaagagacatcagagagacactgtagcccagggtataaatggccttcaccagaatataaaacgtgatcttgctctcatcctccgggtcgctgtagccacaggcatcgacgaaatctgggaacgtctctgaccatccgtcactcgtacagtttttgcttatgtttcctgctttgctgtaaaaattgctgaagacttttgggcagggcaccgtgacggtctctcccacattggcaggccgccagcacgtgatgttgtcccagacgccactgcaggctttgtgtttttctgtttgagacctcagaagctctgcacattttgtttcttcctcctgtatttccagatgaaatcggcattctgggtgaatgctgttcacgggggcgagcagccagcaggtcagcagcgcgggaggcagcagcgtccgcatcccgagctcagcgtgccgggggccgcccagcgcccgccgcctccgtcctaggtccccgcggttccgccgcctccagcatgggccgggagcgagtgcgcggagacctcgggccccgcagctgtagccgagcgccccgagcgcgggggccgccccctccgtcccggcagctggagcgcgctcaatgcac

SEQ ID NO: 7536 - DNA, 65 bp, Homo sapiens
cagcatgatgaagaggtttgtcttgatgaaatgagggatgccctaaaggagaaagtcacttagca

SEQ ID NO: 7537 - DNA, 333 bp, Homo sapiens
  misc_feature (1)...(333): n = a,t,c or g
cacnnnnnnnnnnnnnnnnnnnnnnnnnnnnnnnnnnnnnnnnnnnnnnnnnnnnnnnnnnnnnnnnnnnnnnnnnnnnnnnnnnnnnnnnnnnnnnnnnnnnnnnnnnnnnnaaatcactagtaaaaaacacaccaaccaggaaagaaaaatgaaaaaaccccttgtgccaaagggtttcacaattgaattttcccaattgtgcaaaaaactcagggtgccagtctttatgaaacctttccaaaaatacggggaaaggggtctcttcctaaacggattttacgaacccggtttaaccttgatcccaaagtttggcaaaaacccaggggggaa

SEQ ID NO: 7538 - DNA, 518 bp, Homo sapiens
  SIMILAR (1)..(33): 1001254mologous to Mus musculus putative,accession number AK015348,Smith-Waterman Score=60.
cctcaggtcatgtttactggtgaaaatattccttgttcatcctcatgtttatagcaatggtcatatctgcctcaggtcatgtttactggtgaaaatattccttgttcatcctcatgtttatagcaatggtcatatctgtttatccattctaacagaagactggtccccagcgctctcagtccaatcagtttgtcttagcattattagcatgctttccagctgcaaggaaaagagacgaccaccggataattctttttatgtgcgaacatgtaacaagaatccaaagaaaacaaaatggtggtatcatgggaaatttgaacacagagacatacacaaagggaagaagatgtgaagatacaggaagaatgtgaagatggtcatctataaaccaaagagaggcttgggacagaccctaccctctcagtcttcacaggacaacaaccctgcccgcaccttgatcttggacttctagcttccagagctgtgagaaaataaatgtctatcctcttaagccaaaa

SEQ ID NO: 7539 - DNA, 639 bp, Homo sapiens
  SIMILAR (15)..(155): 811254mologous to Mus musculus putative,accession number AK015348,Smith-Waterman Score=184.
gggatggttccatcatggcgtcaatgcagaaacgactacagaaagaactgttggctttgcaaaatgacccacctcctggaatgaccttaaatgagaagagtgttcaaaattcaattacacacgtggattgtatacatggaaggtgcaccatgtaccttatatgaaggggaaaaatttcaacttctatttaaatgtagaagacgatatccttttgactcttctcaaggcatgtttactggtgaaaatattactgatcatcctcatgtttatagcaatggtcatatgtgcttatccattctaacaaaaaactggttcccagcgctctcagtccaatcagtttgtcttaggcattattagcatgctttccagctgcaaggaaaacgacgaccgaccacccggataattctttttatgtgcgaacaatgtaacaagaatccaaagaaaacaaaatggtggtatcatgatgatacttgttgatggccactgttatcatcctcctagcagaagatagtcctacttgagaaaatgagcactttgatccattcagtctttgaactttaaccctttgactgggaagtgacctataggcaatggagactactttcctttactgcattttaactcgtgtgcattttgggg

SEQ ID NO: 7540 - DNA, 568 bp, Homo sapiens
  SIMILAR (1)..(168): 601254mologous to Homo sapiens Human secreted protein, SEQ ID NO: 7871,accession number AAG03790,Smith-Waterman Score=168.
tggagacagggcctcactctgtcacccaggccagagtgcagtggtgcaatcatggctcactgtaacctcgggctcctggcctcaagccatactcccacctcaccctccagagtagctgggattacaggcgtgcgacctcacccagccttttttttaatgttggcttttcttctgttagatcagctccagaagcagcttatcctgtgtcatttaatctcatcagaatttaactaggattgcaatgaatgtacagtttactttgtggggcagctgacatccttcacccacgatgtggcatgtctgccaactcaccctcttttagcatcttcctcaggcggtccttacacacttctcttccagcttttgtgattctttcatatggaggtggagggttgtggctcatgctccgatgggttattgtggagtagagaaacccactggatgtggcacggactgaactcctcggctggtcctcagggttcctcaggggattttcttggatttacatgcagacgatcgtatcatcaacaaactactaaaccctgtctccaatattcatcctcgtgcc

SEQ ID NO: 7541 - DNA, 367 bp, Homo sapiens
  SIMILAR (9)..(260): 821254mologous to Homo sapiens Unknown (protein for MGC:4693),accession number BC003646,Smith-Waterman Score=359.
ggcacgagaggaaggctcagcctgccggggagggccgaacccacatgacaaagagtgactccctgccctccttccgggtctccaccctgcctctggagtcacaccaccccgacccaaacaccatgggcggggccagccaccgggacagggctctctcggtgactgccaccgtacgggaaaccaatgggaatgaccctgccccaacccagcctccacatgctagtaatcacgaactggcctataacgtgtctcttccatctcatctcaccctgctcatatctcatcacttattacacctaataatcatatactcttcttgcgacataatatatcactataatacccatgggcaacatgacgcacaccg

SEQ ID NO: 7542 - DNA, 383 bp, Homo sapiens
  SIMILAR (10)..(216): 951254mologous to Homo sapiens cytoplasmic protein,accession number AF177377,Smith-Waterman Score=365.
ggcacgaggtctaactcgggagactatgaaatattgtactgggacattccaaatggctgcaaactaatcaggaatcgatcggattgtaaggacattgattggacgacatatacctgtgtgctaggatttcaagtatttggtgtctggccacaaggatctgatgggacagatatcaatgcactggtgcgatcccacaatatataggtgatagctgtttatcgtagagcatattcactgctatacagtaaactctctcgtcttatataacctatgctacaccttacgacgaacagatccgctatatactaattatctatatatagttctctttaatttcataaacacttcgtctatccacacgtgcatccaagttagataatccc

SEQ ID NO: 7543 - DNA, 333 bp, Homo sapiens
  SIMILAR (189)..(329): 971254mologous to synthetic construct serine protease inhibitor,accession number A21853,Smith-Waterman Score=227.
ggcacgagtgaagcgtttaggcatgtttaacatccagcactgtaagaagctgtccagctgggtgctgctgatgaaatacctgggcaatgccaccgccatcttcttcctgcctgatgaggggaaactacagcacctggaaaatgaactcacccacgatatcatcaccaagttcctggcagaccttctgtcttcattttcccaaactgtccattactggaacctatgatctgaagagcgtcctgggtcaactgggcatcactaaggtcttcagcaatggggctgacctctccggggtcacagaggaggcacccctgaagctctccaaggccgacg

SEQ ID NO: 7544 - DNA, 853 bp, Homo sapiens
  SIMILAR (22)..(627): 961254mologous to Homo sapiens alpha-1-antitrypsin,accession number K01396,Smith-Waterman Score=1009.
gagtatcggcgattcttagtagacagacacctccagctgaccaccggcaatggcctgttcctcagcgagggcctgtatctagtggataagtttttggaggatgttgggaggttgtaccactcagaagccttgactgtcaacttcggggacaccgaagaggccaagaaacagatcaacgattacgtggagaagggtactcaagggaaaattgtggatttggtcaaggagcttgacagagacacagtttttgctctggtgaattacatcttctttaaaggcaaatgggagagaccctttgaagtcaaggacaccgaggaagaggacttccacgtggaccaggtgaccaccgtgaaggtgcctatgatgaagcgtttaggcatgtttaacatccagcactgtaagaagctgtccagctgggtgctgctgatgaaatacctgggcaatgccaccgccatcttcttcctgcctgatgaggggaaactacagcacctggaaaatgaactcacccacgatatcatcaccaagttcctggaaaatgaagacagaaggtctgccagcttacatttacccaaactgtccattactggaacctatgatctgaagagcgtcctgggtcaactgggcatgcactaaggtacttcggcagagggagccaacacgagaaaaggcgaacggaggcaaccaaggaatgtagaaaaacacagaacaacagaggaacagagagagtggcaacagcgacataaacacacaaccaaaaaagaaagcgagcacaacaaggaaacacaagagagaaagaaaacggaaaacaacggcaagaaggaccctttgtcttcttaatgattgaacaaaatac

SEQ ID NO: 7545 - DNA, 464 bp, Homo sapiens
  SIMILAR (3)..(155): 721254mologous to Homo sapiens gag 2 protein,accession number M14123,Smith-Waterman Score=207.
  misc_feature (1)...(464): n = a,t,c or g
cacaaattcgcaattgctgtttgagggcatgggagaaaattcaggatctgggaactacttatcagtcttttaattctattagacaaggctcaaaggaaccatatcctgatttcattgctcgccttcaagacgcagcacagaaggctctcactgatnnnnnnnnnnnnnnnnnnnnnnnnnnnnnnnnnnnnnnnnnnnnnnnnnnnnnnnnnnnnnnnnnnnnnnnnnnnnnnnnnnnnnnnnnnnnnnnnnnnnnnnnnnnnnnnnnnnnnnnnnnnnnnnnnnnnnnnnnnnnnnnnnnnnnnnnnnnnnnnnnnnnnnnnnnnnnnnnnnnnnnnnnnnnnnnnnnnnnnnnnnnnnnnnnnnnnnnnnnnnnnnnnnnnnnnnnnnnnnnnnnnnnnnnnnnnnnnnnnnnnnnnnnnnnnnnnnnnnnnnnnnnnnnnnnnacggnaatctattctaat

SEQ ID NO: 7546 - DNA, 454 bp, Homo sapiens
  SIMILAR (152)..(454): 611254mologous to Homo sapiens Human myelin oligodendrocyte glycoprotein gene,accession number AAZ29204,Smith-Waterman Score= 293.
ttcacacatataattgccgccttcttccctcctcttttttcccccctagttgaatcagcttgtctaacaagcccattttcatgccccagctgtgctgtgggttttccaagcctcatatttgaatattcaatgagtttaagatggatatgatttcaaaaaatagggccgggcgcggtggctcacgcctgtaatcccagcactttgggaggccgaagcaggcggatcacgaggtcaggaggtcgagatcatcctggctaacacagtgaaaccccatctctactaaaaatacaaaacattagccgggcgtggtggtgggtgcctgtagtcccagctactctggaggctgaggcaggagaatggcgtgaacccgggaggcggagcttgcagtgagccgagatcgcgccactgcactccagcctgggtgacagagcgagactccgtctcaaaaaaaaaa

SEQ ID NO: 7547 - DNA, 390 bp, Homo sapiens
  SIMILAR (3)..(350): 761254mologous to Mus musculus putative,accession number AK011959,Smith-Waterman Score=434.
agctgacgtggtctgcctgttattggagagatatattaagaatccagttgtggattgcagctgatattcttttgcgaatgcttgaagaagcacttctttatagtgaataccagaacatcagcaacactggactgtcatcccaaggattattgatattagcggagttgattcctgccattaagaggacgttggctcgccttctcgtgatcattgtgagcctggactatggcattgagaaacctcatttaggaacagtcatgcaccgcgtgatcggactgaggctgctatacttaatctttgcagatgctgaaggcgggattagagacattgagggttctaaccattcagctggaggtctctgatgacgctattgtatcagatattgactcc

SEQ ID NO: 7548 - DNA, 333 bp, Homo sapiens
  SIMILAR (3)..(332): 801254mologous to Mus musculus putative,accession number AK011959,Smith-Waterman Score=431.
agctgacgtggtctgcctgttattggaaagatatattaagaatccagttctggattgcagctgatattcgtttgggaatgcttgaaaaagcagttctttatagtgaacaccagaacatccgcaacactggactgtcatcccaaggcttattgatatttgcggagtcgattcctgccattaagaggacgttggctcgccttctcgtgatcattgcgagcctggactatggcattgagaaacctcatttaggaacaggcatgcaccgtgtgatcggactgatgcttctatacttaatctttgcaaatgctgaaagcgtgattagagtcattgggg

SEQ ID NO: 7549 - DNA, 361 bp, Homo sapiens; identical to SEQ ID NO: 7192
  SIMILAR (204)..(341): 951254mologous to Homo sapiens cell growth regulator CGR19,accession number U66469,Smith-Waterman Score=227.

SEQ ID NO: 7550 - DNA, 1143 bp, Homo sapiens
  SIMILAR (743)..(1141): 961254mologous to Homo sapiens cell growth regulator CGR19,accession number U66469,Smith-Waterman Score=674.
gttcgttgccgtccggtccggaattcccgggtcgacccacgcgtccggatggctgcggtgtttctggtaacgctttatgaatactcgccgcttttctacatcgcggtggtctttacctgcttcatcgtgaccaccggcctggtattgggatggtttggttgggatgttccagtaattctgagaaattcagaagagacccagttcagcacaagagttttcaaaaagcaaatgagacaagtcaagaatccttttggcttagagatcactaatccatcttcagcttcaattacaactggcataaccttgacaacagattgccttgaagatagcctccttacatgctactgggggtgcagtgttcaaaaattatatgaagctctgcagaagcatgtttattgcttcagaataagcactccccaagcattagaagatgctctgtatagtgaatatctctatcaggaacagtatttgtatcctttcgtctgatatacccattagcactgaaaattagacttcttatggataaagtgttgctaacttattgatcattcttggtatactagaagcatgtttattgcttcagaataagcactccccatgcattagaacatgctctgtataccgaatatctgtatcaggaacaggatttgcatgctttcgtctgatatacccattagcactgataattagacttcttatggataaagtgccgctaacttattgatcattcttgggatactagaagcatgtttattgcttcagaataagcactcctcaagcattagaagatgctctgtggagtgaatatctctatcaggaacagcattttattaaaaaggatagcaaagaagaaatatattgtcagttaccaagagatactaacattgatgactttggtacagtacccagatctcgctatccattggtagcgctattgaccttatctgatgaggatgaccgggaaatttatgatattatttccatggtgtcagtgattcatattcctgataggacttataaactatcctgcagaatattgtatcaatatttactcttggctcaaggtcaatttcatgatcttaagcaacttttcatgtctgcaaataataatttcactccctccaacaattcctcttcagaaga

SEQ ID NO: 7551 - DNA, 768 bp, Homo sapiens
  SIMILAR (465)..(533): 691254mologous to Mus musculus gamma actin-like protein,accession number AF195094,Smith-Waterman Score=87.
cgacatcaaggagaagctgtgctacgtcgccctggacttcgagcaggagatggccaccgccgcatcctcctcttctctggagaagagctacgagctgcccgatggccaggtcatcaccattggcaatgagcggttccggtgtccggaggcgctgttccagccttccttcctgggtatggaatcttgcggcatccacgagaccaccttcaactccatcatgaagtgtgacgtggacatccgcaaagacctgtacgccaacacggtgctgtcgggcggcaccaccatgtacccgggcattgccgacaggatgcagaaggagatcaccgccctggcgcccagcaccatgaagatcaagatcatcgcacccccagagcgcaagtactcggtgtggatcggtggctccatcctggcctcactgtccaccttccagcagatgtggattagcaagcaggagtacgacgagtcgggcccctccatcgtccaccgcaaatgcttctaaacggactcagcagatgcgtagcatttgctgcatgggttaattgagaatagaaatttgcccctggcaaatgcacacacctcatgctagcctcacgaaactggaataagccttcgaaaagaaattgtccttgaagcttgtatctgatatcagcactggattgtagaacttgttgctgattttgaccttgtattgaagttaactgttccccttggtatttgtttaataccctgtacatatctttgagttcaacctttagtacgtgtggcttg

SEQ ID NO: 7552 - DNA, 658 bp, Homo sapiens
  SIMILAR (3)..(482): 991254mologous to Oryctolagus cuniculus gamma non-muscle actin,accession number X60733,Smith-Waterman Score=831.
  misc_feature (1)...(658): n = a,t,c or g
agctgtgctacgtcgccctggacttcgagcaagagatggccacggctgcttccagctcctccctggagaagagctaccagctgcctgacggccaggtcatcaccattggcaatgagcggttccgctgccctgaggcactcttccagccttccttcctgggcatggagtcctgtggcatccacgaaactaccttcaactccatcatgaagtgtgacgtggacatccgcaaagacctgtacgccaacacagtgctgtctggcggcaccaccatgtaccctggcattgccgacaggatgcagaaggagatcactgccctggcacccagcacaatgaagatcaagatcattgctcctcctgagcgcaagtactccgtgtggatcggcggctccatcctggcctcgctgtccaccttccagcagatgtggatcagcaagcaggagtatgacgagtccggcccctccatcgtccaccgcaaatgcttctaggcggactatgacttagttgcgttacaccctttcttgacaaaacctaacttgcgcagaaaacaagatgagattggcatggctttatttgtcttttttggtttgttatgggnnnnnnnnnnnngggggctggccccaggatttaaaaacggcaccggtgaaggtcactgcagccc

SEQ ID NO: 7553 - DNA, 1580 bp, Homo sapiens
  SIMILAR (104)..(1279): 741254mologous to Sus scrofa skeletal alpha actin,accession number U16368,Smith-Waterman Score=1356.
accgcagcggacagcgccaagtgaagcctcgcttccctcccgcggcgaccagggcccgagccgagagtagcagttgtagctacccgcccagaaactagacacaatgtgcgacgaagacgagaccaccgccctcgtgtgcgacaatggctccggcctggtgaaagccggcttcgccggggatgacgcccctagggccgtgttcccgtccatcgtgggccgcccccgacaccagggcgtcatggtcggtatgggtcagaaagattcctacgtgggcgacgaggctcagagcaagagaggtatcctgaccctgaagtaccctatcgagcacggcatcatcaccaactgggatgacatggagaagatctggcaccacaccttctacaacgagcttcgcgtggctcccgaggagcaccccaccctgctcaccgaggcccccctcaatcccaaggccaaccgcgagaagatgacccagatcatgtttgagaccttcaacgtgcccgccatgtacgtggccatccaggccgtgctgtccctctacgcctccggaaggaccaccggcatcgtgctggactccggcgacggcgtcacccacaacgtgcccatttatgagggctacgcgctgccgcacgccatcatgcgcctggacctggcgggccgcgatctcaccgactacctgatgaagatcctcactgagcgtggctactccttcgtgaccacagctgagcgcgagatcgtgcgcgacatcaaggagaagctgtgctacgtggccctggacttcgagaacgagatggcgacgggccgccatccatccatcctcccatggaaaagagctacgagctgccagacggggcaggtcatcaccatcggcaacgagcgcttccgctgcccacatacactgcttccagccttctttcatcggtatgggagtcggcgggcatttcacgagaccaccttacaacagcatcatgaagtgtgacatcgacattcaggaaggaccttgtatgccaaccaacgtcatgttcggggggcacccacgattgtacccctgggaattcgctgacccgcatgcaagaaagagattcaccggcgctggcaccccaggcacccatggaagatcaaggattcattcgcccccgccggagcgcaaaatactcgggtgtggatcgggcggctcccatcctggccttcgctgtcccaccttccaagcaagatgtggatcaccgaagcagggagtacggacgaggccgggccctttccatcgtccaaccgcaaatgcttctagacacactccacctccaagcacgcgacttctcaaggacgacgaatcttctcaattgggggggcggctgagctccagccacccccgcagtcactttctttgttaacaacttcccgttgctgccatccgtaaacttgacacagtgtttataaccgtgtacatacattaactttattacctccattttgttatttttcggaaacaaagccctgtgggaagaaaatggaaactttgaagaagcattaaagtcattctggttaagctgcgtaaaaaaaaaaaaaaaaaaaagatgcggcgcaag

SEQ ID NO: 7554 - DNA, 287 bp, Homo sapiens
  SIMILAR (14)..(160): 911254mologous to Homo sapiens N-terminal region of beta subunit of cytochrome b(-245) (140 AA),accession number X05895,Smith-Waterman Score=252.
cggccgcgtcgacgggaactgggctgtgaatgaggggctctccatttttgtcattctggtttggctggggttgaacgtcttcctctttgtctggtattaccgggtttatgatattccacctaagttcttttacacaagaaaacttcttggggtaagtataaattccatcccatgcaatattggctggttcacatttctcatcagacattcttgttcatcttcctgttagcattttaaataaatattctgaccaacccaaacagtaccattagcctcactccctccat

SEQ ID NO: 7555 - DNA, 369 bp, Homo sapiens
  SIMILAR (7)..(369): 991254mologous to Homo sapiens unnamed protein product,accession number AK000681,Smith-Waterman Score=633.
ggcacgagctcggagcctgtcttccttctctcgtccaactctagcctccggccagctgagcctcgcttctctctagtggatgccacctccctgcacattgaatcgctgagcctgggagatgagggaatctacacctgccaggagatcctgaatgtgactcagtggttccaagtgtggctgcaggtggccagcggcccctatcagattgaggtccacatcgtggccaccggcacactccccaacggcaccctctatgcagccaggggctcccaggtggacttcagctgcaacagcagctccaggccaccacccgtggttgaatggtggttccaggccctgaattccagcagcgagtcctttggccacaac

SEQ ID NO: 7556 - DNA, 416 bp, Homo sapiens
  SIMILAR (1)..(414): 971254mologous to Homo sapiens aminopeptidase,accession number AF191545,Smith-Waterman Score=723.
aatcaaacacattatgctttgcaggcatcattgatttctcttgatttttatgaaaagcactttgatatctactatccactctccaaactggatttaattgctattcctgactttgcacctggagccatggaaaattggggcctcattacatatagggagacgtcactgctttttgaccccaagacctcttctgcttccgataaactgtgggtcaccagagtcatagcccatgaactggcgcaccagtggtttggcaacctggtcacaatggaatggtggaatgatatttggcttaatgagggttttgcaaaatacatggaacttatcgctgttaatgctacatatccagagctgcaatttgatgactattttttgaatgtgtgttttgaagtaattacaaaagattcattgaatcg

SEQ ID NO: 7557 - DNA, 1523 bp, Homo sapiens
  SIMILAR (1461)..(1273): 541254mologous to Homo sapiens PRO1902,accession number AF118082,Smith-Waterman Score=161.
  misc_feature (1)...(1523): n = a,t,c or g
attgatttaaacaaatgtgatcataccataaacacagatgagttgcaccttgtttttttttacttggtctctttggcatttttccattttttaatgtatctagacaactacatttttaaatgccttacatagtatatttccgttatattaaggaatcataatttaatttgaatcacttataaatggatttttttctataaaattggctgtaagccagagtatatcaggtactataaatacatcactaatttgaaacaaataatgggctcagggcaatcccctgtctgggaatatttccagtgggtgggaatggggttttgctttggggttgcgtgcacgcgcacgcacgtgtgtgtcttcgctttactgtttttctgttctaattttgaggaagaaagattcccagaaataacctgtccagttcagttaaaatatttcattcatgtgagaatgcacacattttagagtgtttagaggtatatctttcaaagtgctttctattatgtttgtgggttaatcgattttaggaatgggttgatttttttgtttgtaattttaaaaaattatttcaaaaacaactacttgtaattaaattattttttcaaaactgtgattttgttaaaatttattttactaatcactagttttaaacgtgatatgactatcttagcttagacatttatttattaaaaggtatgactttttaaacgaaaccttttttgcattagaatttgtgacatttttatatggggttaagtcaggtcacagattaatgtatcttacagttgtctttttctactctttaaaattcatatagtaagaaggtcagttgtaaacaccaatgaaatatatatactttgcaagaagacagttttgagagcataggcagtaaagtggaaggaattccattgtttttgacaatcttgcatatctctcattttcccattgtttaatttctaagtggatgttcagtggaggctaacgcctgagagtgctgatgggaaatggtggaaatctggagctacagtagcagtgaacaagaacaccagctaataaagttatcatatcaaagaataaagcctttaccacatgctcactggtggcctttcaacccctcggggctccctcctgaagcaagtaagtaacccccaggttgaactcttccanggtattttcctgggaaagaaagcttaattacaaacttttcccttgaattacattaggttagaaaacatgcagcccaggcacggtggctcatgccctgtaatcccaacactttggaaggctgaggtaggcagatcacttgagcttaggagtttgagaccagcctgggcaacaaggcgaaaccccatctctactaaaaatccaaaattagctgggggtgctcgtgcacacctatagtccccaggtactccggaggctgaggtgggaggatcacctgagcctggggacgtcaaggctccagtgagctgagatcacgccactgcactccagcctggcaacacagtgagacccccatctca

SEQ ID NO: 7558 - DNA, 1647 bp, Homo sapiens
  SIMILAR (1642)..(1520): 821254mologous to Homo sapiens Secreted protein encoded by gene 94 clone HPMBQ32,accession number AAW88627,Smith-Waterman Score=187.
gtagtagcatgcttacgcctttcctggcacgaggtccaacattcatccagaatctgttaccccttgggtagtttgatggaactgagttaagcagaagaccccagctgttttctgggtaagccaggctttgctgtatctggcagtcaggagagaggtcagcccatggtggaggtcttcagtgccgagggctcggatgagaacgtgtagttctttgacttggacctgggcagcgtcttctatggatgcctgccttgtgagcacccacaccttccctccccactgtcgggttgagtagccccagcgtggctgtgttgggagtcctttgcccaacattgtgctgcactggagcctggccctggcactgtcctcaggaccctgcccaagggcccaccgcagagcacacctatgctatggggagccctgctggcagccccgagagccatgccatggcctgcaggagccaggctcctgtgtggatgaagtccctcttcctctgtgccttgatcccttgggggtgcctttggtcatctctttctgtcctttcctgtctctgaaatagtcatcactccccttgactctctctgttcacgtcttctcagtctgcagagttaacttctgtaaggagtttaatctggggttccaagaaaacaagttccttgttaacatagcactgactttgcaacaatagaaaactaacaaatgagcaacaattttaaagagtagaggtaggttctcattgggtgtaacttcaacccattctgcttgtggttagaatttataattttgctaacgatgtaatttactaaggtttgaaatggtattctaacagtgagtccattgtcttgaggaataatctgatttataagtaatactgatagacatattttcgtacatctgagcagaaataaatgcatgtttctagcatatgtaatataaaaactccagaggataagtttacacttaacaagatgttgttttctatttttgaatttcttattatttccccctttttggtagtggagttgagagggggagcatactatttgtataaagaactgtcaccccagagtgacatttattttccaagatgaccctgaactcatgctgttggtttcatatggtgtttgtgtgctttgcctagattcaaggcctgaggatttgaggaaaatcgggattttttttttcctatttggttttcatgtaaaagttctaaatgtcacttattttgctaaataagaccctttcacaggatagtgtgcgcaatacctgtccgtgtttccaagcagagttcaagttcatgtcttcacaagtagatgagagtcacttccagtcgggggaagcccgcctgagcagtgttttgagagtgcgtacattggaggactgccccacgtccgtttgcactctgccttgcaaaacttactgtggagacgtgccccagactggtctcagaccagagtttgtggcacaggaaaacctggccccctaaaaagaagttttggaattggaagcctgataatttcgggaggctgaggcaggagaacggcgtgaacccgggaggcggagcttgcagtgagccgagatcgcaccactgcaccccagcctgggtgacagagcaagactccgtctccaaaaaaaaaaaaaaaaaaa

SEQ ID NO: 7559 - DNA, 396 bp, Homo sapiens
  SIMILAR (203)..(394): 1001254mologous to Homo sapiens Human secreted protein, SEQ ID NO: 7626,accession number AAG03545,Smith-Waterman Score=340.
tctgaatactggggaacagaaagatatgacagagttttttactgatctaattaccaaaatcgaagaaatgtctcccgaactgaaaaataccgtcaaaagtttatttggaggtgtaattacaaacaatgttgtatccttggattgtgaacatgttagtcaaactgctgaagagttttatactgtgaggtgccaagtggctgatatgaagaacatttatgaatctcttgatgaagttactataaaagacactttggaaggtgataacatgtatacttgctctcattgtgggaagaaagtacgagctgaaaaaagggcatgttttaagaaattgcctcgcattttgagtttcaatactatgagatacacatttaatatggtcacgatgatgaaagagag

SEQ ID NO: 7560 - DNA, 555 bp, Homo sapiens
  SIMILAR (398)..(502): 911254mologous to Homo sapiens KIAA0570 protein,accession number AB011142,Smith-Waterman Score=164.
atggaatcaacctacatgcccatcaacagtggactagataaagaaaatgtggagagtgaatgcaaagcatataatcctagacctttctgtaaaacatacaccatggataagcagcctctgaatactggggaacagaaagatatgacagagttttttactgatctaattaccaaaatcgaagaaatgtctcccgaactgagcttacgatgtgaagaacttcatcttcatgcagaaaatctgtctaggcgggtctgggagctactgatgcttcttcctacatgtcctaatatgttgatggcattccagaatatctcagatgagcagggaagttacagtgatctttatccagattcagatgattcaagtgaagatcaagtggaaaatagtaaaaattcctggagttgcaagatcagtagtaatttcacttcgtcttcttccaaaactatttggtacttttcagcagtttgggagcagttacgatacacactggataacaatgttttaaagaagtcagtgatcattcaaaaagactcagagagctatgaatatgactga

SEQ ID NO: 7561 - DNA, 1048 bp, Homo sapiens
  SIMILAR (893)..(1039): 591254mologous to Drosophila melanogaster brakeless- A,accession number AF242193,Smith-Waterman Score=140.
atgtccttgagcagtggagcctccggagggaaaggagtggatgcaaacccggttgagacatacgacagtggggatgaatgggacattggagtagggaatctcatcattgacctggacgccgatctggaaaaggaccagcagaaactggaaatgtcaggctcaaaggaggtggggataccggctcccaatgctgtggccacactaccagacaacatcaagtttgtgaccccagtgccaggtcctcaagggaaggaaggcaaatcaaaatccaaaaggagtaagagtggcaaagacactagcaaacccactccagggacttccctgttcactccaagtgagggggcagctagcaagaaagaggtgcaggggcgctcaggagatggtgccaatgctggaggcctggttgctgctattgctcccaagggctcagagaaggcggctaaggcatcccgcagtgtagccggttccaaaaaggagaaggagaacagctcatctaagagcaagaaggagagaagcgaaggagtggggacttgttcagaaaaggatcctggggtcctccagccagttcccttgggaggacggggtggtcagtatgatggaagtgcaggggtggatacaggagctgtggagccacttgggagtatagctattgagcctggggcagcgctcaatcctttgggaactaaaccggagccagaggaaggggagaatgagtgtcgcctgctaaagaaagtcaagtctgaaaagatggagtcccctgtttccacaccagcagtgctgccaatacaccttttggtgccagtggtcaacaatgacatctcatctccttgtgagcagatcatggttcgtacccgatcagttggggtcaacacatgtgatgtgggctctggccacagagcctgagtgcttgggcccctgtgaacctggaactagcgtcaaccttgaaggcatcgtgtggcaggaaacagaagatggacacaaggaagcagttcccaatatgccatctaaggtagctaccttcttggtgttcctcagtgacccatactga

SEQ ID NO: 7562 - DNA, 407 bp, Homo sapiens
  SIMILAR (4)..(405): 741254mologous to Homo sapiens N-formylpeptide receptor fMLP- R98,accession number M60626,Smith-Waterman Score=527.
gcattcttcatggccaggaaggccatgggaggacattggactttcagctggctcctgtgcaacttccagattaccatacaggacatcaacgtgatcggaacagactacctgaccgtgctcaatgctatgcaccgctgtgtttgcctactgcgtccagtctggaaccataaccaccacaccgtgagccctgtcccgactgggatgattggtccctgggtgatggctctgctcctcacattgccagttatcattcgtgtgactacagtacctggtaaaacggtgacagtagcctgcacttttaacttttcgccatggaccaacgaccctattgagaggataaatgtggccgatgccatgttgacggcgagaggcatcatccggttcatcattgacttcagcgcacccac

SEQ ID NO: 7563 - DNA, 1930 bp, Homo sapiens
  SIMILAR (71)..(709): 931254mologous to Macaca mulatta N-formyl peptide receptor,accession number X97734,Smith-Waterman Score=1051.
cccagacctagaactacccagagcaagaccacagctggtgaacagtccaggagcagacaagatggagacaaattcctctctccccacgaacatctctggagggacacctgctgtatctgctggctatctcttcctggatatcatcacttatctggtatttgcagtcacctttgtcctcggggtcctgggcaacgggcttgtgatctgggtggctggattccggatgacacacacagtcaccaccatcagttacctgaacctggccgtggctgacttctgtttcacctccactttgccattcttcatggtcaggaaggccatgggaggacattggcctttcggctggttcctgtgcaaattcgtctttaccatagtggacatcaacttgttcggaagtgtcttcctgatcgccctcattgctctggaccgctgtgtttgcgtcctgcatccagtctggacccagaaccaccgcaccgtgagcctggccaagaaggtgatcattgggccctgggtgatggctctgctcctcacattgccagttatcattcgtgtgactacagtacctggtaaaacggggacagtagcctgcacttttaacttttcgccctggaccaacgaccctaaagagaggataaatgtggccgttgccatgttgacggtgagaggcatcatccggttcatcattggcttcagcgcacccatgtccatcggttgctgtcagttatgggcttattgccaccaagatccacaagcaaggcttgattaaagtccaagtccggccctaaggggccctctcctttgtcgcaagaagccttttttctctgctggtcccccatatcaaggtggtggccccttaatagcccacaagtcaagaatcccgtgaagttaattgcaaaggcatgtaccaaaggaaattgggtattgcaagtggatgtgaacaaagtgcccctggccttcttcaacagctggccttcaaccccatggtcctagtctttcatgggcccaggacttccgggagaggctgatccacgcccttcccgccaagtctgggagagggcccttgaccgaggacttcaaccccaaaccagtgccacagcttaccaattctactttaccttcttgcagaggtggcgttacaggcaaagtgaggagggagctggggggacacttttcgagctcccagctcccagcttccgtctcaccttgagtttaggctgagccaccagggattttcctggcttaatttttagggattacccactcatcagaaaaaaaaaaaaaaagcctttgtgtcccctgatttggggagaataaacagatatgagtttattattgacttcttttttgattttggacctcagcctcgggtggtcagggtgggaaatgataggaagaagctgtcatctgcatcctagtttgcctgaaatgaacccaaataatacccattattattagtcctgaattatgagtagtgaatgatacccatcattctggcatcatgatgagtagtgtccacttccattctgaaaagtgccctgctgtgaaaaataaattatatagtcatcctaggtaaatgaaggaggagggagaagtgtgaaagagtatggcttaaatcagacaagatatacaagaagatactttatatagggcaggagcggtggctcatgcctgtaatcccagcactttgggaggccgaggcaggcggatcaccagaggtcaggaattcgagaacagcctggccaacatggtgaaaccctgtctctactaaaaatacaaaaattagctgggcgtagtggcaggctcccgtaatcccagctactcaggagaccgaggcaggagaatcgcttggacctggaaggcggaggttgtagtgagccaagaaaacgccactacactccagcctgggtgacagagagagactccggctcag

SEQ ID NO: 7564 - DNA, 386 bp, Homo sapiens
aaatgggatgctaggaaataggtttaaatcaggttttatttttaaagtgtatttacaggagacagcgggggaaacctggtcagttgagcaggtctgcagttggttggtggagaaaaatttaggagagctagttcatagatttcaagaggaagaagtaagtggggccgctcttcttgcacttaatgatcggatggttcagcaactggtaaagaaaattgggcaccaggctgttctgatggatttaattaaaaaatacaagcagaacactcaaggactgaagtccccagaaaaccccaaaaaggcagccctggtcatgcaaacagaagcagctcgagattacagggatgaagagtcctccagtccagccaggcatggggagcagatgt

SEQ ID NO: 7565 - DNA, 392 bp, Homo sapiens
  SIMILAR (2)..(199): 961254mologous to Homo sapiens tRNA-guanine transglycosylase,accession number AF302783,Smith-Waterman Score= 335.
tatccagggtgggctggacgcagatctccgggccacctgccttgaagagatgaccaagcgagacgtgcctgggttcgccatcgggggcctgagcgggggtgagagcaagtcgcagttctggcggatggtggcgctgagcacctctcggctgccgaaggacaagccccgatatctgatgggggttgggtatgttgtggatagggaagccagagccctacctgtgggaagtggattcctggggaccccctaccctgcttggggaggtggcatttgggggaaacggacacaggtctgatctgaggagactaggaagacatggctgtcccttgggggccattctgagggaatatggcccagtctggggcagtgtgagggttgggaggggccctggg

SEQ ID NO: 7566 - DNA, 711 bp, Homo sapiens
  SIMILAR (234)..(181): 501254mologous to Mus musculus reverse transcriptase,accession number U15647,Smith-Waterman Score=52.
gtgttcaccactcttctactttttgaaaaagtttgtgaagaatttgtattaatttttcattaaaagttttgtagaattcatttaagaagctatttcagcctgggctcttctttgtgggtatcttttcaaaaactcatttaacctatttacttgatataggtttattcaagttttctacttctgagttggttttggtagtttgtgtcttcctaggaatttgtccacttcattgataatttattgacataaaattattcataatatgccttcataatcttttttatttatacaagttcagttgaaatgttccctccttcatttctgattttagtaatttgattatccttttttcctggtcagtctagcagaaggtgtgtcagttttactgatctttttatagaatcaacttttggttgcattgatttttctctacttttcttcactctatttcatttattctcatctaatcttttatatttccttctttctcctggctctaggtttagtttgctcttctttttccagggtcttaaggtgtaaagtgaggttagtgctatggtctttcttttctttttttttttttttttgagatggagtctcgctctgctgcccaggctggagtgcagtggtgcaatcttggctcactgcaagctctgcctcccaggttcacgccattctcctgcctcagcctcccgagtagctgggactaca

SEQ ID NO: 7567 - DNA, 1732 bp, Homo sapiens
  SIMILAR (494)..(1603): 391254mologous to Homo sapiens bA145E8.1 (KIAA1074),accession number AL162272,Smith-Waterman Score=558.
gaagaagagcattcagcaactagttcctgaatataatgaaaaacagacacctgaaagtcttcctcagaatagcaatccagattggcatcctactaatttgacccttagtgatgagacttgtcagagatccaagaatctgaaagttggtgataaaagtccatctgtatcaccatcaatgcctgaaaatcagtcagcaaccaaagaactgggacagatgaacttaacagaacgagaaaaaatggacactggagttgtacttctctcagggaatgatactctccatgacctgtgccaatcacagctaccagaaaacaaagagagcaaagaagactatgtcttttatctaactgttctaagtagtttaactgaacgtttggattttgcagcagaacaagacttggagctgacatcagaggaagagcaagaaagacttaaaggatgcgaaaataagcagccacaagacaaagctatttttaaaacatgtagcccaacagagaagacacccaagaaacaaaacaagcaaattaatcttccacttttgcatctgcagaaaacgtctcaagaaccagaaatggctaaggattgtgatagagaggatatacctatatatccagtacttcctcatgtgcaaaaatctgaggaaatgcggattgaacaaggcaaattagagtggaaaaaccaattaaaactcgtcataaatgagttaaagcagaggtttggtgaaatttatgaaaaatacaaaattccggcttgtcctgaggaagagccactacttgataactctacaagaggaacagatgtgaaggatattccctttaatttgacaaataacatacctggttgtgaggaagaagatgcatctgaaatatctgtctcagtgattctgctagcctaccaagaatccaagaaagacacattttgtttgtgtgaacacttactgaaacttaagaataatcactgtgaccaacttacagtaaaacttaaacaaatggaaaatatggtcagtgtactacaaaatgagctatctgaaacaaaaaagacaaaattacagttagaacttcaaaaaattgaatgggagaaagagctgtacgatttgagacttgccttaaaacaagaaaatgaggagaaaagaaatgccgatatgttgtataataaagatagtgaacagttaagaataaaagaagaggagtgtgggaaagtggttgaaacaaagcaacaacttaaatggaatctgagaagacttgttaaggaattgaggacagtaagaaataacttggatctggttgtgcaggagagaaacgatgcccagaagcaactttctgaagaacaggatgccagaatattacaagatcagattctgacgagtaaacaaaaggaactagaaatggctcagaagaaaaggaatcctgagtttcattctgctgccaaaaatcttcaagctgagagtgaaaagcagattctttcactacaagagaagaacaaggagctgatggatgaatataatcatttaaaagaaagaatggatcaatgtgagaaagagaaagcaggaagaaaagtagttatgagagaattccagcaagaatggaccgatctcctaaaacaacaacctacgtcagaggctacctcacgttgtcacattaatttagatgagacacaggattcaaagaagaaattgggtcaaatcagaagtgaagtatgtatgaaacataacatgtcaacagttaatctatag

SEQ ID NO: 7568 - DNA, 387 bp, Homo sapiens
cggacgcgtgggcggacgcgtgggattctgtgccacatgcagataagttatgcgcaggtggagacaatgcgccagtccattgaagagctgcactactacgaactggagctatacgtcttacagtttcaccacttgcaggttgtctgggaaaatcacctttgcatttttttttattacttaaaatagctcctatatgtttgatgtctagatcacaaattttaagaaattataggagctgagtttgggacatctaacagctgagagtgagtgatactgagccatctgcataactgctggtgatagatacatattaagaatcttcagccatctgcgagtgtaagaggaaacatatacttacgcatttttaatttgccaattacatcctcc

SEQ ID NO: 7569 - DNA, 17889 bp, Homo sapiens
  SIMILAR (17863)..(15374): 1001254mologous to Homo sapiens acetyl LDL receptor,accession number D86864,Smith-Waterman Score=4745.
  misc_feature (1)...(17889): n = a,t,c or g
cagcccgttaaatttcaaaaaattaaattgaaccagagtcccctggccccgttgaaggaaaaataaataaaaatgtgttagtgccaagtagtaatttttggcattaggggattgatacaattttgcccttaaatcagaattgaagtttaaaaaccaggccatagtttcccttaataaattttttttttttttttttttaagatggagtcttgctctgtcgcccaggctggagtgcagtggtgcaatctcggctcactgcaagctctgcctcccaggttcatgccattctcctgcctcagcctcccgagtagctgggactccaggcacccaccaccatgcctggctaatttttttctgtatttttagtagagatggggtttcaccatgttagccaggatggtcttgatctcctgacctcatgatccgcccgcctcggcctcccaaagtgctgggattacaggcgtgagccaccacacccagcctcttccctcctatcattttcgtgttctggagacagtagcatacttggccctgggtttgacataaaactagttctacatatagaaagctagggacaaaaatgagttctggacaaaactaaaggactgaataatcatgtgaacagccaactctcctacatatgctaagcactgatgaagtgtttcatatattcactcacctaaatttcacaacaatcctatgaaatgctaactagcatgatccccagtttaaaggtgaggaaattgagtcacaggcagaataacttgctctgggtcaccaagctaataaatagatctgggttcaaacccaggcagcctggctccggaatcaactcttaaccacttagagcatcatcactgagatcgggagagggacaggctgctgtaaagagggtgaagcgaaaatgggaggagagcagcggttaagcaatgatgtgatggggctaaataaaaatggatacaaaaacgagtaaaagaccagagtaaaaggaaaagactggagaaggggcctaacattaaaagagaatgaggagaagggagagttgacaagcaaaggtgaaagcagaaagtcagttgtccatatggcttggggagataaagaaggcccaggaaggcctccaggaaaaggctgccatgtcaggcaggacacagaggacaattgaggaaaagtgattcttacaagatggtgaaggtgccattgtgggtgttgggctctggcacaggcacttggcggagcctctgctctgggttgagatcaatacatgacaacatctcatctccgcaggtacagagctcacatatgttggtgcttgtggaggccttgtgttcctctggtgcagttaaagccttattttgggtgtaactttcagactgcaccagtgaatcctgagcaggttctagttcagtaggtggacctgtgacttcagtcaggcttcgatgcagagtctgaacccggtctggacgaggagctgtagtcttctccagggctgtagaatgtccagtctctgtagtgggttctggaatgatggcaagtcccaggtctggaggctgagttgaggtctcctccgtggttggagacggtttaacctctgtagtaggttttgtagttatggtaagctccaggtccagaggttgaacggtggcttgagtcaggtgtgaatgctgagcctgacccttgtctgaaggtggaagtgtcacctcagggtgtcctggaggaggagctgtagtcatcagggctgtagaaggttcaacctctgtcatggattttggagtgatggtaaaccccaggtccaaaggttgaactgtggctcgagtcaggtgtgaatgctgagtctgaacctggtctggatgtggaagtgtcacctcaggatgctttggagaaactatagtcctcttcggggctgtagaatgtccaacctccgtagtgggttctggagtgatggtaagtcccaggtccaaaagttgaactgtaacgctgggtgacactggatgctgagcttgatcctgacctggtgttggatttgttaccccttgatatactcgaagttggggtacaactttcttaggaggctgagttggggtctccttcatggttggagaaagttcaacctctgtcatggattctggagtgatggtaaaccccagatccaaaggttgaactgtggcttgagtcaggtgtgaatgctctggaggttgagctacaactacattagggaactctggagtctgagctggggcctcctgatgggttagggaagactcaccctcctcagcggtctgtggatgctcagctgcagcctcctgctgggttggagaggggttctcattattaataggttccggagattgaaatgaagtctcctgttgaactgctaaaggtccagcttcttctgatgactctgaaagcagaggtgggcccccgtgctggatggcgggaggttctatatcattacctgaccctgagagccgagttgtagcctcctgctggactagagaagttcccacctctgcactaggctctgctgctatggtgagctgcacgtctggaggcttcacagagacactgggtgaatctaaatgatgagtttgatggtgacctggaggtgaaactgtgacttcatgatgttctggaggctgacctggggtctcctgctgggtcggagaagattcgacctccctagaagtctcagaaggctgaactggctgctgctgctcactgatggaaagttcatgctccataggaggaactggaggctcaattggggcctcctgttgggttgcagaaggttccacctcctctggaaactgaattggggtctcctgctgagcttgggaagattctgtctcattggtagcctctgaagttatggtaacctccacatctgcaggtttaactgtaatgttgggcaagtgataataagcttgatcctcacctggaggttgaactgacacctcatgattcggtagagttagactctccatagaggactctggaggcagagctggggcctcctgctgcattgaagaaggttcttcctcaaggagctgtggaagctgtgctggggcttcttgctggagtgaagaggactggatgtcttcaagggtctctggattttgagtttcgggctctagatggaattgagaaggtccaacttgctcagagggccctggaggctcatctgacttcacccggagttctggaggcaggctaccgggatacggtgtatctgtactggaatattcattctgcaaagtctgtttctgactctgaggtgtggataattggcgtataattccaataatctcagcaaggctccaacgctgagctggatctttcttcagcttcttgggcgaaacagggagcctttcctgtggactcagcttgtcctttaaatcctgctgtgaagccaagaactgctctggctccaggggcagctctccagctgaatcccaggtgtccaggaatggaaccaaattttcagtcgattcctggggtggggctggcatctctgaggaagcagagggccccaggtgatcaaagtcccacgggtctgctgggagagtaggcgcatggggagattcccgtgggaaatgggaggagtgggaagaccagggctcaggcggccccagggggttagaggtcagctggagcgggtccttgacccactccagaggctgagcctccttgactagtagccacaatagttgccacataaggaggggccatgggccccagaaacgcagcggggacatgacacacgctagtgccgggcactgagcggaagtcattctggcagctccgagacgctcgtgccccttgtaagcatgagtcccgccctgtctttatgacacctttatttatgccacagaactgctccatgtcaccagggcactcatgtcacaatcccgcccaagcacgccttcccatcctgccctgccggagcacccctctcctccccttagtgaggaaggatttgggcctcagatcctggtggtcccaggactccagcgcctgctgtggtggggtagggtggggtagggtgggatgggggcgcggcagagcttcccaaggaagtcaccggacctcgcctcaggatattcagaagtgctagttcagttctggcagccttcctcctttaaggtgaaatccgagaacactcttccttccagggagagcaactgacctgcaaaatgggcgccaggatgtacattacagtcatttattccaaagtgttgccattttcgctaaactgtcgcatgtttgataattaattcaccaccctattaggtaggggctgccagggaataagcgaggactccaaattttctgtaggaggggtgttgggagttggcaattcggtctgggagagaaggttttaatccgagtgaagagccctttgcactagcctgggaggaggctgaactgtcatcctgccttgactcaacacagccattcccctagaagttacagcacttctagggtcacctgtgttcagagatctaccctgtgtgcacacatggagaagaggcttaggttgttaaagtcagcatgttaaatcatttcctgaaatgcgactgtaactagaacccagctgacttcccccacagccgttcttacctattttattactgtctggcataattaccagcatgtaaactccaagaaggtgcttcatcttattttagtgcctggcatagacatagggtgcatagtgatggctttaaaattgaaggggggccgggtgcggtggctcacgcctgtaatcccagcactttgggaggccgaggcgggtggatcacctgaggtcaggagatcgagaccatcagatcgagacccgaaaccatccctggctaacacgggtgaaacccctgtctctactaaaaaaatacaaaaaaaaaattagccgggtgtgtggtggcaggcgccctgtaatcccagctactcgggaggctgaggcaggagaatggcgtgaacccgggaggcggacgttgcatgtgagccgagatcacaacactgcacttcagcctgggcaacaagagagaaactccatctcaaaaaaaaaaaaaaaaaaaaaatcccctacaggtgttttaagacataaatgtgggaggaaaacagtagggaaagatttctgaaataagatttttttaaaaagcataaaccatcttctggccacatagtatgtattagcctcagggggcaggaaggcaccagctgctgtgtgggtaggaggccaaggccaaggcttagctagagggaagacctgggccctctgcacctatatcaggggaactggtgtgatccttgtgctctcatcaaagacaaaatataaaagtacataacaagacactaaaatagattaaagaacttagcaatttagcctatgacttccaacactatattttacaggtagttagcaatgtttcattggcaagccacaattatggaatcgaataatagcccatgttaaggtggtgtattcttttcagcaattcattttcctacagactaccccttcagaaccctaaggttgcatccacaagaacttattatctactactcagcaggctgaggcaggaggattgtttgtgcccaggagtttgagcctttagtgtactgtgatcatgctgtgaatagccactctactccagcctgtgcaagatagtgagataccctctaaaaaaatacattatctaacattatctaaatattaacagcaatagcagcatttgatatgccattttaagattacagtggtctactgccttgatatttttcaagatgcctttgtttctgccatgtgctccaaatccctgatgcctcctggtgccaaaaattacacagaattacaagtgaaacagaatatcttggaaattgactcaaaaagatattatgtgatgatactttaaagtcagaataacctggcattatgctgggaacaaacttataataccatcccctttaaaatgtttatctggccgccctatcagatctcttccttttttatctttttatttttttgaaacagagtctctgttacccaggctggagtgcagtggcgcgatctcggctcactgcaagctccgcctcccgggttcacgccattctcctgcctcagcctcccgagtagctgggactacaggcgcccgctaccacgcccggctaattttttgtatttttagtagagatggggtttcaccatgttatcccagctggtctcaaactcctgacctcaagtgatctgcctgcctcagcctcccaaactactgggattataggtgtgagccaccgtacctggccacatctcttcttttttaaattttattttttcttacctttctccattcataaacgaataaaacacattacaaaaattgcaaagggaaaattaatccttttactaattttactatattaaaattaactttttttttttttgaaacgcagtcttgctcagttgcccaggctggagtgcagtggtgcaatctcggctcactgcaagctccacctcccgggttcacgccattctcctgcctcagcctcccgagtagctggaactacaggcacctgccaccacgcccagctaatttttttgtatttttagtagaaacagggtttcacccatgttagccaggatggtcttcatctcctgaccttgtgatccacccatctcagcctcccaaagtgctgggattacaagcgtgagccaccgcgccaggcctattaaaattaacttttctagattgaaagacatcgtgagaagaatggaaagacagacctcaacttttaaatacatagtattgtatccaaatattctctttaaacttttaagaatcgctaagaaagagaaaaaacaatccaattaaaaatgagtaaggggtggggcatggtggctcacacttttaatcccagcattttgggaggccgaggcgggcggaccacctgaggtcaggagatcgagaccatcctgactaacacggtgaaaccccgtctctactaaaaatacaaaaaaattagccgggcgtggttgcgggtgcctataatcccagctattcaggaggctgaggcaggagaattgcttgaatccaggaggtggaggttgcagtgagccaagatcgcgccactgcactcaagcctaggtgacaaaagcaaaacttccatttcaaaaaaaaaaaaaaagggtaggccaggcatggtggcttacatctataatcccagcactttgggaggtgggaggattgcttgagcccaggagtttgagactagccttggcaacatagcgagacaatgtctctaccaaaaaaaacggttgttgtttttggggacagggtctcactctgtcacccaggctagagagcagtgacatgatcacagttcacagcagccttgaactcccaggctcaagttgtcctcccaaccagcttccggagtagctagaactatgcacgccatcatacctggctacttttaaaaattttttctgtagagatgaggtcttgctatgttgtatcaggccgacctccaattcctgggctcaagcgatcctdunangruccccacctcagcctcccaaagtgctgggattacaggcatgagccaccatgcctagcttttacaaaaaaaaaatttcaaaggttttttgaaattggtgggcatgatggcatgcacctatatcctagctatttgggaggctgaggcgagaggattgcttgagcccggaagtggaggctgcagtgagctatgactgtatcaccacactccagccttgggcaacagagtaagaccctatttcaaaaaaataaaaagaaaaacaaatgagcaagagataaaaacagttaattcactgaagaagaaatgcaaatggccagataaacatactgataaaaaggtgattgaaggggatttcttacacattgcaggtataaatttttccaaatattttggcaaacaatttgacattgtgtagtaaagttgaagacagacataccctaagacccagacaattcagttccaaggcattatatcctagtaagaaattcttgcacatgtgcatgggagatatacctaggaatgtttgcagaagataaacatccctggtagatacatcttacattgttacatactagtggtatgaattatactgtcttatctccttaagtgtccatttcctcacctatacattcaagataagtctacctaacagagttgttatgagattaaatgaaaaaaagaaaaagaaaaaatgcactaaggacacggcttagaacacagtagccatcatttttattctcaaacttgctgtccctgtttcagaggtttctgttgtgaaggccctacattatattgtctatcagacccagccctatgtgtataaaaaacccctcaggttgcctccctttcagatatgatttccttcctatgactagaggatcatgcaggaggaactgagttaatcccttatctcttatatgaagcaacttgttttttctctcattttatagatgttagcatgtaaacttacataatttgctgaaatgttctgaaaactcacactgagatcatataaaataaagccacacaatttgtgaaaatagcatggtgggtttgtgggtttgttgtgggagtgaggaattgagcagagggttatagaacccagctcggaagtctatggggtaggtagcctagcctctgttttctctccatggcagagatgcaaataggagctatagtagcttaagctccctaaattcccccagattgtggaaatcttcttggccttctgtgggaaattattccatcaagaaagcaggataggataacagaaaacagtatttctggaattgtttccagtacaaaacatcatgctggggaaggaggagccaacagagctgtataattgtgtggagcaatctcacctgtcccacatatgggtaggcatcttcagagtcaataccccggttcttctgcacatattggaaggcattggtcatgtagccccctccacagccatcattctcagacacacaatccactaggttctggggactcagatttaagagtttgccagttttcttcttgagttggccctccagggcacccacagagctaaaagcccaacaggaaccacactgaccctgaaagggatacagagaaactatgaatctttggtgtttacatttctatatcttctctctacccggctgaaggaaattccatgtgttcttaaaaatttcagcacaaatgttgtcattgttgtgagtcttcctcttccgcttaatatctgttgcactgttctactgctattgatttttgctaccatttttactattagctacagtaaagcagagcacagtaccagctgtggaggcatttgtcctgggagctaaccctgactttgccacccagtagctatgtgaccccgggtaagttactaaatttgcctgtgtctcagtttctctatgcataaaatattgttataagggattaaatatttaaactcatgtaaagagttaagaagttcctgacaaacaataaaatctcaaaaagtattagctattattgtttgtgcagctagattgtagatttttctttctttcctgttctatttttttagattgagatttcctgaggacacaggttgtgtcttagtcatcttgagtctctgctgcctaacactgcatctggtaggttctgggggtcaaaaagtgtttgttaaatgaacgttaaatcaattgtttatcttgctgatacaatcctgtgttgtttgggttgtgaaaaaactgacattctcatgctagtaagaatgtaagattgcaaaaacttttttgggctgggcatggtggctcatgtctgtaatcctagcactttgggaggccgaagcgggcagattgcttgagcccaggaatttgagaccagcttgggtagcatggcaaaaccctgtctctaacaaaaaattttttaaaattagctgggtgtggtggcatgtgcttctaattcccagctactagggaggctgaggttggagaatcacttgagcctgagacgttgaggctgcagtgagccatgattgcgccactggactccagcctgggtgacagagacgctgtctcaaaaaaaaaaaaaaaatttggggggggggaaaggattatttgtgacctaacaattccaattttaggacttattttgcataaatatttgtacatgtgcacaaaaacatatgcacaagggtgcttattgcaacactatttgtaataaagaaaaaccaggccgcgatggctcatgcctgtaatcccagcactttgggaagctgaggcaggaggatcacctgaggtcaggagttcgagagcagcctggccaacatggcaaaaccccttatttactaaaaatacaaaaattagccaggcgtagtggcgcgtgcctgtaatctcagctactcaggaggctgaggcaggagaatcgcttgaacccgggaggtgtaggttgcagtgagccaagattgcaccactgcactacagcctggaccttacagtgagaccctgtctcaaaaaaattaaaaaaaaaatacattgagagacagagataccaccaacatatgaaacacccatggagcactaagattcagtatgtatgtatggatggatgacacagatcagtagagaaacagataatacaaacattgtgtatgtttgtattcacacacacatattgaggccagctatgggggaggggtgagagagagagtggctcaaaaagaactagaacaagggatacacaaaaagatagaataaaaactcagtgtcataaatatgtcagtggcagaaccggagagagtaatcaagagaaaaagcatgtagcagaaaaagaaactgtacatcaaaaatgaaagcacccaagccaggagatccaggcggtagtgacttattgactacttacctccctggagaagcagcaagaccactactcctgcaatagatgggtggaaagagaaatctgttgagccaaacctggttctgctgtcccagataatggcagtgaaaatgtgggtgtgctcacatacaagatagagccacacttcatctgggctccccagccacagctgctgtggtttctttttttttttttttttttgagacggagtctcaactctgtcgcccaggctggagtgcagtgggcgctatctcggctcactgcaagctccgcctcccgggttcacgtcattttcctgcctcagcctctccgagtagctgggagtacagatgcatgccgccacgcctggctaatttttttttttttgtattttttagtagagacggggtttcaccgtgttagccaggatggtctcgatttcctgacctcgtgatccacccgcctcggccttcaaaagtgctaggattacaggtgtgagccaccgcgcctggcctatacgcttttttctgttaaaaaatatttttaagtttttaaacttttgttaaaaattgagacagaagcaaacacattacttactaggcctacacagagccaggattatcagtatcaatcccttccgcctccacatcatgtcccactggaaggtcttcggggcagtaacggacatggagctgttatctcctaacatgccttcttctggaatacctcctgaaagacctgcctgaggctatttaacagttaactttttttttatatgtaagtaggagtactctaaaataacaatataaaatgtagtacaataaaataaataagccagtaacgtagttgtttattatcaagtatgtactgtacataattgtatatgctagacttttatacagctggcagcacagtaggtttatttataccagcacctccacaaacatgtgagtaatgctttgcacttgaccttctgtcagctatgacatccctaggttgcaggatttttcagcttcattataatcttatgggaccatcttcatatgtgagtggtctcttgacccaaacattgttatgtagcacatgactgtaaattttggaatcaccttgtcagtatttacaaaatagctttctgagatttagtggcaggatctcagctcactcctacctgcacctcccaggttcacgccattctcctgcctcagcctcccgagtagctgggactacaggcgcccgccaatacacccagctaattttttgtatttttagtagagacagggttttgccacattggccaggctggtctcaaactcctggcctcatgtgatctgcccgcctcagcctcccccagagtgctgggattacaggtatgagccactgcgcctggccaaaattgcctaaatttttaaaatcctaaattggtgttgaattttgtcaaatgctttcctgcattgattttgatgatcacttgatttttctccattcttttgttaatgtgctaaattatgttgcttaatttttgaatgaaaaaataatcttacattcctgaaataatttcggtttggttgtgatgttttattcattctatttcgtgctgaattcagtttgctaatattttgtttaggaattttgcatctatgttcatgagacagatcggcctgtaattttacttttttgtaatgtccttgtcaggtttaggcctcaaagttatgttgactttataaaatgaactgtgaagtatttcctcttttttatgctttagtttgagtaagattgattttttttaaaacttatgtcgtccttaaatatttattagaattcactagggaagttatcttggcctgttactttctttcttgagtaaattttgttttcattctttttttatagttaagtatattgagttagaatgcatacacaaacaaatgcacacaacttaaagtccagttctatgaattttgactaatgtataaacctgtttaacttccactgtaagcaaaatatagtgaattttcgtcaactaaaaagtccccttgtacccatttaccttcagtacctatccctaccccagccacaggcaacaaatgattttcatgtgcttatttgccatctgtatacctctttggttagttttctgtttatatcttttgcccatttatttttttttttttttgagacagagtcttgctatgttgcccaggcaggtcttgagctcctgggcttaggggatcctcccgcctcagcctcccaagtagttgggactacaggcacacactactactcttggtttgcctatttttaaatcaggttgtttgttttcttattattgtgttctctacactgtaggatattctacctttcctagaatttcatgtaaatggactcagacatactgttgtgtctggcctcttttgttcagtgtaatgtttttgagcttcatccttgcatgttatgtgtatcagtgattgattcaatttttattgctgcatagtattggattgtatagctataccacaatttgtttattcattctcctgttgatggaatattggttgtttccagtatttagctattattattattattttttttttttgagacggagtcttgctctgtcaccaggctggagtgcagtggtgcaatctcggctcactgcaacctccgcttcccaggttcaaacgattctcctgcctcagcctcctgagtagctgggactacaggtttgtgccaccacgcccagctaatttttatatttttagtagagacagggtttcatcatgttggccagactggcctcgaattcctgacctcaggcaatccacccgcctcggcctcccaaagtgctgggattacaggcgtgagccaccgcgcctggtcttttttgtttgttttgttctttttttagacagagtctcactctgtagcccaggctggagtgcagtggcatgatctcggctcactacaagcctgcgcccctcaggttcaagagattcttgtgccccagcctcctgagtagctggggttacaggcgtgtgccaccatgcctggctaatttttgtacttgtagtagagactgggttttgccatgttggccaggctggtcttgaactcttgacctcaagtgatcttcctgccttggcctcccaaagtgttgggattacaagcgtgagccaccacacccggccagggatgtcattttttataactagccataaactttagctttgaagtaaaactatttctagcaagtgattcttacctgatattttttgttgttcttgcccatattttaattgggttgtgttattatggttctctatgtattctagatttaagtttttgtatatggtgtgaggcaagtgtcaagtttaattttttttctacaaacatcctgttgttccagtaccttttgatgataagactgtcttttcccccattgaattatcttaacgccctcatgaaaagcaattggccatatgtatgtggatctacttttggactctcaattctgttccagtgatttatatgtccacccttatgtcaataccacattattttgattattgctgctttatagtaagtgacatcatgttgcctgaaatcacgttttccacctttattcttctgttgatggttgctttggcaattaggggtcctttgcattttcgtagacattttagaatcaacttatctattgctactaaaaatgcttgattgggattgtggtaaatctagaaactaatttaggaagaatggtcatattaacagtttcaagtttcagatccatgagcatattttcactctccattaggtcttttaaaatttatcctagcagtgttttatggtttttactgtagaggtcttacacattttgttacatttgttgctatgtgtttgaccttttttgatactagtgtaaatggaaattttttcttttatgttctagttgttcattattacactaaatcatctttgggtgactactaaacattctattgaaaatttgtgaatggcgtgaacccgggaggcagagcttgcagtgagccgagatcgcaccactgcactccagcctgggggacagagggagattctgtctcaaaaaaaaaaaaaaattttgtttagccaatcttttatcagcaaacatgtaggttgtttgctatttcagaaaaatgttttgcacgtgaaagaaagaatagcccttatgaggcacacagggtccaggacagcagagcaaaagtccctgcaggcaacccttcctgaccccatcctacagggtctctgcccaggccttcctgggcccctccgggagcactgccaggggcctgggccaactggcctggaagccttgccttttccctgtggaggcgcagaggctctggtttgtctgtcctggccccgggatcattttccagcacacagcacagtctagtccatccactctccccactccccaaattcaaggtcatcagggttctggtggcctggagatgggtacaacattctcatactcaggttcctcctgcctttcctcttcagcctgcttctggggatcctgttctggggagccacagccagagactggctcctgggctctccttgaactctcggtgccagcccccagcccccggaccgcttcctctggtctgactgccataggccctgtggccccaggaagcccagcttttggggctgagttggggctctggccgacagagccagaggcaaggccagggctgccctttttccgattcagggcctggcgcggaggcttagggatggccctcttgaccttggcttccgcctggcctttctggaagctaccaaaatggcggaagacagagcggacagggccttcggatccgcggggcttccctgccagcatgtagatcgtggtcacagggcccgagctctcctggacgctgccctcaatggcttccacgtgctcagccactgtccggctaccaagtgggggccgccggtggccagtggctgaatccccgggactggcagccgccggaaaggactcgggggcttctgcttcgtctgggcctgtggactcttcggcttcccggccctcaggacccgactgcgccccccgggagagcctcttgggctttcggagcgggctggagagctcccctgagcttcggcgactctgtggtgcaaacttggtaccttccgcgaaggagaccgatggccgcttggcccgagctaggctggaggtgcgcgggatggcgaatggcgtggaggcgtcctcagggggcgggaaagcacctgcagccaggctggcctctgacgaccctgcctgggccacagggaccatcccttcttggggtggcacacagtaggcaggaacctcatctgcctctccagactcaggatcggatgagaaggagtcatcagtggcccagccggcagagggcggctcgatgaagctgtggttgaaggggacctccgggtcgtgatgtgagactgtcacccagggtagcttgtgggagctgagggaacggcagggcagcgtggagcccaagctggtcagtgtcccccagacctgcagcttcatcctggacacggtagctccatctctcgctggcctgtccttgaggtctgatcggggggcccagcagcagcaggcacagcaggcaagacccaggaagagcagcagcagaggcacaaggctgcccacgatgagggcagtgtcccgactgccagagcctggctggcaggacccagagacagggtggcagagtccctctgggcattcacaaggaactgagcagttgtttccatggaaaccggctgggcaggaggcgttgcagctgggcccccagtagccggcactgcagacacagtcccctgtcacagtatcacaggacccctgaacacaggtggggcaggtagagccacagtcttccccaaaggtaccagtggggcaggggtcttcacacctgggccccagccagccagggtcacagcgctgacagtggccagtatctggctcacaggcctccccatgtcggcagtgagggcactgctgttcgcagctctcgccaaaggtgccaggcaggcagggctgctggcactgggtcccgttccagcccggctcgcaggactcacagctgcctgtgtctggagagcacggctcattgtgtttgcagcggccacagctgtgtgcgcactgcaccccgtggctgcctgccgggcagggcagctcgcagcgcgctccgcggaagccgggcgggcaggtgcactcgccggaggcggcgctgcagcggccccgcacacactcgcactgctgctggcattcgggaccccaccagcccggccggcaggcgcagcggccggagtcctgctcgcacggggagccgtggcagttgcagcggaagctgcagcggcgcccccaccagcccggcttgcacacgcaggcgcccgtggcctgctcgcagcgcgccgccgcggtgttgcactggcacgggcggcggcacgtggacgaccaccagccgggttcgcagtggcacacgccggtcgcggggtcgcagcgcccgtgggggccgcaggcgcacgggaactcgcagcgggctccccagcggtcggcctggcactggcacgcgcccgtggctggctcgcactggccgtgcgggtggcaggggcagctctcacggcagtcggggccccagtactggcccgggcagcgggagctgcagtgggccccaaagaatccaggcttgcatcgacagaggcccggcttcacacacacctcgtctttctggcaggcgtccggcccctcacagatggggatggtgcattcttgatccttctgcctccagcctgcgcagcactgcagctcagcagaggggctgctggccacacagacgtgctgccctttggggtccagctcggacccctgagtcccccgagtccagagcagcagcagcgggagcagcagccccagccccatggcaggcagctcggtgggagcgctcg

SEQ ID NO: 7570 - DNA, 390 bp, Homo sapiens
gccgagcagctttagtcttagggggtccaaagtttgcctcaaagacccctcggccggtgactgaaccattggttctgctttcggggatgcagctggccaagctgatccgacagagaaaggtgaaatgtatagatgatgttcaggcttatatcaacagaatcaaggacgtgaacccaatgatcaatggaattgacaagcacaggtttgaggaagcgatgaatgaggctcatgctgtacatcaaaagcttgcagagaagcatgtcgatgtaatctcattgaaaaatacatggacttttcttgtggttgctttgaatgcctaggtttctttttctggtatactgaatagtccattctatttaaataatatacagtggtgtattacctatttag

SEQ ID NO: 7571 - DNA, 392 bp, Homo sapiens
  SIMILAR (2)..(190): 951254mologous to Homo sapiens proteoglycan PG- M(V3),accession number D32039,Smith-Waterman Score=311.
ttcaaccttaatagtaacccatgcgctacataaagtcaaagtgggaaaaagcccaccggtgaggggctggctctctggaaaagtcagcctgccttgtcatttttcaacgatgcctactttgccacccagttacaacaccagtgaatttctccgcatcaaatggtctaagatcgaagtggacataactggcatacattagtcattatacccctgttcttaaaccctaatttgatatattcacacttaatctctctacactatacacctttttataattaccactcccttttcatcttacatttgctatttttttctctctctaactttcttactctataccatcataccattctttaatcttctcttctactcctctattatcccctcacttg

SEQ ID NO: 7572 - DNA, 363 bp, Homo sapiens
  misc_feature (1)...(363): n = a,t,c or g
ctgggatttacaggcatgaaaccatgcaggcccacccagaaggagggtttctaggtgaagatgtgtggaattgctgtgccctagattcccaggcccacctatgcccacncagggtgattctctggatgatacatggtggaaccagcagcagccattgaaggagtctctatcctggtttcagagcctatctccagggattggctttgttgatggctcttcctgtggagcagtcagggaggagctggctgctctgacagtccattgtctgatcttcaggttcccgtgtggcctggggttagggaagggcatggatgatggaagcctggagcggatcctagttggggagctgcttacatcccagcg

SEQ ID NO: 7573 - DNA, 852 bp, Homo sapiens
  SIMILAR (274)..(780): 261254mologous to Hydra vulgaris myosin heavy chain,accession number L35595,Smith-Waterman Score=158.
atgccagagagctggcttgctgcttttcctccatatggggatataaagaaagttgtcggtctgcagctcaaagaaggtctgcaccagaatctgaccatgcaagatagtattcagatctttgatttccagcttccaggactgttacggccaagttcggtactatggactctgaaaccctatcatacagcaggtttggccagtgatagggattcatacaaggggatcttggcttgcatgccctgcatgttcggctctaggagatccccattacgtgatattaagtctcatcaagctgaccttgaattggaagttaagaattccctggataccatccatagactggagagcgaattgaaaaagcagagtaagatccaaagccagatgaaagttgagaaagctcacttggaggaagaaattgcagagctcaagaagagccaggcccaggacaaagctaaacttcttgagatgcaagagtccatcaaggacctgagtgccatccgagcagatcttgctaataaattggctgaggaagagagagccaagaaagcagtgcttaaggacctttctgacctcactgcacaggcaaaatccagggatgaagaaacagctacaatcatcacacagttaaagctggaacgagatgtgcaccagagggagctgaaagatctcacatcatcattgcagagtgtgaaaacaaaacacgaacagaatatccaggagcttatgaagcactttaagaaagaaaagagtgaggctgagaatcatatcaggactctgaaggtacctctgctaaattatcctgatgatactgaaggaatttttctggtggctcatgaagttaataaagcgtaa

SEQ ID NO: 7574 - DNA, 996 bp, Homo sapiens
atgtgggtatggactgcagagggtcctactataccacaatttctgcacagtgtgggtaggacagttcaagctgctaatcctggtgaatgggtgctcgaaatgcctggatatttgtctgcgtgtggagcagagagggtcttcatatactacaatatatgtccaggaaggatggggctgcactggctgctgaaccaggaaaaacatataagcattgaagaggagcacttaaggaggatggaagaggccagattgcagctcaaggatcaacttctttgcttggagactgaacaggaatccattcttggtgtgataggaaaggaaattgatgcagcttgtaaaacattctccaaggactcagtggagaaattaaaaaacattttcatgttggccatcgacactgtgtctactagagtagttgtcctttgtagcagtatagattatgctctaagagtatatggaggatctaacttcacagattatggactggagagcgaattgaaaaagcagagtaagatccaaagccagatgaaagttgagaaagctcacttggaggaagaaattgcagagctcaagaagagccaggcccaggacaaagctaaacttcttgagatgcaagagtccatcaaggacctgagtgccatccgagcagatcttgctaataaattggctgaggaagagagagccaagaaagcagtgcttaaggacctttctgacctcactgcacaggcaaaatccagggatgaagaaacagctacaatcatcacacagttaaagctggaacgagatgtgcaccagagggagctgaaagatctcacatcatcattgcagagtgtgaaaacaaaacacgaacagaatatccaggagcttatgaagcactttaagaaagaaaagagtgaggctgagaatcatatcaggactctgaaggtacctctgctaaattatcctgatgatactgaaggaatttttctggtggctcatgaagttaataaagcgtaa

SEQ ID NO: 7575 - DNA, 1043 bp, Homo sapiens
  SIMILAR (143)..(637): 961254mologous to Homo sapiens Human secreted protein cb213_11,accession number AAY05320,Smith-Waterman Score=803.
acagaggtcaatttactattaaagtataaaatgtacattagtttcgatctacattttaattattttaggctggcagagaaagaactgtttcatattttaccatcgtacatataaaataaaatattcaatacttatcttgttttcaagattaaaaaaagaagctcccgcaaaggaacaagaacctgtgtctaaggaaattgcaagacctaacatggctgaaagagaaacagaaacatcaaattctgaaagtaaacaagataaagctgcttcttcaaaagaaaaaaatggatgtaatgcaaattcatttgaaggctcatcaacaacaaaaagtgaagaaagcataacagtttcagataaggaaaatgaaacctgtcttgcagaccaggaaactggctcaaaaaacatcgtcagttgtgattcaaatattggtgcagataaagtggaaaagaaaaaacaaatacaacacgtttgtcaggaaatggagttgaagatgtgccaaagttcagaaaacataatcttatctgatcagattaaagatcacaactccagtgaagccagattttcttcaaagaatattaaggatttgcgattagcatcagataatgtaagcattgatccgtttttttagaaaaagcacatgaacctgaatctgttagttctgatgttagcgagcaaggcagtattcatttggaacctctgactccatccgaggtacttgagtatgaagccacagagattcttcagaaaggtagtggtgatccttcagccaagactgatgaagtagtgtctgatcaaacagatgacattcctgggaggaaataaccctagcacaacagaggcaacagtagacctgggaagatgaaaaagaaagaagttgaaattagtcattttaagtttcagtgtacccaacgataagggcatttgggaacagtgctatccaggtgagctcagtggtgctgttgtaggttcagaaatggaaatatgtaagggaggtcacacatacactttacctgtatgttcaacctatgttatcatacaaaccg

SEQ ID NO: 7576 - DNA, 293 bp, Homo sapiens
  SIMILAR (143)..(292): 681254mologous to Mus musculus protein inhibitor of activated STAT protein PIAS1,accession number AF077950,Smith-Waterman Score= 160.
gacaacagtcagcgctttcgagaaacctgttttgcatttgccttgacaccacaacaagtgcagcaaatcagtagttccatggatatttctgggaccaaatgtgacttcacagtacaggtccagttaaggttttgtttatcagaaaccaaagcgacccagccgaccaattaatatcacctcacttgtccgactgtccacaacagtaccaaacacgtttgttgtttcttggactgcagaattggagaaactattccatggcagtatatcttgtaaaacagtgtctcaacagtctt

SEQ ID NO: 7577 - DNA, 630 bp, Homo sapiens
  SIMILAR (18)..(626): 981254mologous to Homo sapiens Gu binding protein,accession number U78524,Smith-Waterman Score=1040.
cccacgcgtccgcggacttgtgggcagacattagtcagcgctttcgagaaacctgttttgcatttgccttgacaccacaacaagtgcagcaaatcagtagttccatggatatttctgggaccaaatgtgacttcacagtacaggtccagttaaggttttgtttatcagaaaccagttgtccacaagaagatcacttcccacccaatctttgtgtgaaagtgaatacaaaaccttgcagccttccaggttaccttccacctacaaaaaatggcgtggaaccaaagcgacccagccgaccaattaatatcacctcacttgtccgactgtccacaacagtaccaaacacgattgttgtttcttggactgcagaaattggaagaaactattccatggcagtatatcttgtaaaacagttgtcctcaacagttcttcttcagaggttacgagcaaagggaataaggaatccggatcattctagagctttaattaaagagaagttgactgcggatccagacagtgaaatagctacaaccagcctaagggtttctctactatgtccacttggtaaaatgcggctgacaattccgtgtcgggcccttacatgttctcatctacaatgttttgacggaa

SEQ ID NO: 7578 - DNA, 1106 bp, Homo sapiens
  SIMILAR (1)..(144): 1001254mologous to Homo sapiens p53 binding protein WBP1,accession number AAW11943,Smith-Waterman Score=238.
aacacgattgttgtttcttggactgcagaaattggaagaaactattccatggcagtatatcttgtaaaacagttgtcctcaacagttcttcttcagaggttacgagcaaagggaataaggaatccggatcattctagagctttaagtacgtatgataaacttatttcacttattcagctattttgttaaaggttagagtagtattttctcaactcaagaaattttagaatttgtttattcactggagcctgttgtgtagttcttagagtagttctgatatctttgtcatgagctatattttataatctatattttactaatcttaaaattaactttgtgaagtcagtgcacaaacatgggagaatattattctacaacttcataaaatcaatgtttaaggaattctgggaaatgggaagggcatcttggcataaatttcaagaaagttattttagattggtggtttatccaggaaaaatgtacagaattatatcatggcctcaccccctgcatttacaaagtgaagagagccagtggggtggtagaaataataattctgccattaatcaattatatgactgtggacaagtaacgctgctcctgagtttcatcttcctcatctgtaacaagaagtttatgccgtctgatttctaatgcttctgcgaagtctgggttcatacgtgtgaattactggatggtttgttttggatacgttgaatttgagattcaaggtcttcaaatggggctgtgctgacctctgtttttaagggttaaggtcagagggtttggcctttccaaagaggtgaactaagttcttcgtttattcttttatttgtgagagccgggggctgcgtggatttaggagtgagggctggggacttagaaacaaaacttttataggcaggtgttagatagctatcctttaaggacttttgatgtgaactgattaatgaagcccattatcagatttgtacttaggaacactctggtggaaagaactaagataatagcagctttccttttgtagcatagctattacccctttctgtaacttatttctgtggcagagtaaaagatcccactacccctgaataccaatataccct

SEQ ID NO: 7579 - DNA, 2298 bp, Homo sapiens
  SIMILAR (2021)..(2161): 331254mologous to Homo sapiens dJ697K14.6 (probably 5' part of dJ697K14.7 and dJ697K14.11),accession number AL121829,Smith- Waterman Score=52.
gtgtttgaagtggtggaacgtgtagaagagttaagaaggaagtggccagtagcgtgggggaagttagatgatggcagtattggtgtggtgactccatatgctgatcaagtgtttagaatacgtgctgaacttcgaaaaaagagattatctgatgttaatgtagaaagggtgctaaatgttcaaggaaagcaattcagagttttgtttcttagcacagtacgtacaagacatacttgtaaacataaacagacaccaattaaaaagaaagagcaacttctggaagattccacagaggacttagattatggttttttatctaactacaagcttctcaatactgccatcacaagagcacaatccctggttgctgtggtgggtgatcccattgctctgtgctctattggaagatgcaggaaattttgggaacggtttattgccctgtgtcatgaaaacagtagcctacatggaatcacttttgaacagatcaaagcccagttagaggctttagaactaaagaagacatatgtgttgaatccgctggcacctgaatttatcccccgggctctaagactgcagcattcaggaagtaccaacaaacagcagcaatcaccacccaaggggaaaagtcttcatcatacccagaatgatcacttccagaatgatggaattgttcagcccaatccttctgtacttattggcaatcctattagagcatatactcctccaccccctcttggacctcacccaaatttgggaaaatctccaagccctgttcaaagaatagatcctcacactgggacaagtattctttatgtacctgctgtctatggagggaatgtagttatgtcggtgcctttacctgtaccatggacaggataccagggtaggtttgcagttgatcctcgaattattacacatcaggcagcaatggcctataacatgaacctattacagacacatggacgaggatctcctattccttatggccttggacatcacccacctgtcaccataggccagccacaaaatcagcatcaggagaaggatcaacatgagcaaaatcgaaatggtaaaagtgatacaaataattccggacctgaaattaataagattcgaacaccagagaaaaagccaacagaaccaaaacagctaccaagaccaccctttccaattccacagcagcacaccttgttaaatcagcagcagaataatttgcctgaacaaccaaatcagataccacctcagccaaatcaggcgggacccaacaatgctttttttaatagtgcagttgctcatcggccacagtctcctcctgcagaagctgtaattccggagcagcagccccctcccatgctgcaagaaggccacagtcctctgagagccattgcacaacccggccccattcttccttcacatctgaatagcttcattgatgagaacccctcgggattacctataggggaggctttagatcgtatacatgggagtgtcgctctggaaacattaaggcagcagcaggcacggttccagcagtggagcgagcatcatgcctttctcagtcagggcagcgctccatacccacaccatcaccatcctcacctccagcatcttcctcagccgcccctgggattacatcagccgccagtgagggcagactggaagctcaccagcagtgccgaagatgaagtggagaccacatactcaaggctggagatagatgaagaagctggagaagaaaagttggaagctagcagaggttggttcatgaggtttaaggaaagaagccatccccataacataaaagtgcaaggtgaaacagcaagtgctaatatagaagctgcagcaagttacccagaagatctagctaagatcattgatgaagatggctacaccaaactacagattttctgtgtagacaaaacagcctcttattggaagaagatgctgtctaggactttctcagcgccacccaagactgtcaaaccccctgaggatcaactgaagtcggagaacctcgaggtgtccagttccttcaactacagtgtgctgcagcatcttggccagtttccaccccttatgcctaacaagcagatcgcggagtcggccaatagcagtagcccccagagctctgcggggggcaagcccgccatgtcctatgccagcgctctgcgggcccctccaaagcccaggccccctcctgagcaggccaagaagagtagcgaccctctgtctctcttccaggaactgagcctagggagctcatctggcagcaatggcttttactcatattttaaataa

SEQ ID NO: 7580 - DNA, 939 bp, Homo sapiens
  SIMILAR (795)..(691): 771254mologous to Homo sapiens Human secreted protein, SEQ ID NO: 5327,accession number AAG01246,Smith-Waterman Score=134.
tcatggagaggttatagctcctgacttctctgacttcttgctcttggacaaagcagctgcctgcttcaggagctctcggtttttggcctgcagttgttctgtgacttctttgtgggttttctccatctggttcattttggctctcatctgcgattcctggtactgaaaatcagccttcaactctgtaatcttcttctctttctctaaaatcatttgatccttttgatgcaacatcttcttcagggtagccacttcttccttcagttgggcaatgatgacaaagtggtcagtgcctggtgagtccagagccaggtctggggagaagctgttataatggccaccaccactcaggcgactatactgctccttctcctggtggccagcacgagaagagctactcaggtgtttcctctgctctttggtcttctgaaggacccgtttgtatgaaagtgtgcacagccagcacagcaatttcccatctaccttctttctatcatctttcctgtcaaatgcacactgctgcttgcactgttcacaagaatagggtggtccatacttcttttctgaatttgtgcagcgctggcatttattcccaataaatgctgcaattatgttgcaatactgacaaggtttgggcgttccatacaactgcacgttctgagcacatttcttgcatattgtattggttttaatgcctgtaatcccagctactcgggaggatgaggcaggagaatcgcttgaacctgggaggtggaggttgcagtgagccgagatcgtgccattgcactctagcctctcctgctggtactcagtcctgcagtaggtgcacttcacaacagggtgtgcaatccgacattccttgcacagctgctgcccctgagacagcgcctcgaaggggaagcgctggtggcacttggtgcaggcgtagagcgccgccat

SEQ ID NO: 7581 - DNA, 6274 bp, Homo sapiens
  SIMILAR (4711)..(4836): 301254mologous to Homo sapiens dJ697K14.6 (probably 5' part of dJ697K14.7 and dJ697K14.11),accession number AL121829,Smith- Waterman Score=47.
gaaagtaatgacaggatttggatgaagtaatggatcactaatgaactacagtgctggtgagatgtgtaagaaattataaagagctctgatgggctatttgggtgatacccagtgcagtgaactgcaggatttttgtccctgagtcatggaagacagaagagctgaaaagtcatgtgaacaagcatgtgaatcacttaagaggcaggactatgaaatggccctcaagcactgcacagaggcccttctttctcttggccagtactccatggcagacttcacagggccttgtccattggaaatagaacgcatcacaatcgagagtcttctctacagaattgcctcatttttgcaactgaaaaattatgtgcaagctgatgaagattgtagacatgtgctgggagaaggactggccaagggagaagatgcctttcgggcagtgctttgctgcatgcagctgaaagggaagctccaacctgtatccaccattcttgccaagtcactcacaggagagtccctgaatgggatggtaacaaaggatttgacaagactaaaaacacttctctcagaaacagagacagcaactagtaacgccctctctggatatcacgtggaagacttagatgaggggtcttgtaatggttggcatttccgcccaccacctaggggaatcacaagcagcgaggaatatactttgtgtaaaagatttttagaacaaggaatctgtaggtatggtgcccagtgtacttcagcacattcccaggaagaactagcagaatggcagaaaagatatgcttcacggctgataaaattgaaacagcaaaatgagaataaacagctctcaggcagttacatggaaaccttgatagaaaagtggatgaattcattgtctcctgagaaagtgcttagtgaatgtatagaaggagtaaaggtagagcacaatcctgacctgtcagttactgtcagcaccaaaaaatcccaccagacatggacctttgctctcacttgtaagcctgcaagaatgctgtatcgtgtagcattgctttatgatgctcatcgtcctcattttagtatcattgcaatatctgccggagatagtactacccaggtatcacaagaagtcccagaaaactgtcaagaatggataggaggaaagatggcccaaaatggattagatcattacgtgtataaagtcgggatagcatttaacacagaaatatttggaacttttcgccaaaccatagttttcgactttggattggaaccagtactcatgcaaagagtaatgattgatgcagcttctacagaagatctcgaatacctgatgcatgcaaaacagcagctagtaaccacagctaaacgttgggattcttcctctaagactattatagattttgaacctaatgaaactactgatttggagaagagccttcttatcagataccaaattcccctctctgctgaccagctatttactcagtccgttttagacaaatcattgaccaagagcaactatcagtcacggttacatgaccttctttatattgaggagatagcccagtataaagaaatcagcaagttcaaccttaaagtgcaattgcagattctggcaagcttcatgctcactggtgtttctggaggtgcaaagtatgctcagaatggacaactttttggtcgctttaagcttactgaaacactttctgaagatactttggctggacgactggtgatgaccaaagtcaatgctgtttatttattaccagtccctaaacagaagttagtacagacccagggaaccaaagagaaggtttatgaagctactattgaagaaaaaacaaaggaatatatatttttaaggctatctagggaatgctgtgaagaacttaatcttcggcctgactgtgacacacaggttgaacttcagtttcaattaaatcgattacccctctgtgaaatgcactatgcactagacaggatcaaggacaatggggttttgtttccagacatcagtatgactcccaccataccatggagtcctaacagacaatgggatgaacagttggatcctcgactaaatgcaaaacagaaagaggctgttctggccattaccactccacttgcaatccagctgccgcctgtgcttatcatcggaccctatgggacaggcaaaacgttcactctagctcaggctgtcaaacatattctgcagcaacaggagactaggattctcatttgcacccattctaatagtgctgctgatctctacataaaggattatttacatccatatgtagaagcaggcaatccccaggcaagacctctcagggtatatttcagaaatcgctgggtaaagactgtccacccagttgtgcatcagtactgtttgatctcaagcgcacattccacctttcagatgccccagaaagaagatattcttaaacatcgagtggtggttgttaccttgaatacttcccagtacctctgtcagttggaccttgaacctgggttttttacacacattctattagatgaagctgcccaggccatggagtgtgaaaccattatgcctctagcattagcaactcaaaacactcggattgtcttggctggtgatcacatgcagctcagtccttttgtttacagcgagtttgccagggagagaaaccttcacgtttcattacttgaccgactctatgagcattaccctgctgagttcccatgtaggattctcctgtgtgagaactaccgctcccatgaagctatcatcaattatacctctgagcttttctatgagggcaaactgatggccagtgggaagcagccagcacacaaagatttctacccactaactttctttacagcacgaggagaagatgtacaagaaaaaaatagcacagctttttataataatgcagaggtgtttgaagtggtggaacgtgtagaagagttaagaaggaagtggccagtagcgtgggggaagttagatgatggcagtattggtgtggtgactccatatgctgatcaagtgtttagaatacgtgctgaacttcgaaaaaagagattatctgatgttaatgtagaaagggtgctaaatgttcaaggaaagcaattcagagttttgtttcttagcacagtacgtacaagacatacttgtaaacataaacagacaccaattaaaaagaaagagcaacttctggaagattccacagaggacttagattatggttttttatctaactacaagcttctcaatactgccatcacaagagcacaatccctggttgctgtggtgggtgatcccattgctctgtgctctattggaagatgcaggaaattttgggaacggtttattgccctgtgtcatgaaaacagtagcctacatggaatcacttttgaacagatcaaagcccagttagaggctttagaactaaagaagacatatgtgttgaatccgctggcacctgaatttatcccccgggctctaagactgcagcattcaggaagtaccaacaaacagcagcaatcaccacccaaggggaaaagtcttcatcatacccagaatgatcacttccagaatgatggaattgttcagcccaatccttctgtacttattggcaatcctattagagcatatactcctccaccccctcttggacctcacccaaatttgggaaaatctccaagccctgttcaaagaatagatcctcacactgggacaagtattctttatgtacctgctgtctatggagggaatgtagttatgtcggtgcctttacctgtaccatggacaggataccagggtaggtttgcagttgatcctcgaattattacacatcaggcagcaatggcctataacatgaacctattacagacacatggacgaggatctcctattccttatggccttggacatcacccacctgtcaccataggccagccacaaaatcagcatcaggagaaggatcaacatgagcaaaatcgaaatggtaaaagtgatacaaataattccggacctgaaattaataagattcgaacaccagagaaaaagccaacagaaccaaaacaggttgatttggaatcaaatccacagaacagaagtcctgaatcacgtcctagtgttgtttatcccagtaccaaatttcctcgcaaagataatctcaacccaagacacataaatcttccccttcctgctccccacgcacagtatgcaatccctaatcgccactttcatccccttccccagctaccaagaccaccctttccaattccacagcagcacaccttgttaaatcagcagcagaataatttgcctgaacaaccaaatcagataccacctcagccaaatcaggtagtccagcagcaaagtcagttgaatcagcagcctcagcagccacctcctcagctttctcctgcatatcaggcgggacccaacaatgctttttttaatagtgcagttgctcatcggccacagtctcctcctgcagaagctgtaattccggagcagcagccccctcccatgctgcaagaaggccacagtcctctgagagccattgcacaacccggccccattcttccttcacatctgaatagcttcattgatgagaacccctcgggattacctataggggaggctttagatcgtatacatgggagtgtcgctctggaaacattaaggcagcagcaggcacggttccagcagtggagcgagcatcatgcctttctcagtcagggcagcgttccatacccacaccatcaccatcctcacctccagcatcttcctcagccgcccctgggattacatcagccgccagtgagggcagactggaagctcaccagcagtgccgaagatgaagtggagaccacatactcaaggtttcaagacttaatcagagaactgtctcatcgtgatcaaagtgaaacacgggaactagctgaaatgccaccacctcaatcaagacttttgcaatatagacaagtacagagtagaagcccaccagcagtcccatctcccccatccagtacagaccacagtagccacttttctaactttaatgataacagcagagacattgaagtagccagcaacccagcatttccacagcgcctcccaccccagatattcaactcacctttctcgttgccatctgaacaccttgcccctcctcccttgaaatacctggcacctgatggagcatggacttttgctaacttgcaacagaatcacctaatggggccaggttttccctatggcctacctccattgcctcacaggccaccgcagaacccttttgtacaaatacagaatcatcaacatgctattggtcaagagccatttcacccattgtcatctcgaacagtatcttcttcttcgctccctagcttagaagagtatgagcccagaggacctggtcggcccttgtaccaaagaagaatctcatctagctcagttcaaccttgttctgaagaagtaagcactcctcaagacagtctggctcagtgtaaagagcttcaggaccacagtaaccaatcttctttcaacttttcatccccggagtcctgggtaaacaccacctcatctactccttatcagaacattccgtgcaatggatccagcaggacagctcagcccagagagttgatagcgccacccaagactgtcaaaccccctgaggatcaactgaagtcggagaacctcgaggtgtccagttccttcaactacagtgtgctgcagcatcttggccagtttccaccccttatgcctaacaagcagatcgcggagtcggccaatagcagtagcccccagagctctgcggggggcaagcccgccatgtcctatgccagcgctctgcgggcccctccaaagcccaggccccctcctgagcaggccaagaagagtagcgaccctctgtctctcttccaggaactgagcctagggagctcatctggcagcaatggcttttactcatattttaaataatcacttttttttccctcaagggagaatgttttaatttctgtttgtatcagtagaattaaggtagttggacttcatctatagatgcacagttccctttgttttaatattaaatatgttctcacttaattgctttgctgctagacttgcaactaatttttttaaagtatattccattattttgcatttttgatgtgtcaaaactttgacagcttttatgtagaataaaaaaatttttaaatttgtgtattgttacatatgtttgcatcaagctagcagccaagaggttaattgtgcaactat

SEQ ID NO: 7582 - DNA, 753 bp, Homo sapiens
  SIMILAR (3)..(752): 921254mologous to Homo sapiens similar to Kelch proteins; similar to BAA77027 (PID:g4650844),accession number AC006963,Smith- Waterman Score=1227.
ataaatatgttaataatttcatcctgaagaactttcctgctttattgagtactggggagtttctaaaactcccttttgaacgacttgcatttgtgctttccagtaatagtcttaagcactgtaccgaacttgaactctttaaggcagcctgtcgctggctaaggttggaagaccctcggatggattatgctgcaaagttaatgaagaatattcgatttccactgatgacaccacaggatctcatcaattacgtgcagacagtagatttcatgagaacagacaatacctgcgtgaatttgcttttggaagctagcaattaccaaatgatgccatatatgcagccagtgatgcagtcagatagaactgccattcgatctgactccactcacttggttacattaggaggagttttgaggcagcagctggttgtcagtaaagaattacggatgtatgatgaaagggcacaagaatggagatctttagccccaatggatgctccccgttaccagcatggtattgctgtcattggaaactttctttatgtagttggtggtcagagtaattatgatacaaaaggaaaacctgctgttgatacagttttcagatttgatcctcggtataataaatggatgcaggttgcctcattaaatgaaaagcgcacattctttcacttgagtgcctgcaaagctcatttgtatgcagttggtcggcacagtgcagctggtgaactggccacagtagaatgttacaacc

SEQ ID NO: 7583 - DNA, 372 bp, Homo sapiens
  SIMILAR (93)..(269): 981254mologous to Homo sapiens Human secreted protein clone ns197_1 protein sequence SEQ ID NO:6,accession number AAY94900,Smith-Waterman Score=289.
cttaggtgctaatgttcctagaaactatgttgttgattttaactgttaaaggctaacatatttttctgacttcctggaatttttacatcaacagggagctccatttaaataacaacctgttacgagttctaccttttgagctgggaaaactgtttcaattgcagactttaggcctgaaaggtatgacttccatatttgtacttcttatggtttgtgaatatgtctttgaatctaaggaagccaagaagctttctgctaggggattcttttaaagactcattttcccccagacttcatcagcttcttagctatatcgcaatggttttatcttctctgttcagctgtagactatctactaatctttgtttcttt

SEQ ID NO: 7584 - DNA, 410 bp, Homo sapiens
  SIMILAR (13)..(300): 851254mologous to Mus musculus putative,accession number AK015014,Smith-Waterman Score=418.
cccacgcgtccgggcaagtacatcgtgacaggtggggaggacgacttggtgacagtctggtcctttgtagactgccgagtaatagccagaggccacgggcacaagtcctgggtcagtgttgtagcgtttgacccttataccactagtgtagaagaaggtgaccctatggagtttagtggcagcgatgaggacttccaagaccttcttcattttggctgagattgagcaaatagtacacagttcaggctctccaaacggaattttacgtacagtcgccccgttagtgtcactgatctgttttgtgttctttggctattaatcacttatttttatttgtgtttttttttatcattttcatttttcgtcttcgcttcttgtcagagttctttttttctcttttgttcttttct

SEQ ID NO: 7585 - DNA, 426 bp, Homo sapiens
  SIMILAR (207)..(290): 1001254mologous to Homo sapiens lymphoid enhancer factor 1 isoform,accession number AF294627,Smith-Waterman Score=148.
gagatttctttcaaggcaaatgacactttgattgggtggtgtgtgaggaaggggaacggttacgtttctgaaacaatcccggggtctgtaatacttccacaagattctgtttgaatatctccctcttctcccctcatccaactcttactactggttggtaactggtgttttgtcattgatgggttcctttcttctgtgaccttaggcaaggtcagcctgtatatcccatcacgggtggattcaggcaaccctacccatcctcactgtcagtcgacacttccatgtccaggtaggtggtggtggaaactggggctctcgaggacaatttgcttttctcgtgcttgcatcctgggcgccatatgcttgcttttttgttgctaggatgtgggatactttaatcatgtgtttgctgttctgtgttccttg

SEQ ID NO: 7586 - DNA, 389 bp, Homo sapiens
ccagtgatggcagtgcttcaaaaggcaaacattatttcagtgaacctgtacacattttaaagagggcttttgcaagaactgtctcaggggtaagccatgttttaaaaaatctcagcttttctcttcagtcctcagatacattttgatgtttatagtttacctgctcttgtaagtttatcttagcctagatttataaactcagatttggttttgtattcacatttatattctagaccacagataaagtatactttaaatcatacaaaaatggaggtgctggcctatgattttaacatgaccagatgaattggccttgctgtttttgaaacaaataacgatttgcttttctagtaaatcatatatgaatgcatatgctgaatgaattagag

SEQ ID NO: 7587 - DNA, 546 bp, Homo sapiens; identical to SEQ ID NO: 1355
  SIMILAR (49)..(390): 1001254mologous to Homo sapiens ribosomal protein L3,accession number X73460,Smith-Waterman Score=596.
  misc_feature (1)...(546): n = a,t,c or g

SEQ ID NO: 7588 - DNA, 408 bp, Homo sapiens
  SIMILAR (9)..(128): 951254mologous to Homo sapiens ribosomal protein L3,accession number M90054,Smith-Waterman Score=186.
gcacgagacacatcgtgcgggaagtcgacaggccgggatccaaggtgaacaagaaggaggtggtggaggctgtgaccattgtagagaacacacccatggtggttgtgggcattgtgggctacgtggaacccctcgaggctccggaccttcaagactgtctttgctgagcacatcagtgatgaatgcaagaggcgtttctataagaattggaataaatctaagaagattgaccttaagttcattgacaccacctccaagttatgccatggccgattacagaccatggaggagaagaaagcattcatgggaccactgaagaaagaccgaattgcaaaggaagaaggagcttaataccaggaacagattttgcagttggtggggtctcaataaaagttatattccacagaa

SEQ ID NO: 7589 - DNA, 1365 bp, Homo sapiens
  SIMILAR (249)..(932): 371254mologous to Mus musculus J1 protein,accession number Y00225,Smith-Waterman Score=204.
gtgaaccacgcgcccgcccacgcgtccgatggcgtgatgtctcacagaaagttctccgctcccagacattgtttccctcggcttcctgcctcggaagcgcagcagccaggcatcgtgggaaggtgaagagcttccctatggatgacccatccaaggccggtccacctcacagccttccctgggatacaaggctgggcatgactcacatcgtgcgggaaggtcgacagggccgggatccaaggtgaacaagaaggacggtggtggaaggctgtgaccattgtatgagacaccacccactggtgtctgctgggcattgtgggctacgttggaaacccctccgaaggcctccgggacctttcaagacttgtcttttgcttgagcacatcagttattgaatgccaagaaggcgttttctataaagaatttgggcattaaaatcttaagaaggaaggcctttaccaaagtactgcaaagaaattggcaaggatgaagattggcaagaagccagcttggaagaaggactttcagcagcattgaaagaagttacttgcccaagttcatccgtgttcaattgcccaaacccagattgcgcctgcttcctcttgcgccagaaagaaggcccacctgatggagatccaggttgaacggaggcactgtggcccgagaaagctgggactgggcccgcgagaagcttgaagcagcaggtacctgtgaaccaagtgtttgggcaagatgagatgattcgacgtcatccggggtgaccaagggcaaaaggcttcaaaggggttaccaggtcgtgtgccaaccaattagcttccctttaaggcccaacctaggctctgtccagggttgcctgttttggggcatggcatcctgctcgtgcacactggcatgtggcacgcgctgggcagaaaggctaccagccttacacccttcttgttcattcagatttataagattggccagggctaccttatcaaggaccctggaggggtcatctgcacgacaatcccctcctgggcctgtgctgatccgatgctcgttttccagggtggctttgtccactatggtgaagtgacctgtgaacagtgctgaggaaagcctggctcctcgtaatcctaaatcccttcccctcttggcccatagtccttgctggtgcagacgaagcggcgggctctggagaagattgaccttaagttcattgacaccacctccaagtttggccatggccgcttccagaccatggaggagaagaaagcattcatgggaccactgaagaaagaccgaattgcaaaggaagaaggagcttaatgccaggaacagattttgcagttggtggggtctcaataaaattattttccactg

SEQ ID NO: 7590 - DNA, 1026 bp, Homo sapiens
  SIMILAR (882)..(778): 771254mologous to Homo sapiens Human secreted protein, SEQ ID NO: 5327,accession number AAG01246,Smith-Waterman Score=134.
tcatggagaggttatagctcctgacttctctgacttcttgctcttggacaaagcagctgcctgcttcaggagctctcggtttttggcctgcagttgttctgtgacttctttgtgggttttctccatctggttcattttggctctcatctgcgattcctggtactgaaaatcagccttcaactctgtaatcttcttctctttctctaaaatcatttgatccttttgatgcaacatcttcttcagggtagccacttcttccttcagttgggcaatgatgacaaagtggtcagtgcctggtgagtccagagccaggtctggggagaagctgtctccattagttgtgattgactcaaacttggactttttctttgggatttcattttgaattgaagatgtagaaagtgttttctggctgttataatggccaccaccactcaggcgactatactgctccttctcctggtggccagcacgagaagagctactcaggtgtttcctctgctctttggtcttctgaaggacccgtttgtatgaaagtgtgcacagccagcacagcaatttcccatctaccttctttctatcatctttcctgtcaaatgcacactgctgcttgcactgttcacaagaatagggtggtccatacttcttttctgaatttgtgcagcgctggcatttattcccaataaatgctgcaattatgttgcaatactgacaaggtttgggcgttccatacaactgcacgttctgagcacatttcttgcatattgtattggttttaatgcctgtaatcccagctactcgggaggatgaggcaggagaatcgcttgaacctgggaggtggaggttgcagtgagccgagatcgtgccattgcactctagcctctcctgctggtactcagtcctgcagtaggtgcacttcacaacagggtgtgcaatccgacattccttgcacagctgctgcccctgagacagcgcctcgaaggggaagcgctggtggcacttggtgcaggcgtagagcgccgccat

SEQ ID NO: 7591 - DNA, 375 bp, Homo sapiens
  SIMILAR (1)..(366): 771254mologous to Homo sapiens KSRP,accession number U94832,Smith-Waterman Score=522.
cagaacattgctcatataatagggcccccaaacaggtgtgagcacgcagcctggatcatcaacgacctcttccagagctgcaggagaggtccaccaggtcctccagggggtccaggcatgccccagggggcccgagccagagaaagaggccaaggcacttgggatacccctggcgggcaaatgtccttctccatccccgctcacaagagtgggttggtcatcggcctaggtggcgataatgtgaaagccataacccaacaaacgggagctttggtagagatttcccggcagctgccacccaccggggaccccaactacaagttgttaatcatccggggttcaccccaacagattgaccacaccaagcctcgtgcc

SEQ ID NO: 7592 - DNA, 399 bp, Homo sapiens
  SIMILAR (1)..(399): 991254mologous to Homo sapiens Protein sequence and annotation available soon via Swiss-Prot; available at present via e-mail from LABEIT@EMBL-Heidelberg.DE,accession number X90568,Smith -Waterman Score=688.
ctagatgtgaaattaattgaaggtcttgtggtaaaggctggaaccacagtcagattccctgctattataagaggtgtgcctgttcctactgcaaagtggacaaccgatgggagtgagattaaaaccgatgagcactacacagttgaaacagacaacttctcatcagtacttaccattaagaactgcttaaggagagacactggggaatatcaaatcacagtttccaatgcagccggtagcaaaacagtagccgtacatcttactgttcttgatgttcctgggccaccaacaggtcctattaatattctggatgttactcctgaacacatgactatctcatggcagccacctaaggatgatggaggaagccctgtgataaattatattgttgagatacag

SEQ ID NO: 7593 - DNA, 3178 bp, Homo sapiens; identical to SEQ ID NO: 7528
  SIMILAR (123)..(1649): 1001254mologous to Homo sapiens lanosterol 14- demethylase,accession number D55653,Smith-Waterman Score=2661.

SEQ ID NO: 7594 - DNA, 1812 bp, Homo sapiens
  SIMILAR (1353)..(1652): 701254mologous to Homo sapiens Human myelin oligodendrocyte glycoprotein gene,accession number AAZ29204,Smith-Waterman Score= 347.
  misc_feature (1)...(1812): n = a,t,c or g
tttttttttttttttttaaccgataactttttttattgcaagcagatctaattaaataacaaagtccaagaaacacctgcctttaaggcactctccctaacaaactgagttatattccttgtaaaatataatagagaaataaaaatctatggggaaagggtcactctaaagatactttttatttaaatattttttggaagattatatttgtatatgtatcatcataaaatataatcttccaaaaaacaaatgtaaaactaagtgcaaatccactttttcaggaacaaagaaaatcatttagaaaatgtgattatgctaaaagaggcaggttaggtttcccaaggctgctcaaggtggaagcttaagaccaacttttggtttgagtacacaagtgatatttaccattttcatatacttagtgatatgcctgttgccatacctgggcaaaataaaactgatagtaagtcctataataataaaagaaacaacaattacctaagtaaacaattcctagatgatggaagagtaaccctcccatttaagcctacagaccttagatgtctaaaaaaatatgtgtcctgatctgtacacagttagtgggagcacacctatataaaatccctttgcatgacaccattcaacaatattttttaaaatcctacaaaaattttaaagtttcacttccctagcaaaatatcttcagtcaagaaattagtcctttgaaaaattnatgaaaattgttgtgggaaatatttatacaaattattactgataatgcacatatattttgaaacattgtttcctagaagcaataaaatataacctatttaggagataacccaaatgatttgtaaaaaaattaacttgtagaaaagggaaggatgttgtgtaaaatcaagtcaattatttgaggtatgttataatattgagtacttatgtactaagtcacacccagccagtcaataactgagaaatcagaataaaataataatttcaaagaattacataaatacagggccttttgagatttttggcaattgtaaacaaaaacgaatggtttttacaattcagtgtaattctacgaatatttatttggcacccatgttaggcactgaggctacacagcagtgaaataggcctagttgttcctcaactagagaacatagttggttaatgtagctgcactgaattgtagctgtttagaagataatataccctgaggctttttaaagtatactattactataagaagtaaaattattttatacttataaattttgttttggattattcaactgaatttggagtgttcagaattttcatggcggttgagacaaggaagaggtataatgctatttttttttccttttctttttttttttgagacggaatctcactctgttgcccagactggagtgcaatggtgcgatctcggctcactgcaacctccacctcccaggtttaagtgattctcctgccttagcctcctcagtatcttggattacagacgtgcgccaccatctctggctaatttttgtatttttagtagagacggggtttcgccatgttggccaggctagtctcaaactcccgacctcaggagatctacccaccttggcctcccaaagtgctgggattacaggcgtgagccactatgcctggctaatttttgtatttttagtagagacagagtttcaccatgttggccaggctggtctcgaactcctggccccaagtgatccacctgcctaggccttccaaagtgctgggattacaggcgtgagccactgcacccggctgacctgtgcccct

SEQ ID NO: 7595 - DNA, 346 bp, Homo sapiens
  SIMILAR (277)..(2): 891254mologous to Homo sapiens IRS-1 PH domain binding protein PHIP,accession number AF310250,Smith-Waterman Score=392.
cagatgcattagcttttgtaataaaagtctttgcagctgaagaagtagatggttgctcagtgacaactggatctacaaccactcggttgcttctggttcgaaccacagaactagattctgttttaccgtttatctgagcagcattgtgtcttggcggtattgatcgtgtaggtgtagagaatgcagaggtagagctttctgattttagctggggttttaagatcctttttttcctttcagggactagtatagctttagttaaaagattaaaaatcctccacatcataggaacttgcatgtcaaattatcattcttgatgcagcactactggaaacagagctgcttc

SEQ ID NO: 7596 - DNA, 1916 bp, Homo sapiens
  SIMILAR (1)..(1563): 911254mologous to Homo sapiens IRS-1 PH domain binding protein PHIP,accession number AF310250,Smith-Waterman Score=2347.
cctggaagccctattgtgaaatctgctaaattcgtgactgatcttcttctacattttataaaggatcagacttgttataacataattccactttataattcaatgaagaagaaagttttgtctgattctgaggatgaagagaaagatgctgatgtgccaggaacttctactcgaaaaaggaaggaccatcagcctagaagaagattacgtaatagagcccagtcttacgatattcaagcatggaagaaacagtgtgaagaattgttaaatctcatatttcaatgtgaagattcagagcctttccgtcagccggtagatctccttgaatatccagactacagagacatcattgacactccaatggattttgctaccgttagagaaactttagaggctgggaattatgagtcaccaatggagttatgtaaagatgtcagacttattttcagtaattccaaagcatatacaccaagcaaaagatcaaggatttacagcatgagtttgcgcttgtctgcattctttgaagaacacattagttcagttttatcagattataaatctgctcttcgtttttataaaagaaataccataaccaaaaggaggaagaaaagaaacagaagcagctctgtttccagtagtgctgcatcaagccctgaaaggaaaaaaaggatcttaaaaccccagctaaaatcagaaagctctacctctgcattctctacacctacacgatcaataccgccaagacacaatgctgctcagataaacggtaaaacagaatctagttctgtggttcgaaccagaagcaaccgagtggttgtagatccagttgtcactgagcaaccatctacttcttcagctgcaaagacttttattacaaaagctaatgcatctgcaataccagggaaaacaatactagagaattctgtgaaacattccaaagctttgaatactctttccagtcctggtcaatccagttttagtcatggcactaggaataattctgcaaaagaaaacatggaaaaggaaaagccagtcaaacgtaaaatgaagtcatctgtactcccaaaggcgtccactctttcaaagtcatcagctgtcattgagcaaggaggttgtaaggaacaacggttcttgtaccagggaccctttcaagtaaatggccatggaggacagccatcaaaacttgtgaagaggggacctgggaaggaaacctaaagtagaagttaataccaatagtggtgaaattatacacaagaaaaggggtagaaagcccaaaaagcttacagtatgccaaagccagaagatttaggagccaaattattgttgcatcccatcagagatgaagtacttccttcttcaacatgcaattttctttctgaaactaataatgtaaaggaagatttgttacagaaaaagaatcgttgaggtagtaagcccaaaaggaagatgaagacacaaaaattagatgcagatctcctagtccctgcaagtgtcaaagtgttaaggagaagtaaccgaaaaaagatagatgatcctatagatgaggaagaagagtttgaagaacctcaaaggctctgaacccccacatgagaactagaaatcaaggtcgaaggacagctttctataatgaggatgactctgaagaggagcaaaggcagctgttgttcgaagacacctctttaacttttggaacttctagtagaggacgagtccgaaagttgactgaaaaagcaaaagctaatttaattggttggtaacttgtaccaaaatattttacttcaaaatctataaagcaggtacagttaaggaataagtagaactaaggcttctgcttccttgctgctgtggtggagtagggaatgttatgatttgatttgcaaaaaaaaaaaaaaaaaaaaaaaaaaaagtcgtatcga

SEQ ID NO: 7597 - DNA, 397 bp, Homo sapiens
cccacgcgtccggtcttttatagcctgtaccagagattaaagttgtgccacatctgccacccataaccatggaggaagtacccccactgagtggtactgatgcagatcttctggtcccatatgatatctatgtgctaagcccatgttgtaaccttaaatgtctgatacaagcttgtttatgatatccagactccatttatttgacgtcatttgccttgcacttgtaggtcttattccgatgtatctcatctattgctaagggtattcaaactagtaatgttataatattcaaataccagtctcctatattctggctttattatgaggtacaggtttgagagttactgtaagagcagttttaaaatagctagtatcactatcttattataatccaatc

SEQ ID NO: 7598 - DNA, 491 bp, Homo sapiens
  misc_feature (1)...(491): n = a,t,c or g
nnnnnnnnnnnnnnnntggaaccctttggatgataacgatgtggagggcgaccaagcgtgggggactacgacgacgccacacgtacgatcaccggatgccgaaacgctcgttgtttaccggccatgacctggacgatgacaacgagacgcatgaatgagctgcatatactctctaagtggacacttgacccatgtctgaagtatgaaaacagtagacagcggctgacgaacgttaaccgtgactactatttgtagccacccatgctggggaaggacaagaaggagaaggaaaaggcgctgaagcgcaagatcaccaaggaggagaaggagctgcgcctgaagctgaggccgctgtaccagttcatgtcatgcaaggagtttgatgacctttttgaaaacatgcacaaagaaaaaatgctccgggccaagatccgagaactgcagcggtaccggcgaaacgggatcaccaagatggaagagtcggcagagtn

SEQ ID NO: 7599 - DNA, 413 bp, Homo sapiens
cccacgcgtccgatttctgcatcattaagtattcattattttttctagactataacttgctttgtctactgtgtaaatatgccatgatttatttgtagttaattttttacagttaataacactaggatgaactgttagcctattagccaatctttgactatctctggcttgaaacagcatatcacttatatttgtttggagtagatagagcaaaaagtaaagaaatgattattattaaataggacatatcccatttatcagcagatggttacagtagttcagactcttttacttctgacccagaacagatcgggagcaatgtaactcgtcaaaggtcagtatttctgtcaatgaaaagcatgttaaactatcttgctgcgttttaatgtttaaaactatttagaaccaagccg

SEQ ID NO: 7600 - DNA, 403 bp, Homo sapiens
  SIMILAR (297)..(401): 1001254mologous to Homo sapiens Human secreted protein sequence encoded by gene 15 SEQ ID NO:75,accession number AAB45134,Smith-Waterman Score=193.
tttcgtgctacggcttcaacgtgcggggccaagtgatgcgatggcgggcaactgcggagcatcaacggggagctgtacgcgccgctgcagcatgaaccacgtgaatgttgagggggcgacacacaagcaggtggtggacctgattcgagcacgcgagaaggaattgatcttgacagtgttatctgtacctcctcatgaggcagataacctatatcccagtgacgactcgttgggacaatcattttatgattacacagaaaagcaagcagtgcccatatcggtccccagatacaaacatgtggagcagaatggtgagaagtttgtggtatataatgtttacatggcagggaggcagctgtgttctaagcggtaccggcagtttgctatcctacaccagaacctg

SEQ ID NO: 7601 - DNA, 855 bp, Homo sapiens
  SIMILAR (400)..(801): 931254mologous to Homo sapiens RYNR_HUMAN ; SKELETAL MUSCLE CALCIUM RELEASE CHANNEL,accession number AC005933,Smith-Waterman Score=673.
atggacgtcgtggaccctgacattttcaatagagacccccgggaccactatgacctgctacagcggctgggtggcggcacgtatggggaagtctttaagctctttgctaagtgttatacatgcattcacacttatgatgccatgagagttctcttcctcatgaccaagagtggctcccagcttccccgactgaaggaaaaaggtaaatggtacgagagagtaacaggagggaggtcagcaaatgtgcactacattattgtttattgtgaatctgtccacttccttccaatcctactgccgacactctccaccaagccactgtcatctccagagctcaatgcggctgcctcctatgtacccttcccgcccataatccacatcgacacagcagcgagcatgtgttacctgtttcacatgtacgtgggtgtccgggctggcggaggcattggggacgagatcgaggaccccgcgggtgacgaatacgagctctacagggtggtcttcgacatcaccttcttcttcttcgtcatcgtcatcctgttggccatcatccagggtctgatcatcgacgcttttggtgagctccgagaccaacaagagcaagtgaaggaggatatggagaccaagtgcttcatctgtggaatcggcagtgactactttgatacgacaccgcatggcttcgagactcacacgctggaggagcacaacctggccaattacatgtttttcctgatgtatttgataaacaaggatgagacagaacacacgggtcagagcagagctctgtgccgagcctttaggggtatgagagaaaccggagacctggtccgtgctctcaaagagctcgcggtgtag

SEQ ID NO: 7602 - DNA, 706 bp, Homo sapiens
  SIMILAR (458)..(562): 1001254mologous to Homo sapiens Human secreted protein sequence encoded by gene 15 SEQ ID NO:75,accession number AAB45134,Smith-Waterman Score=193.
ggcggcggcggcggtgggtctgttctccactgcgccgggaacggcggcgggggaggcggcggcccgcgggtcgtgcgcatcgtcaagtccgagtccggctacggcttcaacgtgcggggccaagtgagcgagggcgggcaactgcggagcatcaacggggagctgtacgcgccgctgcagcatgtgagcgccgtgctgcccgggggggcggacgatcgggccggggtgcgcaagggggaccgcatcctggaggtgaaccacgtgaatgttgagggggcgacacacaagcaggtggtggacctgattcgagcaggcgagaaggaattgatcttgacagtgttatctgtacctcctcatgaggcagataacctagatcccagtgacgactcgttgggacaatcattttatgattacacagaaaagcaagcagtgcccatatcggtccccagatacaaacatgtggagcagaatggtgagaagtttgtggtatataatgtttacatggcagggaggcagctgtgttctaagcggtaccgggagtttgctatcctacaccagaacctgaagagagagtttgccaactttacatttcctcgactcccagggaagtggccattttcattatcagaacaacaattagatgcccgacgtcggggattggaagaatatctagaaaaagtgtgttcaatacgagtaattggtgaga

SEQ ID NO: 7603 - DNA, 496 bp, Homo sapiens
  SIMILAR (347)..(493): 791254mologous to Homo sapiens Human myelin oligodendrocyte glycoprotein gene,accession number AAZ29204,Smith-Waterman Score= 207.
tgcataataggtggttttctggacacgcatcttagccccaatctgtatgagtgattcacaaacacgggttttgaacctgtgaggccatgaggttatcagaaggaatctatataccataatcttcagcctgaataaatatctttcaaatatttgtatatatttcaattggatgtagattctggtgtgactaataaattaacttaaaagcattactgaaatcatagcagctttttgttatgtattctttaavbbbbaaatactaataatatggctatcaagtgtgttggaagggaatctaataatttgggggtttttgttttgagacagggtctctctctgttgccctggagtgcagtggcacaatctcggctcactacaacctctgcctccttggttcaaacgattctccctcctcagcctcccaagtagctgggacsacaggcgcatgccaccacacccggccaatccttgtatccttagtagacatggtgtccta

SEQ ID NO: 7604 - DNA, 495 bp, Homo sapiens
  SIMILAR (1)..(483): 581254mologous to Pseudomonas aeruginosa probable acetyl-coa synthetase,accession number AE004777,Smith-Waterman Score=510.
ggtcgtgaccttgattgggatgaagagatggcaaaagcccagtcacatgactgtgttcctgttctttcagaacacccactgtatattctttacacatctggcacaacggggttacctaagggtgtgattaggcccactgggggatacgctgtcatgctacactggtcaatgtcttccatatacggacttcaacccggagaggtgtggtgggcagcttctgacttaagctgggttgttggacattcctatatctgctatggacctcttcttcatgggaacacaacagttttatatgaggggaagcctgtgggaacaccagatgctggcgcttatttccgtgtgcttgcagagcatggagtagctgccttgtttacagcaccaactgcaattagagcaatccgtcaacaggaccctggggcagctttggggaagcagtactctctgacaaggttcaaaacattatttgtggctgggagaacgatgtgatgtagagaa

SEQ ID NO: 7605 - DNA, 742 bp, Homo sapiens
  SIMILAR (50)..(595): 531254mologous to Pseudomonas aeruginosa probable acetyl-coa synthetase,accession number AE004777,Smith-Waterman Score=518.
ccaaatggcacatgctgtgatgattagagatattggcagcaactctccagtctccaagctggctggtgtcttggtcaagcatggcatcaagaaaggtgacactgtggttatctacatgcctatgatcccacaggcgatgtataccatgttggcatgtgcaaggataggtgccatccacagtctcatatttggaggatttgcttccaaagaactaagtagtcgcattgatcatgtaaagcccaaggtggttgttacagcatcatttggcattgaacctggaaggagggtagagtacgtaccacttgtagaagaagcgctaaaaataggacaacacaaaccagacaaaattctcatttataatcgtccaaatatggaggcggttcctttggctcccggtcgtgaccttgattgggatgaagagatggcaaaagcccagtcacatgactgtgttcctgttctttcagaacacccactgtatattctttacacatctggcacaacggggttacctaagggtgtgattaggcccactgggggatacgctgtcatgctacactggtcaatgtcttccatatacggacttcaacccggagagtctcagacagatccttcaggtggtattccagaagaagtcattattgtcataggagatgacagctctatgcttgccctagtagagcttccagtgagacaaattgtggagatggaagacagtgataccgacaatcctgatcctgtgtag

SEQ ID NO: 7606 - DNA, 421 bp, Homo sapiens
  SIMILAR (249)..(362): 1001254mologous to Homo sapiens 190kD protein,accession number X69090,Smith-Waterman Score=203.
attttagagtcaatttttcactgctggaaatagagatgctattgatttaggtttattcattggtgtccacttgattctaaactcttttctcaattaaaatagttttcaattcattcctttagaaatctgtgtcttctcactccacgttcagtgctttttcttttatatcttgctgcattaagaactattcaacttcacaagagtacactttcttattttaagaaaagtaattatggtttttctcctaggtggcaaatattaagaaggagactcatattgtgtggtacaaagatgagagggagatatcagtggatgaaaagcatgactttaaggatggtatatgtaccctgcttataacagaggtaggcgattataaatgtaaaatgtaatatattagctctctaccctctatcttacccca

SEQ ID NO: 7607 - DNA, 426 bp, Homo sapiens
  SIMILAR (27)..(425): 991254mologous to Homo sapiens Protein sequence and annotation available soon via Swiss-Prot; available at present via e-mail from LABEIT@EMBL-Heidelberg.DE,accession number X90568,Smith -Waterman Score=690.
  misc_feature (1)...(426): n = a,t,c or g
cccacgcgtncgcccacgcgtncggtcaagaaaaactagtgcctccatccgtggagctagatgtgaaattaattgaaggtcttgtggtaaaggctggaaccacagtcagattccctgctattataagaggtgtgcctgttcctactgcaaagtggacaaccgatgggagtgagattaaaaccgatgagcactacacagttgaaacagacaacttctcatcagtacttaccattaagaactgcttaaggagagacactggggaatatcaaatcacagtttccaatgcagccggtagcaaaacagtagccgnacatcttactgttcttgatgttcctgggccaccaacaggtcctattaatattctggatgttactcctgaacacatgactatctcatggcagccacctaaggatgatggaggaagcn

SEQ ID NO: 7608 - DNA, 420 bp, Homo sapiens
  SIMILAR (79)..(228): 881254mologous to Homo sapiens M-phase inducer phosphatase 3 isoform cdc25Cdm,accession number AJ304504,Smith-Waterman Score= 227.
  misc_feature (1)...(420): n = a,t,c or g
actcccagtagatgttgttgctgcaggtctgcacccacacttgtaggagtaagaactagggggtttaatattcccaaacaggtgagcagaagtggcctatatcgctccccgtcgatgccagataacttgaacaggccaagcctcaagcaggtggaaaaattcaaggtcggctcaataccagataaagttaaaaaaaagtatttttctggccaaggaaagctcaggaaggtaagaactttttaagatgaaaatcgtgttcatcttctatctcacgtctttgcttttctggtatgaggattgttttattatgccttgtttgtgttaatcctctttactttgactttctcctctgtgttctctccatcggtctgtcttttctacatctgcatccacgnnnnnnnnnnnnnnnnnnnnaaaata

SEQ ID NO: 7609 - DNA, 1476 bp, Homo sapiens
atgaggaaattaggcatgcacacacacacaatgaaagtggctaatgtgaaagttaaccaaagtaatctgtccttgggagcggttgtctggggcttcacagaatggctttcctgcttgaatggcttggctaactcacctgcacagttagatgacacttcccagcttcccttgcacagaggaacagccacaggattgagctctggactatggaaagtgggtggaagtgattcgaccatgcaaacctaccatgatgtcctccaacttcaatcttccctgtgctggctgactgtagagagcccagcaaaggagttggccgtcccgcagggtggcagaactacagggtggagggagtccaagtgggggagaccactcactaaacactgcattgagctactgtgtgaaaaagttgatcagatccctgttatattcacaaagtacctgaatgaggaaaggccacataactttccctacacagctcccctctcccagagcctgtggggaagccctgcccagaaccttcaattccacaaaataacgttaaacaaaagtggaaaagaaaccatcaccctgaagtccatagaggttgatataggatatgggggctctccttattccaacatggtcacagtgaatgcagccgtaatagcaatggcaaaaacagcagcagctcacattttatctcactactcttccttaaacccacatagcgtatatcccaaagtgttagattgggaacttatctcatcagagaagcctcaggtttccctacttctgcagcgtcggcaccaagggctgatcaaatgtttctttctccttacaccggcggaccgggaaacgccgccgcagcctcgcctccatccttcctcctacaggttgcaaataaagtacagcagctctgacattaggcagtttctgtccaaggagcaagcggtgacagcggaggcggggacgggggtggacaaactgcggatcaactctccgagaagacggccacctgccggaacctgccttcctccattccgcccaggagcctcgcagcggggcgctggcctgcggaaaggccacgggggagcacagggctccgcgccgccctcctgggagggtccggagtccagcgcaccccgagccctgcccgagcagcggggtctgagagatcagtgtcccagatgctcacatgaaaaggagcgaagccgggaggaggcggggggccacggggaaagccgggttaagggaatgacaacaggtcgtgggagcaacaagtgccgggctgcccggaggtgtcacaggatccgcgactgtcagcgatcccgccgccgccaacgcgcccaaaatagccggcggctgcagggcggggcttacatcaccaaagcctttagagaaacagtcaccttcacagctgtacattctgcaccaatgactacatactttagggaaggaccaaggttacagagggagactggtgccttcgctgcatga

SEQ ID NO: 7610 - DNA, 584 bp, Homo sapiens
  SIMILAR (313)..(582): 1001254mologous to Rattus norvegicus chloride intracellular channel 5,accession number AF323174,Smith-Waterman Score=478.
acgcgcggatcctgtgacacctccgggcagcccggcacttgttgctcccacgacctgttgtcattcccttaacccggctttccccgtggccccccgcctcctcccggcttcgctccttttcatgtgagcatctgggacactgatctctcagaccccgctgctcgggctggagaatagatggttttgtgaaaaattaaacaccgccctgaagaggagccccgctgggcagcggcaggagcgcagagtgctggcccaggtgctgcagaggtggcgcctccccggcccgggacggtagccccgggcgccaacggcatgacagactcggcgacagctaacggggacgacagggaccccgagatcgagctctttgtgaaggctggaatcgatggagaaagcatcggcaactgtcctttctctcagcgcctcttcatgatcctctggctgaaaggagtcgtgttcaatgtcaccactgtggatctgaaaagaaagccagctgacctgcacaacctagcccccggcacgcacccgcccttcctgaccttcaacggtgacgtgaagacagacgtcaataagatcgaggagtt

SEQ ID NO: 7611 - DNA, 500 bp, Homo sapiens
  SIMILAR (264)..(362): 961254mologous to Homo sapiens PTPL1-associated RhoGAP,accession number U90920,Smith-Waterman Score=163.
  misc_feature (1)...(500): n = a,t,c or g
tgcgggtagnnnnccctgaagccactcgaactgatcnncaatnngnaccggcanccnangcgtnncgnccacgccgtccgcccacgccgtccgcccacgcgtnccgtgatcatcatngtacaattttgtatgttaggccttttcaatgttctgaatcttctaatgcttcttgaactaatgatgaagttttaaaggattaaatgattctgtataaatctagtttaaagtatgtttttccttattgtaaccaacttttccttacagctgtgaacttcacagaagttaatgaagaaaacaaaaacgatctcttccaggaagtgttttcttctattgaaactttggcatttacctttggaaatatgtaagtagagaactgtcatttaaagcaactagtcctatgtgtcttagtgagagtatgttgcattatccagtaacatacatgggaaatgaagtattaaatggtattaaatatcacaacttcggaaaaactaccttctgtg

SEQ ID NO: 7612 - DNA, 445 bp, Homo sapiens
  SIMILAR (147)..(13): 311254mologous to Homo sapiens hematopoietic progenitor kinase,accession number U66464,Smith-Waterman Score=42.
agctccatgttccctcctcaccaggctccatcttcaccatcttcagtgccaccaggtcccctgacaccttgtctcgagccttgcaaaggggaagttggcagtcaggcaggctccatttgccagagtccctccacagcatccctgagtcaaggtcaagaactgggaccccctcttgcagcctcctccctgccgagggcttgccttaaaggtcactggttgtagggtgttggggacagaggggcttcctcaccttaaagacttccccatacgtgccgccacccagccgctgtagcaggtcatagtggtcccgggggtctctattgaaaatgtcagggtccacgacgtccatccctgggggcctgagctgggcctgcgcccaggggccagcagggcctcagggctcaacttctggcacgaatcgtcgagccgggaattccgggccggt

SEQ ID NO: 7613 - DNA, 1125 bp, Homo sapiens
  SIMILAR (577)..(1122): 841254mologous to Oryctolagus cuniculus 597 aa protein related to Na/glucose cotransporters,accession number U08813,Smith- Waterman Score=824.
atgcacaaagactgggtggtctttgatgtgtctggagaacacaaagaagccctgctgcatgagctgcagctgtgtgacagcacactcaagccggctgcccatggacagacgcgacttgttgacttgtcgctgagtgaacacaaagcccagggaacaggtgctcatgtctatgaggagagacaccaagtgtccgtctctcgaacagatgatgtgggctgcgtggtgccgtccgagtgcctgcgggcctgcggggccgaggtcggctgctccaacatcgcctaccccaagctggtcatggaactgatgcccatcggtctgcgggggctgatgatcgcagtgatgctggcggcgctcatgtcgtcgctgacctccatcttcaacagcagcagcaccctcttcactatggacatctggaggcggctgcgtccccgctccggcgagcgggagctcctgctggtgggacgcactgggataccctcaacacccccagcccctcaaagccgtctcagcttcctcctgcccgaaacaccaccattggagcggtatctcctaggcctcgtggtcatggatctctggctggtcatagtggcactcatcggcgtgagtgtggcctggatccccgtcctgcaggactccaacagcgggcaactcttcatctacatgcagtcagtgaccagctccctggccccaccagtgactgcagtctttgtcctgggcgtcttctggcgacgtgccaacgagcagggggccttctggggcctgatagcagggctggtggtgggggccacgaggctggtcctggaattcctgaacccagccccaccgtgcggagagccagacacgcggccagccgtcctggggagcatccactacctgcacttcgctgtcgccctctttgcactcagtggtgctgttgtggtggctggaagcctgctgaccccacccccacagagtgtccagattgagaaccttacctggtggaccctggctcaggatgtgcccttgggaactaaagcaggtgatggccaaacaccccagaaacacgccttctgggcccgtgtctgtggcttcaatgccatcctcctcatgtgtgtcaacatattcttttatgcctacttcgcctga

SEQ ID NO: 7614 - DNA, 1200 bp, Homo sapiens
  SIMILAR (652)..(1197): 831254mologous to Oryctolagus cuniculus 597 aa protein related to Na/glucose cotransporters,accession number U08813,Smith- Waterman Score=820.
atgcacaaagactgggtggtctttgatgtgtctggagaacacaaagaagccctgctgcatgagctgcagctgtgtgacagcacactcaagccggctgcccatggacagacgcgacttgttgacttgtcgctgagtgaacacaaagcccagggaacaggtgctcatgtctatgaggagagacaccaagtgtccgtctctcgaacagatgatgtgggctgcgtggtgccgtccgagtgcctgcagggcctgcggggccgaggtcggctgctccaacatcgcctaccccaagctggtcatggaactgatgcccatcgattctcaggtgctggagatttccctggtccccctctttctaatcccctcttcctggaagctttcgatccctcaggtctgcgggggctgatgatcgcagtgatgctggcggcgctcatgtcgtcgctgacctccatcttcaacagcagcagcaccctcttcactatggacatctggaggcggctgcgtccccgctccggcgagcgggagctcctgctggtgggacgcactgggataccctcaacacccccagcccctcaaagccgtctcagcttcctcctgcccgaaacaccaccattggagcggtatctcctaggcctcgtggtcatggatctctggctggtcatagtggcactcatcggcgtgagtgtggcctggatccccgtcctgcaggactccaacagcgggcaactcttcatctacatgcagtcagtgaccagctccctggccccaccagtgactgcagtctttgtcctgggcgtcttctggcgacgtgccaacgagcagggggccttctggggcctgatagcagggctggtggtgggggccacgaggctggtcctggaattcctgaacccagccccaccgtgcggagagccagacacgcggccagccgtcctggggagcatccactacctgcactttggtgtcgccctctttgcactcagtggtgctgttgtggtggctggaagcctgctgaccccacccccacagagtgtccagattgagaaccttacctggtggaccctggctcaggatgtgcccttgggaactaaagcaggtgatggccaaacaccccagaaacacgccttctgggcccgtgtctgtggcttcaatgccatcctcctcatgtgtgtcaacatattcttttatgcctacttcgcctga

SEQ ID NO: 7615 - DNA, 627 bp, Homo sapiens
  SIMILAR (217)..(483): 961254mologous to Homo sapiens Human secreted protein, SEQ ID NO: 7648,accession number AAG03567,Smith-Waterman Score=471.
atgggctgtgggatagaatttgtgactaagtcctcaaaagcaattgcaacaaaaacaaaaattgacaattgggacctgattaaagagcttttgcacagcaaaagaaactatcaatacagtaaacagacaatctacaaagaactttgtggatgtagtgaaagatctcaaggtgaagttgagatcctcaacttagagcctttagatgaaggagcttctatgcacccttgtgatgacacatactgtggcccttttccagaatctgagccggaagtgaaggctgtagctaacttccttcgaaaacacagaaagcacattagggcttatctctcctttcatgcatatgctcagatgttactgtatccctattcttacaaatatgcaacaattcccaattttagatgtgtggaatctgcagcttataaagctgtgaatgcacttcagtcagtatacggggtacgatacagatatggaccagcctccacaacgttgtgttcttcagctggatctggaaaccaaattgacaccaggcaggttaaacaagagaaaagtatacaaattttattaattctatgtgtacaggatcttcataacagagtgaagtccaaagaagtggccaaagcaagatga

SEQ ID NO: 7616 - DNA, 627 bp, Homo sapiens
  SIMILAR (184)..(627): 391254mologous to Homo sapiens dJ998C11.1 (KIAA1415 protein (contains a RhoGEF domain)),accession number AL035106,Smith- Waterman Score=270.
cccaaacaaagatggcgcgggaagcgtctgtgagggcagactgatccgagcacccaaaccctcggcggacagcggagccagtggtagccgcacggccctaaaaccatggaggagggcggcagcactggcagtgctggcagtgacagcagcaccagcgggagtggcggggcgcagcaaagggagctggagcgcatggctgaggtcttggtcaccggggaacagctacggctcaggctgcacgaagaaaaggttattaaagatagacgtcatcatctcaagacctacccaaactgttttgtcgcaaaagaactgattgactggctgattgaacacaaagaggcttctgacagagagacggcaattaaactcatgcagaaattagcagaccggggcattattcaccatgtgtgtgatgagcataaggaattcaaggatgtcaaactcttctaccgctttagaaaggatgacggcaccttcccattggataatgaagtgaaggcctttatgagaggacagaggctatatgaaaagctgatgagccctgaaaacacactcctgcagcccagggaggaggaaggggtcaagtatgagcgcaccttcatggcatctgaattcctggactggctg

SEQ ID NO: 7617 - DNA, 437 bp, Homo sapiens
  SIMILAR (3)..(437): 1001254mologous to Homo sapiens aminopeptidase,accession number AF191545,Smith-Waterman Score=783.
tgtccatctatgcatccccagacaaacggaatcaaacacattatgctttgcaggcatcactgaagctacttgatttttatgaaaagtactttgatatctactatccactctccaaactggatttaattgctattcctgactttgcacctggagccatggaaaattggggcctcattacatatagggagacgtcactgctttttgaccccaagacctcttctgcttccgataaactgtgggtcaccagagtcatagcccatgaactggcgcaccagtggtttggcaacctggtcacaatggaatggtggaatgatatttggcttaaggagggttttgcaaaatacatggaacttatcgctgttaatgctacatatccagagctgcaatttgatgactattttttgaatgtgtgttttgaagtaattacaaaagattca

SEQ ID NO: 7618 - DNA, 415 bp, Homo sapiens
  SIMILAR (220)..(414): 431254mologous to Woolly monkey sarcoma virus reverse transcriptase (476 AA),accession number X15311,Smith-Waterman Score =162.
  misc_feature (1)...(415): n = a,t,c or g
nnnnnnnnnnnnnnnnnnnnnnnnnnnnnnnnnnnnnnnnnnnnnnnnnnnnnnnnnnnnnnnnnnnnnnnnnnnnnnnnnnnnnnnnnnnnnnnnnnnnnnnnnnnnnnnnnnnnnnnnnnnnnnnnnnnnnnnnnnnnnnnnnnnnnnnnnnnnnnnnnnnnnnnnnnnnnnnnnnnnnnnnnnnnnnnnnnnnnnnnnnnnnnnnnnnnnnnnntcaaatatgctttcttagtactccacatttatgcatccatctgggaagaaaggagactttttacaacagagaatacccctattaaatatgggtcacagatttttaccctagtccagcctatccacctaccacagaaagtagctgtagttcattgctggggccaccagaaaggtcaagatgaaattggtcagaagaacn

SEQ ID NO: 7619 - DNA, 934 bp, Homo sapiens
  SIMILAR (2)..(205): 951254mologous to Homo sapiens acid ceramidase,accession number U70063,Smith-Waterman Score=337.
  misc_feature (1)...(934): n = a,t,c or g
gcatgaattgatgcttgacaaggcaccagtgctaaaggttatagtgaattctctgaagaatatgataaatacattcgtgccaagtggaaaagttatgcaggtggtggatgaaaaattgcctggcctacttggcaactttcctggcccttttgaagaggaaatgaagggtattgccgctgttactgatatacctttaggtaaagttcacttagaagctttaaaaaaaaaagtaattaaattcttttacaagtttccattgaggtgtgatatacatacagcacaggtgctgtatgtcttagatatacagcacaggtgctgtatgtccttagatatacatacagcacaggtgcacaggtcttagatatacagctcaagtgaagcttcagaaaatgcatgcatgcatgtagccattgactcagatcaaagatacggaagagcccagcactccacgatggctccatcatgcccctttgcagaaaatactgcctcctccagtaaacactattctgatgtcactatagattagttttgcctcttcgtgaactttgtataaatagaactgaacaatatgaactgtcctgtgtgatttcttgtatttcattatgggtggtgtgctattgtatcaacagggtatttgggtggttttcagatttggtgatattaacaataaaggaattataaatattgtagtacnnnnnnnnnnnnnngggggggccgttttaaagaatccttgagggggccaaagttaacccgggcatgcaacgtaaaagttttttccttatagggagcggaataaaaacctacttgggaatctttggaaaagaacccttatttttggggggggacatattgggccaacctccctacaaaaatttaaggctttagggaaaataaaaaattttaaagggaaaaaggggtaaaactacctgcatag

SEQ ID NO: 7620 - DNA, 2400 bp, Homo sapiens
  SIMILAR (224)..(1267): 721254mologous to Homo sapiens acid ceramidase,accession number U70063,Smith-Waterman Score=1227.
  misc_feature (1)...(2400): n = a,t,c or g
cggacgcgtgggcggacgcgtggggaactagtgctggagtccggggagtggcgttggctgctagagcgatgccgacccggaggagctgtcgccttaatcctcctggctgctgtcgtcagcttgtgccgttctcgcagcacgcgccgccgtggacagaggactgcagaaaatcaacctatcctccttcaagaccaacgtacagaggtgcagttccatgggacaccatacagtgcttgacttaccaccctacaaaagatgtgatgaattgatgcttgacatggcaccagtgcctnaaaggttatagtgaattctctgaagaatatgataaatacattcgtgccaaagtggaaaaattatgcaggtggtggatgaaaaaattgcctgggctacttggcaactttcctgggccttttgaagaggaaatgaaaggtattgccgctgtttactcgatatacctttaggagagattatttcattcaatattttttatgaattatttaccatttgtacttcaatagtagcagaagacaaaaaaggtcatctaatacatgggagaaacatgggtttttggagtattttcttgtgtggaacataaataatgatacctgggtcataactgagcaactaaaacctttaacagtgaatttggatttccaaagaaacaacaaaactgtcttcaaggcttcaagctttgctggctatgtgggcatgttaacaaggattcaaaccaggactgttcagtcttacactgaatgaacgtttcagtataaatggtggttatctgggtattctagaatggattctgggaaagaaagatgccatgtggatagggttcctcactagaacagttctggaaaatagcacaagttatgaagaagccaagaatttattgaccaagaccaagatattggccccagcctactttatcctgggaggcaaccagtctggggaaggttgtgtgattacacgagacagaaaggaatcattggatgtatatgaactcgatgctaagcagggtagatggtatgtggtacaaacaaattatgaccgttggaaacatcccttcttccttgatgatcgcagaacgcctgcaaagatgtgtctgaaccgcaccagccaagagaatatctcatttgaaaccatgtatgatgtcctgtcaacaaaacctgtcctcaacaagctgaccgtatacacaaccttgatagatgttaccaaaggtcaattcgaaacttacctgcgggactgccctgacccttgtataggttggtgagcacacgtctggcctacagaatgcggcctctgagacatgaagacaccatctccatgtgaccgaacactgcagctgtctgaccttccaaagactaagactcgcggcaggttctctttgagtcaatagcttgtcttcgtccatctgttgacaaatgacagatctttttttttttccccctatcagttgatttttcttatttacagataacttctttaggggaagtaaaacagtcatctagaattcactgagttttgtttcactttgacatttggggatctggtgggcagtcgaaccatggtgaactccacctccgtggaataaatggagattcagcgtgggtgttgaatccagcacgtctgtgtgagtaacgggacagtaaacactccacattcttcagtttttcacttctacctacatatttgtatgtttttctgtataacagccttttccttctggttctaactgctgttaaaattaatatatcattatctttgctgttattgacagcgatattattttattacatatcattagagggatgagacagacattcacctgtatatttcttttaatgggcacaaaattggtgcctttgcctctaaatagcactttttcggggtcaagaagtaatcagtatgcaaagcaatcttttatacaataattgaagtgttccctttttcataattactctacttcccagtaaccctaaggaagttgctaacttaaaaaactgcatcccacgttctgttaatttagtaaataaacaagtcaaagacttgtggaaaataggaagtgaacccatattttaaattctcataagtagcattgatgtaataaacaggtttttagtttgttcttcagattgatagggagttttaaagaaattttagtagttactaaaattatgttactgtatttttcagaaatcaaactgcttatgaaaagtactaatagaacttgttaacctttctaaccttcacgattaactgtgaaatgtacgtcatttgtgcaagaccgtttgtccacttcattttgtataatcacagttgtgttcctgacactcaataaacagtcactggaaagagtgccagtcagcagtcatgcacgctgataaaaaaaaaaaaaaaaaa

SEQ ID NO: 7621 - DNA, 3432 bp, Homo sapiens
  SIMILAR (2577)..(487): 881254mologous to Homo sapiens dJ1057B20.1.1 (KIAA0406 protein, isoform 1),accession number AL109823,Smith-Waterman Score= 3089.
tcactgcagctccttgagcagctggagcacgttggtcgtgtaggggttctgctgcccgctggccccgtgcagctgcacagggtggaggctggggtggggaggtgtgaactgcacggggcagtaaagctcgttcaggaggaaccaggtggagtctgggtccaccttcatcaagtggaggaagacgctcctggcagcctcttgtaatttcacgggctgtttgacactgaggtaaatcaagcaggcatcagccactttattcaggtcaccctcacctaggtccagtctctcacagagggggcccaggccctgtaagacagccagctgcaacttgaaggccagcgtgtgcgagtaaactggtccagccctggcactgatgggggcctgggtgactagggagccagccagctttggcaggacatctttgcagaaccggctgcgaagaaagtcaccacacttgcttcccagggtacgtaaaaccttgaaggctctaagcactgccaggggggcgtcccgtgtgagtcggtgaacgagcgagggccaggcctgatgagccaagggaagcagctggtttttgtgggactgaagaacaaccacacacagatccagcacatccaagactgaaaagagactgcctgcatcagtgtcacaggcagcggtcagtacgacggccagcgcaggcttccctcccgcgtgggcggccagcgcaggcttccctcccacatggacgcccaaccttagtcctgctactctgggaatgcagagaagcagctgcgcactgaccttcaggcggatttgcagatttttatctgacaacaagtggatgcagcgttccatcacgtccatggctatttggatctgcaatggcagtggtggctccacatctggacgggtgtcattctcatccactttgggagggactgactgttcctcttcttcattatcaaaatccgagacatttccatctgccacatccttctctttgaggtagttcagcaaaaactgttcgatgtcttcagctgtggtggtgctcttctcaagagctgctggtctttggttcaaatgacttccctcttctcctaaactttgctcttggaggtgcccaagattacctgtgtctgggaaccactgggctaatgctgccatcagagcatgcagaacgctgacaaaggaagcagctctcttatcgtaaaattggtccagggtggccaagacatcttgaaccacatctgccaccaaaggaagcaggttagcatctgagttccgcagcatgacttccaggacctttggggtatgaggatgcagagccagatgacgcagatttaaagagatcccattcactaaatagtctgaattttgattgatcaggtgctgcagggagtcgtagccacaagcacggcaaacgtccatcatggtgctggtagccacctgactaatgagtagggtttggtctccagccttctccagtactggataaagggctgacatcaagagcaaacagaagtcttttcctagtgcatatgcaaactggccaattccttccaactgaatgcatatttgccagatgttactgttcatggagcaaatagtgggacttggctttgagaaggctagaaaagatgtaacttggcaggtgtgttcaccagacgtgatggcttggaggcctgggtgctccatcatcagctcctctcccatttcctcagtttcaagacaggtaaccaaataccaattttcttgacttgtgtattcttcaagtatagatgtcacaatctctctcagttcttctgggtttgttttaatatgtttttcgtgaagatcctcaacctccagcccagcagcccctgtaaccagttcattaaggatcatggcagcttgcttccggtaaaccacagattgatggtaaagttccataaagtgatccacaagcaaataaagattcccataataaccaagtagctgacaaacctgcctcaagagcatgaagattctctcatcagtgaagaagcggaaatatctcctctggatgcggttccaaggctgtgtggctgaggtctttggagaagcattcagatcatcagagttccaacgccgttcctcaacaatcttgatgtcagccacgtctagctctagaacttggatgagtgctttggaaagccgctggagatgggccacagagttgaggacaaagtttatttttgggcccaagagtttcagataaccaagtaacaaggaaagagtagagaatttgccctggtcatcttgggagttcattaggcgaggaagagatgtggcaagggaatgcaggctttctgacaagatgtcagcgagggctttgttgcccaccactactttttgatctgcaaaatgtctcagaactttattgcactgggcttggatttcaggactctcatcatttactagtcccactaaggccttcagaaggggaccagcacattcgaccaatgattgactgcacttcaaaagaaggtcctccacaagttctaccagttccagtctcaccttccagtgtgggtgaacagaaacacactcaattatctttttaataaggatagtcaacttgtcgccagtcttttttacccaatctgcttccctgtaaaccatcagctctgctactctgtgctcaactgcaggttttgcttggacctttgagattcttttgagctgttcatcagccataatgaagctcactgtcttgtaaaagatctttagggaagatacgacaatgctgtgaccttgtttaaagtctcctgtgataagcctggtcagtgcagttgagattccaggtaaaaaagaggcaaacaaatcccccagctgcttttgttcaagttcatccaatgaccttggatggtcctgacaatcacactgcaagagtagaacctgtaaacattttaaggcagcaattttaatttgctttgatttctcctgttctgcaaggcctaacagtaaagatacagcaaatcctaaacgtggcagaatggagggctcataaaaagtcagaatgatgtccccataagctgagtgcattaatgtgctaagtccctggatcacagccaatttcaactcctcggacacagccgcaggtttttgggagctgggtgaatacagacaagcagagagttctgaaaagagttcctggagaagctcctgttctttcacacatgttgaagaaaggacaaatgtgaggcattccaccacactttggatcaaacgctctcttttgggacctggggtcttcagggtaaatcgcagagggaagaggatgtactgctgaagttcctgaagggcactgtcactcacagcttgtagtcgtgtctgcagatgctccacattctccactgtctgggtctttgtgagctgaacacagactggacgtaagacaccaaaggcctcctcaggagtatcaaaaactgccat

SEQ ID NO: 7622 - DNA, 652 bp, Homo sapiens
  SIMILAR (652)..(503): 681254mologous to Mus musculus Ser/Thr kinase,accession number Y09010,Smith-Waterman Score=150.
tttttttttttttttttagcaaaggctaaagtcatgtttattgggagatgaggacatgccatgaccactagtgtgtctatgggggagggggtgcaaggactagttcctgacacccccctagggactcattcctggatgtaaaggttgctgggagcagtatgatcatccactgggcgtgtctccaccactacaggcctgggggagccaagcagacggaaagtgagggtagggtctctcagctcctgtagcagctgatccgagcctagagcccacacctgcactccatgcttccataaggcctgaagctgacctccaaccatagccacggactccaccgcttcggtcatggggatctcaggtgtgcgaagtccccggactggggacccctccggggtcaccaggcttcacagagccatccatcaacaccatcaccatatcttcctctacctgggtcacctgcacgggtcccctgtgctcggtgctcatctcgcccagccagcaagagagcgcgccaaagcgcaccgtgttggaagagcaccgacttccccggccgcccggggctcacgccgatgcacacagcgggcagctcagagcctggcccggtcagcagcgcgaacacggacaagaggcgtcgcagtgggaacagcaccct

SEQ ID NO: 7623 - DNA, 442 bp, Homo sapiens
  SIMILAR (137)..(21): 791254mologous to Homo sapiens dJ1057B20.1.2 (KIAA0406 protein, isoform 2),accession number AL109823,Smith-Waterman Score= 151.
ggggtgaagaacaaccacccacagattccggcccttccaaggtttaaaaagagcttgcctgcatcagtgtcacaggcagcggtcagtacgacggccagcgcaggcttccctcccgcgtgggcggccagcgcaggcttccctcccgcgtgggcggccagcgcaggcttccctcccacatggacgcccaaccttcacagggcgaggcactcgttagtctgcaagacagagagaagccggccaacacaaagcagtaaaccctactgggcgcctactatgtgctggtccacactgagactggaacagaagagaccctgccattgaggggtgaataattaggccagggagtaagagaaagctcagctgcacagtggggagcaggggatcaggggagcagagtggaaatggctttggtatcactgacaggcttggaatttgagctctg

SEQ ID NO: 7624 - DNA, 1317 bp, Homo sapiens
  SIMILAR (879)..(589): 791254mologous to Homo sapiens PAX3 protein-forkhead transcription factor fusion,accession number U02368,Smith-Waterman Score=407.
ttattctgtcaagcttaggctgttttcttcttcttcttcttcttcttcttcttcttcttcttcttcttcttcttcttcttcttcttcttcttcttcttcctcctcctcctcctccttcttcttcttctctttcttcctcttcttcttttttaagctaaaggaactacgtttggtaatatagccattgaatccagaaaactgagaatcctgcccacttttctctccagttaaccttgatatgccataaaccttcaaggataagagatggaaagtgaactgggccaggtctacttcacgacagcagttactggaaagtgccagaactaaatcatgggcagagagggaaggaggcactaggtggagggcatggtaaaacagaacctgatgtctcagattccccaagatcttaatcagagtcactctgtgctgttttactgtctgcattcctacctttctccagccacttcccattactttatctcccacttgaaaaggtttcgttttttcataatctgaagcagttatcttgagcatatggtagtacttcctcggtactccatattccaaggcagcattcctttttcctcctgcatgtgtaggaaggtgctggtaatgtactctctgaggtgagaggccattgccaatggtggggttcatggggttggagggccccgacggaggcacaaagctgtctgtatagctggaaaatccatgcctggtgctggggaggcagtaggcagagctgctgtctgggttggaaggaatcgtgctttggtgtacagtgcttggaggaagcggttgaggtctgtgaacggtgctgctgggatctgacacagctctcttctctgctgatttttgtgtgtgtgtgtgtgatactttcagaataagattatcctggaccccatgacgttcagcgaggccaggttccggccgtccctggaggagaggctggagagcatcatcagcggcgcagcgctgatggccgactcctcctgcacgcgagacgaccggcgcgagaggatcgtggcggagtgcaacgccgtgcggcaggcgctccaggacctgctcagcgagtacatgaataatgtaagtcttgggatctccattctcatgtcttggtggattctgttctgcaatcgtgttgctctggtgattagtgatgataggagtggtggtgcttctagcagcagcagcagcagcagcagcctcaatgcaaagccatagcaataatgcagcttcccctggcccataggtaccactgggcctacacaatgggcactgtgcctcagaaatccaggaccatattcgggacaccat

SEQ ID NO: 7625 - DNA, 420 bp, Homo sapiens
ttaactagggggcagtgcccaactgtccccaagccagaagtaagaggtatgcatcttcacgacctcaatgacaaacttgatcatataaaataggcagcattcattgacctggttcaggctacgccggaggtggactaccaccataatagtaactgaaggaccttgcatggaaatattggcttcattctggtgaacaataatttcttccaagtaagtccagtggtaaaagaatttcctgccaaattgttctgcaaaggagcttttcttcttcttcttcttcttcttcttcttcttcttattattattattattattattatactttaagtttagatctgatggttttataagcatctggcatttccgctgcttgcattcattctctctcccactgccctgtgaagaggtgtcttccaccat

SEQ ID NO: 7626 - DNA, 582 bp, Homo sapiens
  SIMILAR (552)..(181): 511254mologous to Homo sapiens Human secreted protein sequence encoded by gene 33 SEQ ID NO:89,accession number AAB32403,Smith-Waterman Score=279.
tcatttatcttcactgagtaggaactgattcttcccagatatcatatcccctgctgacctggaatgtaagctccaccaagacagggatctttgtcgtttttgttcaccctgaatgtcctgctgtactccaagtgcctcaagtcctcctcccaggcaggatccattgatggcagccacaataggctttgtggacttttcaagtttctcaactattctctgtgcttcttgtgatagctgtgttacttctgccattgtttgatttcctctagaaacctcaggagttgattcgtaagaaataacagtttcttcctgttcgtcaacactgttctttgtattttcttcaggatgctcttctggtttatgatttgcggtctgtgtttcatcttgagggctggttaggttcttgtttcttttggtgttttgttgttgttgttgtttatattttttacttctttctcttttctcttctttttttttcttcttttcttcttcttcttcttcttcttcttcttcttcttcttcttcttcttcttcttcttcttcttctttcttctcctcctcctcctccttcttctgtgccat

SEQ ID NO: 7627 - DNA, 1719 bp, Homo sapiens
  SIMILAR (891)..(286): 641254mologous to Mus musculus putative,accession number AK005297,Smith-Waterman Score=633.
tgtggtttttttttttttgtgcggttctgcaaactttttttaattttaattttatttttttacaatgtaccatgaacatcttttccatgcacatgggtgaaaatcctctactaaaatatagagcgctgtagttgggtcaaaaggctgctggtaacgagattgacatctaaagcaaaaatatcagcttaaggttaaagcattggggcctggctaatacccttccggggaaagcagggccagcaatattctcatcagagaaatcagaatggaaggccaaaggcattaaaggtatgggatatcgtgtaagcccctctggcccctacctccacccctcactcccctgacaccccgttgtccccttggggcgaaatggatcctgtacatctctttgcatcccaatgaaaaccacccattttctgttttttcccttagctccctcttgaacccttgaaaacatctcccacattctctcatcatctcctcactgctcagatgcctttcctgtaagtcctcctgagagtccttgggggaatcgtccgtccccctgtctgtttttctttttgctttccggggcacataatctccagccgggcgcttttcggcggcccgcggctggccctctggctttgcctgggaggctggcttgccctcgccttgtggcttgccctcaccttcggacttgccctgcttttcctggcttcccttatcttccagttgtccctcatcacctggctctccctcagcctttcgctttccctcgcattctgtcttcccctccgcgtctggcttttcttcctcgtctgactttccttcatcatcaggctctacttcatcttctggctttccctcgttttccaggtttccttcatttttattgtagggtttttccatgtcgagatttctctttttcctgtctctcaacccttgtgggcccctgtccatgcagccccctgctttcacggacctgcggggattctggacaggttgctcttcctttgcaggcctcccagagcgctgggaacaacagacgcgcagactgattctctcttcgttcacttcagactcattattgagctgctctaacaagtttttcattacagttgttttccgttcaatggagaaaaggtagtcttttccacaaatgatactggaaatcaactggacttgctgataggcactctccttggaatcttccctcaactgaagttccctaattttcctccttagctctctcatctcctccatgaaccgttccatatcatctccatctccatctatcatatcaatgttatcgacaagcctattgggcacatcctctccaaaacccggggcaggtggagcccaaacccctttaacatttcctccaggctcctggtattcaccacctcctaaagcgggggcttcattctgcactggggccttctccacaactttgttttccttggggacattttccatgttgagtttttttcctgttttttttttttttttcttcatattcattttcttcttcttcttcttcttcttcttcttcttcttcttcttcttcttcttcttcttattattattattattattattatactttaagtttggtgcaaggggtgggctcccaagggcttgtgcaacccttcccctggctttgcagggtgtaacctccatggctgttctcatggtctgaagttgagtgcctatggcttttctaggctcaacgggcat

SEQ ID NO: 7628 - DNA, 403 bp, Homo sapiens
  SIMILAR (1)..(402): 941254mologous to Homo sapiens Human GTPase associated protein-13,accession number AAY99662,Smith-Waterman Score=679.
aagtcattacagtatagtaacacaggagacatgattcttgttgtatctggaagctgtcatgccaaggtgattgacagagatggttttgaagtaatggaatgtataaaaggagaccagtatattgtggacatggccaacaccaagggtcatacagcaatgcttcatactggctcatggcatcccaaaataaagggagaatttatgacttgctcaaatgatgcgactgtgacgacgtgggaagttgaaaattcaaagaagcacaaaagtgtgtttaaaccacggacgatgcatggccaaaaagtcattcccactacgtgcacatatagtagagatggaaacctcatagcagctgcctgccagaatggaagcatacagatctgggaccgaaatttgactgttcatt

SEQ ID NO: 7629 - DNA, 397 bp, Homo sapiens
  SIMILAR (3)..(395): 1001254mologous to Homo sapiens Human GTPase associated protein-4,accession number AAY99653,Smith-Waterman Score=655.
ccctggagaagcagatggaaaaggcccacgaggactcggagaagctgcgggagatcgtactgcccatggaaaaggagatcgaggagctgaaggcgaagctgctgagggccgaggagctgattcaggagatccagagacgtccccggcatgccccttccctgcacggctccacggagttgctgcccctgtcccgggatccatcgcccccgctggagcctctggaggagctgagcggagatgggggtccagccgctgaggccttcgctcacaactgcgatgacagcgcctccatctcctccttctcccttggcggaggggtcggcagcagctcctccctgccccaaagccgccagggcctgagccctgaacaggaagagacggcctcgctggtgtctac

SEQ ID NO: 7630 - DNA, 446 bp, Homo sapiens
  SIMILAR (36)..(446): 901254mologous to Homo sapiens calcineurin A2,accession number M29551,Smith-Waterman Score=655.
  misc_feature (1)...(446): n = a,t,c or g
tttaaaacggatagacgatcatcggacgngcaannaattttatggatgtcttcacgtggtctttaccgtttgttggagaaaaagtgacagatttgtttttaaatgttctgagtatttgctctgatgatgaactaatgactgaaggtgaagaccagtttgatggttcagctgcagcccggaaagaaatcataagaaacaaaattcgagcaattggcaagatggcaagagtcttctctgttctcagggaggagagtgaaagtgtgctgacactcaagggcctgactcccacagggatgttgcctagtggagtgttagctggaggacggcagaccctgcaaagtgcaatacgaggattctctccaccacatagaatctgcagttttgaagaggcaaagggtttggataggatcaatgagagaatgccacctcggaaagatgctgtacag

SEQ ID NO: 7631 - DNA, 602 bp, Homo sapiens
  SIMILAR (398)..(451): 1001254mologous to Homo sapiens calcineurin A2,accession number M29551,Smith-Waterman Score=100.
cggcacgagcggcacgagcggcacgaggaactaatgactgaaggtgaagaccagtttgatgtaggttcagctgcagcccggaaagaaatcataagaaacaaaattcgagcaattggcaagatggcaagagtcttctctgttctcagggaggagagtgaaagtgtgctgacactcaagggcctgactcccacagggatgttgcctagtggagtgttagctggaggacggcagaccctgcaaagtgccacagttgaggctattgaggctgaaaaagcaatacgaggattctctccaccacatagaatctgcagttttgaagaggcaaagggtttggataggatcaatgagagaatgccacctcggaaagatgctgtacagcaagatggtttcaattctcttgaacaccgcacatgccactgagaaccacgggacgggcaaccatactgcccagtgacccactacttcccagggactctcacatctcgggccccaaatggacagatcacccgaggagctggaggggtcggccaagctgactgtaaatttcacagtctctctgaagaaaccattgtgcttctgagaccctagcccccttcctggat

SEQ ID NO: 7632 - DNA, 895 bp, Homo sapiens
ggctttagagatgaagcagtagtgatcctttagccatgtttttcttgttgcttatgtcatactcacctagagatgtaaaagattgtatatatttgcatgaccttaggagcacctggtacattaggcacctggtgcattgttgaaatgctggtatggcccttagttcaggattacctgcacagtagctccttcatgccattcattttagaccaactcaaagcaaagaagcttattctgtcatagtctgatgggatattgtcagcctgcatgtcaaatactttgtgatagttaaataagactacaggactgttagaaattcttgtctgttagtctgcatgccataggctgtcatgaaaattaaacagagactataggattattatcagtttttgccctctggtttgtaatgcaagttgggctcaagtttgtttgttttttttttccccattgctgttttactgattagccagtagagtgaaatattaaagtttgtggattactttttatttctatatttatcagaccccagtattagaccaatgctgagctaaaccattgagagagcaagacattttttagcatgagttcatctagtcccctccatgtaagctggtggcaggggtcttggtactggtttagatgagtgtggaacaggctaatagaatattgtaagcatgcatgccctaaacttgagcctttctctctatttattccattgaaagtaggttcagctgcagcccggaaagaaatcataagaaacaaaattcgagcaattggcaagatggcaagagtcttctctgttctcaggtaatgatatattttcttgattatttgttttgcagaaattacgtttattgtaccttgttacaagcattgtcccgcatctaaaagcaaa

SEQ ID NO: 7633 - DNA, 2940 bp, Homo sapiens
  SIMILAR (905)..(444): 991254mologous to Homo sapiens hematopoietic progenitor kinase,accession number U66464,Smith-Waterman Score=795.
gaaatctgattcaaattccagaaaaatccgatttaactaataagtctgaatcagcaagaatgccaagacagagaaatctattcacatggtaaaaggagtgatgatagagaatgacacaatgtctctctgagtgtcttatctgtaaattcttatcaggaaaagtaacgctgggccaggcgcagtggctcacgcatgtaatcccagcactttgggaggctgaggcaggcagatcacctgaggtcgggcgttcaagaccaagcctggccggcatggtgaaatcccgtctctactaaaaatacaaaaaaaaaaaaaaaaaaaaaagattagccgggcgtggtggcacatgcctgtagtcccagctacttgggaggctgaggcaggagaattgcttgaacccggtaaggcggaggttgcagcgaggcgagatcgtgccactgcactcccagcctgggggagccaagcagacggaaagtgagggtagggtctctcagctcctgtagcagctgatccgagcctagagcccacacctgcactccatgcttccagaaggcctgaagctgacctccaaccatagccacggcctccaccgcttcggtcatggggatctcaggtgtgcgaagtccccggactggggacccctccggggtcaccagcttcacagagccatccatcaacaccatcaccatatcttcctctacctgggtcacctgcacgggtcccctgtgctcggtgctcatctcgcccagccagcaagagagcgcgccaaagcgcaccgtgtggaagagcaccgacttccccggccgcccggggctcacgccgatgcacacagcgggcagctcagagcctggcccggtcagcagcgcgaacacggacagaggcgtcggcagtgggaacagcacctgctgcgggccgcacagggaggggcgggccggacaagcaggaatttgttcatgggctggtaccactgaagcaggacaacggacgtctccaatgcaccgcacaggaacgggcccccagagctcgcaccctccgccacacagcacgcccggcagcctttggtgtcctggatcttggtggaaaccatgttcttccttgccagtaggcggtgggggctaatgtgagcgatggggtttcctgctctggtctctttccgttccagcaggccaaggatgctatgagaatacacggtggggggtctttcctgagagagacatgagaacgttgttgatggagtacacccacgtagtccggctaggaaagagcatttccagcgtggcctcctggtcattccggttcaggatgaagatgccttcctctgcccccaggagcaggtgctggtccttggtggagggatgtgtccaggcggccgtgctgtggatccggagggggcagccattgaacaactttacgagaagggcacatccctttctcttcatcttttccttcttggggggcagaagtgggggcttgtcaagctcccgggagggtgggttccagagtgagggttctgaatgggcggtgaggtgggggctgctggtggatgggggaggcccaggacgggggctgtttggtgggggcccactggcacaccggaccagcacccccgggctcagctgcccatcatcccccatgctcccaggaccctcgtctgatggagaacggaacttgggcttggggggaagtggaggaggtgtgtcctctgcaggggtggggatgtccacgtcgtcatagtcatcgtcagacgactctgacagttgcttcctggggctgctgctcctgaggtctcgaggaggctgtaggcgagcggtgttggctgggggtctggtctccattcctcggagcttcctgaactccatgtgccgccgacagcagtctgcatctgggatccccagagagctggagcggtgggtggatctgatccgccgagggatagcagggggtagctcgggctcctcatcctcaatgtccccaatggagggtcctttcccgggattcttcagtttgtcaagaagatccaggatcaggcctcgattcagcccaggctgggataccagttgatgactgagcatcttggtggcgctgggtcgtttcttgggactcttagtcagagtgactttgatgaagttgtggaaggcagccgaccatttgcctttttccttcagtcggggaggctggtagccactcttggtcatgaggaagagaactctgagagggtgcacatcaaagagcggtggctgtagctcggccagttcgatggccgtgatgcccagggaccagatgtcacacagctcattgtatcctcccttcagggccacagctgccacttccggagccatccagtagggtgtcccaatgaaagagaggcgtctggccagtgtagccccaatctgggccgagatgccaaagtcagccaatctgacctccccagcatcattgatgaggatgttagctcccttgatgtccctgtgtatcttcttctgtgagtgcaaataggccagtccctggagcacttcccggcagacatagctaatctggagctctgacagggagcctgtcacttggtagatgtcctggagagaaccagccccacagaattccatgcagatccagagtttctgcaaccagagataactcccatggtaggccacgatgttggcgtgccggcaagttttcaatatgaggatttccttctgaagggtggagacatcatcatcaggctccatcttcaccatcttcagtgccaccaggtcccctgacaccttgtctcgagccttaaagacttccccatacgtgccgccacccagccgctgtagcaggtcatagtggtcccgggggtctctattgaaaatgtcagggtccacgacgtccatccctgggggcctgagctgggcatgcgcccaggggccagcagggcctcagggctcaacttctgacgaaatt

SEQ ID NO: 7634 - DNA, 676 bp, Homo sapiens
  SIMILAR (43)..(153): 891254mologous to Homo sapiens KIAA1200 protein,accession number AB033026,Smith-Waterman Score=167.
cccccacaccccttcctgggttatgcccttgagtaatctcattcctctcttccctgctcagcttcaagccctcctgcccttgtttcccctgggtctttctctggcctggtctacaagaatgtcactgtgcctgtctacacagcactgaagggggtaagaaactgctgcacaaagagggggtgtctcatcaggaaaggcccctggcctcatcatccaatgactggggcggggctctagggccaggcttctgcacatggtgaccctgcccagggagctcagcccagcacgtgtcattttgttttattgtttattaggttattataaaaattccacatttacaaaaatgtgaatcagtatgaacgtggacaaggtaagaaggttaagcctatgcccgctttacagctctccccaccttttctcatgtctgcctcactcctcaagtcccagagggcagtggggctccttctagaattactgaggtatattccaacttatattcccgtaacgtcactacattttaaaaacaaaaatcagatagaattgcaatattttcatacacatttttgtctctgttactggtttttgaataatagtaatacttgataaaattttttatagaagaataaaaaaccaaaagtgaaatttccaaaaaaaaaaaaaaaaaagggcggccgct

SEQ ID NO: 7635 - DNA, 562 bp, Homo sapiens
  SIMILAR (2)..(175): 981254mologous to Homo sapiens Human secreted protein, SEQ ID NO: 7746,accession number AAG03665,Smith-Waterman Score=285.
agaagacaagacaatcagtgaccaggaatcctttagggaagttattacggcaatggacgtgatgcagttcaccaaggaggaagtttgggaagtgtcgaggctgcttgctggtatactgcatcttgggaacatagaatttatcactgctggtggggcacaggtttccttcaaaacaggtaagattatgcctgcctgccctcctcgctccctttgttccccgtgggaaacttaaacctaaattattgactgtctagcctttcagaaagaaaattctggcccaggtgcggtggctcttgcctgtaaccccagcactttgggaggtggaggcgggcagattgcttgagcccaggagttcgagaccagcctgggcaatgtggccaaaccccatctctactaaaaatacaaaaattagccaggcatgatggtgtgcccctgtagtcccagctgcttgggaggagagggtgggaggatcacctgagcctctgcgggttgaaggtgcaatgagctgagatgatgccactgcactccagtctgggcaacagaacgagatcttgtatcacca

SEQ ID NO: 7636 - DNA, 693 bp, Homo sapiens
  SIMILAR (693)..(565): 681254mologous to Homo sapiens Human secreted protein sequence encoded by gene 94 SEQ ID NO:264,accession number AAB56170,Smith-Waterman Score=151.
ggataatgtgatctacaacgcaacagagaatcatctctggctattaaacagttgacagggtgcctagatatgtcatgagagtaattatagaatataagctttgaaaactggatgctggctagacttctgggattcttacattgttagcatagtggcatatgtatttctgtgtttactgcagaaacttatgaatcatgaatagaactttaataacaaattgtggtggggttaattattaaattaaaactttgagaaatagttaaaggaagattggcatctctcttataatgactccttactactattcccatagcctttatctcaccctgaaatctattaattgcttgattggcttgacatctttctattcgtaccataattttccggtattcctgaagatattttagggagtcagctttgttctcttttgctcatcatgatgatgaaatagctagtactcatgaaatgacaagtgttttgaatttgggaatatatagagaacattattattttgaggattaagtcatcaaattatcttaaacaggttctacttaaaaagttctaggctgggcgcgatggctcacgcctgtaatcccagcactttgggaggccgaggccagctgatcatgagatcaggtgttcgaggccagccggttcaacatggtaaaaccccgtatctactaaaaatacaaa

SEQ ID NO: 7637 - DNA, 434 bp, Homo sapiens
  SIMILAR (2)..(433): 1001254mologous to Homo sapiens F-box protein Fbl3a,accession number AF129532,Smith-Waterman Score=761.
aggaagagatagtgaccgtaattcatcagaagaaggaactgcagagaaatccaagaaactgaggactacaaatgagcattctcagacttgtgattggggtaatctccttcaggacattattctccaagtatttaaatatttgcctcttcttgaccgggctcatgcttcacaagtttgccgcaactggaaccaggtatttcacatgcctgacttgtggagatgttttgaatttgaactgaatcagccagctacatcttatttgaaagctacccatccagagctgatcaaacagattattaaaagacattcaaaccatctacaatatgtcagcttcaaggtggacagcagcaaggaatcagctgaagcagcttgtgatatactatcgcaacttgtgaattgctctttaaaaacacttggacttatttcaactgctc

SEQ ID NO: 7638 - DNA, 417 bp, Homo sapiens
  SIMILAR (190)..(417): 861254mologous to Homo sapiens calpain-like protease CAPN10a,accession number AF089088,Smith-Waterman Score=325.
tacgccaagcttggcacaaggccgggctgcacgcggcggactgggcaggccgggcccggtcactgttgggtgacagtcatacttcgtggagcgcagggagcatcccgggcaagcactaccaagctgtgggtcttcacctctggaaggtagagaagcggcgggtcaatctgcctagggtcctgtccatgccccccgtggctggcaccgtgtgccatggcatacgaccgggaggtccacctgcgttgtgagctctcaccgggctactacctggctgtccccagcaccttcctgaaggacgcgccaggggaggtcctgctccgagtcttctctaccgggcgagtctcccttagcgccatcagggcagtggccaagaacaccacccccggggcagccctgcctgcggtggagagggggacg

SEQ ID NO: 7639 - DNA, 751 bp, Homo sapiens
  SIMILAR (727)..(677): 821254mologous to Homo sapiens Human ORFX ORF1641 polypeptide sequence SEQ ID NO:3282,accession number AAB41877,Smith-Waterman Score=73.
  misc_feature (1)...(751): n = a,t,c or g
cgtggcgggttgacgtctgctggtgctcccagacccggctctgacctgagactgcaggtctttctgccttgccgtgtgcctcattggccaaaggaaagcaacagagtctgcagccagggcaggacccgcaggaggggcctggacccggggggctcctggcagcgccgtgcctttctgaggcaaggaggtagagccagcggctgaggacctgtcagggccagtcccagctctgcagcttgctgtgtgacctggcacacatcctctccctgcctccctcagtctcttcccctgcaagacggggtcctgacacggatctcatgggattgctctgaggcccaggcagtcccaggctcaaccactggttcacaaagtgtgttgtttccaggaagaacagatgggggcgcctgagggcaaagggcctgagtgtgggtcgaggatatgccggctgctcgctcaggggctgggttttcatcttgtgtgtcttgacagggtgtgacacttggcaccacactgttccctgtcccttcatggatgtggcccacatgatgttcctttcctcgttgcaaaaagaagttttttggggctggaaggcccactgtccagcagccccccangttgcctgggccacggtgcctttgtgggcccagctacaaggaggacttgcaggctcgtgtctgggacagatacttggcgccagggccaagtgaagcccgggattggtgggcatctctagctggtccctgagagaggg

SEQ ID NO: 7640 - DNA, 427 bp, Homo sapiens
  SIMILAR (23)..(145): 871254mologous to Mus musculus Dhm2 protein,accession number D88026,Smith-Waterman Score=190.
atctttctgactttttttcccagataatttagaagatgagactgaagatgatgacctatttgaaactgagtttagacaatataaaagaacatattacatgacgaagatgggggttgacgtagtatctgagtacgtttttgccaatgcttttattttaaaatagaaaaaattagattttgcagttattcagaaaatatgattttgatgaagtagtgggagaaaaaggattttttggtttcatgaattattgggtatgtttcaactagtctggttttggagaagatggtattaattctgacttgtattatattcctgtgataaaaattgctgaagagaaaatgatccttatgtataaggatttttgttacaaagttgtttataatagtaaaaaaattagaaataatctaaatgtccaataagaaggttt

SEQ ID NO: 7641 - DNA, 437 bp, Homo sapiens
  SIMILAR (45)..(221): 941254mologous to Homo sapiens DERP2,accession number AB009685,Smith-Waterman Score=281.
ccgagcatttcagatctgctcggtagacctgttgcaccaccaccatgttggctgcaaggctggtgtggctccggacactaccttctagggttttccacccagctttaaccaaggcctcccctgttgtgaagaattccatcacgaataatcaatggctgttaacacctagcagggaatatgccaccaaaacaagaattgggatccggcgtgggagaactggccatgtgtgcgcccagtgaaaagtttctgaacatgggtgcacccctgggagtgggcctgggactcgtctttgtgtcctcattgggatctatgtttcttccacctaccaccgaggctggtgccactctttactcactggcaatgtacggtggattagttcttttcagcatgttccttctgtatgatacccagaaagtaatcaagcgtgcccaagtatc

SEQ ID NO: 7642 - DNA, 663 bp, Homo sapiens
  SIMILAR (453)..(662): 841254mologous to Mus musculus Pro-Pol-dUTPase polyprotein,accession number Y12713,Smith-Waterman Score=333.
atggctctctggaccctcaggcccactcccctgctggtgacctgcatgctgatctgtgccccaggtgtgatgggtgcagtggtggctcctctgacaatattagggggtcctcttctcatcagagctgcatggtacacagctggcattgtgggaggcctctccactgtggccatgtgtgcgcccagtgaaaagtttctgaacatgggtgcacccctgggagtgggcctgggtctcgtctttgtgtcctcattggttgatcagatgggaagatggtttgttgctggaggggctgctgttggtcttggagcattgtgctactatggcttgggactgtctaatgagattggagctattgaaaaggctgtggagtattggtttaacagctttgtctgccatagcaatcagcagaacgcctgttctcatgaacttcatgatgagaggctcttgggtgatatgggtttgcctatcctgcatgcaatgcttctgcgaagactaccatccgtggactcacagaatgccttatccagcatcatgttactccacacagcattgcctctgaccaaggcactcactttacagctaaagaagtgcagcagtgggctcatgctcatggaattcactggccttaccatgttccccatcatcctgaagcagctggattaa

SEQ ID NO: 7643 - DNA, 1541 bp, Homo sapiens
  SIMILAR (187)..(660): 441254mologous to Homo sapiens My021 protein,accession number AF060923,Smith-Waterman Score=184.
gtcatgcagtgcgccggaggaactgtgctctttgaggccgacgctaggggcccggaggggaaactgcgaggcgaaggtgaccggggaccgagcatttcagatctgctcggtagacctgggtgcaccaccaccaatgttggctgcaaggctgggtgtgtctccggacactaccttctagggttttccacccagctttcaccaaggcctccccgtgttgtgaagaattccatcacgaagaatcaatggctgttaacacctaggcagggaatatgccacctaaacatagaattggggatccgggcgtggggagaactgggccaagaactcaaagagggcagcattgggaaccattcgatgggaaaaaatattttaaaatttgattcagatggggaagaatggttggttgcttggaggggcttgttgttggtcttgggagcatttgtgcttacttattggctttgggacttgtcttaattgagatttgggagctatttgaaaaaggctgtaatttgggcctcagtatgtcaagggatagaattccattccacctatatggtacttagcagggggagtattgggtttaacagcttttgtctgccatagcaattcagcagaaccgcctgttcttcatggaacttccatgatggaggaggctcttggggtggacaattggtgttgacctttggcagccatggttgggagctgggatgctggtacgatcaataccatatgaccagagcccaggcccaaagcatcttgcttggttgctacattctggtgtgatgggtgcagtggtggctcctctgacaatattagggggtcctctttctcatcagagctgcatggtacaacagctggcattgtgggaggcctctcccactgtggcccatgtgtgcgcccagtgaaaagtttctgaacatgggtgcaccccttgggagtggggctggggtctccgtctttgtgtcctccattgggatctaatgtttcttcccacctaccgacccgtggctggtgccactcttttactcagtgggcaatgtacggtgggattagttcttttttaagcatgttccttctgtatgataccccagaaagtaaatcaagccgtgcagaagtatcaccaatgtatgggagttcaaaaatatgatcccattaaactcgatgcttgagtatctacgatggatacattaaatatatttatgcgagttgcaactatgctggcaactggaggcaacagaaagaaatgaagtgactcagcttctggcttctctgctacatcaaatatcttgtttaatggggcagatatgcattaaatagtttgtacaagcagctttcgttgaagtttagaagataagaaacatgtcatcatatttaaatgttccggccactgtgatgcctcaggtctgccttttttttctggagaataaatgcagtaatcctctcccaaataagcacacacattttcaattctcatgtttgagtgattttaaaatgttttggtgaatgtgaaaactaaagtttgtgtcatgagaatgtaaaaa

SEQ ID NO: 7644 - DNA, 1491 bp, Homo sapiens
  SIMILAR (277)..(1104): 821254mologous to Homo sapiens DNA-binding protein,accession number AF038951,Smith-Waterman Score=1226.
tttccgggtcgacccacgcgtccggcttccgggttttgcggggcctttgtctctgcagccgtagctccaggtcttgtcttcactgctgtgtgtcctctgctcctagaggcccagcctctgtggccctgtgtcctgcaggtattgggagatccacagctaagacgcccgggagcccctggaagcctagaaatggccagaaaaactgggaaaaacaggctcttccacttactggatgtttgacaaaatatccttcttgggccaaaaacattgacatcattggggccattgcaatttagagacgtggccatagaattctctctggaggagtggcattgcctggacactgcacagcggaatttatataggaatgtgatgttagagaactacagaaacctgggctttcttggtattgttgtctctaagccagacctgatcacctgtctggagcaaggaagaaaacctttgaccatgaagagaaatgagatgattgccaaacccccagttatgagttctcattttgcccaagacctttgtccagagcagagcctaaaagattccttccaaaaagtgatagtgacaagatatgaaaaacgtgaatatggcaatttagagttaaaaaaaggttgtgaaagtgtggatgagggtaaagtacacaaaagaggttataatggacttaaccaatgtttgacagctacccagagcaaagtatttcaatgtgatacatatgtgaaagtctctcatatattttcaaattcaaacagacataagataagagatactggaaaaaaacctttcaaatgtatagaatgtggcaaagctttcaaccagtcctcaacccttgctacacataagaaaattcatactggagagaaaccttacagatgtgaagaatgtggcaaagcttttaaccaatctgcaaaccttactacacataagagaattcataccggagagaaaccttacaaatgtgaagaatgtggcaaagcttttaactggtcctcagaccttaataaacataagaaaattcatattgaacgaaaaccctacatagtgaagaatgtgacagatcttttaaatgttcctccacttttaattagcataagataattcatactggagagaaaccctatgaatgtgatgaatgtgggaaagcctttaaccagccctcgactcttagtaaatttgagagtttatatggaacacaaaccctacaaatataaagaaatgtgacaaagctttttaaggaagttctcaacccttattacacataattcataccaaacagaagccctacaagtgtgaagaatgtggcaaaacctataaacctataacaagttctcaattcctttttttttgagatggagtttcactcttgtcaccgaggctggagtgcaatgacatgatctccgttcactgcaatctctgcctcctgggtttaagccattcttctgcctcagcctcccaagtagctgggattacaggtgcccaaca

SEQ ID NO: 7645 - DNA, 432 bp, Homo sapiens
  misc_feature (1)...(432): n = a,t,c or g
aatnnnnnnnnnnnnnnnnnnnnnnnnnnnnnnnnnnnnnnnnnnnnnnnnnnnnnnnnnnnnnnnnnnanaannannnnnannnnnnnnnnnnnnnnnnnnnnnnnnnnnnnnnnnnnnnnnnnnnnnnnnnnnnnnnnnnnnnnnnnnnnntggcaacttcatagcatatccagaaaaaaaccatgaatggtccaattcaggtgaaagtatcaattggtccaagatggctaacatgggtaagcctagaatgtcaaatattggtttcagaaggttgggtttttttgctggtgggagttgatgctgcacacatttgttttgtagggggtgagtggtgcactgacagtgcttatgaaggacgcactcaagcccaatctcatgcagacactggaggtgagcagagtgactcctgcattcttgaattggttttgg

SEQ ID NO: 7646 - DNA, 605 bp, Homo sapiens
  SIMILAR (1)..(261): 911254mologous to Homo sapiens MDMCSF (EC 1.5.1.5; EC 3.5.4.9; EC 6.3.4.3),accession number J04031,Smith-Waterman Score= 373.
gagaagggtcacacacggacggcccagtttgatatctctgtggccagtgaaattatggctgtcctggctctcaccacttctctagaagacatgagagagagactgggcaaaatggtggtggcatccagtaagaaaggagagcccgtcagtgccgaagatctgggggtgagtggtgcactgacagtgcttatgaaggacgcaatcaagcccaatctcatgcagacactggaggtgagcagagtgactcctgccttcttgaattggttttggacagtcagagcagagtggttataaagcacacttgcaaggcgcggtggctcacacctgtaatcccagcactttgggaggccaaggtgggcagatcacaaggtcaggagatcgagaccatcctggctaacatggtgaaaccccgtctctactaaaaatacaaaaaattagccgggcatgggtgcgggcgcctgtagtcccagctgctcggaaggttgaggcagaatggcgtgaacctgggaggcagagcttgcagtgagccgagatcacgccactgcactccagactgggcgacagagcgccactccgtgtcaaaaaaaaaaaaaaaaaagtcgacc

SEQ ID NO: 7647 - DNA, 627 bp, Homo sapiens
  SIMILAR (70)..(318): 731254mologous to Homo sapiens Human GTPase associated protein-4,accession number AAY99653,Smith-Waterman Score=268.
cccacgcgtccgcgactcgggaatcttcggccgaggctcggcaatccccccatcctccgtcaccagggagtgcgggaatccgccgtttgcgctgaggcaatggcggcagctgcgccggtggccgcggacgacaataagcggcggcggcggccgggggctgactccatcagcagctatgaagcccagatcaccgccctgaagcaggagcgacagcagcagcagcaggactgtgaggagaaggagcgggagctgggccgcctgaagcagctgctgtcccgggcctaccccctggactccctggagaagcagatggaaaaggttgggattgggatggcttccctgctgccctgggatttggaagaatgttgaggactgtggatgtcccattccctggtcatggggtgcggggcacccagcagtgattctaggaatagcacagagttaccaggtgttgttgagagcttggctctgtgctccgtagggtcctggcttgccccttattagtgggtgaccaagttcgcttagctccaaaattaacttaagttatgtagaagggaagggaacttacacttaagggtaacaaaaaaaattcttactgttattaaatattgacttctggtgtacatt

SEQ ID NO: 7648 - DNA, 910 bp, Homo sapiens
  SIMILAR (789)..(887): 841254mologous to Mus musculus Dhm2 protein,accession number D88026,Smith-Waterman Score=170.
tgctctcattaaccttaaaaaaacctagatatagataaaagactgaaacactaaaaatgtaaaagtgatggctataagatgataaaaatgctgttcttcattgtccagattttcactcctgaggaaatagttcttttataataaaaaagcaatatttttcatattaaaaaactacctcccagaaatatgtagttatgtaatttctaagtgaatatttttgcctttagcccagggctctgttttgttttgttttgatgatttgaagacttattttacccaaacttagaagatggcatttggtttttgacaaagaaaggattagaaggaatattgttcacatacagcacttctgaaagcattctagcttctgtgaccaaattttaagatcttcctgatttgctgctttgcttctctcagatatcatcccatgtaaagaagattcccatccctttctcccgtctcacccccactatttaagagagtggtagtgtcactatggaaagcttcattgggtaaatcttcaacctttggaccaagggagtggtacattaactgagtaaatatgaataacagacttatctattttgatagttggtttaggaaaactgtcatgtgacaggatgtaatttttaaaaatattttggagtttttaggattataatttttagccataaatagctaattcattgattaaataaatcatctgaggtaaaatgttgtatcagcagataccgtgctctaaagacacgggcctgtcttcagaaaatatgttataatgaaaatattctattttcagtgactttctggctgatcaagctgcatgttatgttcaggcaatacagtggattttgcactattactatcatggagttcagtcctggagctggtgagagaataaaaacaaaaaaaa

SEQ ID NO: 7649 - DNA, 421 bp, Homo sapiens
  SIMILAR (44)..(133): 1001254mologous to Homo sapiens Ras-GAP SH3 binding protein,accession number AF051311,Smith-Waterman Score=166.
ccagatttctggatatttatggaataaatgttgtttcctatagggatctgttccaaataaattttatgttcacaatgatatgtttcgttatgaagatgaagtgtttggtgattctgagcctgaacttgatgaaggtgaggttactttgaagatatgaagatagaagggttctgttggtactctttatggactaatttctataagtatgacatctacggaaatttgctgctttattgtaactgtgtcaaacatccttttttcatggttttgttgttgttggcgttgttacaaaaagatgtccattgtttgaaaatatacaaaatttggatgtcaaggaaaaaggttcccctcagtctcatcctctgtagataaccaagtttggtgcctattggagaaggtttttggattctatacttgcaac

SEQ ID NO: 7650 - DNA, 414 bp, Homo sapiens
  misc_feature (1)...(414): n = a,t,c or g
agggatcacacagagcagcatccacacgtccccagctccctcttcccgttctgttgtcctgttttcaccattccccggacctcaggccgctgcctccacgcatccccctgcaggagccctttgccaccttctttcatgaaggtcattcctcaggccacagatggagcgtgtgttgagcatctcaccgccaggcacaaggctggcccttcctagtggaggaagtgggagcctcgactagagagggagccaagagggacgagctgggcagggccccgtgatcaccacggcctccttgaaggggctatagggaaatgatctggtctttctggccctagctggcagccaggaggcaggagcagcgggcgacagtgcgggccctggggttctgggccttctcgctgcaggcaaaggaan

SEQ ID NO: 7651 - DNA, 467 bp, Homo sapiens
  SIMILAR (137)..(292): 1001254mologous to Homo sapiens UnpES,accession number AF017306,Smith-Waterman Score=273.
aagctcgacacagtcgtagaattcccaatcagagggctgaacatgtccgagtttgtctgtaacatgtcagcaaggccttatgtgtacgacctcattgccgtgtccaatcattatggagccatgggggttggccactactaaagcagcttatgtgctattttaccaacgtcgagatgatgaattttataagacaccttcacttagcagttctggttcctctgatggagggacacgaccaagcagctctcagcagggctttggggatgatgaggcttgcagcatggacaccaactaatgctgactccacgatcctgccaccctgtagcgccagtgtaatcccccaggagaacatctttgacactctgcagactgctagtgttctgtctaaaaaccagacaaggaaatacccttcttttatgagcagaaggaaacaaaaaaaaaaaagaagaccgtttacctagaaaaaa

SEQ ID NO: 7652 - DNA, 638 bp, Homo sapiens
  SIMILAR (329)..(484): 981254mologous to Homo sapiens UnpES,accession number AF017306,Smith-Waterman Score=268.
tcgttatggattaaagctgggaagagcctctatcaggctagttggttatttcatcatcctgatgtgatagtgggagctaggtgtgacagagctggctggcattccttcagggaccttcataaatgagaagctcagctctcctcagagttctctgcacaaggctccttccatttcctgctgcctggcaggggcagccatcctcaggtggaagggtctcctctgtgtggatatggcagatccttgagggttttggacagctagagaaaagctggggaaaatgggtgatttttccaagcactgaatggtctttccccctcttgtatttcagactaaagcagcttatgtgctattttaccaacgtcgagatgatgaattttataagacaccttcacttagcaggtctggttcctctgatggagggacacgaccaagcagctctcagcagggctttggggatgatgaggcttgcagcatggacaccaactaatgctgactccacgatcctgccaccctgtagcgccagtgtaatcccccaggagaacatcttttgaacttttcagactgctagggggtccggtcttaaaaacccagccaggggacatccccttccttttattgagccggagggaaacaaaaaa

SEQ ID NO: 7653 - DNA, 917 bp, Homo sapiens
  SIMILAR (1)..(618): 1001254mologous to Homo sapiens ubiquitin protease,accession number U20657,Smith-Waterman Score=1115.
gcctacgagaagcatgtgagcatgttgcagcctcagaagaagaagaagaccacagtggccctgagagactgcatcgagctcttcaccaccatggagacccttggggagcatgacccctggtactgtcccaactgtaagaagcatcaacaggccacaaaaaagtttgacctatggtccttgcccaagatcctggtggtccacctcaaacgtttctcctacaacagatactggagggataagctcgacacagtcgtagaattcccaatcagagggctgaacatgtccgagtttgtctgtaacctgtcagcaaggccttatgtgtacgacctcattgccgtgtccaatcattatggagccatgggggttggccactacactgcatatgcgaagaacaaactgaatggtaaatggtattactttgatgatagcaacgtgtccctggcctctgaggatcagatagtgactaaagcagcttatgtgctattttaccaacgtcgagatgatgaattttataagacaccttcacttagcagttctggttcctctgatggagggacacgaccaagcagctctcagcagggctttggggatgatgaggcttgcagcatggacaccaactaatgctgactccacgatcctgccaccctgtagcgccagtgtaatcccccaggagaacatctttgacactctgcagactgctagtgttctgtctaaaaaccagacaaggaaatacccttcttttatgagcagaaggaaacaaaaaaaaaaaagaagaccgtttacctagaagaagctatgtcaagaggctgaattatttttatttttaaacaggtggtgagaaattttctgaaagttacccactgaagcccatttctccgttgagtcatcttgtaatttccagctttctccccgctaag

SEQ ID NO: 7654 - DNA, 807 bp, Homo sapiens
  SIMILAR (652)..(804): 981254mologous to Homo sapiens Human secreted protein, SEQ ID NO: 7046,accession number AAG02965,Smith-Waterman Score=272.
atgggtccccagcgagggccctaccctcaagcctggaaccaccagcccaagggggagtgccccccactagatgctgctgcaggccccgcatggagttgtgctcctgctggtgcccagaagcagttgccccggctcctgcacccacatgctccttcccgcgaggggttgagcacagtaggttccatatgttcccctcaagtggatatcggcttaaataatggagacatgagtgattctgttggttctttaaaatatatctgtccctcttccccaaaggagaaaagtttattttcctttctctacactgagatttgcttgcaaggcttagtgggaaaagaagggtctcagcaaatggtagaaggtctgattagttggagaaggttgtattgtgttttgcgaggaggtaaactctattgtttttacagtccagaggaaattgaagctaaagtggaaccagctttggtagtacccattaacaagatgttggagagggaaagagagggcgagagagctgaaagaaatccttcgcaagaaaacaaagagtggcgacggcccggacagttcgcgttggagatggaggggccgagcctgaggggtcctgcgctccgcctggcggggcttcccacccagcaggaaaccagaatccgggcaatggataaggatgccaagaaaagaatccataatttctctgtcatcaatcctgttcctggacaagctataactcagatttttgcagttgacaatagagaagatcttcagaagtggatggaagccttctggcagcatttctttgatcttagtaaatag

SEQ ID NO: 7655 - DNA, 462 bp, Homo sapiens
  SIMILAR (152)..(457): 811254mologous to Homo sapiens Krueppel-related DNA-binding protein,accession number M61870,Smith-Waterman Score=444.
  misc_feature (1)...(462): n = a,t,c or g
tttcgttgtctctcgctgacgccagagatccagctatcgtcttcactgctctgtgccgtcagctcctagaggcccagcctctgtggccctgtgacctgcaggtattaggagggtcacagctaggacgccgggaccccctggaagcctagaaatgggaccattgcaatttagagatgtggccatagaattctctctggaggagtggcattgcctggacgctgcacagcggaatctatatagggatgtgatgttagagaactacagaaacctgatcttccttggtattgttgtctctaaaccaaacctgatcacctgtctggagcaaggaaaaaaacctttaactatgaagaggcatgagatgattgccaaacccccagttatgtattctcattttncccaagacctttngtcagagcagagcataaaagattctttccaaaaagtgatactaaggaagatatg

SEQ ID NO: 7656 - DNA, 431 bp, Homo sapiens
  misc_feature (1)...(431): n = a,t,c or g
tnnnnnnnnnnnnnnnnnnnnnnnnnnnnnnnnnnnnnnnnnnnnnnnnnnnnnnnnnnnnnnnnnnnnnnnnnnnnnnnnnnnnnnnnnnnnnnnnnnnnnnnnnnnnnnnnnnnnnnnnnnnnnnnnnnngttaccttgaatttcattgagcttcctctaaacagctatttcacattctctgtctgaatggtcatatctctgcattctggcattggtcattggtgccttatttagttcatttggtgaggtcatgttttcctcgatggtcttgatgcttgtggatgtttatttgtgtctggtcattaaagagttaggtttttattatagtctttgcagtctgggtttgtttgtacccatccttcttgggaaaactctccaagcattcaaagggaattgagtgttatcgnacgcgtgggcgnacgcgtggg

SEQ ID NO: 7657 - DNA, 2229 bp, Homo sapiens
  SIMILAR (1)..(2226): 1001254mologous to Homo sapiens transmembrane glycoprotein,accession number AJ251595,Smith-Waterman Score=3989.
atggacaagttttggtggcacgcagcctggggactctgcctcgtgccgctgagcctggcgcagatcgatttgaatataacctgccgctttgcaggtgtattccacgtggagaaaaatggtcgctacagcatctctcggacggaggccgctgacctctgcaaggctttcaatagcaccttgcccacaatggcccagatggagaaagctctgagcatcggatttgagacctgcaggtatgggttcatagaagggcatgtggtgattccccggatccaccccaactccatctgtgcagcaaacaacacaggggtgtacatcctcacatacaacacctcccagtatgacacatattgcttcaatgcttcagctccacctgaagaagattgtacatcagtcacagacctgcccaatgcctttgatggaccaattaccataactattgttaaccgtgatggcacccgctatgtccagaaaggagaatacagaacgaatcctgaagacatctaccccagcaaccctactgatgatgacgtgagcagcggctcctccagtgaaaggagcagcacttcaggaggttacatcttttacaccttttctactgtacaccccatcccagacgaagacagtccctggatcaccgacagcacagacagaatccctgctaccactttgatgagcactagtgctacagcaactgagacagcaaccaagaggcaagaagcctgggattggttttcatggttgtttctaccatcagagtcaaagaatcatcttcacacaacaacacaaatggctggtacgtcttcaaataccatctcagcaggctgggagccaaatgaagaaaatgaagatgaaagagacagacacctcagtttttctggatcaggcattgatgatgatgaagattttatctccagcaccatttcaaccacaccacgggcctttgaccacacaaaacagaaccaggactggacccagtggaacccaagccattcaaatccggaagtgctacttcagacaaccacaaggatgactgatgtagacagaaatggcaccactgcttatgaaggaaactggaacccagaagcacaccctcccctcattcaccatgagcatcatgaggaagaagagaccccacattctacaagcacaatccaggcaactcctagtagtacaacggaagaaacagctacccagaaggaacagtggtttggcaacagatggcatgagggatatcgccaaacacccagagaagactcccattcgacaacagggacagctgcagcctcagctcataccagccatccaatgcaaggaaggacaacaccaagcccagaggacagttcctggactgatttcttcaacccaatctcacaccccatgggacgaggtcatcaagcaggaagaaggatggatatggactccagtcatagtacaacgcttcagcctactgcaaatccaaacacaggtttggtggaaaatttggacaggacaggacctctttcaatgacaacgcagcagagtaattctcagagcttctctacatcacatgaaggcttggaagaagataaagaccatccaacaacttctactctgacatcaagcaataggaatgatgtcacaggtggaagaagagacccaaatcattctgaaggctcaactactttactggaaggttatacctctcattacccacacacgaaggaaagcaggaccttcatcccagtgacctcagctaagactgggtcctttggagttactgcagttactgttggagattccaactctaatgtcaatcgttccttatcaggagaccaagacacattccaccccagtggggggtcccataccactcatggatctgaatcagatggacactcacatgggagtcaagaaggtggagcaaacacaacctctggtcctataaggacaccccaaattccagaatggctgatcatcttggcatccctcttggccttggctttgattcttgcagtttgcattgcagtcaacagtcgaagaaggtgtgggcagaagaaaaagctagtgatcaacagtggcaatggagctgtggaggacagaaagccaagtggactcaacggagaggccagcaagtctcaggaaatggtgcatttggtgaacaaggagtcgtcagaaactccagaccagtttatgacagctgatgagacaaggaacctgcagaatgtggacatgaagattggggtgtaa

SEQ ID NO: 7658 - DNA, 1102 bp, Homo sapiens
  SIMILAR (882)..(1097): 881254mologous to Homo sapiens cell surface glycoprotein CD44,accession number L05424,Smith-Waterman Score=347.
tgataccagataacttggctttgcaagctcccatgcaggattcttttgtctgtgtgacataagtattaaaatgtgtcctgcctttataaagaatgtgaattccatattctcacttggtatcagtgagaaatattcccatatttctatttgcaacatagaagataatgcatcatgtccttctggggcatggcaagttctaaatgaattcctggcagagcaatggattctgtgattgactatgtggtggtagttgttgctaagaaggatgctattggtaatccttttctacctatacttcttccattggctcagaatgaagcaaggcatgtgctgctttcttatatgtcatttatgccataaatcccattgttagaaggtaatgcttctaacggattccattcatgcttttgagataaatggcaattgactttcttattgatcacatggaaaagctgttaccctgaaaccctttccctgaagatcacttcttcccctaatgtgcatttggctggaatatggttgtctcagaataacatcatgcactcgggcttttatacttctgccctttagggggactgtggcagcatggcatgggtcaagaagtacttctccttcatcttcctttgatgtcggtaactcatcctttctggcactgcgggagttgttaatgcttttgggtcctccaagttcaccatggctggattgcttaagaagaaaatgagccatggagtgaacccaaagctgctgaaacattctgcgtttatgcaaactttccttgccctctatacaaggaagatgggtttcattgtcttgtctagagaataaagtctttttttaaaataaaatcggtgtatccctgaccaagcgtccattaacactttgacaattgctcaaactgcatggtcacagcagcctcagctcataccagccatccaatgcaaggaaggacaacaccaagcccagaggacagttcctggactgatttcttcaacccaatctcacaccccatgggacgaggtcatcaagcaggaagaaggatggatatggactccagtcatagtacaacgcttcagcctactgcaagtccaaacacagggtttgg

SEQ ID NO: 7659 - DNA, 426 bp, Homo sapiens
agctattccaaaccacaaagatccagaaagtacacaattctcccaccactggtatcttactgactggaagtctggtgacacctaccaatccctgtccagctccagcactgccactggcaccacagtcattgagtgcacccaagttcagggcagctcagagtctcttgcctcaccttccacctccagagccactacaccttcccaactctccattgaagtggaggccagggagatatcatccccgggaaggccccctggactgatgtcaccctccagtggctactccagccagtcggaaacaccaacacccactgtttccatgtccctgaccctgggccacttaccccctccaagcagcagtgtccgggtacgtccagtggtacctgagaggaagtcatcactacccccgacgtcaccaatggagaa

SEQ ID NO: 7660 - DNA, 407 bp, Homo sapiens
  misc_feature (1)...(407): n = a,t,c or g
gataaagagattttttcaaaaagttttctttctcattttattttacttcatatttcaggttccctccctaaagtacatccacgttatgatttagacggggatgctagcatggctaagggtagtatttaatttaattactatgtaaacatctgaatttaatgtatcctatcaatagtggaagcaataacatgtattgtggcttcatgtatgcctatatgacttaggaaattattcacttaaattgataccctttccaagtgattttgggggctttcttttttactttttatcctttcttgaattcattatataagaaaattctctccattgagatagtgcatgtttagataatgttaaggagaacatatttattatatttatatctattcttaactcttagaaattgn

SEQ ID NO: 7661 - DNA, 514 bp, Homo sapiens
  misc_feature (1)...(514): n = a,t,c or g
ntagatcgcctgcggtatcgagtcccgaattnccgccggtacccaattcctcgcgtcgacccacgcgtccgcccacgcgtccgaggacttcttatgaaaaacagggatatctgcttctaccacctgtattcagcattgtactagaggttcttgccagggcaattagtcaagaaactgaaataaaaagtgtccaaatgggaaaggaagaagtaaaactgtctttagtttgtgtgtgtgtatatttatgcatgagaaaatcctgtggaatccaccaaaannnnnnnnnnnnnnnnnnnnnnnnnnnnnnnnnnnnnnnnnnnnnnnnnnnnnnnnnnnnnnnnnnnnnnnnnnnnnnnnnnnnnnnnnnnnnnnnnnnnnnnnnnnnnnnnnnnnnnnnnnnnnnnnnnnnnnnnnnnnnnnnnnnnnnnnnnnnnnnnnnnnnnnnnnnnnnnnnnnnnnnnnnnnnnnnnnnnnnnnnnnnnnnnnnnnnnnnnnnnnnnaagggcattggaat

SEQ ID NO: 7662 - DNA, 779 bp, Homo sapiens
  SIMILAR (189)..(779): 891254mologous to Mus musculus putative,accession number AK011690,Smith-Waterman Score=888.
gcggaaccgctccggaatttccgggtcgacgatttcgtggaaaactgagcgtgggcctcagaaagattttaaggcacttttgagccgggcaactgccctcgttccgcgccgggggagcgattaaagtgaagaaacaatggccagcattcacaaatcttcagcagctcgccctgtttcaagaggtggagttgggttaacaagaaaggcttccttctgggatacgacccctatcaggaaatattcgagtggcaactgcaatgccacctgggacagcaagaccaggttctcgtggttgtcccatagggactggtggagttctgtcttctcaaatcaaagttgcccatcgccctgtaacacaacaaggtttgactggaatgaaaactgggacgaaaggtccccagaggcaaattttagacaaatcttactatcttgggcttcttagaagtaaaataagtgaacttacaactgaagttaataaacttcagaagggaatagaaatgtacaatcaagagaattcagtatatttgtcatatgaaaagagggctgagactttagctgttgagataaaagagcttcaaggacaactagcagactacaacatgttggtagataaacttaataccaacactgaaatggaagaagtaatgaatgattacaatatgcttaaagctcaaaatgatcgagaaacacaaagtttggatgtcatatttactgaaagacaagcgaaagaaaaacaaatcagaagtgtcgaagaagaaattgaacaggaaaaacaagcg

SEQ ID NO: 7663 - DNA, 441 bp, Homo sapiens
  SIMILAR (1)..(441): 471254mologous to Homo sapiens DOCK180 protein,accession number D50857,Smith-Waterman Score=346.
gcatatgtgaaactctccaaggtactgaacttctatgtggctaatgcagatgactccagcaagactgaactgctttttgctgcgttgaaagccttgaagtacttgtttagattcatcatccaatcccgagtgctctacttgagattttatgggcagagcaaagatggagatgagtttaataattcaattcgccagttatttcttgctttcaatatgctgatggacaggcctctggaggaagccgtcaagatcaagggggcagctttgaagtaccttcctagcataattaatgatgtcaaacttgtatttgatcctgttgagctcagcgtgctcttctgcaaattcattcaaagcattcctgacaaccagctggttcggcagaaacttaactgcatgaccaagatagtagagagcactctttttcgacagtcagagtgcaaa

SEQ ID NO: 7664 - DNA, 700 bp, Homo sapiens
  SIMILAR (219)..(386): 941254mologous to Homo sapiens Human secreted protein, SEQ ID NO: 4677,accession number AAG00596,Smith-Waterman Score=288.
cttcccgggtcgacgatttcgtagacccggtcaccagcaaccatgacggaccagcatgctgaggccaggtcctacctcagcgaacagatgatcgctgagttcaaggctgcctttgacatgtttgatgctgatggtggtggggacatcagcgtcaaggagttgggcacggagatgaggatgctgggccagacaccactccagccatcatcatcaccaccatggacaagttcaacgtcaccaagcctgtggagtacctcatcaaccccatcatcacccagttcttccccaccctgctgctgtggtgcttctcggccctccttcccaccatcgtgtactactcaggcttctttgaagaccactggacacgctctggggagaacaggacaaccatgcacaagtgctacactttgctcatcttcatggtgctgctcctaccctcgctgggactgagcagcctggacctcttcttccgctggctctttgataagaaattcttggctgaggcagctattcggttagagagtgggttcctgcccaacaacggtgccttcttaaagaactacgtcattgcctcaccctttatcggcaacgccatggacctgctgcgcatcccaggcctgctcatgtacatgatccggctctgcctgacgcgctcggccgccgagaggcgcaacgtgaaacggcatcaggcctacgagtt

SEQ ID NO: 7665 - DNA, 765 bp, Homo sapiens
  SIMILAR (489)..(277): 471254mologous to Homo sapiens Human secreted protein, SEQ ID NO: 7982,accession number AAG03901,Smith-Waterman Score=103.
tatttggaacatttgcttttattcccttccagacaaagacccacaaggggttcgcgccctccctggtggggaacccggcaagggcggaagtctccaacaccctagggaacacgcgaatcttggtagaggcggactgtcccactcccttactggcacgccctccaatcaatcttcaaggaactcgttcaaaagtcaaatgcggccgttcgtttgttcttgtcgccggtcttttcaatcagaagaattcgaatcttccttcgtcggtcaaggtgcttccccggaaggcccctgaaaaatcttaagccaagccttcttccgggttcgaatgtagccgttctgcattcctgtccaaagaatgcggaaagcaactcgggccaagctcctcctcggctctttccctttcggggtccttctttcatcttggcgcaccatcatgaccaagaactcctcggaagtcggatggtgcccgctgccgtcctcatccaccttcctcgatgattggcgtccagctcctccttggtgggtgtctggcccagcatcctcatcaccgtgcccaactccttgacgctgatgtccccaccaccatcagcatcaaacatgtcaaagggcagccttgaactcagcgatcatctcttcgctgaggtaggacgtggcactcagcctgctggtccgtcatggttcctggtgcccgggactcctctgttgcaggtcgcatccttatgcactccaccacccaaagatgacctggcctgctctagccaccgg

SEQ ID NO: 7666 - DNA, 448 bp, Homo sapiens
  SIMILAR (165)..(446): 641254mologous to Homo sapiens Human secreted protein, SEQ ID NO: 5907,accession number AAG01826,Smith-Waterman Score=273.
cctccactgctgtcctcttcagctcaagatggtggcctgccgggcgattggcatcctcagccgcttttttgccttcaggttcctccgctcccgaggttatatatgccgcaattttacagggtcttctgctttgctgaccagaacccatattaactatggagtcaaaggggatgtggcaggcgctcgaatgtaactctaccaattcaaaggtaaatacactgattacagagctacaatcacagttctcacaagttatgaatgaaatattgtctagttatcaaatcagaagagccgtccttatctcatcaaagcctggctgttttattgcaagttctgatatcaacattttaaccgcttgcatgactctttaagaagtatcacatcgatcatctgaagcacagattatagtgcagaaacttgaaatgaccacactgtctattgtggctgg

SEQ ID NO: 7667 - DNA, 761 bp, Homo sapiens
  SIMILAR (11)..(556): 931254mologous to Homo sapiens ASPL,accession number AF324219,Smith-Waterman Score=883.
tttcgtgaaaatggcggccccggcaggcggcggaggctccgcggtgtcggtgctggccccgaacggccggcgccacacggtgaaggtgacgccgagcaccgtgctgcttcaggttctggaggacacgtgccggcggcaggacttcaacccctgtgaatatgatctgaagtttcagaggagcgtgctcgacctttctctccagtggagatttgccaacctgcccaacaatgccaagctggagatggtgcccgcttcccggagccgtgaggggcctgagaacatggttcgcatcgctttgcagctggacgatggctcgaggttgcaggactctttctgttcaggccagaccctctgggagcttctcagccattttccacagatcagggagtgcctgcagcaccccggcggggccaccccagtctgcgtgtacacgagggatgaggtgacgggtgaagctgccctgcggggcacgacgctgcagtcgctgggcctgaccgggggcagcgccaccagtcaggtttgtcatgaagtgctacgaccccgtgggcgaagaccccaggaagcctgggctcgtcagcgtcggctggccaggcagccgccagcgctccacttcccttggaatctggggagctcagccgcggcgacttgagccgtccggaggacgcggacacctcagggccctgctgcgagcacactcaggagaagcagagcacaagggcacccgcagctgccccctttgttcctttctcgggtgggggaca

SEQ ID NO: 7668 - DNA, 257 bp, Homo sapiens
  SIMILAR (149)..(256): 861254mologous to Mus musculus putative,accession number AK014638,Smith-Waterman Score=147.
attataacactttttaaggagctgttatagttgaaataaactaatttgaaatcatgtaaatttttgttgtttttgctgttttagtgacagaggagagataaaactggggataaacgtaattaaacgtattcatgtaattaggaaaatcttttttccttttagaactgaagctagtttagcctcacgcagagaacaaaagagagagcagtatcgtcaggtaaaagcacatgttcagaaggaagaccgtagagtgcagg

SEQ ID NO: 7669 - DNA, 179 bp, Homo sapiens
  misc_feature (1)...(179): n = a,t,c or g
cggccgcgtcgacctctaannnnnnnnnnnnnnnnnnnnnnnnnntggaagaggatgaactgtttcaagttcaggagaaaggtgaactctgaaatgagtctacttttaatgttttccagcagcaccagatgaagacagtacaaccaatataacaaaaaagcagaagtggactgtagaag

SEQ ID NO: 7670 - DNA, 571 bp, Homo sapiens
  SIMILAR (313)..(567): 851254mologous to Homo sapiens uridine phosphorylase,accession number X90858,Smith-Waterman Score=376.
  misc_feature (1)...(571): n = a,t,c or g
ctaatgaagancccttgcgnannnnngctannggccanacctttcgtannancngcncgacccacgcgnncgngagagccgtcccttcgtccggccctggagcattgcgtttgtcgccggtgtcgcaatgcgaggatggcgccgcgggtgtagcggctctctgcgcaggccgagtgggcttggtgaggtgactcgcggtcgcgggtgactcgccggcaggacactgcctggaacgcctggagcgcctcccactgcagacgtctgtccgcctccagccgctctcctctgacgggtcctgcctcagttggcggaatggcggccacgggagccaatgcagagaaagctgaaagtcacaatgattgccccgtcagacttttaaatccaaacatagcaaaaatgaaagaagatattctctatcatttcaatctcaccactagcagacacaatttcccagccttgtttggagatgtgaagtttgtgtgtgttggtggaagcccctcccggatgaaagccttcatcaggtctggagcccggcactgtggtcataacagagcaggcagtggatacctgg

SEQ ID NO: 7671 - DNA, 509 bp, Homo sapiens
  SIMILAR (5)..(112): 911254mologous to Homo sapiens uridine phosphorylase,accession number X90858,Smith-Waterman Score=166.
ttttgtcgaccttttaatttcaaacatagcaaaaatgaaagaagatattctctatcatttcaatctcaccactagcagacacaatttcccagccttgtttggagatgtgaaggtaagaggccaggtgttgacaccttggaatttggcttaagatcaacctccccctatattatacaggtatgaccaacccacaaatgcttgagagaccacagctgacaggtttatgaagacataatgtttaccacacttttgcaagattttaactttcaagtatgcgaactatcaagtaaaactatcctaagtagtgccaaattgttccctaattcatcttttgcaaatatagtgcagtcatgcattgtttaactctggaaatacggtccgagaaatgcagccttaggtattttatcattgtgtggacaacatagagcgtatccacactaacctaggtggtagagcctactacttgcctgggccatattgctctaagctacaaacccttttagcatgtg

SEQ ID NO: 7672 - DNA, 857 bp, Homo sapiens
  SIMILAR (353)..(568): 791254mologous to Homo sapiens uridine phosphorylase,accession number X90858,Smith-Waterman Score=271.
  misc_feature (1)...(857): n = a,t,c or g
attcgagtgctccggagaacagacccgcgccccgccgtccgcgagcctcccgagagccgtcccttcgtccggccctggagcattgcgtttgtcgccggtgtcgcagtgcgaggatggcgccgcgggtgtagcggctctctgcgcaggccgagtgggcccagagaagcgaggaactccccagatcgccgacacgtctcgtctcctgtcccaattcagggcttggtgaggtgactcgcggtcgcgggtgactcgccggcaggacactgcctggaacgcctggagcgcctcccactgcagacgtctgtccgcctccagccgctctcctctgacgggtcctgcctcagttggcggaatggcggccacgggagccaatgcagagaaagctgaaagtcacaatgattgccccgtcagacttttaaatccaaacatagcaaaaatgaaagaagatattctctatcatttcaatctcaccactagcagacacaatttccccaggccntgtttggagatgttgaagtttgtgtgtggttggtggaagcccctcccggaatgaaaagccttcatcagggtgccgtttgggtgcaagagctgggccttgactgcccaggtagagactatcccaacatctgtgcgggaactgaccgctatgccatgtataaagtaggaccggtgctgtctgtcagtcatggtatgggcattccttctatctcaatcatgttgcatgagctcataaagctgctgtactatgcccggtgctccaacgtcactatcatccgcattggcacttctggtgggataggtctggagcccggcactgtggtcataacagagcaggcagtggatacctgcttcaaggc

SEQ ID NO: 7673 - DNA, 744 bp, Homo sapiens
  SIMILAR (28)..(714): 1001254mologous to Homo sapiens MHC cell surface glycoprotein,accession number M60333,Smith-Waterman Score=1209.
actcccaaaagagcgcccaagaagaaaatggccataagtggagtccctgtgctaggatttttcatcatagctgtgctgatgagcgctcaggaatcatgggctatcaaagaagaacatgtgatcatccaggccgagttctatctgaatcctgaccaatcaggcgagtttatgtttgactttgatggtgatgagattttccatgtggatatggcaaagaaggagacggtctggcggcttgaagaatttggacgatttgccagctttgaggctcaaggtgcattggccaacatagctgtggacaaagccaacttggaaatcatgacaaagcgctccaactatactccgatcaccaatgacaagttcaccccaccagtggtcaatgtcacgtggcttcgaaatggaaaacctgtcaccacaggagtgtcagagacagtcttcctgcccagggaagaccaccttttccgcaagttccactatctccccttcctgccctcaactgaggacgtttacgactgcagggtggagcactggggcttggatgagcctcttctcaagcactgggagtttgatgctccaagccctctcccagagactacagagaacgtggtgtgtgccctgggcctgactgtgggtctggtgggcatcattattgggaccatcttcatcatcaagggattgcgcaaaagcaatgcagcagaacgcagggggcctctgtaaggcacatggaggtgatggtgtttctta

SEQ ID NO: 7674 - DNA, 382 bp, Homo sapiens
  SIMILAR (2)..(37): 831254mologous to Felis catus MHC class II antigen,accession number U51576,Smith-Waterman Score=58.
cttggatgagcctcttctcaagcactggggtatggaccaacactcaatctcctttatttcaaggtttcctcctatgatgcttgtgtgaaacttggggttctaactgtttcataatatctgctacaattaatataactgtcttctcctactatccagcttccgcctttttttaatctgtaattctctcaatacatcattctgtcttcctcttctttaatctatgaataacttttctctttattaagaaccctacatttgattctgagtgttacttcttcccacactcattaccatgtactctgccttatttccccccagagtttgatgctccaagccctctcccagagactacagagaacgtggtgtgtgccctgggcctgat

SEQ ID NO: 7675 - DNA, 1302 bp, Homo sapiens
  SIMILAR (65)..(829): 751254mologous to Homo sapiens cell surface glycoprotein,accession number M60334,Smith-Waterman Score=924.
  misc_feature (1)...(1302): n = a,t,c or g
attcttgtctgttctgcctcactcccgagctctactgactcccaaaagagcgcccaagaagaaaatggccataagtggagtccctgtgctaggatttttcatcatagctgtgctgatgagcgctcaggaatcatgggctatcaaagaagaacatgtgatcatccaggccgagttctatctgaatcctgaccaatcaggcgagtttatgtttgactttgatggtgatgagattttccatgtggatatggcaaagaaggagacggtctggcggcttgaagaatttggacgatttgccagctttgaggctcaaggtgcattggccaacatagctgtggacaaagccaacctggaaatcatgacaaagcgctccaactatactccgatcaccaatgtacctccagaggtaactgtgctcacgaacagccctgtggaactgagagagcccaacgtcctcatctgtttcatcgacaagttcaccccaccagtggtcaatgtcacgtggcttcgaaatggaaaacctgtcaccacagggggtttcagagacatgttttcctgcccaggggaagaccactttttccggcaagttccactatctccccttccctgccctcaactgaggacgtttaacgactgcaggggtggagcactggggcttggatgagcctcttctcaagcactgggagtttgatgctccaagccctctccgcagagactacagagaacgtggtgtgtgccctgggccttgactgtgggtctggtgggcatcattattgggaccatctttcatcattcaagggagttgcgcaaaagcaattgcaggcagaaacgcaaggggggcctctgtaaggcacaatggaggtgatggatgttttcttagagagaggatcacttgaagaaacttctgctttaatggctttacaaaagctgggcaatatttacaattccttgacctcaagtgaaagcaagtcatcttcaagcgttttccagcccctataaggccacccccaagtgtggttatgcctccctttcctttctccggggagaatntggctccccgtactctaacaatcttagctgggcttcccctgtctaattgcctttttcctgtatctaatttcctctaatttccctatcaatttattatcaccatgcaatgcctctggaataaaaacatacaggagtctgtctctgctatggaatgccccatggggcatctcttgtggacttattgtttaaggtttccctcaaactgtgatttttctgaacacaataaactattttgatgatcttgggtggaaaaaa

SEQ ID NO: 7676 - DNA, 223 bp, Homo sapiens
tattaataattctctatttattaaaaagggtcctacagctttacagccacagcaccggacacggccctggacagcgacggcgagcccggccaggggccgctttgcaacttcaatgccaagctcacgtctggctgcgaccgtggcaggctgtggcatccccgacagcggccggccggcgcccactcgagattcacagaacatggcaagcccgcctgactggcat

SEQ ID NO: 7677 - DNA, 432 bp, Homo sapiens
  SIMILAR (96)..(395): 981254mologous to Homo sapiens COBW-like protein,accession number BC005996,Smith-Waterman Score=500.
  misc_feature (1)...(432): n = a,t,c or g
tttcgtgccgggagtnnnncctgggcgtgcgcggctgcggtacggcgtgttggtcccagcggttcagctgaggtagggacgtgctgtaggccggaatgttaccggctgttggatctgtggatgaggaagaggatcctgcggaggaagattgtcctgaattggttcccattgagacgacgcaaagcgaggaggaggaaaagtctggcctcggcgccaagatcccagtcacaattatcaccgggtatttaggtgctgggaagacaacacttctgaactatattttgacagagcaacatagtaaaagagtagcggtcattttaaatgaatttggggaaggaagtgcgctggagaaatccttatctgtcagccaaggtggagagctctatgaagagtggccttagagctattgagaatttgatgcanaagaagggg

SEQ ID NO: 7678 - DNA, 3252 bp, Homo sapiens
  SIMILAR (52)..(1203): 1001254mologous to Homo sapiens HIP1R,accession number AB013384,Smith-Waterman Score=1906.
atggagctatccgtcacccttgtcagtcgggcacctcgtcctgggctcccagttttccgacagctcaacacggccatcgccgtatcccagatgtcctcaggccagtgccgcctggcccccctcatccaggtcatccaggactgcagccacctctaccactacacggtcaagctcctgttcaagctacactcttgtctccctgcggacaccctgcaaggccacagggaccggttccacgagcagtttcacagcctcaggaacttcttccgcagagcctccgacatgctgtacttcaagcggctcatccagatcccccggctgcccgagggaccccctaacttcctgcgggcctcagccctggctgagcacatcaagccggtggtggtgatccccgaggaggccccggaagatgaggagccggagaatctcattgagatcagcacagggccccccgcgggggagccagtggtggtggctgacctcttcgatcagacgtttggaccccccaatgggtctgtgaaggacgacagggacctccagattgagagcttgaagagagaggtggaaatgctccgctctgaactggagaagatcaagctggaggcccagcggtacatcgcgcagctgaagagccaggtgaatgcactggagggtgagctggaggagcagcggaagcagaagcagaaggccctggtggataatgagcagctccgccacgagctggcccagctgagggctgcccagctggagggcgagcggagccagggcctgcgtgaggaggctgagaggaaggccagtgccacggaggcgcgctacaacaagctgaaggaaaagcacagtgagctcgtccatgtgcacgcggagctgctcagaaagaacgcggacacagccaagcagctgacggtgacgcagcaaagccaggaggaggtggcgcgggtgaaggagcagctggccttccaggtggagcaggtgaagcgggagtcggagttgaagctagaggagaagagcgaccagctggagaagctcaagagggagctggaggccaaggccggagagctggcccgcgcgcaggaggccctgagccacacagagcagagcaagtcggagctgagctcacggctggacacgctgagtgcggagaaggatgctctgagtggagctgtgcggcagcgggaggcagacctgctggcggcgcagagcctggatgatttctcgcccacgagcaagctccagcgtttgctggcggaatctcgtcagatggtgacggacctggagctgagcacactgctgcccatcagccatgagaatctcactggcagtgccacaaatataaggaaatgctgcctgcagagctgcagccacggtctcatcgccaaaccttctgcaacccttattcagcatgtcctgctgttatttatagctgaaggaaccttgcgagtggaggggtcctacagctttacagccacagcaccggacacggccctggacagcgacggcgagcccggccaggggccgctttgcaacttcaatgccaagctcacgtctggctgcgaccgtggcaggctgtggcatccccgacagcggccggtgcggagattcagtgagcaacaacgcagccacaggtgtggcccagccacggcgctcttccaggccgcacgcgcccacccgccctcaccagggctgcagtggccggccatcagcatcagcaaagccatcaacacccaggaggcccccgtgaaggagaagcacgcccggcgtatccttggccggctcttggacccaggagttgggcatcattctgggcacacaccacgagaagtgggcttcaccttctggtctacgccattgggctgccgctgcccagcagtccattctcagctggagttctgtcacgtcctcaaaggtcctcgagagtgcacccatggctgcctgatgccccagcagcacgtatgttgcttccgcaactccccagccgcaatggttcagcctcagcgtcttctccactccaggacacgcactgtaggcacaggcctgctcagcccagccaaccttcccaatcctcagaggatccccaaaagaatgccccctgcccctcctggggaccctgcacctccagggataggtaatggggcctgccccctccaaagcatggcaggccccagcgggtacatccaggatacaggttcagccatctcttccatccagcagacgagcaccccacagtgctccagagagaaccaggccaaggccctctgcccaccagggacatctctaactcctgaggtcttgcagtgcatccagattgcaggccccccagggctctcaggccttactgtgtgtgtgctcaaaatgcagacctccagtcctgattcttcagcagcaggtctgggggagcccaggaacctgcgccctgccacaggctctctaaccaccgaggtgcccgggctgtggtcttgccacatttcccaactcgagtctcaggagcaggagctgcggcagaggctactggacgagcagttctcagtgttccggggcgctgctgccgaggccgcagtgatcctgcaggatgccgtgagcaagctggacgaccccctgcacctgcgctgtaccagctccccagactacctggtgagcagcgcccaggaggccttggatgccgtgagcaccctggaggagggccacgcccagtacctgacctccttggcagacgcctccgccctggtggcagctctgacccgcttctcccacctggctgcggataccatcatcaatggcggtgccacctcgcacctggctcccaccgaccctgccgaccgcctcatagacacctgcagggagtgcggggcccgggctctggagctcatggggcagctgcaggaccagcaggctctgcggcacatgcaggccagcctggtgcggacacccctgcagggcatccttcagctgggccaggctgccgtggacggggggggacggaggctacccctgtctgactcccatcctcaccaggaactgaaacccaagagcctagatgtgcggcaggaggagctgggggccgtggtcgacaaggagatggcgccacatccgcagccattgaagatgctgtgcggaggattgaggatcctcaactcctgcacagacctgatgaaggtgaggggctgtgacccgggggggtctgcacctggagggccaccagtcattgctgtcttggtctcggcaggctatccggctcctggtgacgacatccactag

SEQ ID NO: 7679 - DNA, 4457 bp, Homo sapiens
  SIMILAR (12)..(2243): 901254mologous to Rattus norvegicus huntingtin interacting protein 1 related,accession number AB005052,Smith-Waterman Score= 3421.
gtgagtcgcgcggacggagccggacaaaagcgggcggcggcggcaggatgaacagcatcaagaacgtgccggcgcgggtgctgagccgcaggccgggccacagcctggaggccgagcgcgagcagttcgacaagacccaggccatcagcatcagcaaagccatcaacacccaggaggcccccgtgaaggagaagcacgcccggcgcatcattctgggcacacaccacgagaagggggctttcaccttctggtcctatgccattgggctgccgctgcccagcagctccattctcagctggaagttctgccacgtcctccacaaggtccttcgagacgggcaccccaatgtgctgcatgactgccagcggtaccgcagcaacatccgggagattggagacctgtggggacatttgcatgaccgctacggacagctggtgaatgtctacaccaagctgctgctgaccaagatctccttccacctcaagcatccccagtttcccgcgggcctggaggtgacagatgaggtactggagaaggcagctgggaccgatgtcaacaacatcttccagctcactgtggagatgtttgattacatggattgtgagctgaagctttctgaatcagttttccgacagctcaacacggccatcgccgtatcccagatgtcctcaggccagtgccgcctggcccccctcatccaggtcatccaggactgcagccacctctaccactacacggtcaagctcctgttcaagctacactcttgtctccctgcggacaccctgcaaggccacagggaccggttccacgagcagtttcacagcctcaggaacttcttccgcagagcctccgacatgctgtacttcaagcggctcatccagatcccccggctgcccgagggaccccctaacttcctgcgggcctcagccctggctgagcacatcaagccggtggtggtgatccccgaggaggccccggaagatgaggagccggagaatctcattgagatcagcacagggccccccgcgggggagccagtggtggtggctgacctcttcgatcagacgtttggaccccccaatgggtctgtgaaggacgacagggacctccagattgagagcttgaagagagaggtggaaatgctccgctctgaactggagaagatcaagctggaggcccagcggtacatcgcgcagctgaagagccaggtgaatgcactggagggtgagctggaggagcagcggaagcagaagcagaaggccctggtggataatgagcagctccgccacgagctggcccagctgagggctgcccagctggagggcgagcggagccagggcctgcgtgaggaggctgagaggaaggccagtgccacggaggcgcgctacaacaagctgaaggaaaagcacagtgagctcgtccatgtgcacgcggagctgctcagaaagaacgcggacacagccaagcagctgacggtgacgcagcaaagccaggaggaggtggcgcgggtgaaggagcagctggccttccaggtggagcaggtgaagcgggagtcggagttgaagctagaggagaagagcgaccagctggagaagctcaagagggagctggaggccaaggccggagagctggcccgcgcgcaggaggccctgagccacacagagcagagcaagtcggagctgagctcacggctggacacgctgagtgcggagaaggatgctctgagtggagctgtgcggcagcgggaggcagacctgctggcggcgcagagcctggtgcgcgagacagaggcggcgctgagccgggagcagcagcgcagctcccaggagcagggcgagttgcagggccggctggcagagagggagtctcaggagcaggggctgcggcagaggctgctggacgagcagttcgcagtgttgcggggcgctgctgccgaggccgcgggcatcctgcaggatgccgtgagcaagctggacgaccccctgcacctgcgctgtaccagctccccagactacctggtgagcagggcccaggaggccttggatgccgtgagcaccctggaggagggccacgcccagtacctgacctccttggcagacgcctccgccctggtggcagctctgacccgcttctcccacctggctgcggataccatcatcaatggcggtgccacctcgcacctggctcccaccgaccctgccgaccgcctcatagacacctgcagggagtgcggggcccgggctctggagctcatggggcagctgcaggaccagcaggctctgcggcacatgcaggccagcctggtgcggacacccctgcagggcatccttcagctgggccaggaactgaaacccaagagcctagatgtgcggcaggaggagctgggggccgtggtcgacaaggagatggcggccacatccgcagccattgaagatgctgtgcggaggattgaggacatgatgaaccaggcacgccacgccagctcgggggtgaagctggaggtgaacgagaggatcctcaactcctgcacagacctgatgaaggctatccggctcctggtgacgacatccactagcctgcagaaggagatcgtggagagcggcaggggggcagccacgcagcaggaattttacgccaagaactcgcgctggaccgaaggcctcatctcggcctccaaggctgtgggctggggagccacacagctggtggaggcagctgacaaggtggtgcttcacacgggcaagtatgaggagctcatcgtctgctcccacgagatcgcagccagcacggcccagctggtggcggcctccaaggtgaaggccaacaagcacagcccccacctgagccgcctgcaggaatgttctcgcacagtcaatgagagggctgccaatgtggtggcctccaccaagtcaggccaggagcagattgaggacagagacaccatggatttctccggcctgtccctcatcaagctgaagaagcaggagatggagacgcaggtgcgtgtcctggagctggagaagacgctggaggctgaacgcatgcggctgggggagttgcggaagcaacactacgtgctggctggggcatcaggcagccctggagaggaggtggccatccggcccagcactgccccccgaagtgtaaccaccaagaaaccacccctggcccagaagcccagcgtggcccccagacaggaccaccagcttgacaaaaaggatggcatctacccagctcaactcgtgaactactaggccccccaggggtccagcagggtggctggtgacaggcctgggcctctgcaactgccctgacaggaccgagaggccttgcccctccacctggtgcccaagcctcccgccccaccgtctggatcaatgtcctcaaggcccctggcccttactgagcctgcagggtcctgggccatgtgggtggtgcttctggatgtgagtctcttatttatctgcagaaggaactttggggtgcagccaggacccggtaggcctgagcctcaactcttcagaaaatagtgtttttaatattcctcttcagaaaatagtgtttttaatattccgagctagagctcttcttcctacgtttgtagtcagcacactgggaaaccgggccagcgtggggctccctgccttctggactcctgaaggtcgtggatggatggaaggcacacagcccgtgccggctgatgggacgagggtcaggcatcctgtctgtggccttctggggcaccgattctaccaggccctccagctgcgtggtctccgcagaccaggctctgtgtgggctagaggaatgtcgcccattactcctcaggcctggccctcgggcctccgtgatgggagccccccaggaggggtcagatgctggaaggggccgctttctggggagtgaggtgagacatagcggcccaggcgctgccttcactcctggagtttccatttccagctggaatctgcagccacccccatttcctgttttccattcccccgttctggccgcgccccactgcccacctgaaggggtggtttccagccctccggagagtgggcttggccctaggccctccagctcagccagaaaaagcccagaaacccaggtgctggaccagggccctcagggaggggaccctgcggctagagtgggctaggccctggctttgcccgtcagatttgaacgaatgtgtgtcccttgagcccaaggagagcggcaggaggggtgggaccaggctgggaggacagagccagcagctgccatgccctcctgctccccccaccccagccctagccctttagcctttcaccctgtgctctggaaaggctaccaaatactggccaaggtcaggaggagcaaaaatgagccagcaccagcgccttggctttgtgttagcatttcctcctgaagtgttctgttggcaataaaatgcactttgactgtttgttgtc

SEQ ID NO: 7680 - DNA, 1213 bp, Homo sapiens
  SIMILAR (1)..(249): 621254mologous to Homo sapiens testis-specific protein TSP- NY,accession number AY009105,Smith-Waterman Score=220.
agcaagtcggagctgagctcacggctggacacgctgagtgcggagaaggatgctctgagtggagctgtgcggcagcgggaggcagacctgctggcggcgcagagcctggatgatttctcgcccacgagcaagctccagcgtttgctggcggaatctcgtcagatggtgacggacctggagctgagcacactgctgcccatcagccatgagaatctcactggcagtgccacaaatataaggaaatgctgcctgcagagctgcagccacggtctcatcgccaaaccttctgcaacccttattcagcatgtcctgctgttatttatagctgaaggaaccttgcgagtggaggggtcctacagctttacagccacagcaccggacacggccctggacagcgacggcgaagcccggccaggggccgcttttgcaacttcaatgccaagctcacgtctggctgcgaccgtggcaggctgtggcatcccccgacagcggccggtggcgggaggttatgggggcgggtggcaccgctgcactcgagattcacagaacatgggcaagccccgcctgactgggcatgggcagttgaatcgtcctgttacagcttcatttcctttaagaaaacagttaacagtaggagtttcaagtccccaggagcagggaatgtatggtcactgaggacaaaagggcagtggcctggccccgtggccgaggaccccgctttcagtttcttgccttctgttcaccctgggcggctaaggcaaaggtcgggggccctggaatgcccgacaagtgacaggggaggggcgggccagaaggtccactggtaaagcacctcggccttttccgtcaacaggtgccactgccccctggctgggccctgggctttcagcacacatgggcacgtgaaagatgaggtcccacaggggttggggggaaagagcaggtgcagaacggttggagtgcagccccgttccttcaattcccatggggccgggctttcctacaaccccatagcgtgccccaccctgaggcccagccaccagccaaccagggtcagtgtattttgtataaaagtaccgtgggtcaagccccccgcacgtttaagccacgtgtgacggggcaatgaacttgggctggccgttcagagaaagcagcgccggggccttgtccagcccttagcaggtgtcagtcacggcccatcggcaaagtaagg

SEQ ID NO: 7681 - DNA, 393 bp, Homo sapiens
  SIMILAR (189)..(392): 941254mologous to Homo sapiens Human protease HUPM- 12,accession number AAY06443,Smith-Waterman Score=335.
  misc_feature (1)...(393): n = a,t,c or g
ctnnnnnnnnnnnnnnnnnnnnnnnnnnnnaggggacgcgggtgctgtccaccttctgtcggcacaggttggcgaggcttaatgactgcccagcccatgcagtccaagagtcccacagcccagcccatgcccaggctcatacactgcggggggtggcctctgccaggggaggctaggaaaccccagggggtttcaaagacaacctccacgctgtgatctgcttggctgaaaactcggtggggcccaatgcgacaaggccagatgacatccacctgctgttctcagggaagacggtggaaatcaacaacacggatgccgagggcacgctggtgctggcagatggcgtgccctatgcttgcaaggacctgggggccgacatcattctggacatgn

SEQ ID NO: 7682 - DNA, 400 bp, Homo sapiens
  SIMILAR (147)..(398): 821254mologous to Homo sapiens Human protease HUPM- 12,accession number AAY06443,Smith-Waterman Score=351.
  misc_feature (1)...(400): n = a,t,c or g
ctnnnnnnnnnnnnnnnnnnnnnnnnnnnnaggggacgcgggtgctggccaccttctgtccgcacaggttggcgaggcttcatgagtgcccagcccatgcagtccaagagtcccacagcccagcccatgcccaggctcatacactggggggggtggcctctgccaggggaggctaggaaaccccagggggtttcaaagacaacctccacgctgtgatctgcttggctgagaactcggtggggcccaatgcgacaaggccagatgacatccacctgctgcactcagggaagacggtggaaatcaacaacacggatgccgagggcacgctggtgctggcagatggcgtgtcctatgcttgcaaggacctgggggccgacatcattctggacatggccaccct

SEQ ID NO: 7683 - DNA, 473 bp, Homo sapiens
  SIMILAR (178)..(471): 821254mologous to Mus musculus putative,accession number AK009166,Smith-Waterman Score=403.
ttgatcccctcggaccgcccgttgatcgcgtcgacccacgcgtgcgctgacagcaacgatctgaaagtcattatcatctcggctgttgggcctgtgttttcttctgtgcatgacttaaaggagctgacagaggagcaaggccgtgattaccatgccgaagtatttcagacctgttccaaggtggccttggagatgctctttactggtgagcccatttctgcccaggaggccctgctccacgggctgcttagcaaggtggtgccagaggcggagctgcaggaggagaccatgcggattgctaggaagatcgcgtcactgagccgtccggtggtgtccctgggcaaagccaccttctacaagcagctgccccaggacctggggacggcttactacctcacctcccaggccatggtggacaacctggccctgcgggacgggcaggagggcatcacaggcttcctccagaagagaag

SEQ ID NO: 7684 - DNA, 1010 bp, Homo sapiens
  SIMILAR (971)..(642): 881254mologous to Mus musculus putative,accession number AK009166,Smith-Waterman Score=505.
tcaccagccttgcactgaggtcagcacctcagtcactctccattttgtcctttcccaatgaaattgtggcttttaatgtaggccaaatgctatgacaccaatatcaagtcacgaaagcagcctgtcacctgttgaagctgagaggcagtggtggctgggccagaggggaaggtgggctcctgggcgctgcccgtgggcctcactcctctgcctccactcacactggctcgtgtgaccagacaggttttctcttgtggaggaaggccgtgatgccctcctgcctgtcccgcagggccaggttgtccaccatggcctgggaggtgaggtagtaatccgtccccaggtcctggggcagctgtttgtagaaggtggctttgcccagggacacccccggacggctcagtgacgcgatcttcctagcgatccgcatggtctcctcctgcagctccgcctctggcccccccttgttaagcagcccgtggagcagggcctcctgggcagaaatgggctcaccagtaaggagcatctccaaggccacctttctaggcactgctcttgccaagacaaccccaggggtagaacagaagagcctgacgttcaccccaggagtggcaaaagaggtcttgtcgctcgcctcggcatatgtcgcagctggcaaccagttgacagccggcagccgtggccaggccattgaccatggcaatgacggggacggggtggttccggatgtgcatcatgaccttggaacaggtctgaaatacttcggcatggtaatcacggccttgctcctctgtcagctcctttaagtcatgcccagaagaaaacacaggcccctcagccgagatgataatgactttcagatcgttgctgtcagcgtcatgaagaatgtcactttggagagatttcagcattgcaagtgacaacgtgttcctcttcttgggattgctcaagacgatgttccttatgccgtccagcgaattccaccacatggcctagtgttctacgagggg

SEQ ID NO: 7685 - DNA, 399 bp, Homo sapiens
  SIMILAR (272)..(361): 1001254mologous to Homo sapiens Human ATP-binding cassette transport protein,accession number AAW89585,Smith-Waterman Score= 161.
attttttattcctctttaggctttttgtactatctttctattagtatttgatggtactactgatgtagcaagtgcagtttgactttcttcccttgttgcctaaagtagattttctaaagtatttgatttttcacccatcattcacgtacataacttcacgccaccatatttttgttaaaatcttttgaccgagatttgctgttgtgtattacaaactgtttgggaagaacaataactgtttcacgtttcttctttggacttccttttctagtattacaaatgcggcgcccagtttgctttggtaacccttggaacacttggtacatacacagcattcacagttgcagtcacacggtggaggtaatttattccctagaagccacataaaatttagaaatt

SEQ ID NO: 7686 - DNA, 488 bp, Homo sapiens
  SIMILAR (91)..(243): 1001254mologous to Homo sapiens COBW-like protein,accession number BC005996,Smith-Waterman Score=260.
ccggaatgttaccggctgggcgtgcgcggctgcggtacggcgtgttggtcccagcggttcagctgaggtagggacgtgctgtaggccggaatgttaccggctgttggatctgcggatgaggaggaggatcctgcggaggaggattgtcctgaattggttcccattgagacgacgcaaagcgaggaggaggaaaagtctggcctcggcgccaagatcccagtcacaattatcaccgggtatttagttattcagaggctgctctgctgagaagatgaacaaatttcttgtccaaaacaatgtatttcaaacgtgccgctcgggcctttcccgtattgctcactggtgctgggaagacaacacttctgaactatattttgacagagcaacatagtaaaagagtagcggtcattttaaatgaatttggggaaggaagtgcgctggagaaatccttagctgtcagccaaggtggagagctctatgaagagtgg

SEQ ID NO: 7687 - DNA, 412 bp, Homo sapiens
  SIMILAR (1)..(147): 951254mologous to Homo sapiens phosphomannose isomerase,accession number X76057,Smith-Waterman Score=248.
atctttggggagcttttgctatttctgcaccatcagtacccaggtgatatcggctgctttgccatctacttcctgaacctgcttaccctgaagcctggggaggccatgtttctggaggccaacgtaccccatgcctacctgaaaggaggtgagccacatttcagcagtgagccccactgccatccctgctgggccctgtttccctatctggacaaaggaaggagaagggtggtcaaggagacccccaaggaccttgcagctctgacctctgagggttcctgggctcagcaagcaacagctggtagggatgatgaatgcatttagcattgaacacgccttgaatcctgacaccaaccctgtgatgccatgctactctgattttaaggcctgcccgtcacgggtggaacccact

SEQ ID NO: 7688 - DNA, 344 bp, Homo sapiens
  misc_feature (1)...(344): n = a,t,c or g
tcggccccctcactgcaagcagctgcacccagttaacccccagctcctgacactgaccccacacccacctacccaggactcaccctgctcctcactaacccccgaactaactcaaccctgcctcccacactgcacctgccctcacgaccgaccccatcctcacccccatcaacatctctgcctccctccttggtcctagggttttttttaaaaattcaatcaggaaaacggagggcatacccagaacacttctgggtgcagaatggggagagaaaggctcagccatccgtccatgcccctgtgaattcagccagcgcttatgtcgacgcggccgcgaattccan

SEQ ID NO: 7689 - DNA, 412 bp, Homo sapiens
  SIMILAR (3)..(410): 911254mologous to Homo sapiens atypical PKC isotype-specific interacting protein short variant,accession number AF196186,Smith- Waterman Score=625.
acagtgcaaggcttcacacggtttatagagttccccgactgaaccacccgcctgaggagataggctgtcactcgagagtacctggtagcgcacacccctcggaaaaaccaccatccgctccagcctcggcacctcagaatgtatttagtacgactgtaagcagtggttataacaccaaaaaaataggcccgaggcttaatatccagcttaagaaaggtacagaaggtttgggattcagcatcacttccagagatgtaacaatagggggctcagctccaatctatgtgaaaaacattctcccccggggggcggccattcaggatggccgacttaaggcaggagacagacttatagagggaaatggagtagatttagtgggcaaatcccaagaggaagttgtttcgctgttgaa

SEQ ID NO: 7690 - DNA, 438 bp, Homo sapiens
  SIMILAR (10)..(438): 881254mologous to Homo sapiens unnamed protein product,accession number AK026000,Smith-Waterman Score=635.
agagtcgctatggcggcggtggattcggatgtctaatcgctgccgcgtggggggttccgctgctgcctctgccacgttactacagccaaccgacccagccttgatgcccacttgggaggcagaaagcaccggcacctggtagaactacgagctgcgagaaaggcccagggacttcgaagtgtgtttgtcagtggctttcccagggatggggattctgctcagctctctgagtacttcctagcatttggacctgtggccagtgttgtcatggacaaggacaagggagtgtttgccattgtggagatgggggacgtgggtgctcgagaggctgtcttgtcacagtcccagcacagcctgggaggacattcgctgcgtgtcccgccaccggagcaaaaggagtccagagccccgcctccaaatccccaaaggagcggcccc

SEQ ID NO: 7691 - DNA, 424 bp, Homo sapiens
  SIMILAR (2)..(424): 751254mologous to Homo sapiens coatomer protein,accession number U24105,Smith-Waterman Score=536.
cggacgcgtgggaaaacttcgcaagatgatgattattgctgagaacaaaaaggacatgagtgggcactatcagaatgccctatacttgggtgatgggtcaaatcgtgggcggatcctgaaaaactgtggacagaagtccctggcctatttcacaagtgctacccatggcttatatgaagacactgaaagcctaaaggagacatttgacccaaagaaggagacaatcccacacatttaccctaatgccaggctgctccagcctcctgcacctatattgccattggataccaactggactttattgactgtatccaacggattttttgaaggcaccattgcccgcaaagggaagggaggagtactggctgcttgcatagacattgtcactggatggtccataggctggcgaaggggagtcaaactg

SEQ ID NO: 7692 - DNA, 885 bp, Homo sapiens
agtgacctggaaacaagttctgatccagaaggtgaggattgggatgaggaagctgaggatgatggttttgatagtgatagctcactgtcagactcagaccttgaacaagaccctgaagggcttcacctttggaactctttctgcagtgtagatccttataatccccagaactttacagcaacaattcagactgctgccagaattgttcctgaagagccttctgattcagagaaggatttgtctggcaagtctgatctagagaattcctcccagtctggaagccttcctgagacccctgagcatagttctggggaggaagatgactgggaatctagtgcagatgaagcagagagtcttcaaactgtgggaacttcattctgttaattctggatggacccctacaaccctttaaattttaaggctccttttcaaacatcaggggaaaatgagaaaggctgtcgtgactcaaagaccccatcgtgagtccatttgtggccatttctgagtgtcacaccttactttcttgtaaggtgcagctgtagaaaagccaagaaagtgaatgtccagactcggtacagcgtgacgttctttctggaggaagacacacacatgtcaaaagaaaaaaggtaaccttccttgaagaagttactgagtattatataagtggtgatgaggatcgcaaaggaccatgggaagaatttgcaagggatggatgcagtgtccaaaaacgaattcaagaaacagaagatgctattggatattgcttgacatttgaacaccgagaaagaataggtaatagactccagggaacatgctgcaaaggacttaatgttctcaagcaatgttgagttggcagcctgtagtcctagctagcatacactacct

SEQ ID NO: 7693 - DNA, 697 bp, Homo sapiens
  SIMILAR (547)..(588): 571254mologous to Mus musculus ODZ3,accession number AF195418,Smith-Waterman Score=45.
  misc_feature (1)...(697): n = a,t,c or g
acccccggattgttcaagagccgcctgtccagtgttatgtagtggcaacgggcagtactccaagggccgctgcctgtgtttcagcggctggaagggcaccgagtgtgatgtgccgactacccagtgtattgacccacagtgtgggggtcgtgggatttgtatcatgggctcttgtgcttgcaactcaggatacaaaggagaaagttgtgaagaagcaccaagatacattccaaagaaggaaagnnnnnnnnnnnnggcagccactttgtttgtgtaggaaaaatatttagaaaaccaaaacccaaatggtggctacgggttatcttttggcccaggggggttactagaaacttttcttttttatttaacccctgagttttgcagggtttacttttgaaaccactttacatgacttttgtccttaggaaataattaaaattgtaaggatcttttgaaatattttaggccaaaccttttgataaaaacttggtttttttttattctgaaaatttttaaaaccaaacccaaaaaaggggtaggttaaagggaatattaagggtatttttccttcggggccttgacatacatgatgataggggattaaaactttaccctaggaggaggtttaacggtttttttggcaattgcccaaaatttccaaaggnnnnnnnnnnnnnnnnnnnnnnngggcccccgt

SEQ ID NO: 7694 - DNA, 533 bp, Homo sapiens
  SIMILAR (8)..(220): 981254mologous to Mus musculus ODZ3,accession number AF195418,Smith-Waterman Score=417.
  misc_feature (1)...(533): n = a,t,c or g
cgccgttccggattgttcaagagccgcctgtccagtgttatgtagtggcaacgggcagtactccaagggccgctgcctgtgtttcagcggctggaagggcaccgagtgtgatgtgccgactacccagtgtattgacccacagtgtgggggtcgtgggatttgtatcatgggctcttgtgcttgcaactcaggatacaaaggagaaagttgtgaagaagcaccaagatacattccaaagaaggaaagnnnnnnnnnnnnggcagccaccttgtctgggtggaaaaaatagttagaaaaccaaaacccaaatggtggctacgggttatctttgggcccaggggggttactaggacctttccttttttactaaacccctgatttttccagggttaacttttgaaacccttttacatgaactttggacctcttaggaaatttaaatttaaaattgttaaggaatccattaggaaataaattataaattcaaacaccctttgtgataaagacactgggcctttttttttaaaattcgg

SEQ ID NO: 7695 - DNA, 403 bp, Homo sapiens
caatggaagagttttgtggggcaattgtaggaagcagaatggagaccctgccttgaagatgtcatgtaaaaacataaagaatcacacatgtatacgtgcggcatacagacattcctcagccgaaaggaccccaaactggcttaatgaaatgtcaaattatatctttttaagtttaaactaaatgatagcgttttaccttggtcccttataaggaattacattaagtcaaatgttaatgaaaggtatatttctgtggggagggagacctgggaaataaggccaaggagatatgaattatacacctgtacttttgtgttttctttgaggaccattcagacaatccccttggtgcagccgtgacccttgcacatgagcttgggcacattttcggatggatatgaaa

SEQ ID NO: 7696 - DNA, 413 bp, Homo sapiens
  SIMILAR (275)..(3): 901254mologous to Homo sapiens SOCS box-containing WD protein SWiP-1,accession number AF072880,Smith-Waterman Score=429.
  misc_feature (1)...(413): n = a,t,c or g
gcattgttcaaccctgtagcaagaagtagctgatcttgtccaaatctgaagcgatgccattctatatttacacagcgactctgtttttctggaactgatgacccaaaagcaagactccagactatatctccacagtctataatatgttcacgaggcttatttttctgaccaccatcactattttgtcttggcaatcttaaactgcttgaattggtaacattcttggtgccatgcaagagacgatctctttctcgttgaccctcgggggaaagctggccatctatggggcaccgtctgattccgggaatacgatgcggacccaacaacagagaagagagtggcgaccgctgaggggcgtgacgccaagttggtccctcccgggcccagggacagaggagacgggcgggnnctnn

SEQ ID NO: 7697 - DNA, 868 bp, Homo sapiens
  SIMILAR (123)..(497): 421254mologous to Homo sapiens Human secreted protein, SEQ ID NO: 8022,accession number AAG03941,Smith-Waterman Score=133.
tacgtgcggtggaattccaggccccggccaggccgggagtggcgtgctgggcgtgcgcggctgcggttctgcgtgttggtcccagctggttcagctgaggtagggacgtgctgtaagccggaatgttaccggctgttggatctgcggatgaggaagaggaatcctgcggaggaggattgtcctgaatttggttcccattgagacgacgcaaagcgaggcaggaggaaaagtctggcctcggcgccccaagatcccccagtcacaattatccacccgggtatttagggtgcctggggaagaccaacacctcctgaacctatattttggaccagagcaacataggtaaaagagtagcgggccattttaaattgaatcctggggggaaggaagttgcgcctggagaaatccttaagctgtcagcccaaggtggaggagctctatgaaagagtggcctggaaccttagaaaccgggttgcctcctgcttgtttcagtgaaagtgaggaatgtgtttgactggtgtacatgggtttactgagaaatgttttatttgattgatgattttccagctttaattttcttggagtaatttaactgaatttacacagtttgcttcattgtattttcaaacaaatagaaaataaacttattaggaagcattttcttaaagtgtttcttgctgtcttttctatctgctctaatgttttggtccttttattgagtttttattgcttttgatgtcagggcttatttaatctctagtgcatgaaagtctcatatgtaaaaaatgattattgtgaatttaatctgtcattggtcatatttctaagtgttcaaccttataaaaaaaataaatgactatcaaaaaag

SEQ ID NO: 7698 - DNA, 409 bp, Homo sapiens
  SIMILAR (137)..(409): 971254mologous to Homo sapiens WSB1 isoform 2,accession number AF240696,Smith-Waterman Score=454.
gcggccgcccccgcccgtctcctctgtccctgggcccgggagggaccaacttggcgtcacgcccctcagcggtcgccactctcttctctgttgttgggtccgcatcgtattcccggaatcagacggtgccccatagatggccagctttcccccgagggtcaacgagaaagagatcggaaaactcctccttaacttggtagatcatactgaagtggtcagagatttaacttttgctccagatggaagcttgatcctggtgtcagcttcaagagacaaaactctcagagtatgggacctgaaagatgatggaaacatgatgaaagtattgagggggcatcagaaattggtgtacagctgtgcattctctcctgactcttctatgctgtgttcagtcggagccagtaaagca

SEQ ID NO: 7699 - DNA, 2109 bp, Homo sapiens
  SIMILAR (1642)..(710): 751254mologous to Homo sapiens WSB-1 protein,accession number AF112205,Smith-Waterman Score=1166.
ttttttttttagtagagacagggtttcatcatgtttgccaggctagtctcaaactgctgacctcaggtgatttgcccgcctcacccaattcaactttcgtaagtcagtatttaccatctaactcagtgtcccagaatttaaaatttccttgcactttacagcaaagatacatattgtggctctactgaagcaatatatacatgtcagaactaaaaatcagaaaagcaaaagggtccattcaacatatagcagcctatattctaaatatgtacaggtatgtatgttttcacagttagatctttaaaaaaatttatatttgatatgttcagaaatacttctattgtctataaataatattttaaaagctcaactgatccaaatgcagtacaagaacatatccaaattaaataaaccttctacgtctttaaaaacagataattgaagtcaagtaaagcttgaggtttgtgttaagtgtattctgtcagtccctactactagggaaggcagaatcttctaaatacgatacgagagaaactccaaaagcttggaaggaatcggcagctcctgaacttcttgggtgggcatcactcttcgggattgacatgcgacattaaatgttgcagggctagggacctgccgtggagtggcccaaaaatacacacttccgtcatgtgtcccagcagctaaaacactgccatcagtagagaaggcacagcaaagaccattgctcaaagggtgcaacttgcactggataatcctcatcaattctccagaacctcaccattttatcatcagcaaggcttgcaacatgcagtccatcatggctaaaagatacagatcgtacccaccggtcatttgctcctccagcaaatattggagtaggtgggggaaacaggtgaacaaattaacatcagaatgtctccattatgtggatcccagatatatactcgagtatcataagatgcagtagccagtaatgctccatcaggagaaaagtcacaagctacccacattcatggtgatgtccttctagtttccgtatcatggtgtatttatccatattccaaaggaaaactgctttactggctgcgactgaacacagcatataagagtcaggagagaatgcacagctgcacacccaattttgatgccccctcaatactttaatcatgtttccatcatctttcaggtcccatactctgagagttttgtcttttgaagctgacaccaggatcaagcttccatctggagcaaaagttaaatctctgaccacttcagtatgatctaccaagttaaggaggagctttcctgtatatacatcccatattttgatacgcccattgctcatccctggagcaagaagaagctgatcttgaccaaatctgaagcgatgccattctatatttacacagcgactctgtttttctgggaactgatgacccaaaagcaagactcccagactatatctcccacagtctaataatatgttcacgaagccttaatttttctgaccaccatcactattttgtcttggcaatcttaaactgcttgaattggtaacattcttggtgccatgcaagagaaagttctgaaggcactgggacccacggaacaagctttactgtgcgatgtccttgtgaccaagcaaagtatgaaccatctggagcaaaagcaacagtccaattttcacgaccacatttcttgtcaaaaggagctgcaggagctaaaagttcacctatagtacgtgatctcacgatctctttctcgttgaccctcgggggaaagctggccatctatggggcaccgtctgattccgggaatacgatgcggacccaacaacagagaagagagtggcgaccgctgaggggcgtgacgccaagttggtccctcccgggcccagggacagaggagacgggcgggggcggccgctgcggcttctgctaactgcctcgggaaagctcccgaaggcctcagaccaaagtacggagtcaaccacagacaatagaccctgtacccagcctcgcgcctgcggaggaagacagttcccctaaagcgccgactgcaaacgagacactggagtcaaaatggcgggcggcgccggagatatct

SEQ ID NO: 7700 - DNA, 4259 bp, Homo sapiens
  SIMILAR (1881)..(1327): 831254mologous to Homo sapiens SOCS box-containing WD protein SWiP-1,accession number AF072880,Smith-Waterman Score=805.
tttttctttttttttttttttttttttttttttttttttttttttttttttttttacaagtctttaattaaaaaactcaacaaaaatatataattgagcattttacataatgcatacattcttaatatctgcaggtaagataaacaacagaaggcaaaagcagatatgctgtattgcttctttggcaactcaccaatatcatcccctgcagaaacagagtttttttttttttctttaaatccatggtcttaaaataattgtcccttagtataaacaaaatatttagcaataatacagtagacggattcttcaaattcacaacaatttataatactttataccacaagggtaaactagtaagctgctttctaaaattaaggcagcagcagtgtttagagggggagtaaaaaaaaaaaaaaagacatcctttttctagttatatcctggctctgccttctttgttgttgtttttaaataacgtcacattcaagctctacgtcttggatgacattcctaaggataataaaatccttttccctgtacataaactgtgtttcacttccagatcagtctgacactctccaacaaaaccaaatacatttcgtatgaggcaacacaatttttttttttttttgagatggagtctcgctctgttgtccaggtttggagtgcagtggtgtgatcttggcttactgcaacctccacctcctgggttcaagcaattctcctgcctcagcctcccaagtagctaggactacaggtgtgcaccaccacgcctggctaattttttttttttttttgtatttttagtagagacagggtttcatcatgttggcgcaggctagtctcaaactgctgacctcaggtgatttgcccgcctcacccaattcaactttcgtaagtcagtatttaccatctaactcagtgtcccagaatttaaaatttccttgcactttacagcaaagatacatattgtggctctactgaagcaatatatacatgtcagaactaaaaatcagaaaagcaaaagggtccattcaacatatagcagcttatatctaaaatatgtacaggatatgtagtgttttccacacgttagatcttataaaaacaatttactatttgatagtgttacgagaaaatacttctattgtctataaataatattttaaaagctcaactgatcaaaatgcaggtacaagaacatatccaaattaaataaatcttctacgtctttaaaaacagataattgaagtcagtaaagcttgaggtttgtgttaagtgtattctgtcagtccctactactagggaaggcagaatcttctaaatacgatacgagagaaactccaaaagcttggaaggaatcggcagctcctgaacttcttgggtgggcatcactcttcggattgacatgcgacataaatgttgcaggctagggacctgccgtggagtggcccaaaaatacacacttccgtcatgtgtcccagcagctaaaacactgccatcagtagagaaggcacagcaaagaccattgctccaaaggtgcaacttgcactggataatcctcatcaattctccagaacctcacccattttatcatcagcaaggcttgcaacatgcagtcccatcatggctaaaagatacatatcgtacccaccggtcatttgctcctccagcaaatattggagtaggtgggggaaacaggtgcccaaattccatcagaatgtctccattatgtggatcccagatatatactcgagtatcataagatgcagtagccagtaatgctccatcaggagaaaagtcacaagctaccacatcatggtgatgtccttctagtttccgtatcatggtgtatttatccatattccaaaggaaaacctgcaataaaaaggcaaatgttatagcttcattcagacatacagaggacaaaatggcacctcttatactaaagctgctaaatttaattaagattatattaagcattataaattatgagtaatttaaagaatatgctcagtgtcatagtcagattaaaatcagtctttaagttaattaaggcagacatgcaaattctatttcaaatgtttctgttaaatgttaatttaaaaataagcctaaacataaaataaaggcaatgctttttaacctcaaagctatactgaaatccatttattccaaaaactaattaactaaaatatacggaaataaatagggttaagtactacaaacccccttctctttttttttccagaaactaccagatttttaaaaaaatatacagacagaaaacgtaaggttaacaaattgttactccattggcatctccctttgagataatcacttgtttacaataggcttgggtcaccaacttgagcctaggaagagaaacagatactgcaagcaaatagaatattcacagccaaatgaaatttctttggcaaacaacaaggatgttaaaccacattacaaaatgaaaatgctattttatgaaaataatacaattacatttcaataaatcaaaatttaaccatcttatttttccccaaactaaccacgatcataagtcatttgaatataaaacggttcaattatttaagaataagttcatatacaattttagattctaaagatcagtagttaactgtgcagaatagctctaaacaggattctaatgtttacttcagtctgttatattaaatgtgagcttggaggtttatcctaagacaatctctcctcttggagtaaagcaatcctttttggttttttttttttctgcacagacacaatacattatttctaaaagaaaataagtacaaattttaaattgaatcaaagacgtaagatatctctggaatctgaaagaattccaaaaaatagcacagagaaaccatttgaaagccaaatactttacattaaattggtttcacttgtcagactcccaattccataaaactggaaaatcaatttactcaggagtcagtgtattttactgtgggggaaattactttaaaaaagaaaaaaagaaagaaagaaaagcagaaagtggacatcgaccagcacctgtgtacgtacagtacaccttgcagccgaatgcaaggttacttcatcctatggtaaaggtcgcccccagcccggtagccagagatgccactctttctgcccagctaacaccattgtgcgcctgtgtgcgagtggtgccagcataacctcaatcacaccaatattgctgccaccactgctttactggctccgactgaacacagcatagaagagtcaggagagaatgcacagctgtacacccaattctgatgccccctcaatactttcatcatgtttccatcatctttcaggtcccatactctgagagttttgtctcttgaagctgacaccaggatcaagcttccatctggagcaaaagttaaatctctgaccacttcagtatgatctaccaagttaaggaggagttttcctgtatatacatcccatattttgatacgcccattgttcaaccctgtagcaagaagtagctgatcttgtccaaatctgaagcgatgccattctatatttacacagcgactctgtttttctggaactgatgacccaaaagcaagactccagactatatctccacagtctataatatgttcacgaggctttatttttctgaccaccatcactattttgtcttggcaatcttaaactgcttgaattggtaacattcttggtgccatgcaagagaaagttctgaaggcactgggaccacggaacaagctttactgtgcgatgtccttgtgaccaagcaaagtatgaaccatctggagcaaaagcaccagtccaattttcacggacaacatttcttgtcaaaaggagctgcaggagctaaaagttcacctatagtacgtaatctcactaaaaggaaaaataaaaatacgatctctttctcgttgaccctcgggggaaagctggccatctatggggcaccgtctgattccgggaatacgatgcggacccaacaacagagaagagagtggcgaccgctgaggggcgtgacgccaagttggtccctcccgggcccagggacagaggagacgggcggggccgaccgctgcggcttatgctaactgcctcgggaaagctcccgaaggcctcagaccaaagtacggagtcaaccacagacgatagaccccgtaccccgcctcgcgcctgcggaggaagacagttcccctaaagcgccgactgcaaacgagacactgccc

SEQ ID NO: 7701 - DNA, 403 bp, Homo sapiens
  SIMILAR (33)..(95): 451254mologous to Macaca fascicularis unnamed portein product,accession number AB046048,Smith-Waterman Score=41.
tggcaacctctggcctccctggggctcaaagtggaccctccctgccctcgggtctccctgaagtagctaggactactggcactagccaccacaccccagctaatttttgtattttttgtaaagatgggcccagactggtctcgaattcctgagctcaagcaatccacccacctcggccttccgaagtgctggaaccacaggcacaagccactatgcaatacatttcaatcttatttttacccgtggacatacaattgccatccctcatgtaaaaagattaaagtcaagtggagacaagtgtaaatattcaactctgttacataatgtacaatgtgagctttaaacattaatatgtaaaattaattattagggaaataaaacgctctcataaacaatgcaatca

SEQ ID NO: 7702 - DNA, 370 bp, Homo sapiens
  SIMILAR (6)..(248): 611254mologous to Homo sapiens dJ947L8.1.5 (novel CUB domain protein),accession number AL355178,Smith-Waterman Score=299.
  misc_feature (1)...(370): n = a,t,c or g
gttcagattgcacatggacaataaatctacccataggttttggtgtacatctccagtttgtaaatttttctacagaaaccatacatgattatttggaagtacgaagtggatcctcagaaactagtactgttattggccggcttagtggtcctcaaataccatcttccttattcagcaccacccatgaaaccagcttatattttcacagtgactattcacaaaacaaacaagggtttcatattgtataccaaggtaagagaaataataaaaaatgaaaatttatataaccccaaatcagctattagaaatatttaactgagtctaattattttctgtattctgttttagaaagnnnnnnnnnnnnnnnngg

SEQ ID NO: 7703 - DNA, 567 bp, Homo sapiens
  SIMILAR (247)..(450): 821254mologous to Homo sapiens neogenin,accession number U61262,Smith-Waterman Score=282.
atgtccctgggttgtttttcagaaacctggaccccaccaaatggatctgttggcatgtacacatcagcaatccaaatgtcagtgtttagctttgctgcactgggtgggcagaccgaagttcagtttggtaacatgcccagaagaggaactgttagttcaaatgagagaagccactatagcaggtatgggggtggtatcacagtactgagagaggagaaaggaagaaaccgacacatagacacttgccattgtgttcgcattgcctacagcgttcagtacagtaacatgctgtgcagggaacgtgttgagaataccagtcacccaggagagatgcaagtaaccattcaaaacctaatgccagcgaccgtgtacatctttagagttatggctcaaaataagcatggctcaggagagagttcagctccactgcgagtagaaacacaacctgaggctatttcagatgttttccactacctgcaaattctggtccttcccaacaccaccacccttctctcatcatcagcagatgaactcatctcatattttagaggctattcaagccgttaa

SEQ ID NO: 7704 - DNA, 364 bp, Homo sapiens
  SIMILAR (1)..(363): 961254mologous to Homo sapiens zinc finger protein 268,accession number AF317549,Smith-Waterman Score=660.
aaatcgcaacttatgtgccaacaaatgtatatgggcgaaaaaccctttggatgccgctgttgtgagaaagccttcagcaacaagtcataccttctagtgcatcagcaaactcatgccgaagagaaaccctatggttgtaatgaatgtgggaaagacttcagtagtaaatcatacctcattgtacatcagagaattcatactggagagaaactacatgaatgcagtgaatgcaggaaaacattcagtttccattcacagcttggtatacatcagagaattcacacaggtgagaatccctatgagtgctgtgaatgtgggaaagtcttcagtaagaaagaccagcttgtttcacaccagaaaactt

SEQ ID NO: 7705 - DNA, 368 bp, Homo sapiens
caggcaccctgtgttgtgatagttcacaaactcagacggagtggatgaccagtatctttattgcccaggtacgagatttgtttgaactatccagtagagtataataactttgttcacaggaaatgttagtgtgatggtgatttctaaagaatttttaataagcattttaaatgtatgtacaattggcataaactttgattctctcattcttagtttttaaaatagtatattaaagttcaaatttattcattaccttttgaaagagagtttattccattaaagcgtcttttctgccagccccacagcctccttggcttaggtgaggtgtgttgctttaaaatggtcgtgtaagaaagagggacttttct

SEQ ID NO: 7706 - DNA, 747 bp, Homo sapiens
  SIMILAR (1)..(741): 1001254mologous to Homo sapiens ASH1,accession number AF257305,Smith-Waterman Score=1258.
gtaaacggagttccctctcgaagtccaagattagttgcttctggggatgactctgtggatagtctgctgcagcggatggtacaaaatgaggaccaagagcccatggagaaaagtattgatgctgtgattgcaactgcctctgcaccaccttcttccagtccaggccgtagccacagcaaggaccgaaccctgggaaaaccagacagccttttagtgcctgcagtcgcaagtgactcttgcaataatagcatctcactcctatctgaaaagttgacaagcagctgttccccccatcatatcaagagaagtgtagtggaagctatgcaacgccaagctcggaaaatgtgcaattacgacaaaatcttggccacaaagaaaaacctagaccatgtcaataaaatcttaaaagccaaaaaacttcaaaggcaggccaggacagggaataactttgtgaaacgtaggccaggtcgacctcggaaatgtccccttcaggctgtcgtatcaatgcaagcattccaggctgctcagtttgtcaacccagaattgaacagagacgaggaaggagcagcactgcacctcagtcctgacacagttacagatgtaattgaggctgttgttcagagtgtaaatctgaacccagaacataaaaaggggttgaagagaaaaggttggctattggaagaacagaccagaaaaaagcagaagccattaccagaggaagaagagcaagagaataataaaaggtaa

SEQ ID NO: 7707 - DNA, 417 bp, Homo sapiens
  misc_feature (1)...(417): n = a,t,c or g
tggtgggttggcaacaaggggttccagaaccgccccccggcaaagctgtaaccgttcccttaaggccagctgaccccttcaaaggcaaaaaagccccagcccgcagcggatttcctgccctttttcccggtgacccccctggtgaggaatccttggggaggaggaggccagggtcctccccattaacgcccctcagcattccggaagttataaaaatatttgtgccccctgccccccaaaaatccggccattttttttccttccnnnnnnnnnnnnnnnnnnnnnnnnnnnnnnnnnnnnnnnnnnnnnnnnnnnnnnnnnnnnnnnnnnnnnnnnnnnnnnnnnnnnnnnnnnnnnnnnnnnnnnnnnnnnnnnnnnnnnnnnnnnnnnnnnnnnnnnnnnnnnnnnnnnnnnnnn

SEQ ID NO: 7708 - DNA, 422 bp, Homo sapiens
  SIMILAR (175)..(252): 691254mologous to Homo sapiens Human immunoglobulin heavy chain amino acid sequence,accession number AAB26884,Smith-Waterman Score=78.
acacgtccaagagccagttctccctgaaactgagctctgtgaccgccgcagacacggccgtatattactgtgcgagagatgataggcgggacccctcagatgtttttcatatctggggccaagggacaatggtcaccgtctcttcagcctccaccaagggcccatcggtcttccccctgggcaccctcctccaagagcacctctgggggcacagcagccctgggctccttggggtcaaaggactactttccccgaaccggtgacggtgtcgtggaactcaggcgctctgaccagcggcgtgcacaccttcccggctgtcctacagtcctcaggactctactccctcagcagcgtggtgaccgtgacctccagcaacttcggcaccatgaattgcgctcgctataaagcatgcaagcagaacg

SEQ ID NO: 7709 - DNA, 637 bp, Homo sapiens
  SIMILAR (496)..(624): 971254mologous to Homo sapiens Human hydrophobic domain- containing protein HP03303,accession number AAB20089,Smith-Waterman Score=237.
agccttcagcaggtgtagttcagccatgactgatgctgttaactaccaaagttctacctttagttcctgttagaccctaaactgtgaaacaaaaaagggttgggctaactttaaaaggccagcttcatgtttaactgggtggatttctgcacagtcctcttcagcacttaaaaagttgctagctttaaaaacgaaattttcggccaggcgcagtggcttcctctcccccatcaccccttaatcctgaaacagctgtgaggtagataccattatctgcactttatataaatacttagtcttctacggctaagagcagggttcaaacccaggtattccaacctgtgctatttggagtatattaatccacctgtctttactaaaggtgaaaacttttgcatgtggttcaatagtcagggagaagttagaaaaaaagtaatggaagaataatcatgaatttgtatgcttctatacattaactagctctttctccctttttccagagttctcttggaacggttgattgtaaataggccacatccttggggtcttcttattaccttcattgagctgattaaaaacccagcgtttaagttctggaaccatgaatttgtacactgtgcccccggacgcgtgggtc

SEQ ID NO: 7710 - DNA, 3655 bp, Homo sapiens
  SIMILAR (1)..(3318): 931254mologous to Homo sapiens Polypeptide identified by the signal sequence trap method,accession number AAY02377,Smith- Waterman Score=5268.
ttaaacttgaagtttgaaatcgaggttctctgcaagaaccttgcattagacatcaatgagctaaaacctggaaacctcctaaaggataaagatcgcctgaagaatttagatgagcaactctctgctccaaagaaagatgtcaagcagccagaagaactccctcccatcacaaccacaacaacttctactacaccagctaccaacaccacttgtacagccacggttccaccacagccacagtacagctaccacgacatcaatgtctattcccttgcgggcttggcaccacacattactctgaatccaacaattcccttgtttcaggcccatccacagttgaagcagtgtgtgcgtcaggcaattgaacgggctgtccaggagctggtccatcctgtggtggatcgatcaattaagattgccatgactacttgtgagcaaatagtcaggaaggattttgccctggattcggaggaatctcgaatgcgaatagcagctcatcacatgatgcgtaacttgacagctggaatggctatgattacatgcagggaacctttgctcatgagcatatctaccaacttaaaaaacagttttgcctcagcccttcgtactgcttccccacaacaaagagaaatgatggatcaggcagctgctcaattagctcaggacaattgtgagttggcttgctgttttattcagaagactgcagtagaaaaagcaggccctgagatggacaagagattagcaactgaatttgagctgagaaaacatgctaggcaagaaggacgcagatactgtgatcctgttgttttaacatatcaagctgaacggatgccagagcaaatcaggctgaaagttggtggtgtggacccaaagcagttggctgtttacgaagagtttgcacgcaatgttcctggcttcttacctacaaatgacttaagtcagcccacgggatttttagcccagcccatgaagcaagcttgggcaacagatgatgtagctcagatttatgataagtgtattacagaactggagcaacatctacatgccatcccaccaactttggccatgaaccctcaagctcaggctcttcgaagtctcttggaggttgtagttttatctcgaaactctcgggatgccatagctgctcttggattgctccaaaaggctgtagagggcttactagatgccacaagtggtgctgatgctgaccttctgctgcgctacagggaatgccacctcttggtcctaaaagctctgcaggatggccgggcatatgggtctccatggtgcaacaaacagatcacaaggtgcctaattgaatgtcgagatgaatataaatataatgtggaggctgtggagctgctaattcgcaatcatttggttaatatgcagcagtatgatcttcacctagcgcagtcaatggagaatggcttaaactacatggctgtggcatttgctatgcagttagtaaaaatcctgctggtggatgaaaggagtgttgctcatgttactgaggcagatctgttccacaccattgaaaccctcatgaggattaatgctcattccagaggcaatgctccagaaggattgccccagctgatggaagtagtgcgatccaactatgaagcaatgattgatcgtgctcatggaggcccaaactttatgatgcattctgggatctctcaagcctcagagtatgatgaccctccaggcctgagggagaaggcagagtatcttctgagggaatgggtgaatctctaccattcagcagcagctggccgcgacagtaccaaagctttctctgcatttgttggacagatgcaccagcaaggaatactgaagaccgatgatctcataacaaggttctttcgtctgtgtactgaaatgtgtgttgaaatcagttaccgtgctcaggctgagcagcagcacaatcctgctgccaatcccaccatgatccgagccaagtgctatcacaacctggatgcctttgttcgactcattgcactgctcgtgaaacactcaggggaggccaccaacactgtcacaaagattaatctgctgaacaaggtccttggtatagtagtgggagttctccttcaggatcatgatgttcgtcagagtgaatttcagcaacttccctaccatcgaatttttatcatgcttctcttggaactcaatgcacctgagcatgtgttggaaaccattaatttccagacacttacagctttctgcaatacattccacatcttgaggcctaccaaagctcctggctttgtatatgcctggcttgaactgatttcccatcggatatttattgcaagaatgctggcacatacgccacagcagaaggggtggcctatgtatgcacagctactgattgatttattcaaatatttagcgcctttccttagaaatgtggaactcaccaaacctatgcaaatcctctacaagggcactttaagagtgctgctggttcttttgcatgatttcccagagttcctttgtgattaccattatgggttctgtgatgtgatcccacctaattgtatccagttaagaaatttgatcctgagtgcctttccaagaaacatgaggctccccgacccattcactcctaatctaaaggtggacatgttgagtgaaattaacattgctccccggattctcaccaatttcactggagtaatgccacctcagttcaaaaaggatttggattcctatcttaaaactcgatcaccagtcactttcctgtctgatctgcgcagcaacctacaggtatccaatgaacctgggaatcgctacaacctccagctcatcaatgcactggtgctctatgtcgggactcaggccattgcgcacatccacaacaagggcagcacaccttcaatgagcaccatcactcactcagcacacatggatatcttccagaatttggctgtggacttggacactgagggtcgctatctctttttgaatgcaattgcaaatcagctccggtacccaaattgcccacactcactacttccagttgcacccatgctgtaccctttttgcaggggcccattccggaagccatcccaagaacagatcacaagagttctcttggaacggttgattgtaaataggcccacatccttggggtcttcttattaccttcattgagctgattaaaaaccccagcgtttaaggttctgggaaccatggaatttgttacacttgtgccccaggaaattcggaaaagttatttccagtcgggtcggcacagtggctggcatggggacaggaagggcagggccccagcaagttaattgggagggggacagggttgcccagttagggacggaaacttgcatctctgttgtacgtgttcagtcttggaggtctcacttgcaccgagttcataaaactgactggagaatcctttcagctccttcctgaactttccccaggccctttggttttgtgggtaatctggcccaactaactggtggggatcagccctcctggcctaatgtgggcacggttcccaaggtttaaatgccatttttttgactcttggccaaaatttagaagatgctgtgaatatcattttgaaacttgtgtaaatacatgaaagagaaaaaaaaaaaaaaaaaaaaaaaaaaaaagtcgatgc

SEQ ID NO: 7711 - DNA, 520 bp, Homo sapiens
  SIMILAR (252)..(383): 911254mologous to Seriola quinqueradiata elongation factor 1 alpha,accession number AB032900,Smith-Waterman Score=208.
aaaatggattccactgagccaccctacagccagaagagatatgaggaaattgttaaggaagtcagcacttacattaagaaaattggctacaaccccgacacagtagcatttgtgccaatttctggttggaatggtgacaacatgctggagccaagtgctaacatgccttggttcaagggatggaaagtcacccgtaaggatggcaatgccagtggaaccacgctgcttgaggctctggactgcatcctaccccaactcgtccaactgacaagcccttgcgcctgcctctccaggatgtctacaaaattggtggtattggtactgttcctgttggccgagtggagactggtgttctcaaacccggtatggtggtcaatgcaccatgaagctttgagtgaagctcttcctggggacaatgtgggcttcaatgttaagaatgtggatgtcaaggatgttcgtcgaggcaacggagctggggacagcacaaatgaaccaacaatggaagccaatggcttcactg

SEQ ID NO: 7712 - DNA, 443 bp, Homo sapiens
  SIMILAR (1)..(441): 911254mologous to Oryctolagus cuniculus elongation factor 1 alpha,accession number U09823,Smith-Waterman Score=746.
gcttacacactgggtgtgaaacaactaattgtcggtgttaacaaaatggattccactgagccaccctacagccagaagagatatgaggaaattgttaaggaagtcagcacttacattaagaaaattggctacaaccccgacacagtagcatttgtgccaatttctggttggaatggtgacaacatgctggagccaagtgctaacatgccttggttcaagggatggaaagtcacccgtaaggatggcaatgccagtggaaccacgctgcttgaggctctggactgcatcctaccaccaactcgtccaactgacaagcccttgcgcctgcctctccaggatgtctacaaaattggtggtattggtactgttcctgttggctttgctccagtcaacgttacaacggaagtaaaatctgtcgaaatgcaccatgaagctttgagtga

SEQ ID NO: 7713 - DNA, 665 bp, Homo sapiens
  SIMILAR (290)..(655): 961254mologous to Oryctolagus cuniculus elongation factor 1 alpha,accession number U09823,Smith-Waterman Score=625.
  misc_feature (1)...(665): n = a,t,c or g
agagtcncnnaggagccccccatagtacacctatagatgacctctccacttggccgaggagaaaaatggctacaaccccgacacagtagcatttgtgccaatttctggttggaatggtgacaacatgctggagccaagtgctaacatgccttggttcaagggatggaaagtcacccgtaaggatggcaatgccagtggaaccacgctgcttgaggctctggactgtatcctaccaccaactcgtccaactgacaagcccttgcgcctgcctctccaggatgactacaaaatttctggttggaatggtgacaacatgctggagccaagtgctaacatgccttggttcaagggatggaaagtcacccgtaaggatggcaatgccagtggaaccacgctgcttgaggctctggactgcatactaccaccaacttgtncaactgacaagcccttgcgcctgcctctccaggatgtctacaaaattggtgggattggtactgttcctgttggccgagtggagactggtgttctcaaacccggtatggtggtcacctttgctccagtcaacgttacaacggaagtaaaatctgtcgaaatgcaccatgaagctttgagtgaaactcttcctggcgacaatgtgagcttcaatgtcaagaatagtgtctgca

SEQ ID NO: 7714 - DNA, 394 bp, Homo sapiens
  SIMILAR (183)..(392): 921254mologous to Oryctolagus cuniculus elongation factor 1 alpha,accession number U09823,Smith-Waterman Score=324.
cgccgacattgaacgcctgaggatgagacgcgtaatggccgcggcgacccacgcgtccgcaatttctggttggaatggtgacaacatgctggagccaagtgctaacatgccttggttcaagggatggaaagtcacccgtaaggatggcaatgccagtggaaccacgctgcttgaggctctgaattggcggtattgggactgttcctgttggccgagtggagactggagttctcaaacccggtatggaggtcacctttgctccaggcaacgttacaacggaagtaaaatctgtcgaaaagcaccatgaagctttgagtgaagctctttctggggacaatgcgggcttcaatgtcaagaatgtgtctgtcaaggatgttcgtcgtggcaacgttgc

SEQ ID NO: 7715 - DNA, 463 bp, Homo sapiens
  SIMILAR (335)..(460): 1001254mologous to Oryctolagus cuniculus elongation factor 1 alpha,accession number U09823,Smith-Waterman Score=199.
atgctgcttgaggctctggactgcatcctaccaccaactcgtccaactgacaagcccttgcacctgcctctccaggatgtctacaaaattggtggtattggtagtgttcctgttggccgagtggagactggtgttctcaaacctggtatggtggtcacctttgctccagtcaacgttacaacagaagtaaaatctgtcgaaatgcaccatgaagctttgagtgaagctcttcctggggacaatgtgggcttcaatgtcaagaatgtgtctgtcaaggatgttcgtcatggcaacgttgctggtgacagcaaaaatgacccaccaatggaagcagctgggtcgctttgctgttcgtgatatgagacagacagttgcggtgggtgtcatcaaagcagtggacaagaaggctgctggagctggcaaggtcaccaagtctgcccagaaagctcagaaggctaaatga

SEQ ID NO: 7716 - DNA, 845 bp, Homo sapiens
  SIMILAR (1)..(693): 941254mologous to Oryctolagus cuniculus elongation factor 1 alpha,accession number U09823,Smith-Waterman Score=1148.
atgggaaaggaaaagactcatatcaacattgtcgtcattggacacgtagattcgggcaagtccaccactactggccatctgatctataaatgcagtagcatcgacaaaagaaccattgaaaaatttgagaaggagactgctgagatgggaaagggctctttcaagtatggctgggtcttggataaactgaaagctgagcgtgaacgtggtatcaccattgatatctccttgtggaaatttgagaccagcaagtactatgtgactatcactgatgctccaggacacagagacttcatcaaaaacatgattacagggacatctcaggctgactgtgctgtcccgattgttgctgctggtgttggtgaatttgaagctggtatctctaagaatgggcagacccgagagcatgcccttctggcttacacactgggtgtgaaacaactaattgttggtgttaacaaaatggattccactgagccaccctacagccagaagagatatgaggaaatgtggttaagggaagtcagcacttacattaagaaaattggctacaaccccgacacagtagcatttgtgccaatttctggttggaatggtaacaacatgctggagccaagtgctaacatgccttggttcaagggatggaaagtcacccgtaaggatggcaatgccagtggaaccatgctgcttgagggagcttctcagactatccacctttgggtcgctttgctgttcgtgatatgagacagacagttgcggtgggtgtcatcaaagcagtggacaagaaggctgctggagctggcaaggtcaccaagtctgcccagaaagctcagaaggctaaatga

SEQ ID NO: 7717 - DNA, 945 bp, Homo sapiens
  SIMILAR (399)..(944): 511254mologous to Arabidopsis thaliana T6D22.2,accession number AC026875,Smith-Waterman Score=415.
  misc_feature (1)...(945): n = a,t,c or g
gcaatgccagtggaaccacgctgcttgaggctctggactgcatcctaccaccaactcgtccaactgacaaggccttgcgcctgcctctccaggatgtctacaaaattggtggtattggtactgttcctgttggccgagtggagactggtgttctcaaacccggtatggtggtcacctttgctccagtcaacgttacaacggaagtaaaattggttcaagggatggaaagtcacccgtaaggatggcaatgccagtggaaccacgctgcttgaggctctggactgcatcctaccaccaactcgtccaactgacaagcccttgcgcctgcctctccaggatgtctacaaaattggtggtattggtactgttcctgttggccgattggagactggtgttctcaaacccggtatggtggtcacctttgctacagtcaacgttacaacggaagtaaaatctgtcgaaaaccacttgatngccnctctgaanngncncngtantnnctgttggacccacgcgtccgagcacttacattaagaaaattggctactattcccgacacattagcatttgagccaatttctggttggaatggtgacgacatgctggagccaagtgctaacatgccttggttcaagggatggaaagtcacccgtaaggatggcaatgccagtggaaccacgctgcttgaggctctggactgcatcctaccaccaactcgtccaactgacaagcccttgcgcctgactatccaggatgtctacaaaattggtggtattggtactgttactgttggccgagtggagactggtgttctcaaacccggtatggtggtcacctttgctccagtcaacggtacaacgtaagtaaaatctgtcgcaatgcaccatgaagctttgagtgaagctcattctgtggacaatgtgggctttaatgtcaaaaatgtgt

SEQ ID NO: 7718 - DNA, 2131 bp, Homo sapiens
  SIMILAR (1436)..(2116): 871254mologous to Xenopus laevis 42Sp48,accession number X56699,Smith-Waterman Score=1061.
cgtggtatcaccattgatatctccttgtggaaatttgagaccagcaagtactatgtgactatcattgatgccccaggacacagagactttatcaaaaacatgattacagggacatctcaggctgactgtgctgtcctgattgttgctgctggtgttggtgaatttgaagctggtatctccaagaatgggcagacccgagagcatgcccttctggcttacacactgggtgtgaaacaactaattgtcggtgttaacaaaatggattccactgagccaccctacagccagaagagatatgaggaaattgttaaggaagtcagcacttacattaagaaaattggctacaaccccgacacagtagcatttgtgccaatttctggttggaatggtgacaacatgctggagccaagtgctaacatgccttggttcaagggatggaaagtcacccgtaaggatggcaatgccagtggaaccacgctgcttgaggctctggactgcatcctaccaccaactcgtccaactgacaagcccttgcgcctgcctctccaggatgtctacaaaattggtggtattggtactgttcctgttggccgagtggagactggggttcatttgtgccaatttctggttggaatggtgacaacatgctggagccaagagctaacatgccttggttcaagggatggaaagtcacccgtaaggatggcaatgccagtggaaccacgctgattgaggctctggactgcatcctaccaccaactcgtccaactgacaagcccttgcgcctgcctctccaggatgtctacaaaattggtggtattggtactggtcctgtaggccgactggagactggtgttctcaaacccggcatggtggtcacctttgctccaggcaacgttacaacggaagtaaaatctgtcgaaacgctccatgaagctttgagtgaagcttttcctggggacaatgtgggcttcaatgtcaagaatgtgtctgtcaaggatgttcgtcatggcaacgttgctggtgacagcaaaaatgacccaccaatggaagcagctggtttcactgctcaggtgattatcctgaaccatccaggccaaataagcactggctatgcccctgtattggattgccacacggctcatattgcatgcaagtttgctgagctgaaggaaaagattgatcaccgttctggtaaaaagctggaagatggccctaaattcttgaagtctgttgatgctgccattgttgatatggttcctggcaagcccatgtgtgttgagagcttctcggactatccatctttgggttgctttgctgttcgtgatatgagacagatagttacagtgggtgtcatcaaagcagtggacaagaagactgctggagctggcaaggtcaccaagtctgcccagaaagctcagaaggctaaatgactctggactgcatcctaccaccaactcgtccaactgacaagcccttgcgcctgcctctccaggatgtctacaaaattggtggtattggtagtgttcctgttggccgagtggagactggtattctcaaacccggtatggtggtcacctttgctccagtcaacgttacaacagaagtaaaatctgtcgaaatgcaccatgaagctttgggtgaagctcttcctggggacagtgtgggcttccatgtcaagaatgtgtctgtcaaggatgttcgtcgtggcaacgttgctggtgacagcaaaaatgacccaccaatggaagcagctggcttcactgctcaggtgattatcctgaaccatccaggccaaataagcgctggctatgcccctgtattggattgccacacggctcatattgcatgcaagtttgctgagctgaaggaaaagattgatcgccgttctggtaaaaagctggaagatggccctaaattcttgaagtccggtgatgctgccattgttgatatggttcctggcaagcccatgtgtgctgagagcttctcagactatccacctttgggtcgctttgctgttcgtgatatgagacacacagttgcggtgggtgtcatcaaagcagtggacaagaaggctgctggagctggcaaggtcaccaactctgcccagaaagctcagatggctaaatga

SEQ ID NO: 7719 - DNA, 321 bp, Homo sapiens
  SIMILAR (1)..(312): 801254mologous to Homo sapiens Human IGFAM-16 immunoglobulin,accession number AAY96304,Smith-Waterman Score=456.
atggacctcctgtgcaagaacatgaagcacctgtggttcttcctcctgctggtggcggctcccagatgggtcctgtcccaggtgcagctgcaggagtcgggcccaggactggtgaagccttcggagaccctgtccctcacatgcactgtctctgatgtctccatcaccagtggcaattacttctgggcctggatacgccagccccccgggaagggcctggagtggattgggagtaaatttcatactgggaccaatttgtacaacgagtccctcaagagtcgagtcaccttttcgatagacacgtccgggtcgacgcggccg

SEQ ID NO: 7720 - DNA, 1257 bp, Homo sapiens; identical to SEQ ID NO: 303
  SIMILAR (430)..(1254): 991254mologous to Oryctolagus cuniculus elongation factor 1 alpha,accession number U09823,Smith-Waterman Score=1427.

SEQ ID NO: 7721 - DNA, 2626 bp, Homo sapiens
  SIMILAR (1199)..(2377): 711254mologous to Arabidopsis thaliana T6D22.2,accession number AC026875,Smith-Waterman Score=1445.
atgcagtcggaacgtggtatcaccattgatatctccttgtggaaatttgagaccagcaagtactatgtgactatcattgatgccccaggacacagagactttatccaaaacatgattacagggacctctcaggctgactgtgctgtcctgattgttgctgctggtgttggtgaatttgaagctggtatctccaagaatgggcagacccgagagcatgcccttctggcttacacactgggtgtgaaacaactaattgtcggtgttaacaaaatggattccactgagccaccctacagccagaagagatatgaggaaattgttaaggaagtcagcacttacattaagaaaattggctacaaccccgacacagtagcatttgtgccaatttctggttggaatggtgacaacatgctggagccaagtgctaacatgccttggttcaagggatggaaagtcacccgtaaggatggcaatgccagtggaaccacgctgcttgaggctctggactgcatcctaccaccaactcgtccaactgacaagcccttgggcctgcctctccaggatgtctacaaaattggtggtattggtactgttcctgttggccgagtggagactggtgttctcaaacccggtatggtggtcacctttggtccagtcaacgttacaacggaagtaaaatctgtcgaaatgcaccatgaagctttgggtgaagctcttcctggggacaatgtgggcttcaatgtcaagaatgtgtctgtcaaggatgttcgtcgtggcaacgttgctggtgacagcaaaaatgacccaccaatggaagcagctggcttccctgctcaggtgattatcctgaaccatccaggccaaataagcgccggctatgcccctgtattggattgccacacggctcacattgcatgcaagtttgctgagctgaaggaaaagattgatcgccgttctggtaaaaagctggaagatggccctaaattcttgaagtctggtgatgctgccattgttgatatggttcctggcaagcccatgtgtgttgagagcttctcagactatccacctttgggctgctttgctgttcgtgatatgagacagacagttgcggtgggtgtcatcaaagcagtggacaagaaggctgctggagctggcaaggtcaccaagtctgcccagaaagctcagaaggctaaatgatggtatcaccattgatatctccttgtggaaatttgagaccagcaagtactatgtgactatcattgatgccccaggacacagagactttatccaaaacatgattacagggacctctcaggctgactgtgctgtcctgattgttgctgctggtgttggtgaatttgaagctggtatctccaagaatgggcagacccgagagcatgcccttctggcttacacactgggtgtgaaacaactaattgtcggtgttaacaaaatggattccactgagccaccctacagccagaagagatatgaggaaattgttaaggaagtcagcacttacattaagaaaattggctacaaccccgacacagtagcatttgtgccaatttctggttggaatggtgacaacatgctggagccaagtgctaacatgccttggttcaagggatggaaagtcacccgtaaggatggcaatgccagtggaaccacgctgcttgaggctctggactgcatcctaccaccaactcgtccaactgacaagcccttgggcctgcctctccaggatgtctacaaaattggtggtattggtactgttcctgttggccgagtggagactggtgttctcaaacccggtatggtggtcacctttggtccagtcaacgttacaacggaagtaaaatctgtcgaaatgcaccatgaagctttgggtgaagctcttcctggggacaatgtgggcttcaatgtcaagaatgtgtctgtcaaggatgttcgtcgtggcaacgttgctggtgacagcaaaaatgacccaccaatggaagcagctggcttccctgctcaggtgattatcctgaaccatccaggccaaataagcgccggctatgcccctgtattggattgccacacggctcacattgcatgcaagtttgctgagctgaaggaaaagattgatcgccgttctggtaaaaagctggaagatggccctaaattcttgaagtctggtgatgctgccattgttgatatggttcctggcaagcccatgtgtgttgagagcttctcagactatccacctttgggctgctttgctgttcgtgatatgagacagacagttgcggtgggtgtcatcaaagcagtggacaagaaggctgctggagctggcaaggtcaccaagtctgcccagaaagctcagaaggctaaatgacgttctggtaaaaagctggaagatggccctaaattcttgaagtctggtgatgctgccattgttgatatggttcctggcaagcccatgtgtgttgagagcttctcagactatccacctttgggctgctttgctgttcgtgatatgagacagacagttgcggtgggtgtcatcaaagcagtggacaagaaggctgctggagctggcaaggtcaccaagtctgcccagaaagctcagaaggctaaatga

SEQ ID NO: 7722 - DNA, 2848 bp, Homo sapiens
  SIMILAR (1)..(591): 801254mologous to Arabidopsis thaliana T6D22.2,accession number AC026875,Smith-Waterman Score=834.
atgggaaaggaaaagactcatatcaacattgtcgtcattggacacgtagattcgggcaagtccaccactactggccatctgatctataaatgcggtggcatcgacaaaagaaccattgaaaaatttgagaaggaggctgctgagatgggaaagggctccttcaagtatgcctgggtcttggataaactgaaagctgagcgtgaacgtggtatcaccattgatatctccttgtggaaatttgagaccagcaagtactatgtgactatcattgatgccccaggacacagagactttatcaaaaacatgattacagggacatctcaggctgactgtgctgtcctgattgttgctgctggtgttggtgaatttgaagctggtatctccaagaatgggcagacccgagagcatgcccttctggcttacacactgggtgtgaaacaactaattgtcggtgttaacaaaatggattccactgagccaccctacagccagaagagatatgaggaaatgtggttaagggaagtcagcacttacattaagaaaattggctacaaccccgacacagtagcatttgtgccaatttctggttggaataggtgacaacatgctggagccaagtgctaacatgccttggttcaagggatggaaagtcacccgtaaggatggcaatgccagtgcaaccacgctgcttgaggctctggactgcatcctaccaccaactcgtccaactgacaagcccttgcgcctgcctctccaagatgtctacaaaattggaggcattggtactgatcctgctggccgagtgaagactggtgttctcaaacccggcatggtggggcaccttttgctccagtcaacggtaccacggaagtaaaatctgtcgaaatgcaccatgaagctttgagtgaagcctcttgctgggggacaagggggccttcaatgtcaagaatgtgtctgtcaaggatgttcgtcgtggctaacgttgctggtgacagcaaaaatgacccaccaatggaagccagttggcttcactgctcaggtgattatcctgaaccatccaagaccaaaaaaacgcccggcatatgccccttgaattggattgccacacggctcacattgcatgcaagtttgctgagctgaaggaaaagattgatcgccgttctggtaaaaagctggaagatggccctaaattcttgaagtctggtgatgctgccattgttgatatggttcctggcaagcccatgtgtgttgagagcttctcagactatccacctttgggtcgctttgctgttcgtgatatgagacagacagttgcggtgggtgtcatcaaagcagtggacaagaaggctgctggagctggcaaggtcaccaagtctgcccagaaagctcagaaggctaaatgtctcaggctgactgtgctgtcctgattgttgctgctggtgttggtgaatttgaagctggtatctccaagaatgggcagacccgagagcatgcccttctggcttacacactgggtgtgaaacaactaattgtcggtgttaacaaaatggattccactgagccaccctacagccagaagagatatgaggaaattgttaaggaagtcagcacttacattaagaaaattggctacaaccccgacacagtagcatttgtgccaatttctggttggaatggtgacaacatgctggagccaagtgctaacatgccttggttcaagggatggaaagtcacccgtaaggatggcaatgccagtggaaccacgctgcttgaggctgtggactgcatcctaccaccaactcgtccaactgacaagcccttgcgcctgcctctccaggatgtctacaaaattggtggtattggtactgttcctgttggccgagtggagactggtgttctcaaacccggtatggtggtcacctttgctccagtcaacgttacaacggaagtaaaatctgtcgaaatgcaccatgaagctttgagtgaagctcttcctggggacaatgtgggcttcaatgtcaagaatgtgtctgtcaaggatgttcgtcgtggcaacgttgctggtgacagcaaaaatgacccaccaatggaagcagctggcttcactgctcaggtgattatcctgaaccatccaggccaaataagcgccggctatgcccctgtattggattgccacacggctcacattgcatgcaagtttgctgagctgaaggaaaagattgatcgccgttctggtaaaaagctggaagatggccctaaattcttgaagtctggtgatgctgccattgttgatatggttcctggcaagcccatgtgtgttgagagcttctcagactatccacctttgggtcgctttgctgttcgtgatatgagacagacagttgcggtgggtgtcatcaaagcagtggacaagaaggctgctggagctggcaaggtcaccaagtctgcccagaaagctcagaaggctaaatgaggtttcactgctcaggtgattatcctgaaccatccaggccaaataagcactggctatgcccctgtattggattgccacacggctcatattgcatgcaagtttgctgagctgaaggaaaagattgatcaccgttctggtaaaaagctggaagatggccctaaattcttgaagtctgttgatgctgccattgttgatatggttcctggcaagcccatgtgtgttgagagcttctcggactatccatctttgggttgctttgctgttcgtgatatgagacagatagttacagtgggtgtcatcaaagcagtggacaagaagactgctggagctggcaaggtcaccaagtctgcccagaaagctcagaaggctaaatga

SEQ ID NO: 7723 - DNA, 976 bp, Homo sapiens
  SIMILAR (537)..(716): 881254mologous to Mus musculus putative,accession number AK007657,Smith-Waterman Score=263.
acagtgcggtggaattctcagtttttgtcagcatctccaccccgaggtggtttgaactttgagccttttgtagtcctgatgaataatttcattttcctcaagtttatgacactcggaacgtcaagaactggaggtttgtgcaatttgagaccggtcggcactgtgcagagatcagagtactaagagacagagattaaaatggcttccagaggaaagacagagacaagcaaattaaagcagaatttagaagaacagttggatagactcatgcaacaattacaagatctggaggaatgcagagaggaacttgatacagatgaatatgaagaaaccaaaaaggaaactctggagcaactaagtgaatttaatgattcactaaagaaaattatgtctggaaatatgactttggtagatgaactaagtggaatgcagctggctattcaggcagctatcagccaggcctttaaaaccccaaaggtcatcagattgtgtggaaagaaaaccacccggttcagcttcggccaaggtaagcagagatggatagagatctgatggtaggaaagctggaaagagacctgtacactcaacagaaagtggagatactaacagctcttaggaaacttggagagaagctgactgcagatgatgaggccttcttgtcagcaaatgcaggtgctatactcagccagtttgagaaagtctctacagaccttggacggcccccaagttacatgaactacctgctagactcacaccccagcaaaaatattgatgtccccagcaagattagcttcctgttaaagatccaggacctgtgaatacatgcgtaactgcaagaatggaagcaaaggatgaacccaagttaaagcccagcacaagaatatgatgtaagcgcttttgggaaatgcagagattttcttttctcttcaaataataaattacatctaaaaattaatgggaaaaaaaaaaaaaaaaa

SEQ ID NO: 7724 - DNA, 1563 bp, Homo sapiens
  SIMILAR (154)..(387): 851254mologous to Mus musculus putative,accession number AK007657,Smith-Waterman Score=335.
ggcacgaggtctggaaatatgactttggtagatgaactaagtggaatgcagctggctattcaggcagctatcagccaggcctttaaaaccccagaggttatcttattgtttgcaaagaaacaaccaggtcagcttcggacaaggttagcagagatggatagagatctgatggtaggaaagctggaaagagacctgtacactcaacagaaagtggagatactaacagctcttaggaaacttggagagaagctgactgcagatgatgaggccttcttgtcagcaaatgcaggtgctatactcagccagtttgagaaagtctctacagaccttggctctggagacaaaattcttgctctggcaagttttgaggttgaaaaaacaaaaaaatgacatggtgcagaaagcttgtaacattgatcacattcttaatgtaaatggtgtctttcttctggggttttcagttattgcaaagaaatgaagagattctggaaatgcatcaataacctaagaaaaagcgacataaaaatatacttatggcttgtgtttatgctcttcatcattgtgcgttgtgtgcggttacctgcttgagtgatcctgaacttgttgcgacagagggactcactggactctgttcgttatgatttgtctgtttaagagagaaaacaaagtggacttgatttttattaaggctgtttgtttttaagtgttgatagtgaacgaaaagatgtgaagtaatgatatttttctgctttacaccttatccccactcattggagtgaacagtgtacgcaagctcaatagacttcataagtgttcatagaattttacaattctgagtgatcttagaaatcatttctgtttttacaaacaaggaaactgaggtccagaaagagcaagcgactttgcttaaagtcgcatcagagagctgagggtaagactcaggtgtcctgactcccagtttagtatcttttgaattttatttctgtaccatttaaaaaaaataattaacactatttgtgcaagtcagtgtttttgacaattcagtgtcgcaataaaaagtggactgcacactaagggaccatcccccagcctgtaagctgtctgtattaatggggcccgttgtatctcggaattttgaggttggaacaatgggagccctgttgagcgtttcctaaagtgacttagccgcctgcgttgtttgaccagggaagcaacaggaaatggcagctagaggccctccctgtgcgtgacctcttgtcacactcagaggggaggtaactgttcagctggttatctactcttcaggtgtttggacgaaacacacaaataatgttatgaggaaaaagcaaatttctctcctgagtatttacatgtctgctgtatgctcaaatatgcagaagtgtccctatgcgtgtatattagcttattttttaggctctagccattttatattctttcatgtgcttctcaatattcattttctttgcactttatacaaattaaaagcatttttaaagcttcttctgtactggaaactactaagtgctttgccaaccagacaga

SEQ ID NO: 7725 - DNA, 1028 bp, Homo sapiens
  SIMILAR (624)..(824): 911254mologous to Homo sapiens embryonic lung protein,accession number AF006621,Smith-Waterman Score=302.
ggtttttagcttccttgcaatgggttcaaacatcctcctttagctcagagaagtttgttattaccgaccttctgaagcctacttctgtcaacttgtcaaagtcattctccgtccagctttgttccattgctgggggttccttaaggcctaccccggaaattcaagaagtgaaaactcctgaagaactagagacctttatgcttaaacatggagaaaatattattgatactttaggagctgaagtagatagacttgagaaggaactgaaatctgggagcttagtgccttgcatcccagctgctccagctgtgactaaaaggggccaaggtacagctccagctattgcttcagtaggtggaagccccaagccttggcagcttccacgtggtgttgggcctgtgggtgcacagaagtcaagaactgaggtttggaaatctctgcctagatttcagaggatgtatgggaaacacctggatgcccagaatgatagatccactgacagcttgcacagtgcacctggaaaagccacagacactcaatgccagcccctgaaagcagccaaaagtgggctatatcctgcagagctaaagaggtggagctgcccatggctgtgggagcccaccttttgcatcagcgtgacctggagtgatctagaacaacttcgaaaaatcagacgacgaagtccccatgaagatactgagtcttttactgtatacttgagatcagatgtggaagcaaaatctttggaagtttggggaagccctgaagctcttgccagagagaaaaaattgcgtaaggaagcagaaatagaatacagagaaaaagggtctattaactcagctacattaattaattcagcagatatttatccgatacccgctatgaacaagaagctgtgcttggtgtttgaaatgtatatgcaaaattatccctactatggcaaactcctgcagcccaaatacctgcagcctctgcttgctgtacagttcaccagccttaccatggacactgaaattcgcctagtgtaa

SEQ ID NO: 7726 - DNA, 828 bp, Homo sapiens
  SIMILAR (22)..(516): 1001254mologous to Homo sapiens embryonic lung protein,accession number AF006621,Smith-Waterman Score=825.
tagcccctgtggtggaattcagttataatagcagccacttgcatgggccttacttctataacaggcaatccactgtatgacagcctaggttctttgggtgtgggcaccttattaggcatggtctcagcattcctcatctacactaacacagaagcactcttagggcggtccatccagccagaacaagtacaacggctcactgaactcctggagaatgacccatcagtaagggcaattcatgatgttaaagccacagatctgggattaggtaaagtaagatttaaggcagaagtagattttgatgggcgagttgttacaagatcatatttggaaaaacaagattttgaccaaatgttacaagaaattcaagaagtgaaaactcctgaagaactagagacctttatgcttaaacatggagaaaatattattgatactttaggagctgaagtagatagacttgagaaggaactgaaaaaacgaaatcctgaagttcgacatgtagatttggagatactgtgagtttgatggaatgaatcacctgggtggggaccttggaaacaagtttgtccgtccactctacaaagtttcctcctctcctacactgaaagactcagtgccatgcagaagccttttttttaagatgaaggaaatattttatgtaaagagcaactcagcaggacacagaactaaaactactacttacatctaacagacacactacaagttgaatcaatttgaaaatcatgtttttatgcttccatagggaacattttggttatttaaattgttcataatgtcccatatttcacctgttcagtgtatactgtg

SEQ ID NO: 7727 - DNA, 587 bp, Homo sapiens
  SIMILAR (16)..(246): 981254mologous to Homo sapiens dJ202D23.2 (novel protein similar to C21ORF5 (KIAA0933)),accession number AL121716,Smith- Waterman Score=371.
gggtcgacccacgcgtccgaaagaagacagaataaaacaaccaccaggaccaaggtcattcctgcagccagtgaagaacagcttttattagtggaattggttcgttcaatcagtgtcatgagagcagaaactgttatccagactgtaaaagaagttttaaagcagccaccagccatagccaaggacaagaaacatctttctttggaagtctgcatgcttcagtttttctatgcttatattcaaaggtaagattactgatattgatctgtccttactatgttgctagaaacagagaaacattatttatggatatattaatataagtaatgagtgtcttaacgacccagccatgtatatcctacaaacctaaagacctaaggatattgaagattcctagatagtaaaacactgaattgtgataaaatcatttaaacataaatgaaaagttgaacctactctcgaaactatgcatattgccactgaatccattattttggtataggtgaacatacagtaattcattctgcttttttaatgttaggaatgattacatgaaatatcttcttactatcatattccattttgcg

SEQ ID NO: 7728 - DNA, 4136 bp, Homo sapiens
  SIMILAR (2921)..(3079): 241254mologous to Homo sapiens dJ202D23.2 (novel protein similar to C21ORF5 (KIAA0933)),accession number AL121716,Smith- Waterman Score=40.
caattccaatggttgtgtctgattttgatcttccagaccaacagatagaaatacttcagagttctgactcgggatgttcacagtcctctgctggggacaacttgagttacgaagttgatcctgaaaccgtgaatgcccaagaggattctcaaatgcccaaggaaagctccccagatgatgatgttcaacaggtagtatttgacctgatatgtaaagttgtaagtggcctcgaagtggaatctgcatcagttacatctcaattagaaattgaagctatgcccccaaagtgcagtgatatagatccagatgaagagacgattaaaattgaagatgactccattcaacagagtcagaatgctttgctgagtaatgaaagttctcagtttctgtctgtgtctgcagagggaggccatgagtgtgtggcaaatggaatctccaggaatagctcctcaccttgtatttcaggaaccacacacactcttcatgactcttctgttgcttccatagaaaccaaatctagacaaaggagtcacagtagtattcaattcagcttcaaagaaaaattatcagaaaaagtttcggagaaggaaacaatagttaaggagtcaggtaaacaaccaggagcaaaacctaaagtaaaacttgccagaaaaaaggatgatgacaagaaaaaatcttcaaatgaaaaactcaaacaaaccagtgtattcttcagtgatggtctggatttagagaactggtatagctgtggagagggagacatttctgaaattgagagtgacatgggttctccaggatctcgaaaatctcccaatttcaacattcatcctctctatcaacatgtgctcctgtatctccagttgtatgattcatccaggactttgtatgctttctctgccatcaaagccatcttgaaaactaaccctatagcttttgtaaatgccatttcaactactagtgtaaataatgcatatactcctcagttgtctctccttcagaatctattggccagacaccggatttctgttatgggcaaagatttttatagtcacattccagtggactcaaatcataacttccggagttctatgtacatagaaattcttatttctctctgcttatattacatgcgtagccattacccaactcatgtcaaggttactgcacaagatttaataggcaatcgaaacatgcaaatgatgagcatagaaattctgacactactcttcactgagctggcaaaagtaatagaaagctcagcgaagggtttccctagttttatttctgatatgttatctaagtgcaaagttcagaaagtgattcttcattgtttgctgtcatctatctttagtgctcagaaatggcatagtgaaaaaatggcaggtaagaacctggttgctgtggaagaaggtttctcagaggacagccttattaatttctcagaggatgaatttgacaatggcagcacgttgcagtcacaacttcttaaggtgcttcagaggctgattgttctagaacacagagtaatgactattcctgaagagaatgaaacaggttttgattttgttgtatctgacttagaacacatcagtccccatcaacccatgacttctcttcagtatttgcatgctcagccaatcacatgtcaaggcatgttcctctgtgcagtgatacgagctttgcatcagcactgtgcatgtaagatgcacccacaatggattggtttaatcacatctactctgccttacatgggaaaagttctgcagagagtggttgtttctgtgacactacaactgtgcagaaatttagataatctaattcagcagtacaaatacgaaacaggattatctgatagtaggcctctgtggatggcatcaattattccaccagatatgattcttactcttttggaagggattacagccattatccattactgtttgttggatccaactacacagtatcaccaacttttggtcagtgtagaccagaaacacttgtttgaagcacgcagtggaatcctctcaatccttcatatgatcatgtcctctgtgacactgctttggagcatactgcatcaagctgattcttcagaaaagatgactattgccgcatccgcatctcttaccactattaatcttggagctacaaagaacttgagacaacagattcttgaattgttgggccccatttcaatgaatcatggtgttcactttatggctgccattgcatttgtgtggaatgaaagaagacagaataaaacaaccaccaggaccaaggtcattcctgcagccagtgaagaacagcttttattagtggaattggttcgttcaatcagtgtcatgagagcagaaactgttatccagactgtaaaagaagttttaaagcagccaccagccatagccaaggacaagaaacatctttctttggaagtctgcatgcttcagtttttctatgcttatattcaaagaattccagtgcccaatttagtggatagctgggcgtcactgttgatacttctgaaagactctatacaactgagtcttccagctccagggcagtttcttatacttggggttctgaatgagtttattatgaaaaaccctagtttggaaaataaaaaagaccaaagagaccttcaggatgtaactcacaaaatagtggatgcaattggtgcaattgctggttcttctctggaacagacaacatggctgcgacgaaatcttgaagttaagccttctcccaaaataatggtagatggaaccaatttggaatctgatgttgaagatatgttatcacctgcaatggaaaccgcaaacataactccttctgtatatagtgtccatgcattgacattactctctgaggttttggctcatcttttggatatggttttctatagtgatgaaaaggagcgggttattcctttacttgtaaatattatgcattatgttgtgccctacctcagaaatcacagtgcacataatgcccctagttatcgagcttgtgtccagctgctcagcagtcttagtgggtatcagtacacacggagagcttggaaaaaagaagcttttgacctctttatggatcccagtttctttcagatggatgcctcttgtgttaatcattggagagcaattatggacaatctgatgacacatgataaaacaacatttagagatttgatgactcgtgtagcagtggctcaaagcagttcacttaatctctttgcaaaccgtgatgtggagctagaacagagagctatgcttcttaaaagattagcatttgctatttttagcagtgaaattgaccagtaccagaaatatcttccagatatacaagagagattggttgagagtctccgtttgccacaggtgccaactctccattctcaagtgttcctgtttttcagagtgttacttttaagaatgtctccccaacatcttacctcactctggcctaccatgattacagaacttgtacaagtatttttactgatggagcaggaactcactgctgatgaagatatttcacggacttcagggccctctgtggctggtctggagacaacgtacacaggaggtaatggcttctctacttcatataacagccagcggtggttaaacctctatctctctgcttgcaaatttttggatttggctctcgcattgccctctgaaaaccttcctcagtttcagatgtaccgatgggcctttattccagaagcctcagatgattcaggtttggaagtcagaaggcagggtatacatcaacgagaatttaaaccttacgtggtacgactagcaaaacttcttcggaaaagagcaaagaaaaatccagaggaagacaactcagggagaacattgggttgggagccagggcacttgctgctcaccatctgcaccgtgcgcagtatggagcagctcctgccgttcttcaatgtgctcagtcaagtcttcaacagcaaagtcacaagccgatgtggaggacactcagggagtcctatcctctactcaaatgccttccctaataaggacatgaaactggagaaccacaaaccatgttccagcaaagccaggcaaaaaatagaagagatggtagaaaaagattttctggaagggatgataaaaacttga

SEQ ID NO: 7729 - DNA, 417 bp, Homo sapiens
  SIMILAR (2)..(415): 901254mologous to Homo sapiens hSgt1p,accession number D88208,Smith-Waterman Score=637.
aaaggaattttcagagttagtagcaaggattgattacaatgatggagaattcttgttaatagaagctgctgactttctccctaaatggctggatcctgaaaatagcaccaataggggatttttctgccatggggaattgtgtattatccctgcaccaataaaatttggagcagaatcttggttacccaccacacccccaacaattccacaagcattgaatataatcacagcacattcagaaaaaatacttgcttcaaaatctataccatctgttgtgaataggcgcatcacagggtacccagaaaaaattcaggcctcacttaatcgagcacactgcttccttccagctggcattgtggcagtgctaaagcagcgccccagattggtggctgcagcagtccaggcatttttacttat

SEQ ID NO: 7730 - DNA, 433 bp, Homo sapiens
attaacccagtctagaatttctgggaagcggaatgagtggccgcctcagtctctctgacaaaaaatagtaccacgtttttgatctgaaacttcctcttaatttagctctgaacacatcaatcaagcttgtgaaatgcatcctcctccttgcccctcatattttaagccatctgttgttcacagtacagtttgcacgacatctttgttcaaacatagctcagtttttctggcaccaaagcaaatttgggttaggttcgtgtatgcagagacaacctatgaggagggcccataaggcaccctccacttttgcgtgaggagatccgaaagcagaagtaatgggaggaaatggaagactagggttggagatgggatgggtggggcaagggatggaaaggtaaaggcagacaactaatgcgttccacttataacaagt

SEQ ID NO: 7731 - DNA, 437 bp, Homo sapiens
  SIMILAR (299)..(337): 461254mologous to Xenopus laevis small Rho-like GTPase Rnd1,accession number AF151014,Smith-Waterman Score=37.
  misc_feature (1)...(437): n = a,t,c or g
ctcagggattgaggatggtattcccagggctttagggcttaggcctattggggaaggaaaacaccatggctcaccatcagctctttctggcctacaccaggatctccctactacgataatgtccgtccactctgctacagcgactcggatgcagtattactatgttttgacatcagccgtccaaagacagtggacagcgcactcaagaaggtaagactagatcaactctctaatctctaactcagcatgaggaccaagaaggaatcgggaccttgtcatgaatgccctcttgtataacatcaagaaatggaagccagggaaggaagagatttgcccaaggccacaccattagctacagctctgggactggaactttgggcttcttaccccactgcctcccgccctttttgttatcccatgctgctttgcagagggcn

SEQ ID NO: 7732 - DNA, 487 bp, Homo sapiens
  misc_feature (1)...(487): n = a,t,c or g
ggggcatggnnnnaccttgacgccngctcagatggccgtaagaaccggctcgacccacgcgtccgcggacgcgtgggcagcaggccttttgttggttgcactaactgcaaggttgctgggaagtagagtccatttggttgatgagctttgactgcggttttggaaccttacctctcctccttagcccaatatgctgtctcgggtcctattcaaataaagttatttctcctggtctcnnnnnnnnnnnnnnnnnnnnnnnnnnnngggggggggcccttttaaaagatccctgggggggcccaattttcccgggggggggaaagaaatttttttttctttttggggggggtttttaaaaccccccgggggtttttgggaaagaaccctttttttgggggggggaaatttggggnnnnnnnnnnnnnaaaattttaagcctttgggggnnnnnnnnnntttttagggggtaaggggggaaacccccccg

SEQ ID NO: 7733 - DNA, 416 bp, Homo sapiens
  misc_feature (1)...(416): n = a,t,c or g
attttttaagaaagcagggaaatgcggggggttttcccccttttccccttaaaaannnnnnnnnnccccaaaggccttaaaatttnnnnnnnnnntgggcccataatgtcccccccccaaaaaaaggttcctttccaaaaatcccaaggagggttttaaaaccccccccaaaaagaaaaaaataatttctttccaccccccggaaaaattgggccccccaagggattttttaaaagggcccccccnnnnnnnnnnnnnnnnnnnnnnnggcaatgcaaaaatgtatactttaattttaaaacccaatttttgttctcaacttgaaaagggaacacttttttgtttcacaaacaagctggtcggttggaattctttttggaacagtagtcccgcgctaaacactggttcttgcctcc

SEQ ID NO: 7734 - DNA, 240 bp, Homo sapiens
accaccaagcaattccggtttgttttcccccttttccccttaaaaatttttattttcccctaaacgcttaaattttggaaggagggtgggcccccaatttcccccccccaaaaaaagggtcctttcccaaaaatccccagggggggtttataaggcccccccaaaaagaaaaaaaatttttctttcccacccccggtaaaattgggcccccccaagggaatttttaaaagggcccccccc

SEQ ID NO: 7735 - DNA, 471 bp, Homo sapiens
  SIMILAR (40)..(471): 361254mologous to Homo sapiens dJ383J4.1 (A Kelch motif- containing protein),accession number AL109921,Smith-Waterman Score= 218.
tccgaaactctccgatgaacaccacgccaagctcggcacgagggtgaagactttgtaagtgtatcaccgcagcacctccataagtttttggcctccattgatctaaatattgaaaatgaaaagcaggtctataatgctgccatcaagtggcttcttgccaatcctcagcatcattccaaatggttggatgaaacacttgcacaggttcgcctgccattgttgccggttgattttcttatgggtgttggggcaaaagaacagattgtcaagcaaaatctaaaatgtagagatttactggatgaagcaagaaattaccaccttcacttgagtagcagagcagtacctgactttgaatactccattcggactaccccaaggaagcatactgctggtgtgctgttttgtgtaagtggtcgaggtggatctggtgacccctttcgcagtattgaatgctattctatcaacaaaaac

SEQ ID NO: 7736 - DNA, 399 bp, Homo sapiens
  SIMILAR (12)..(398): 961254mologous to Mus musculus putative,accession number AK009235,Smith-Waterman Score=645.
cccacgcgtccgccaatgcaggcgatagcagggccatcattgtccggaatggtgaaatcattccaatgtcccgggagtttaccccggagactgagcgccagcgtcttcagctgcttggcttcctgaaaccagagctgctaggcagggaattcacccaccttgagttcccccgcagagttctgcccaaggagctggggcagaggatgttgtaccgggaccagaacatgaccggctgggcctacaaaaagatcgagctggaggatctcaggtttcctctggtctgtggggagggcaaaaaggctcgggtgatggccaccattggggtgacccgaggcttgggagaccacagccttaaggtctgcagttccaccctgcccatcaagccctttctctcctgct

SEQ ID NO: 7737 - DNA, 919 bp, Homo sapiens
aacttgaacaccaggaaagaggataccaggtctttggaggtctagagcaggggtcagtaaactgtttttgtaaaggataagacagaacatattttaggctttgcaggacacatggtctctgctgttgcagtgtgaaagcagccatagacaatatgtaacaaatgaacatggctttgttccaataaaactttactttacaaaagcagacagcaggctggatttggcccatgagctgtagtttgacaacccttggtctagaacattctttgccaagaccagctacagagccactggagagaccttccagaagccacattgcccccacagaatacagccagctggtgcctttgtccagctgcgggtgtgagggtttactgcctctgcctcaagcaaccattacctcccactctcacccagaagcaggccctggcctggaagcccgaactccagaactccagctcttttcaggtcagctcagcttctggtctgcagctgaagagactaaaactcgcccaccccaggcaagggcgacgaagccaccaaagcccaagagttcttggcaaagaagctgcatttcctcagaggaatcagagactcctggtctacccatcgacttcccctcatgcccatacgctctcgtaaggctacccctacggagtagcttgagtagccaagaagtcagagtcccccagggatcttccagagccaagagtctgcctgccagggaatgggaagcctggccccatccagcaactgccaccgtgagggcctgggcctggccctgctcaggagtcccactcatggagaggggtggcagcaggagtgggccaggcaggtaggtccctgggcccacagacaggggtggctgggaacagaaacagaaaactgacctgtccactgatgtcaccttagggtgctg

SEQ ID NO: 7738 - DNA, 633 bp, Homo sapiens
  SIMILAR (1)..(630): 951254mologous to Homo sapiens LIM protein,accession number AF061258,Smith-Waterman Score=1025.
cggtagcccacaatcaccaacgtgtggtccgagacttctcaggagctagcagatggactgagaagaggatcccagggcgacagtgtacagcaaaatggcccaccaagaaaacacattgtggagcgctatacagagttttatcatgtacccactcacagtgatgccagcaagaagagactgattgaggatactgaagactggcgtccaagaactggaacaactcagtctcgctctttccgaatccttgcccagatcactgggactgaacatttgaaagaatctgaagccgataatacggagaaggcaaataactctcaggagccttctccgcagttggcttcctcggtagcttccacacggagcatgcccgagagcctggacagcccaacctctggcagaccaggggttaccagcctcacaactgcagctgccttcaagcctgtaggatccactggcgtcatcaagtcaccaagctggcaacggccaaaccaaggagtaccttccactggaagaatctcaaacagcgctgcttactcaggatcagtggcaccagccaactcagctttgggacaaacccagccaagtgaccaggacactttagtgcaaagagctgagcacattccagcagggaat

SEQ ID NO: 7739 - DNA, 828 bp, Homo sapiens
  SIMILAR (3)..(209): 751254mologous to Mus musculus ENH2,accession number AB016588,Smith-Waterman Score=252.
atggcggcaaggcagccaaggcaaatgtaagaataggcgatgtggttctcagcattgatggaataaatgcacaaggaatgactcatcttgaagcccagaataagattaagggttgtacaggctctttgaatatgactctgcaaagagcatctgctgcacccaagcctgagcccggttcctgttcaaaagcccacagtcaccagcgtgtgttccgagacttctcaggagctagcagagggaccagagaagaggatcccagggtgacagtaaacacgcaaaatgggaaaatcccacctaaacgcccaccaagaaaaccacattgtggagcgctatacagagttttatcatgtacccacttcacagtgatgccagcaagaagagactgattgaggatactgaaagacttggcgtccaagggactggaaccaactccagtctcggctctttccgaatccttgccccagatcacttgggactgaacattttgaaagaatctgaagccgataatacaaagaagggccaaggaaaaagataccccttcacgtctttagtcccaaatacacaaaattaccgtgactggcaccatgaagttttcagcacgtgctcttaacgtacagtgatttatgagccttgccccccaagcagccagcacatacctttttcatttacttttttttttttcaacttcatagcaaaatctgtattaaatttgccttatgaaaaaatagaactttttctatacttttctaacaatttcctattgttgtgagaaaaggaagatgaaaatgttttgtgctagttggtagctcacaaatgtaaaaccaaaaa

SEQ ID NO: 7740 - DNA, 442 bp, Homo sapiens
caactctgcaccttcttaatctgccagtgtggctgtagtgggggagtttggccccgcccagcttggccttggtcatttgcagccaaaccctgggaagccaggctcaagtcagtggtccccggtcccagggagcagcacagtggccctgctctgccccaggcccgccactgcctcagaactgataaaattccctctatcctcccaggctcaaaatagctgcaagtggagctatattaggaaagggccagcacggagctccattccttctccatttttggccagtgctgacagctgcagggtcgtctcttgccctgaccagcccagggccccctgcagagggcagtgttggcctggcggggtgggggctgcctctgccctcccttggcagcctgctccttctttgacatttattcctgcctcctactcagctcccacgcgtccg

SEQ ID NO: 7741 - DNA, 495 bp, Homo sapiens
  SIMILAR (60)..(194): 971254mologous to Mus musculus putative,accession number AK002595,Smith-Waterman Score=254.
gaagaggacgaaaaaaataaccgtccgcgacgccgagacaaaccggacccgcaaccaccatgaacagcaaaggtcaatatccaacacagccaacctaccctgtgcagcctcctgggaatccagtataccctcagaccttgcatcttcctcaggctccaccctataccgatgctccacctgcctactcagaggtgcttccagtttgccagatttgaactagctgggaatactcttagggtggtcctttagtccttagctaaatctgacttcacatatttactcttcacaaatgctaacatgaataatctaaaacactatataatttggcaatttttgtcggagttgaaagtgcattatttgatgattttgtgttatttggcacaggctaaggtgcagaagatgaatttgcgttctgtgagcccaacattagctatagcagaaagtgatccaggagaatattgaaggccagtggaaaggcaacttgtataatcttac

SEQ ID NO: 7742 - DNA, 378 bp, Homo sapiens
  SIMILAR (82)..(243): 941254mologous to Homo sapiens nuclear transport receptor,accession number AJ133769,Smith-Waterman Score=251.
ctgtcttcatagttgtgcccttttaccctggctgcttatatagcctaatcttgtcatataatacctagtctcactttccccaccaggtttattcagcgtagccctgtcaccttgctgcggagccaagtggtcatccttatcttacagtgggccattgcctctactaccctggacctccgggatgccaattgtagtgtcatgaggtttgtacgagacctcattcatacaggggtagccaatgatgtaagtataaaaatgataccatttctacttaacagcttttatctcctatctctttgtcattccttaggagaaaaccagcatcccagtatttccttccttgatctatattggtagacatatatcatagtggatgtc

SEQ ID NO: 7743 - DNA, 401 bp, Homo sapiens
  misc_feature (1)...(401): n = a,t,c or g
aaagtgatctccnnnnnnnnnnnnnnnnnnnnnnnnnnnnnnnnnnnnnnnnnnnnnnnnnnnnnnnnnnnnnnnnnnnnnnnnnnnnnnnnnnnnnnnnnnnnnnnnnnnnnnnnnnnnnnnnnnnnnnnnnnnnnnnnnnnnnnnnnnnnnnnnnnnnnnnnnnnnnnnnnnnnnnnnnnnnnnnnnnnnnnnnnnnnnnnnnnnnnnnnnnnnnnnnnnnnnnnnnnnnnnnnngatagaaagcccagaaacaaactcatgtattgatggtcagttgctttttgacggtggtatcaggattacacactgtgcaaaggacagtnnnnnnnnnnnnnnnnnnnnnnnnnnnnnntcatccacatgcaggagaatgaaattagacccttatcttacaccaa

SEQ ID NO: 7744 - DNA, 358 bp, Homo sapiens
  SIMILAR (357)..(1): 401254mologous to Homo sapiens KIAA1466 protein,accession number AB040899,Smith-Waterman Score=252.
  misc_feature (1)...(358): n = a,t,c or g
nactagtaaatacttgttacctctacactttggcatctcagtgaagtccacctggagatcttcaaagggggctgctccataagcttgtatgccgggtggaacggctggaccttgcctcgcattatgctgtcggcaggtaacacaccactgcgtcaccattttggcaaggcctgacaaatgtgagatgtagaaataccagcctaacaacttttcaagtaattcctgacctcgatgggtggtttcatgcacagccagtacaactgcagctactctcccatccggtaaccgaattcatccttcctccatcacttgtcctccctttgcctggagaaagtcattttcttctttagaataagta

SEQ ID NO: 7745 - DNA, 1711 bp, Homo sapiens
  SIMILAR (1105)..(1527): 581254mologous to Homo sapiens BC62940_2,accession number AC004659,Smith-Waterman Score=423.
atggtgttggagaaacttgatttccacatgcagaagaatgaaggtggactctatgtcacaccagcccctggagattatattcggatcaatatcaccggctgggtttacaactactgcgatattggacgtaatatcatgctctctccctccctggacattaggagcaatatcacagctcctttacggcccaaaacggggatacaaatgtccccgagagaacagcggtatactgggatagatgaggatggtcacgtggtggagaggcgtgtttttggctaccagcccttcacctccgtcgaccttctcaactggaaaagcaatacaccgccctataccgaaaagccacaagccctaattgatttgctccaaactgttatccagacccacaaccacacctgggctgattggcaccagttgctcatgttcctctttaacagcgaagaaaggcggagagtcctccaagcagcaactaagtggctggaggaacatgcaccagctgattaccaaaacccccaagagtatgttgatgaccttctgctgggacaccccacggcagtcgggtgcaccaagggaacagatgccctacaccggcacctggaggactgtgggtataaggtgtccaagaagaaagctcagatctgccgacagcagccttgggcatcagtagactgggaactatacgtggatgggaacagcttcttcaacccccaaggagagagaggtgcagggtgtgcagtggtaaccctggacactgttgttgaagccagatcgttgccccaggccactgcagcccagaaagctgaactcattgctttcattggggccttagaactcagtgaagatctgattcctagatttcgactgcccttacggatcggctcacataacgggcctgcgtttttggctgccatggtacagaagacggcaaaggaaatgactaacaaggtcacgggggagtgtactccccctgcaatactggcagtaatctcgtcctccccaaacctggatgtgagcgacaagatcacagagggggtgtacacaccctgcgacattggaagtaatatgatcctctccccacctggatattgggaaagatatcacagcgcggaggatccagaactgcagcccatcctcgctgggctgtccctgtccatgtatctggtcacggtgctgaggaacctcctcatcagcctggctgtcagctctgactcccacctccacaccccaatgtgcttcttcctctccaacctgtgctgggctgacatcggtttcacctcggccacggttcccaagatgattgtggacatgcggtcgcatagcggagtcatctcttatgcggactgcctgacacggatgtctttcttggtcctttttgcatgtgtagaagacatgctcctgactgtgatggcctatgactgttttgtagccatctgtcgccctctgcactacccagtcatcgtgaatcctcacctctgtgtcttcttagtttcggtgtccttttccttagcctgcattggcgtgtacctgacttcagctgtggcaccacccctcaggaatggtgtggtggcgtcagtgacgtatgctgtggtcacccccatgctgaaccctttcatctacagcctgagaaacagggacattcaaagcgccctgtggaggctgcgcagcagaacagtcaaatctcatgatctgttccatcctttttcttgtgtgg

SEQ ID NO: 7746 - DNA, 2691 bp, Homo sapiens
  SIMILAR (2008)..(2685): 701254mologous to Homo sapiens olfactory receptor,accession number Y10529,Smith-Waterman Score=825.
atggtgtcagacatccggaaagaagacgggatgaatgttttacctctgaagtacatcccaaatgtgggagttaacttcagctttgctggggtctatttggccagtgaaactctgcctggttccttcgcacatccggaagccacttcacggggggccgtcgcaactggaaccacacacttggcatcggcggttgagccaaatggggactcgtggtgcaagcaacgctccccacgtgttagcgtgcattatattcggatcaatatcaccggctgggtgtgcacctgctgcgatattgaacgtaatatcatgctctctccctccctgaacattaggaacaatatcacagctcgtttacgacccaaaacggggacacaaatgcccctgagagagcagcggtatactgggatagatgaaaatgctcatgtagtggagagacgtgtttttgggtaccagcccttcacctgcgtcgaccttctcaactggaaaaacaatacatcgccctataccgaaaagccacaagccctaattgatttgctccaaactgttatccagacccacaaccacacctggaccgattggcaccagttgctcattttcctctttaacagtgaagaaaggcagagagtcctccaagcagcaactaagtggctagaggaacatgcaccagctgattatcaaaaccccgaacagtatggaaggacccagttgccaggaaccgacccccagttggacccacatgaaagagaggagatgcaaaggctaaaccgagacagggaagctctcttggaaggattaatgaggggagctcagaaggccacaaacgttaacaagctctctgaggtcattcagggaaaagaagaaagtccagcacaattctacgagagactgtatgaggcctatcatatgtatactccctttgatcccgatagccctgaaaatcagcgcatgattcacatggctttagtccatcaaagtgcagaagacatgagaagaaaactgcagaaacagactgggcttgcagggaagaatccatcccaattactagaaatagctagccaggtgtttgtaaacaggtatgcagtaagccgtaaggaaaacggcaaagagaatggaggtcaggcccggccacacgccgacctgtttgtcagctgcagcaatcagaggggcccccgcaaagaggcaagggaaagggggccctgggaaagaaactcagcttggctgtcagagtttgcagcgttgatgaccttctgctgggacaccccacggcagtcgggtgtgccaagggaacagatgccctacaccgcacctggaggactgtgggtagaaggtgtccaagaagaaagctcagatctgccgacagcagacggagtttctaaaggatggcccccctgttggagggccttggcagcaactgccctgctagtacaagaagcaaataagctgactcttgggcgaaacctgaacataaaggcctcccgtgctgtggtgatgaatactaaaggacgtcattggctaacgaatgccaggctcaccaagtaccaaactttggtctgtgaaaatccccgtataaccattgaagtttgtaacaccctacaccccgccaccttgctgccggtatcagggagccctgtcgagcctgattgtgtagaagtgttggactcaattgactctagcagacctgagctccgggaccagacttgggcatcagtagactgggagccacacgtggatgggagcagcttcttcaacccccaaggagagagaggtgcagggtatgcagtgataactctggacactgttgttgaaaccaggtcgttgccccaggccacttcagcccagaaagctgaacttaatgctttcatttgggccttagaactcagtgaggaggatccagaactgcagccggccctcgctttgctgtccctgtccctgtccatgtatctggtcacggtgctgaggaacctgttcagcatcctggctgtcagctctgactgccccctccacacccccatgtacttcttcctctccaacctgtgctggcctgacatcggtttcacctcggccatggttcccaagatgattgtggacacgcagtcgcatagcagagtcatctctcatgcgggctgcctgacacagatgtctttcctgctccttgttgcatgtatagaaggcatgctcctgactgtgatggcctatgactgctttgtagccatctgtcgccctctgcactacccagtcatcgtgaatcctcacctctgtgtcttcttcgttttggtgtcctttttccttagcctgttggattcccagctgcacagttggattgtgttacaattaaccatcatcaagaatgtggaaatctctaatttggtctgtgacccctctcaacttctcaaacttgcctgttctgacagtgtcatcaataacatattcatatatttcgatagtactatgtttggttttcttcccatttcagggatctttttgtcttactataaaattgtcccctccattctaaggatttcatcgtcagatgggaagtataaagccttctccacctgtggctgtcatctagcagttgtttgctggttttatggaacaggcattggcatgtacctgacttcagctgtgtcaccaccccccaggaatggtgtggtggcatcagtgatgtacgctgtggtcaccccatgctga

SEQ ID NO: 7747 - DNA, 1296 bp, Homo sapiens
  SIMILAR (763)..(698): 501254mologous to Feline leukemia virus gag-pol precursor polyprotein gPr80,accession number M18247,Smith-Waterman Score=54.
ctattgttctgaataccctgtgatgttgttcccaatatgcaaggggggagaggatgatactactctcaataccgcagggctattcacatccccagtgacatttttcctaatatctccacactttggcatctctgtgaagtctacctggagatcttcaaagggggcttctccgtaagctcgtatgccgggcggaacggctggaccttgcctagcatcatgctgtcggcaggtaacacacggctgcctcaccgttttggcaagggctctctttccttgggcgttgaagaagctgctcccatccacgtatagttcccagtctactgatgcccaaggctggtcctggaggtcaggtctgctagagtcaattgagtccaacacttctacacaatcagcctggacagggctctcataagcctcacacagtctctggtagaattgtgctggactttcttcttttccctgaatgacctcagagaccttgttaacgtttgtggccttccgagctcccctcttgaatccttccaagagagcttccctgtctcggtttagcctttgcatatcctctctttcatgtgggtccaactggaagtgggttcctggtgactgggtccttccacactcttgggggttttgataatcagctggtgcatgttcctctaaccacttagttgctacgtggagccctctccgcctttcacctttcatctctcttaaagaggaatatgagcaaccggtggcgatcagcccaggtggggttgtgggtcccattgcgatgggggtcctaagagccagggggagataggggctggctcttactccccgtaccgccgggggggggggcctcaccgccctgcgacggggctccttagagccagggagggggaggggctggctcttactcccggtatcgcaggaggtgtgtacaacccctgcgatattgggagtaatatcatcctctccccccaggatattaggaacaagatgaccgaagggatgtacacccactgcgatatcttccataatgtcatcctctaccccctggctattaggagtaacatcatagaggggtgtacactttctgtggtattgggagtcatatcctctcactgcgatattttccataatgtcatcctctaccccctggctattaggagtaacatcatagaggggtgtacattttctgcgatattgggagtcatatcctctcccgttggggcactgaggtccctgttttcttttaagctgccatcggggaccactctcggcatccacaggcccccttgtatgtggccccat

SEQ ID NO: 7748 - DNA, 319 bp, Homo sapiens
  SIMILAR (121)..(318): 501254mologous to Felis silvestris polyprotein,accession number X51929,Smith-Waterman Score=132.
gttgatgaccttctgctgggacaccccacggcagtcgggtgcaccaagggaacagatgccctacaccggcacctggaggactgtgggtataaggtgtccaagaagaaagctcagatctgccgacagcagccttgggcatcagtagactgggaactatacgtggatgggaacagcttcttcaacccccaaggagagagaggtgcagggtgtgcagtggtaaccctggacactgttgttgaagccagatcgttgccccaggccactgcagcccagaaagctgaactcattgctttcattggggccttagaactcagtgaag

SEQ ID NO: 7749 - DNA, 993 bp, Homo sapiens
  SIMILAR (993)..(502): 561254mologous to Friend murine leukemia virus pol protein,accession number M93134,Smith-Waterman Score=466.
  misc_feature (1)...(993): n = a,t,c or g
ctaatatccagagcgaaagaggatgatatgactctcaatatcgcagagggtgtacacccctcctgtcctattgttctgaataccctggagaaagtccttttcttctttagaagaagtaggtccaagatcaggtgcttgagggagcactgatgcccgaaagggggcagatgctgcttttcgagcctctctctctccttgggggttgaagaagctgctcccatccacgtatagttcccagtctactgatgcccaaggctggtcccggaggtcaggtctgctagagtcaattgagtccaacacttctacacaatcaggctcgacagggctctctgcgatgagggtcccaaagccagggggggaataggggctggttctcagtccccgcctcccggggggtgcctccccccgctgtgatgggggtcctaagagccagggggggaagaggggctggctctcagtcccctcctcctgggggatgcctcccgccaatgcgatgggggtctggagcaacacgcagcctaggtctctggtgggaaacttctgatggtctcgagccaacgccttcccgaagatggtgggggagttcttgaacccttggggaagcccggtccaagtgtactgattagtgacacctgactccggatcttcccactgaaaggcaaacagcttctgcctctcaggggataatctgataggaaagaaagcgtctttcaggtccaagcaggtgaaccagctgtcctcagctggcagcaaacccaacaatgtggacgggttaggtactgttggatgtaaagtcagtgtagcttgattaagcaagcacaaatcctgtactggccggtagtccttggtccgtggcttgggaaaaggcaggaggagagtgttgcatggagactgacaaggaacaataattccaaaagttcttaggtgcttgagacggacctggataccttgaagggcttctctggngaccgggtcccgcttttttctcaccgg

SEQ ID NO: 7750 - DNA, 2457 bp, Homo sapiens
  SIMILAR (1120)..(1587): 581254mologous to Moloney murine leukemia virus Pr180,accession number AF033811,Smith-Waterman Score=464.
atgttgaaaaattttaagaagggatttaatggcgactatggggttactatgacaccagggaaacttagaactttgtgtgaaatagattggccaacattagaagtgggttggccatcagaaggaagcctggacaggtcccttgtttctaaggtatggcacaaggtaactggtaagtcaggacactcagaccagtttccatacatagacacttggttaccacagtgggtaagagggcaggcagcagcagtgctagtagcaaagggacagatagtcaaggaaggatcccgctccacccaccgagggaaatcaactcctgaagttctgttcgacccaacatcagatgatccattgcaggagatggcaaaagtcatcccagtggtgccctccccttaccagggagagaggctccccacttttgagtccacagtgcttgtgcctccgcaagacaaacatatccctaggccacccagagtagacaagagaggaggtgaagcctcaggagaaacccctcccttggcagctcgtttaagacccaaaacggggatacaaatgtccttgagagagcagcggtatactggaatagatgaggatgggcacatggcggagaggcgtgtttttgtgtgccagcccttcacctctgccgaccttctcaactggaaaaacaataccccgtcctgtactgaaaagccacaagctctaattgatttgctccaaactattatccagacccataaccccacttgggctgattgccaccagttgctcatgttcctctttaacacagatgaaaggcggagagtgctccaagcagcaactaagtggctaggggaacatgcaccggctgattaccaaaacccccaagagtatgtaaggacccagttaccgggaaccgacccccagtgggacccaaatgaaagagaggatatgcaaaggctaaaccgatacagggaagctctcttagaaggattagaggggagcccagaaggccacaaacataccggtgctgaacattcggtagtaaccggcccagtcgcccccttatccaaaaagactattgacatcatcggagccatgggagtttcagcaaaacaagctttctgcttgccccggacttgtactcctgggaccaaggactacaggctggtacaggatttgcgcttggttaatcaggctacagtgactttacatccaacagtacctaacccgtacatattgctggggttgctgccagctgaggacagctggttcacctgcttggacctgaaagacgctttctttagcatcagattagcccctgagaggcagaagctgtttgcctttcagtgggaagatccggagtcaggtgtcactactcagtacacttggacctggcttccccaagggttcaagaactcccccaccatcttcggggaggcattggctcgagacctccagaagtttcccaccagagacctaggctgcgtgttgctccagtacgttgatgaccttttgctgggacaccccacggcagtcgggtgcgccaagagaacagatgctctactccggcacctggaggactgtgggtataaggtgtccaagaaaaaaagctcagatctgccaacagcaggatggcccccatgtttgagggccttggcagcaactgccctgctagtacaagaagcagataagctgactcttgggcaaaaccggaacataaaggccccccatgctgtggtgactttaatgaatactaaaggacatcattggctaatgagtgctagactcactaagtaccaaagtttgctttgtgaaaatccccgtataaccactgaagtttgtaacaccctgaaccccgctaccttgttcccagtatcagagagccctgttgagcatgactgtgtagaagtgttggactcagtttactctagcagacctgacctccgggaccagccttgggcatcagtagactgggaactatacgtggatgggagcagctttatcaacccacaaggagagagatttgcagggtatgcggtggtaactctggacactgttgttgaagccagatcgttgccccagggcacttcagctcagaaagctgaactcattgctttaattcgggccttagaactcagtgaagtgcatggagcattatataaagaaaagggcctattgaactctgggggaaaagacataaaatatcaacaagaaatcttgcaattattagaagcagtatggaaaccccacaaggtggcagttatacattgcagaggacaccagcgagcttccaccttggtgactcttaaatttgagaaacattggaatagtggattaattcggagtagcggtttttgtgatccacagatgaagcacagagaaaaggatagagatggagacacaaaaacattgatctcccaagctgtagagactgggtctcctttgggaatatctacaactaccaactgcacaacaaagtag

SEQ ID NO: 7751 - DNA, 1473 bp, Homo sapiens
  SIMILAR (193)..(690): 411254mologous to Murine leukemia virus pol polypeptide,accession number AF019230,Smith-Waterman Score=309.
atgcagctgggaatccaacaggctaaggaaaaaggacaccaaaatgaagaagacacagaggttgatgaccttctgctgggacaccccacggcagtcgggtgtgccaagggaacagatgccctacattggcacctggaggactgtgggtgtaaggtgtccaagaagaaagctcagatctgccgacagcaggccttggcagcaactgccctgcgagtacaagaagcaaataagctgactcttgagcaaaacctgaacataaaggcctcccgtgctgtggtgactttaatgaatactaaaggacatcattggctaacgaatgccagactcacccagtaccagacttggctctgtgaaaatccccgtataaccattgaagtttgtaacagcctacaccccgccaccttgctcccggtatcagagagccccgtcgagcctcgttgtgtagaagtgttggacacaattgactctagcagacctgacctccggggccagccttgggcatcagtagactgggaactatacgtggatgggagtagcttcttcaacccccaaggagagagaggtgcagggtgtgcagtgataaccctggacactgttgttgaagccagatcgttgtcccaggccacatcagcccagaaagctgaactcattgctttcattcgggccttagaactcagtgaggaagaaaaggactttctccaggtagagggaaggacaagtgatggaggaaggatggattcggttaccggatgggagagtactgtgccacagctgctaggagctgcagttgtactggctgtgcaagaaaccacccatcgacatcaggagtcactggaaaagttgttaggccggtatttctacatctcgcctttgtcagctcttgccaaaacggtgaggcagcggtgtgttacctgccgacagcatgatgcgaggcaaggtccagccgttctgcctggcataggagcttatggagcagccccctttgaaggtctccaggtggacttcacagagatgccaaagtgtggaggtaacaagtatgtactagttcttgtgtgtacctactctgggtgggtggaggcttatccaacgctaactgagaaagctcgtgaagtaacccgtgtgcttcttcgagacctgattcctagatttcgaccgcccttacggatcggctcagacaaggggcctgcgtttttggctgccttgttacagaagacggcaaagatgggcacacgcagtgacacacagctagcacacataggcacagtcctgcgggacatccatgtcagtgtctgttctgatgggccgaatctaagaacaggtttgaacgtcatccttgggggtgtggagtggcagagcactcctgggaatcttgtaagaagacaaggagagacaggacttcatcttcacatctaccactggtggcaggctgtggccatcttccccgtgtacctgggctcgagcctgcacatgaag

SEQ ID NO: 7752 - DNA, 2297 bp, Homo sapiens
  SIMILAR (242)..(727): 691254mologous to Mus musculus putative,accession number AK002595,Smith-Waterman Score=545.
  misc_feature (1)...(2297): n = a,t,c or g
gttttaatgntcttaaccgtctatgccgagaaatcnttggggagggcccataaggcaccctccactnttgnctgaggagatacgaaagcagaagtaatgggatctgtacttggggcacagagagggtttcagaggatccttgtgaaacactagttaaaagatgacgagtagctccgaacaggaagaggacgaaaaaaataaccagtccgcgacgccgagacaaaccggacccgcaaccaccatgaacagcaaaggtcaatatccaacacagccaacctaccctgtgcagcctcctgggaatccagtataccctcagaccttgcatcttcctcaggctccaccctataccgatgctccacctgcctactcagagctctatcgtccgagctttgtgcacccaggggctgccacagtccccaccatgtcagccgcatttcctggaagcctctctgtatcttcccatggcccaagtctgtggctgttgggcctttaaggttccacaatccccatggcttattatccagtcggtcccatctatccaccttggctccacaagtgcttggtgggaaaggagggtatgatgcaggtgccagatttggagctggggctactgctggcaacattcctcctccacctcctgggatgccctcccaatgctgctcagcttgcagtcatgcagggagccaacgtcctcgtaactcagcaggaaggggaacttcttcatgggtggttcagatggtggctacacccatctggtgaggaaccaaggccacctttgtgcccgggaaaagacatcacatacccttcagcacttctcacaatgtaactgctttagtcatattaacctgaagttgcagtttagacacatgttgttggggtgtctttctggtgcccaaactttcaggcacttttcaaatttaataaggaaccatgtaatggtagcagtacctccctaaagcattttgaggtaggggaggtatccattcataaaatgaatgtgggtgaagccgccctaaggattttcctttaatttctctggagtaatactgtaccatactggtctttgcttttagtaataaaacatcaaattaggtttggagggaactttgatcttcctaagaattaaagttgccaaattattctgattggtctttaatctcctttaagtctttgatatatattacttgttataaatggaacgcattagttgtctgcccttttcctttccatcccttgccccacccatcccatctccaaccctagtcttccatttcctcccgccagtctccaattgaaatcaatgggtgcaggacagaaagccaggncaggactaatttccttctttcctcgcacttctccccactcgtcatcttttaactagtgtttcacaaggatcctctgaaaccctctctgtgccccaagtcacagatgcccattaacttctgctttcgtatctcctcagggcaaaagtgggaggggtgccttatggggccctcctcataggttgtctctgcatacacgaacctaacccaaatttgctttggtgccagaaaaactgggcctatgtttggaaccaaggatgtcgtccaacctgtactgtgaaccaaccagtggggtttaaaaatatgaggggccaaggaggaggatgccattccaaaaagctggatggatgtgttcagagcctaaattaagaggagttttcagatccaaaaactgggttacccattttttgtccagagtgtctggatgccggcccactcaattcgggctcccccagaattccttagacttgggttaatagggtccatattggtgaatgtctcactaccaaaatgacctggagtccagtgaaatctccattaggggtttaagaatatttcagggatcccttaatgttttgaatttttgttttctgaaattgggattttattttattttaatcttataatttcagttcatctaaattgtgtgttctgtaccatgtgatgtttgactgtaccatttgactggtaatggaagttcagcgttggtatgtctcttctctacactggtggtgcaccttaacttggtggaatttttatactaaaaaatgtagaataaagactattttgaagatttgaataaagtgatgaagttgcattacacctcactgcaaggattctttacttagcttgtttttagatttcttctatatatattttatttatatcccatctagaattcagctaggtgctgctgctgctctgtttcctttgatgacgctttgaaataaaggcaggagtacaagcctaaaaaaa

SEQ ID NO: 7753 - DNA, 1236 bp, Homo sapiens
  SIMILAR (287)..(3): 481254mologous to Baboon endogenous virus strain M7 gag-pol precursor polyprotein,accession number D10032,Smith-Waterman Score= 245.
aaggcttgctgttgttgggatccccattcgaaaggttcccggtccccctactttgtgacctcatacaaaggcttggctaatactgcaaagtttgggatccacagtctgcaaaaccccgcagctcctaagaattttctcacctgctttctgctcttaggctccggtagagtgcaaatgacctgctttctttctgatcccaggctgcgctccccctgtcggatagtaaatcccaagtaacgtacctgcggtcggcagatctgagctttttttcttggacaccttatacccacagtcctccagatgccggagtagagcatccgttcccttggcgcacccgactgccgtggggtgtcccagcaaaaggtcatcaacgtactggagcaacacgcagcctaggtttctggtgggacacttctggaggtctcgagccaactcctccccgaagatggtgggggagttcttgaacccttgaggaagccaggtccaagtgtactgagtagtgacacctgactccggatcttcccactgaaaggcaaacagcttctggctctcaggggcgaatctgatgctaaagaaagcatctttcaggtccaagcaggtgaagcagctgtcctcagctggcagcaaccccagcaatgtgtacgggttaggtactgctggatgtaaagtcactgtagcctgcttaaccaagcgcaaatcctgtcccggccagtagtccttggtcttaggctcgggaacaggcaggaggggagtgttccatggagactgacaaggaactatcattccaaaggttcttaggcacttgagagggacctgaataccttcaagagcttctctggggaccgggtactgtttttgcctaactggctgggccccaggcttaacttcttgttttccttttagctgggggcatttgttcttccaatatcctatttctttacaataagcacactggttacactgcaagctctgacagccaggctgagtctctttcccgggtccccccttcccttgcctctttgaggagacccctccgactgctgcagctaacagctcggcgtttcgccgggcctgacgttcattctctctgcggttttccttagggcttactgcatccctgtttacaaacacctggttagctacttctaataactgtgatgtgttcgtccctgcaaacccatcctgtttctgcagttttcttctaatgtcttctgcgctttgactaactaaagccat

SEQ ID NO: 7754 - DNA, 1032 bp, Homo sapiens
  SIMILAR (19)..(315): 601254mologous to Homo sapiens myosin light chain kinase isoform 3A,accession number AF069602,Smith-Waterman Score=261.
atgggctcctgcatggcccgagcctccccaatgggcgccaccccctgctttgcggcggtgggtcccatcgactgccaggctgaggagtgccggcacacagtgtgggactggtgggtagctttgcctaccgccgctgtgggggatccaatagggcagcccatccagtatgctcgctccacctgcgaggccggcgtgggtgagctccacatccaggatgccctgccggaggaccatggcacctacacctgcctggctgagaatgccttggggcaggtgtcctgtagcgcccgggtcaccgtccgtgagggcacgtcccctggcccaaaggggaagactggccactgtgggctgggcagtgtcagtcccttagggatgaaggaactggcactgatggagaatgtggccgagcctggctccgtgaagctctctgccaggactgtccaggtccagccctctcttgcccttagtgtggcaccaggccatggtggggagcatggatgtggagccagcggcctgggtgttgatgaccttctgctgggacaccccacggcagtcgggtgtgccacgggaacggatgccccacaccggcacctggaggactgtgggtataaggtgtccaaaaaaaaagctcagatctgccaacagcagcatgatgcgaggcaaggtccagccgttccgcccggcatacaagcttatggagcagccccctttgaagatctccaggtagacttcagagagatgccaaagtgtggaggtaacaagtatgtactagttcttgggcgtacctactctgggtgggtggaggcctatccaacacgaactgagaaaactcgtgaagtaacccctgtccttcttcgagatctgattcgtagatttcgaccgcccttatggatcggctcagacaacgggcctgcatttttggctgccttggtacagaagacggcaaagggtattcagaacaatattacaggaggggtgtacaccctctgcgatattgacagtcatatcatcctctttcgctctggatattag

SEQ ID NO: 7755 - DNA, 2800 bp, Homo sapiens
  SIMILAR (2117)..(2794): 701254mologous to Homo sapiens olfactory receptor,accession number Y10529,Smith-Waterman Score=827.
atggtgtcagacatccggaaagaagacgggatgaatgttttacctctgaagtacatcccaaatgtgggagttaacttcagctttgctggggtctatttggccagtgaaactctgcctggttccttcgcacatccggaagccacttcacggggggccgtcgcaactggaaccacacacttggcatcggcggttgaaccaaatggggactcgtggtgcaagcaacgctccccacgtgttaacgtgcattatattcggatcaatatcaccggctgggtgtgcacctgctgcgatattgaacgtaatatcatgctctctccctccctgaacattaggaacaatatcacagctcgtttacgacccaaaacggggacacaaatgcccctgagagagcagcggtatactgggatagatgaaaatgctcatgtagtggagagacgtgtttttgggtaccagcccttcacctgcgtcgaccttctcaactggaaaaacaatacatcgccctataccgaaaagccacaagccctaattgatttgctccaaactgttatccagacccacaaccacacctggaccgattggcaccagttgctcattttcctctttaacagtgaagaaaggcagagagtcctccaagcagcaactaagtggctagaggaacatgcaccagctgattatcaaaaccccgaacagtatggaaggacccagttgccaggaaccgacccccagttggacccacatgaaagagaggagatgcaaaggctaaaccgagacagggaagctctcttggaaggattaatgaggggagctcagaaggccacaaacgttaacaagctctctgaggtcattcagggaaaagaagaaagtccagcacaattctacgagagactgtatgaggcctatcatatgtatactccctttgatcccaatagccctgaaaatcagcgcatgattcacatggctttagtccatcaaagtgcagaagacatgagaagaaaactgcagaaacagactgggcttgcagggaagaatccatccccaattactacaaatagctagccaggtgtttgtaaacaggtatgcagtaagccgtaaggaaaacggcaaagagaatggaggtcaggcccggccacacgccgacctgtttgtcagctgcagcaatcagaggggcccccgcaaagaggcaagggaaagggggccctgggaaagaaactcagcttggctgtcagagtttgcagcgttgatgaccttctgctgggacaccccacggcagtcgggtgtgccaagggaacagatgccctacaccgcacctggaggactgtgggtagaaggtgtccaagaagaaagctcagatctgccgacagcagacggagtttctaaaggatggcccccctgttggagggccttggcagcaactgccctgctagtacaagaagcaaataagctgactcttgggcgaaacctgaacataaaggcctcccgtgctgtggtgactttaatgaatactaaaggacatcattggctaacggatgccagactcatcaagtaccaaactttgctctgtgagaatccccgtataaccattgaagtttgtaacaccctacaccccgcctccttgctcccggtatcagagagcactgtcgagcctgattgtgtagaagtgttggattcagttgactctagcagacctgacctccgggaccaagcttgggcatcaggagactggaaactatacgtgtatgggagcagcttcttcaacccccaaggagagagaggtctccaggtggacttcaccttcacggagatgccaaagtgtggaggtaacaagcatgtactggttcttgggcgtacctactctgggtgggtggaggcctatccaacacgaactgagaaagctggtgaagtaatccctgtgcttcttcgagatgtgattcctagatttcgaccgcccttatggatcggctcagacaacgggcctgcgtttttggctgccttggtacagaaaacggcaaagccggccctcgctttgctgtccctgtccctgtccatgtatctggtcacggtgctgaggaacctgttcagcatcctggctgtcagctctgactgccccctccacacccccatgtacttcttcctctccaacctgtgctggcctgacatcggtttcacctcggccatggttcccaagatgattgtggacacgcagtcgcatagcagagtcatctctcatgcgggctgcctgacacagatgtctttcctgctccttgttgcatgtatagaaggcatgctcctgactgtgatggcctatgactgctttgtagccatctgtcgccctctgcactacccagtcatcgtgaatcctcacctctgtgtctttttcgttttggtgtcctttttccttagcctgttggattcccagctgcacagttggattgtgttacaattaaccatcatcaagaatgtggaaatctctaatttggtctgtgacccctctcaacttctcaatcttgcctgttctgacagcgtcatcaataacatattcatatatttcgatagtactatgtttggttttcttcccatttcagggatctttttgtcttactataaaattgtcccctccattctaaggatttcatcgtcagatgggaagtataaagccttctccacctgtggctgtcatctagcagttgtttgctggttttatggaacaggcattggcatgtacctgacttcagctgtgtcaccaccccccaggaatggtgtggtggcttcagtgatgtacgctgtggtcaccccatgctga

SEQ ID NO: 7756 - DNA, 396 bp, Homo sapiens
  SIMILAR (2)..(394): 881254mologous to Homo sapiens fatty acid amide hydrolase,accession number U82535,Smith-Waterman Score=632.
ctcaattctgaagcttccccaatggcttaaaggactgctggccttcctggtgaagcctctgctcccaaggctgtcagctttcctcagcaacatgaagtctcggtcggctggaaaactctgggaactgcagcacgagatcgaggtgtaccgcaaaaccgtgattgcccagtggagggcgctggacctggatgtggtgctgacccccatgctgggccctgctctggacttgaatgccccaggcagggccacaggggtggtgcctgtcaccacggtgactgctgaggacgaggcccagatggaacattacaggggctactttggggatatctgggacaagatgctgcagaagggcatgaagaagagtgtgggactgccggtggccgtgcagtgtgtggc

SEQ ID NO: 7757 - DNA, 1776 bp, Homo sapiens
  SIMILAR (1549)..(1773): 971254mologous to Homo sapiens fatty acid amide hydrolase,accession number U82535,Smith-Waterman Score=388.
tgccgggcggtaggcagcagcaggctgaagggatcatggtgcagtacgagctgtgggccgcgctgcctggcgcctccggggtcgccctggcctgctgcttcgtggcggcggccgtggccctgcgctggtccgggcgccggacggcgcggggcgcggtggtccgggcgcgacagaagcagcgagcgggcctggagaacatggacagggcggcgcagcgcttccggctccagaacccagacctggactcagaggcgctgctagccctgcccctgcctcagctggtgcagaagttacacagtagagagctggcccctgaggccgtgctcttcacctatgtgggaaaggcctgggaagtgaacaaagggaccaactgtgtgacctcctatctggctgactgtgagactcagctgtctcaggccccaaggcagggcctgctctatggcgtccctgtgagcctcaaggagtgcttcacctacaagggccaggactccacgctgggcttgagcctgaatgaaggggtgccggcggagtgcgacagcgtagtggtgcatgtgctgaagctgcagggtgccgtgcccttcgtgcacaccaatgttccacagtccatgttcagctatgactgcagtaaccccctctttggccagaccgtgaacccatggaagtcctccaaaagcccagggggctcctcagggggtgaaggggccctcatcgggtctggaggctcccccctgggcttaggcactgatatcggaggcagcatccgcttcccctcctccttctgcggcatctgcggcctcaagcccacagggaaccgcctcagcaagagtggcctgaagggctgtgtctatggacaggaggcagtgcgtctctccgtgggccccatggcccgggacgtggagagcctggcactgtgcctgcgagccctgctgtgcgaggacatgttccgcttggaccccactgtgcctcccttgcccttcagagaagaggtctacaccagctctcagcccctgcgtgtggggtactatgagactgacaactataccatgccctccccggccatgaggcgggccgtgctggagaccaaacagagccttgaggctgcggggcacacgctggttcccttcttgccaagcaacataccccatgctctggagaccctgtcaacaggtgggctcttcagtgatggtggccacaccttcctacagaacttcaaaggtgatttcgtggacccctgcctgggggacctggtctcaattctgaagcttccccaatggcttaaaggactgctggccttcctggtgaagcctctgctgccaaggctgtcagctttcctcagcaacatgaagtctcgttcggctggaaaactctgggaactgcagcacgagatcgaggtgtaccgcaaaaccgtgattgcccagtggagggcgctggacctggatgtggtgctgacccccatgctggcccctgctctggacttgaatgccccaggcagggccacaggggccgtcagctacactatgctgtacaactgcctggacttccctgcaggggtcggtgcctgtcaccacggtgactgctgaggacgaggcccagatggaacattacaggggctactttggggatatctgggacaagatgctgcagaagggcatgaagaaaagtgtggggctgccggtggccgtgcagtgtgtggctctgccctggcaagaagaagtgtgtctgcggttcatgcgggaggtggagcgactgatgacccctgaaaagcagtcatcctga

SEQ ID NO: 7758 - DNA, 772 bp, Homo sapiens
aggatcagcagaaacaaacggcatgtttggaaggagggagctgagtctggtgaggaggaggtggacaggatccctgcatagagactgggattgctgtgggccgggcgagcaagctgggaaggatgtggggatgggagtgcctggaccgagcattttgtttcccagcaaaggtgatttcgtggacccctggctggggcatgagtggaaaggaccaggaagtgggggttggcctgggccaagggtggggcacccgggagagatgccactgttagagatctgagctgacctgagctgcgccaggccctacttgccccttagtggctggggctggaaaagcagggcgtaaacctccctgtttcatgccctgacgtcccatggactcactccttcccttaccaccaggcttcaggactggcagcagctatggcctctcccgtgtcctgagggtagcgaggaatcggccctgggctagtcctggctctgctgtggagtcaccaagtgccagcctgtgcccctctggggcctgattttctcatccagacagtaggggtttgaacttccctctcagagctcccatggggttgtgaagggtccacggaggggtgagatctagagggttggcagtaggggtctgatgttgctgatctccgtggctgtgaccatcatggctggtgaccacactccttctgcccagttcggctggaaaactctgggaactgcagcacgagatcgaggtgtaccgcaaaaccgtgatttgccagtggagggcgct

SEQ ID NO: 7759 - DNA, 372 bp, Homo sapiens
aaatggctgccccgacgtcagaatgatcctcccctcctgcctggcaacctcggccgccctgcggtggtcttcaccattgcccagcatgcgtgcatccacaccgagacagcggaggctccgtgccagcccctgcagcatgttgtcacacaccacacggaaggccctggccggaatttgaggggcagcgccctcagacacagccacagccacagggacctgcctgggtgcggccggtgctgacgctttctgcaggccgggtggcttccgtgcccctggtctctctctgtgcctgggcctccggctcccagccaggtcctccgacaggtggaagcgggcgggctatctgcacagggcttggtgcacctccagcag

SEQ ID NO: 7760 - DNA, 769 bp, Homo sapiens
agggtggtggcttctgttctccctggactcttgggcatctgaggcccacttaccccgccccgtaggccactgcgtgctgtgatttggtcacaccgcaggccttatgatacaacaggtcttttgtcactggatacagtggatgccagataaggtttctgaaggggagggctgctgctcttcagttcagttttacgctcccagtgaggggggaccatctctgttatttgacacctcgtatttcttacaaatctaattgtttctactcttagaaatagaatctaaccaatgcaactctgatcattatgtgctgtgctgtggaaaggaaagatttttttaaaaatcaactgggaagggttcaggaagtaaaactaggaagagaaactttttgtcctaagggaataaaactaagactaacttaaggaaaattgtgcctcgtgtattggtggcacggctggctcatttatgcaggtggtagtaaattgtgtgtagttagtatagttctccttgcagaaaaacatgggcaccgtactgggtttctcttgttcccagcctggggttttgtcctcaccattgtacagtatccattctgaacggacacacctggcattcccaggtgtttctgagagacacaggcctcgactctgagtgagtctttgtgagtgggtatggctgtcagtgcactgagaacaacacttcttgcctctcaggattttgaagcaagagcaccccgagttggcagtcctcgcagactcggttgaccttcaagagg

SEQ ID NO: 7761 - DNA, 425 bp, Homo sapiens
  SIMILAR (1)..(27): 771254mologous to Rattus sp. reverse transcriptase homolog,accession number S80119,Smith-Waterman Score=32.
  misc_feature (1)...(425): n = a,t,c or g
aaaacattggtgaaagaaattgaagagtacttttaaaaaggaaagatattccatatttgtggatgggaagaatattattnnnnnnnnnnnnnnnnnnnnnnnnnnnnnnnnnnnnnnnnnnnnnnnnnnnnnnnnnnnnnnnnnnnnnnnnnnnnnngcagnnnnnnnnnnntcctannnnnnnnnnnnnnnnnnnnnnnnnnnnnnnnnnnnnnnnnnnnnnnnnnnnnnnnnnnnnnnnnnnnnnnnnnnnnnnnnnnnnnnnnnnnnnnnnnnnnnnnnnnnnnnnnnnnnnnnnnnntgacactggcataaaaacaaacagatagaccaatggatcaaaatcaagaacccaaaaacaaatccccccacctacagggaacttatttttggccaaggggcccaaaacaatacctggggaaaag

SEQ ID NO: 7762 - DNA, 410 bp, Homo sapiens
  SIMILAR (4)..(30): 771254mologous to Rattus sp. reverse transcriptase homolog,accession number S80119,Smith-Waterman Score=32.
  misc_feature (1)...(410): n = a,t,c or g
acgaaaacattggtgaaagaaattgaagagtacatatttaaaggaaagatattccatatttgcggattggaagaatattattnnnnnnnnnnnnnnnnnnnnnnnnnnnnnnnnnnnnnnnnnnnnnnnnnnnnnnnnnnnnnnnnnnnnnnnnnnnnnngcagnnnnnnnnnnntcctannnnnnnnnnnnnnnnnnnnnnnnnnnnnnnnnnnnnnnnnnnnnnnnnnnnnnnnnnnnnnnnnnnnnnnnnnnnnnnnnnnnnnnnnnnnnnnnnnnnnnnnnnnnnnnnnnnnnnnnnnnntgacactggcttaaaaacaaacagatagaccaatggatcagaatcaagaacccagaaacaaatccacacacctacagtgaactcatttttgacaaaggtgccaagg

SEQ ID NO: 7763 - DNA, 491 bp, Homo sapiens
  SIMILAR (220)..(489): 961254mologous to Homo sapiens heat shock protein 90,accession number D87666,Smith-Waterman Score=443.
cccacgcgtccggccacgcgtccgcccacgcgtcctttcactcgtccgaaaacatgaaattataacctgtgctctttggatacctaatgcgacatttaagttgtatttgacagtagatagtattttggatctattgaaatttgggttctacagatttcatttcacaatgaaagtttacgaattaatctttctaggttcctaatcatcactttttgattacaggtggttgtgtcaaaccgagtggtgacatctccatgctgtattgtcacaagcacatatggctggacagcaaacatggagagaatcatgaaagctcaagccctaagagacaactcaacaatgggttacatggcagcaaagaaacacctggagataaaccctgaccattccattattgagaccttaaggcaaaaggcagaggctgataagaacgaccagtctgtgaaggatctggtcatcttgctttatgaaactgcgctcctgtcttctgg

SEQ ID NO: 7764 - DNA, 501 bp, Homo sapiens
  SIMILAR (3)..(500): 841254mologous to Mus musculus putative,accession number AK011751,Smith-Waterman Score=770.
gattagttattttggattacatcatcagaaatacagacaggggcaatgataattggttagtcagatacgaaaagcagaaatgtgaaaaggaaattgaccataaggaatcaaaatggattgatgatgaagaattccttattaaaatagctgcaattgataatggtctagcatttccttttaaacatcctgatgaatggagagcatatccatttcactgggcttggcttcctcaagcaaaagttcccttttctgaagaaataagaaatttgattctaccatatatttctgacatgaactttgtgcaagatttatgtgaagatctctatgaactttttaagactgacaaaggatttgacaaagccacttttgaaagtcagatgtctgtgatgaggggtcagatcttaaaccttactcaggcattgagagacgggaagagtcctttccagctagtacagataccttgtgtgattgtggaacgcagtcaaggtggaagtcagggtc

SEQ ID NO: 7765 - DNA, 708 bp, Homo sapiens
  SIMILAR (363)..(295): 1001254mologous to Homo sapiens hypothetical protein,accession number AL162045,Smith-Waterman Score=135.
tagaataagaagtcccaggagtcagagggccagctctcccagggtctcaagcctgccagctttcagcctggagtggtggtaatccaccctccaggggtctccagggtgccaaccgtggctctcgggacttgtcagcctccatcatcacaggagcagattccttctcatcgatctttttctccagatacagagatgggtgtgtcccctgctggctctggttctttggagaccccggctaacacacacccagcaggacctgccgggcatctgagctgccctggggtgtcacaggtgaagccagcagtggcgggtgggaagtgacgtgtcatgggtgaacagcagtggagggtggagctgttgagccagtcctgggcggcgtatggctggataggaggtgtcccaggccacactttaaatgaggtgactcgagaccctctgagatgaagggaccctgaacgttgatcattttgacctcccatctctaggagcatgtccagagtctgccattccttccagaaaggaaaaaggagaactcacatcaagatctcccttgtttagccagggaggtgggagtggggccggggggcagccaggaaacatgagcacgttcgtcatggagggcaggggctgcacgggcggccaggcagtgtgagcccatggtcagcaccagcggcgagctgtcatctccctgtgcctcagttcccttcc

SEQ ID NO: 7766 - DNA, 475 bp, Homo sapiens
  SIMILAR (220)..(270): 941254mologous to Homo sapiens uridine phosphorylase,accession number X90858,Smith-Waterman Score=80.
  misc_feature (1)...(475): n = a,t,c or g
cggctctctgcgcaggccgagtgggccaagagaagcgaggaactccgcagctcgtcgacacgtctcgtctcctgtcccaattcagggcttgttgaggtgactcgcggtcgnggtggactcgccggcagacactgctggaacgcctggagcgcctcccactgcagacgtctgtccgcctccagccgctctcctctgacgggtcctgcctcagttggcggaatggcggccacgggagccaatgcagagaaagctgaaagtcacaatttgtgtgtgttggtggaagcccctcccggatgaaaagccttcatcaggtctggagcccggcactgtggtcataacatgagcaggcagtggatacctncttcaaggcagaagtttgaagcagattgtcctggggaaagcgggtcatccggaaaacggaccttaacaagaagctggtgcaggagctgttgctgtgttctgcanaactngagcn

SEQ ID NO: 7767 - DNA, 734 bp, Homo sapiens
  SIMILAR (325)..(366): 1001254mologous to Homo sapiens uridine phosphorylase,accession number X90858,Smith-Waterman Score=69.
  misc_feature (1)...(734): n = a,t,c or g
tagtccagtgcggtggaattccgagagccgtcccttcgtccggccctggagcattgcgtttgtcgccggtgtcgcagtgcgaggatggcgccgcgggtgtagcggctctctgcgcaggccgagtgggcccagagaagcgaggaactccgcagctcgtcgacacgtctcgtctcctgtcccaattcagggcttggtgaggtgactcgcgagtcgcgggtgactcgccggcaggacactgcctggaacgcctggagcgcctcccactgcagacgtctgtccgcctccagccgctctcctctgacgggtcctgcctcagttggcggaatggcggccacgggagccaatgcagagaaagctgaaagtcacaagtctggagcccggcactgtggtcataacagagcaggcagtggatacctgcttcaaggcagagtttgagcagattgtcctggggaagcgggtcatccggaaaacggaccttaacaagaagctggtgcaggagctgttgctgtgttctgcagagctgagcgagttcaccacagtggtggggaacaccatgtgcaccttggacttctatgaagggcaaggccgtctggatggggctctctgctcctacacggagaaggacaagcaggcgtatctggaggcagcctatgcagccggcgtccgcaatatcgagatggagtcctcggtgtttgccgccatgtgcagcgcctgcggnctccaagcggncgtgg

SEQ ID NO: 7768 - DNA, 581 bp, Homo sapiens
  SIMILAR (362)..(577): 871254mologous to Homo sapiens uridine phosphorylase,accession number X90858,Smith-Waterman Score=311.
gtccttaaattagcttaaaatgtccctgtcctcaacagggacatttttgtttttgtttaaaaaacagggatggttggccactgcacccagccctctactttgttttttgtgcctttctcttccatagtgtccataatgatcatgcattaattactttcatagcttaaaaaaaaagttgaatgggaaaaatgggtcactgtgtatttgagaacagaactggatgcttcgtgtttggatgtgtgggtggatctgcttctttcttccatatgctctgctgtgtgctccctggctgccctgctttaattttattttgttttacacccctgcaatatccttggatgtctggcttttttttcctccaggtctgggaagccccggcactgtggtcataacagagcaggcagtggatacctgcttcaaaggcagagttttgagcaggattgtcctggggaagcgggtcatccggaaaacggaccttaacaagaagctggtgcaggagctgttgctgtgttctgcagagctgagcgagttcaccacagtggtggggaacaccatgtgcaccttggacttctatgaaaggg

SEQ ID NO: 7769 - DNA, 1374 bp, Homo sapiens
  SIMILAR (353)..(832): 801254mologous to Homo sapiens uridine phosphorylase,accession number X90858,Smith-Waterman Score=635.
attcgagtgctccggagaacagacccgcgccccgccgtccgcgagcctcccgagagccgtcccttcgtccggccctggagcattgcgtttgtcgccggtgtcgcagtgcgaggatggcgccgcgggtgtagcggctctctgcgcaggccgagtgggcccagagaagcgaggaactccccagatcgccgacacgtctcgtctcctgtcccaattcagggcttggtgaggtgactcgcggtcgcgggtgactcgccggcaggacactgcctggaacgcctggagcgcctcccactgcagacgtctgtccgcctccagccgctctcctctgacgggtcctgcctcagttggcggaatggcggccacgggagccaatgcagagaaagctgaaagtcacaatgattgccccgtcagacttttaaatccaaacatagcaaaaatgaaagaagatattctctatcatttcaatctcaccactagcagacacaatttccccaccctgttttgggaatttaaatttggtttgtttggtggaaaccctctcccggatgaagcccttcattgaggtgccttggtccagagatcggccttgactgcccagttagagactatcccaaccatctgtgcgggaactgaccgctatgccatgtataaagtaggaccggtgctgtctgtcagtcatggtatgggcattccttctatctcaatcatgttgcatgagctcataaagctgctgtactatgcccggtgctccaacgtcactatcatccgcattggcacttctggtgggataggtctggagccgggcactgtggtcataacagagcaggcagtgggatacctgcttcaaggcagagtttaagcagatttgtcctggggaagcgggtcatccgggaaaacggtaccttaacaagaagctggttcaggagctgttgctgggtttctgcagagctgagcgagttcaccacacagtggtggggaacaccatgtgcacccttggacttctatgaaagggcaaggccgtcatggatggggctctctgctcctacacggagaaggacaagcaggcgtatctggaggcagcctattgcagcccgcgtcccgcaattattcgagatggagtcctcggtgtttgccggccatgtgcagcgcctgcggcctccaagcggccgtggtgtgtgtcaccctcctgaaccgcctggaaggggaccagatcagcagcccctcgcaatgtgctcagcgagtaccagcagacggccgcagcggctggtgagctacttcatcaagaagaaactgagcaaggcctgagcgctgccctgcacctccacagaccccctgtgatgacttgccattaaaagcattgtaccaaatcaaaaa

SEQ ID NO: 7770 - DNA, 337 bp, Homo sapiens
  SIMILAR (3)..(275): 501254mologous to Drosophila melanogaster ubiquitin-specific protease,accession number X99211,Smith-Waterman Score=224.
agcagtggtacagcttcaatgatcaacatgtcagcaggataacacaagaggacattaagaaaacacatggtggatcttcaggaagcagaggatattattctagtgctttcgcaagttccacaaatgcatatatgctgatctatagactgaaggatccagccagaaatgcaaaatttctagaagtggatgaatacccagaacatattaaaaacttggtgcaaaaagagagagagttggaagaacaagaaaagagacaacgagaaattgagcgcaatacatgcaagataaaattattctgtttgcatcctacaaaacaagtaatgatggaaaataaatt

SEQ ID NO: 7771 - DNA, 375 bp, Homo sapiens
  SIMILAR (2)..(373): 891254mologous to Sus scrofa glyceraldehyde 3-phosphate dehydrogenase,accession number AF017079,Smith-Waterman Score=557.
gaaccatgagaaggatgacaacagcctcaaaatcatcagcaatgcctcctgcaccaccaactggttaacacccctggccaagggcatccatgacaactttggtatcgtggaaggactcatgaccacagtccatgccatcactgccacccaaaaaactggggatggcccctccgggaaactggggcgtgatggccgcggggctctccaaaacatcatccctgcctctactggggctggcaaggctgggggcaaggtcatccctgagctgaacgggaagctcactggcatggccttccgtgtccccactggcaacgtggcaggggtggacctgacctgccggctaaaaaaacctggcaaatatgatgacatcaaaag

SEQ ID NO: 7772 - DNA, 1185 bp, Homo sapiens
  SIMILAR (84)..(776): 521254mologous to Felis catus glyceraldehyde-3-phosphate dehydrogenase,accession number AB038241,Smith-Waterman Score=444.
gaattcggcacgaggttcgacagtcagccgcatcttcttttgcgtcgccagccgagccacatcgctcagacaccatggggaaggtgaaggtcggagtcaacggatttggtcgtattgggcgcctggtcaccagggctgcttttaactctggtaaagtggatattgttgccatcaatgaccccttcattgacctcaactacatggtttacatgttccaatatgattccacccatggcaaattccatggcacccgtcaaggcttgagaacgggaagcttgtcatcaaatggaaatcccatcaccatcttccaggagccgaagattccctccaaaatcaaagttgggggcgatgctgggcgcttgaagtacgtccgtggagttccacttggccgtcttcaccacccatggagaaaggcttgggggcttcattttgcagggggggagccaaaagggtcaatcaatctctgcccccctctggctgatgccccccatgtttcggtcatggggtgtgaaccattgagaagtatgacaacagcctcaaggatcatcagcaatggcctcctgcaccaccaactgcttaacaacccttggccaaggtcatccatgacaactttgggtatcgtgggaaggactcatgaccacagtccatggccatcacttgccacccagaagactgtgggatgggcccttccgggaaactgtgggcgtgatgggcccgcggggctcttccagaacatcatccctgcctctactggcggctgccaaggctgtgggcaaggtcaatcccttgagcttgaacgggggaagctcacttgggcatgggcttccgtgtccccaatgccaacgtgttcagtggtggacctgacctgccgtctagaaaaacctgccaaaatatgatgacatcaagaaggttgtgaagcaggcgtcggagggcccccttaagggcatcctgggctacactgagcaccaggtggtctcctctgacttcaacagcgacacccactcctccaccttcgacgctggggctggcattgccctcaacgaccacttttgtcaaggctcatttcctggtatgacaacgaatttggctacaagcaacaggggtggtggacctcatggcccacatggcctccaaggagtaaagacccctggaccaccagccccagcaagagcacaagaggaagag

SEQ ID NO: 7773 - DNA, 374 bp, Homo sapiens
  SIMILAR (1)..(369): 691254mologous to Homo sapiens dJ991C6.1 (novel protein similar to C. elegans F55A12.9 (Tr:P91086)),accession number AL078599,Smith-Waterman Score=456.
  misc_feature (1)...(374): n = a,t,c or g
cagtttgaattcagcatagactccttccagatcatcctggactccctgttgctctttggccagggctcgtccactcccatgtctgaggccttccacccaacggtcacaggcgaaagcctgtacggggacttcaccgaggccctggagcacctgcggcaccgtgtcatcgccacgcgcagtcccgaggagatccgaggtggtggcctcctcaagtactgccacctcctggtgcggggcttccggccccggcccagcaccgatgtgcgcgccctgcagcgctacatgtgctcccgcttcttcatcgactttccagacctggtggagcagcggcgcaccctagagcgctacctggaggcccacttcggtggggcaan

SEQ ID NO: 7774 - DNA, 369 bp, Homo sapiens
  misc_feature (1)...(369): n = a,t,c or g
cttttagaaacccaagacggggggttccccagtcaggagtgtcgagcccacccgggccaccccgcgaaacccccttttttctaaaaaatgccaaattttaacccggcctggtggaagacccccgtaatcccaactacctgggaagcttaagccggaaaaagggggtaaccccaaaagccgaacctgccattaacccaaatcgggcccccgcactccaacccggggggcaaaacgaaaccccgtttccnnnnnnnnnnnnnnnnngttttttgccttcttcattctataagtgtacagtggagtttttcagaagctacatgatatgtattgacaccatggttcccacgatgaaagtagaacgtgtcccta

SEQ ID NO: 7775 - DNA, 2977 bp, Homo sapiens
  SIMILAR (1556)..(2185): 521254mologous to Homo sapiens 90 kDa heat-shock protein (AA 1-732),accession number X15183,Smith-Waterman Score=395.
cagttgcttcagcgtcccggtgtggctgtgccgttggtcctgtgcggtcacttagccaagatgcctgaggaaacccagacccaagaccaaccgatggaggaggaggaggttgagacgttcgcctttcaggcagaaattgcccagttgatgtcattgatcatcaatactttctactcgaacaaagagatctttctgagagagctcatttcaaattcatcagatgcattggacaaaatccggtatgaaactttgacagatcccagtaaattagactctgggaaagagctgcatattaaccttataccgaacaaacaagatcgaactctcactattgtggatactggaattggaatgaccaaggctgacttgatcaataaccttggtactatcgccaagtctgggaccaaagcgttcatggaagctttgcaggctggtgcagatatctctatgattggccagttcggtgttggtttttattctgcttatttggttgctgagaaagtaactgtgatcaccaaacataacgatgatgagcagtacgcttgggagtcctcagcagggggatcattcacagtgaggacagacacaggtgaacctatgggtcgtggaacaaaagttatcctacacctgaaagaagaccaaactgagtacttggaggaacgaagaataaaggagattgtgaagaaacattctcagtttattggatatcccattactctttttgtggagaaggaacgtgataaagaagtaagcgatgatgaggctgaagaaaaggaagacaaagaagaagaaaaagaaaaagaagagaaagagtcggaagacaaacctgaaattgaagatgttggttctgatgaggaagaagaaaagaaggatggtgacaagaagaagaagaagaagattaaggaaaagtacatcgatcaagaagagctcaacaaaacaaagcccatctggaccagaaatcccgacgatattactaatgaggagtacggagaattctataagagcttgaccaatgactgggaagatcacttggcagtgaagcatttttcagttgaaggacagttggaattcagagcccttctatttgtcccacgacgtgctccttttgatctgtttgaaaacagaaagaaaaagaacaatatcaaattgtatgtacgcagagttttcatcatggataactgtgaggagctaatccctgaatatctgaacttcattagaggggtggtagactcggaggatctccctctaaacatatcccgtgagatgttgcaacaaagcaaaattttgaaagttatcaggaagaatttggtcaaaaaatgcttagaactctttactgaactggcggaagataaagagaactacaagaaattctatgagcagttctctaaaaacataaagcttggaatacacgaagactctcaaaatcggaagaagctttcagagctgttaaggtactacacatctgcctctggtgatgagatggtttctctcaaggactactgcaccagaatgaaggagaaccagaaacatatctattatatcacaggtgagacgcaaggaccaggtagctaactcagcctttgtggaacgtcttcggaaacatggcttagaagtgatctatatgattgagcccattgatgagtactgtgtccaacagctgaaggaatttgaggggaagactttagtgtcagtcaccaaagaaggcctggaaacttccagaggatgaagaagagaaaaagaagcaggatgagaaaaaaacaaagcttgagaacctctgcccaatcatgaaagacatattggagaaaaaaagttgaaaaggtggttgtgtcaaaccgaattggtgacatctccatgcctgtattgtcacaagcacatatggctggacagcaaacatgggagagaatcattgaaagcttcaagcccttaaggagacaacttcaacaatggggtttacatggccagccaaaggaaacaccgggggattaaacccttgaccctttccattattgagtaccttaaggccaaaaggccagaaggcttgataagaacggacaagtcttgtgaaggatcttggtcatcttgctttatggaaactgcgctcctgtcttctggcttccagtcttggaagattcccagacaccatgcttaacaggtttcttacaggatgatcaaactttggtctgggtattgatgaagatggaccctacttgctggatgataccagtgcttgctgttaacttgaaggaattgccacccccttgaaggagatgacgacacattcacgcatgggaaggaagtaggacttattctcttgggcttgaggggatggactttacctgtttcagtactctacaattcctctgataatatatttttccaaggatgttttcctttatttttggttaatatttaaaaagtctgtatggcatgacaactactttaaggggaagataagatttctgtctactaagtgatgctgtgataccttaggcactaaagcagagctagtaatgctttttgagtttcatgttggtttattttcacagattggggtaacgtgcactgtaagacgtatgtaacatgatgttaactttgtgtggtctaaagtgtttagctgtcaagccggatgcctaagtagaccaaatcttgttattgaagtgttctgagctgtatcttgatgtttagaaaagtattcgttacatcttgtaggatctactttttgaacttttcattccctgtagttgacaattctgcatgtactagtcctctagaaataggttaaactgaagcaacttgatggaaggatctctccacagggcttgttttccaaagaaaagtattgtttggaggagcaaagttaaaagcctacctaagcatatcgtaaagctgttcaaaaataactcagacccagtcttgtggatggaaatgtagtgctcgagtcacattctgcttaaagttgtaacaaatacagatgagt

SEQ ID NO: 7776 - DNA, 420 bp, Homo sapiens
  SIMILAR (139)..(420): 951254mologous to Homo sapiens unnamed protein product,accession number AK000163,Smith-Waterman Score=456.
gagagtggagctcactgtccagtagaaatcagtgatgtagcaatgttgcagtaaatagaaatgattatatatttcaatagcttagcaagaaaacatttataatatttttttctttcatctgattaagttttgctgtctattttcttccagagagatgtggataatttgccctgcctccaacatctctttctcagctttaacaatatatctagttttgacagggtttcctgccttgctgactcttcttccctctcggacatcacctttgatggcaatcccatagctcaagagtcatggtacaaacacactgtccttcagaatatgatgcagctgcgccagctagatatgaagagaatcacggaagaagaaaggcgtatggcatctgttttagccaaaaaagaggaagagaagaagcgggaa

SEQ ID NO: 7777 - DNA, 723 bp, Homo sapiens
  SIMILAR (3)..(416): 301254mologous to Drosophila melanogaster putative mitotic protein phosphatase 1 regulator,accession number AF214664,Smith- Waterman Score=195.
  misc_feature (1)...(723): n = a,t,c or g
ggaaaaacagaatcaagaaaatctcaaatctggagaatctaaaaagcttagatgtcttggatcttcatggaaatcagattaccaaaattgaaaatattaatcatttgtgtgagttgagagttttaaatcttgccaggaactttttaagtcatgttgataatcttaatgggctggattcactaactgaacttaacttgcgacacaatcaaatcactttcgtgagagatgtggataatttgccctgcctccaacatctctttctcagctttaacaatatatctagttttgacagtgtttcctgccttgctgactcttcttccctctcggacatcacctttgatggcaatcccatagctcaagagtcatggtacaaacacactgtccttcagaatatgatgcagctgcgccactaagatatggaaggagaattcacgggaagaaggaaaggcgtatggcatctgttttagcccaaaaaaggagggaagaggaaggagccgggaaagtcctaaaccattcttttgcttaaggagaagaaaagggttaaccatttaaccacgtagcttcgacagtgggacttgcaacaacgagtagccaatattgctacaaatgaagatagaaaagatttctggactctcctcaggaccctgttcagattgatgggaaggcaccctctttggctttcccagaggcccacaggggcntttaggattcagggnttcaagg

SEQ ID NO: 7778 - DNA, 384 bp, Homo sapiens
  SIMILAR (2)..(382): 291254mologous to Homo sapiens tcp11-like protein,accession number AF260330,Smith-Waterman Score=164.
attgaaaattattgcctgcctgtccctaattaccaacaacatggtgggtgctattacaggaggcctgcctgagcttgcaagcaggttaacaaggatttcagctgttctacttgaaggcatgaacaaagagacctttaacttgaaggaagtcctgaattctattggtattcagacttgtgttgaggttaacaagaccctgatggaaagaggtttacccactttaaatgctgagattcaagctaatcttataggtcaattttcaagcattgaagaggaggacaatcctatctggtccttgattgataaacgaattaagctttacatgagaaggctactttgtcttccaagccctcaaaaatgcatgcctcctatgccaggaggcct

SEQ ID NO: 7779 - DNA, 430 bp, Homo sapiens
  SIMILAR (164)..(430): 741254mologous to Mus musculus putative,accession number AK010153,Smith-Waterman Score=358.
gaaagagtgggtaatgtgtgttcactggaaatttctaacattcaaaaaggagaagggggagagtacatgtgtcatgctgtaaacatcataggggaagcaaagagctttgcaaatgtagacataatgccccaggaagaaagagtggtggcactaccacctccagaattttgtagatccaaatatggattcaagggagggagaagacaaagaactaaaaattgatttagaagtatttgaaatgcctcctcgctttataatgcctatttgtgattttaaaattccagaaaattcagatgctgtattcaaatgttcagtcatagggatcccgactcccgaagttaagtggtataaagaatatatgtgtattgagccagataatattaaatacgtgattagcgaggagaagggaagtcacactcttattattcgg

SEQ ID NO: 7780 - DNA, 12064 bp, Homo sapiens
  SIMILAR (1)..(2802): 991254mologous to Homo sapiens Protein sequence and annotation available soon via Swiss-Prot; available at present via e-mail from LABEIT@EMBL-Heidelberg.DE,accession number X90568,Smith -Waterman Score=4848.
atggtggtggagtggctccatgatggaaagccacttgaagcagccaacaggctccgtatgatcaatgaatttgggtactgcagccttgattatggcgttgcatattctagagacagtggtatcattacttgcagagccactaacaaatatggaacagatcacacatctgctacccttattgttaaagatgagaaaagtcttgtggaagaatcccaattgcctgaggggaggaaaggcttacagagaattgaagaattagagagaatggctcatgaaggtgcacttacaggtgtaacaacagatcagaaagaaaagcaaaagccagacattgtcttgtacccagagccagttagagtacttgaaggggagactgcaaggttccgctgcagggtaacaggctaccctcagcccaaagtcaactggtacctcaatggacagctcatccgcaaaagcaaaaggttcagagttcgctatgatggtatccattacctggacatcgtggactgcaaatcatatgacacaggtgaagtgaaggtcaccgcggaaaatcctgaaggtgtgatagagcataaagtgaagcttgagattcaacagagggaagattttaggtctgtccttaggagagctcctgaaccaaggcctgagtttcacgtacatgaaccaggaaagcttcagtttgaagtacaaaaagtggatagacctgttgacaccactgaaaccaaagaagttgtgaagttgaaaagggctgaaagaattacccatgaaaaagtgcctgaagagtcggaagagctgcgcagtaaattcaagcgcagaacagaagagggctattatgaagccattaccgctgtggagctcaagtctcgaaagaaggatgaatcctatgaggaactcctcaggaagacaaaagatgaacttctccactggaccaaagagttaactgaagaggaaaagaaagctcttgccgaagaaggcaaaatcacgattccaacttttaaacctgacaagattgaactaagtcctagtatggaggctccaaaaatcttcgaaagaatccagagccaaacagtgggccaaggatctgatgcacacttccgggtcagagtcgtggggaaaccagaccccgaatgtgaatggtacaaaaatggtgtcaaaattgaacggtctgaccggatctactggtactggcccgaagacaatgtttgtgaattggtcataagagatgtgactgctgaggactctgccagcatcatggtaaaagccatcaacatagctggagaaacctccagtcacgcattcttacttgtccaagccaagcaattgatcactttcacacaggaattacaagatgttgttgctaaggaaaaagacactatggcaacctttgaatgtgaaacttcagaaccatttgtcaaagtgaaatggtataaagatggtatggaggttcatgagggagataaatacaggatgcactctgacagaaaggttcacttcctctccatactgaccattgatacgtctgatgctgaagattacagctgtgtacttgtggaagatgaaaatgtcaaaacgactgctaaacttattgttgaaggtgcagttgttgagtttgtgaaagaacttcaggacatagaagttccagaatcatattcaggagaattagagtgcattgtatccccagaaaatatagaaggaaaatggtatcataatgatgtggagcttaaatccaatggcaaatatacaattacatctcgtcgtggacgtcagaacctcacggtcaaggatgtaaccaaggaggaccagggagaatacagctttgtcatcgacgggaaaaagacaacctgtaaattaaagatgaaaccccgccccattgctatcctacaaggacttagtgaccaaaaagtctgtgagggtgacattgttcagcttgaagttaaagtctccttggaaagtgtggaaggcgtctggatgaaagacggccaagaagtgcagcccagtgacagggttcacattgtgatagacaaacaatctcatatgctgctcattgaagacatgactaaggaagatgctggaaattactctttcaccattccagcccttggcctctccaccagtgggcgtgtctctgtctatagtgtggacgtgataacacctctaaaagatgttaatgtgattgaaggcaccaaggctgtgcttgaatgtaaggtgtcagtccctgatgtgacttctgttaagtggtacttaaatgatgaacaaatcaagcctgatgaccgtgtacaggccattgtgaaaggtactaaacagcgactagtcattaaccgaactcatgcttcagacgaaggaccttacaagctgatagttggcagagttgaaaccaactgtaatctctctgtagaaaaaattaaaattatcagaggtcttcgtgaccttacctgtacagaaactcaaaatgtggtgtttgaggttgagctgtcccactctggaattgatgtcctgtggaattttaaggacaaggaaatcaagcccagttctaaatataaaattgaagcacatggaaaaatatataaattgacagttctaaatatgatgaaagatgatgaaggaaaatacacattttacgcgggagaaaatatgacatctggaaaacttactgtggcaggtggggccatctccaagccactcacagatcagaccgtagctgaatcccaggaagctgtgtttgaatgtgaagttgccaacccagattccaaaggcgaatggttgagggatggcaaacacctaccactgactaacaacatcagaactgtcaaaattaagaagactctgaagaacctcacagtgacagaaacacaggatgctgttttcactgtcgagcttacacaccctaatgtcaaaggtgtccagtggatcaaaaatggagttgtgctggaatccaatgaaaagtatgctatctctgtcaaaggaacaatttactctctgaggattaaaaactgtgccatcgtggatgagtctgtttatggcttcaggcttggaaggcttggagccagtgccagactgcacgtggagactgtcaagatcattaaaaagccaaaggatgtgacagccttggaaaatgccactgttgcctttgaagttagtgtttcccatgacactgttccagtaaaatggttccataagagtgtggaaattaagccaagtgacaaacacagactggtctcagaaaggaaagtccacaagctgatgctgcagaacatctccccctcagatgctggggaatacacagctgtggtcgggcaattggaatgcaaagcaaaactgtttgtggagacattacatattacaaaaaccatgaaaaatatcgaggtgcctgagaccaaaactgcctcttttgagtgtgaggtgtcccacttcaatgtcccttccatgtggctgaagaatggtgtggaaattgagatgagtgaaaagttcaagatagttgtgcagggaaaactccatcagctgatcatcatgaacaccagcacagaggactcggcagaatacacatttgtctgtggcaatgaccaagtcagtgccaccctgacagtcaccccaatcatgattacttccatgctgaaagacatcaacgctgaagaaaaagacactattacttttgaggtgacagtgaactatgaaggcatctcttacaaatggttaaagaatggtgtggaaatcaaatcaactgacaagtgccagatgagaaccaaaaagctcacacactcactgaacatcaggaatgttcactttggggatgctgctgactacacctttgtggctggaaaagcaacatcaacagccacactttatgtggaagctcgtcatatagaatttaggaaacacattaaggacattaaggtactggagaagaagcgagccatgtttgaatgtgaagtttctgaacctgacatcactgtacagtggatgaaagatgaccaggaactgcagatcacagacagaataaagattcagaaggagaaatatgtccaccgccttctgatcccatccacccggatgtctgatgctgggaagtacacagtggtggcaggaggcaacgtgtcaactgcaaaactctttgtagaaggcagagatgttcgcatccgaagtattaaaaaggaggttcaggtcattgagaaacagcgtgctgttgttgaatttgaggtcaatgaagacgatgttgatgcccactggtataaagatggcattgaaatcaatttccaagttcaagaacgacacaaatatgtagtggaaagaagaatccaccgaatgtttatctctgagaccagacagagcgatgcaggagaatacacctttgtggcaggaaggaacaggagttctgtcactctctatgtcaatgctcctgaaccgccccaagttctgcaggagctccagcctgtcactgtgcagtctggcaagcctgcccgcttctgtgccgtgatatccggaagaccacagcccaaaatttcctggtacaaggaagagcagctgctttccactggcttcaagtgcaaatttcttcatgatgggcaagaatacacgcttttgctaattgaagccttcccagaggatgcggcagtctatacctgtgagcccaagaatgactatgttccagaagttgtgtctcctgatcaggaaatgcctgtttatccacctgccatcatcaccccgcttcaggacactgtcacttctgaagggcagccagcccgttttcaatgccgggtttctggaacagatctaaaagtgtcgtggtacagcaaagacaagaaaatcaagccatctcggttctttagaatgactcaatttgaagacacttatcaactggaaattgccgaagcttatccagaagatgaaggaacttacacgtttgttgctagtaatgctgtaggccaagtatcaagcacagccaacctgagtctggaagtttcatttaagaaggagccccttggccaaaagcccagcttcatccagcctctgtcaagcctcagggtgcacaacggggagacagtcagatttcatgcgagggtttctggcattcccaagccagaaatccaatggtttcataaccagcagctaattctaccaacaaaagatgtagttttccattttgaggagtccacaggcatggctttaatgcttatagttgatgcttactcagagcatgctgggcagtactcttgcaaagcagccaatagtgctggggaagccacttgtgcagctacactcacagtgactccaaaagtgcaagccctagataggcaaagttctgggaaagatgtaagagagtccgccaagtcccaggcagtggcagattcctctttcacaaaggaggagagcaaaatatctcaaaaggaaattaagtcatttcaaggatcatcatatgaatatgaagtgcaggtttttgaaagtgtatctcaaagttccatccacacagctgcatctgttcaagatacacagttgtgccatactgcatccctttcacaaattgcagaaagcactgagctatctaaggaatgtgctaaagagtccacggatgattctttcattgatgtaacctggactcacgaaggtgcaaagatagaggaatccgagagactgaaacaatcacaaaatggaaatattcagtttcttaccatatgtaatgttcagctggtagaccaaggactatacagctgcattgtacacaatgactgtggagagaggacaacgtcagcagtactaagtgtagaagctcctgaatcaattttgcatgagaggattgaacaagagattgagatggaaatgaaagaattattctctgagggggaatctgaacattcagaaagggatacacgtgacgccttttcagattctgaagacatagaccacaaatccatggctgctaaaagatatgcaagtagaatatcatctacaagctcctggcctgaatattttaagccttcttttacccagaaacttacatttaaatatgttttagagggtgaaccggttgtttttacatgtagattaattgcctgtccaactccagaaatgacttggtttcataacaatcggcccatcccaacaggtcttcgtcggattataaaagctgagagtgatttacaccatcactcttccagcttagagattaaaagggtccaagacagagattctggaagttataggttactagcaattaatagtgaagggtctgcagaatcaactgcatcattgcttgttatccaaaaagggcaagatgagaaatatttagaatttctgaaaagagcagaacggacacatgaaaatgtggaggctttagttgaaaggggagaagataggataaaggttgacctgaggtttactggctctccctttaacaaaaaacaagatgtggaacaaaagggaatgatgagaactatacattttaagacaatgagttctgccaagaaaacagattacatgtatgatgaagaatatttagaaagtaaatctgacataagaggttggcttaatgtaggtgaaagtttcctggacaaggagaccaaagtgaagttgcaacgtttaagggaggctagaaaaacattaatggagaaaaagaaattatctcttttagatacgtcttctgaaataagctcaagaactttgagaagtgaagctagtgataaagatattctgttctctagagaggacatgaaaatcagatctatgtctgatctagctgaaagttataaggtagatcattcagctgagagtattgtgcaaaatccacatgccctttctaatcaaatggatcaaaatatagaatctgaggaacttcccacaagctttcaaactattgttgatgaagaaattttccagactgaaataagaatgagccaagaagcactggtaaaggaaagtctaccaaaagaccatttatatggtgaaattctagtaaatgaaaatacccaagcaagaggacagctggaagaaattatggccaatactacaattggagagtcatccacatatatcactaatgtatgtgagaaggaggaagtatatgagactcctgaaaatgtgtctcaagctattacaccacatgccagcgaatcttttggtacacttgtaaatgttgaagaaagtgaagaaatagctagtgaaagaataaaaaaggatgatttgagagaattacaactctctgcttctacacgaattgatgaattcaaaaccgaacagaaggaagaaaacatgagattttttgaaaattcttttcgaaaacgcccacaacgttgcccaccttcatttcttcaagaaattgaatctcaagaagtttatgaaggtgacagttgtaattttgtgtgtcattttcaaggatatcctcaacctatagtgacgtggtataacaatgacatgccaatcccacgtaatcaaaactttatcattcattcgttggaaaactattcaatattaactctttcatctgttcatcatcagaatgaaggttctattacttgtgtgctatttaaccaatatggaacagtaaaaacaaccagtatgcttaaagtgaaagcaaaacaaaaacatgatgtcaaagcacataaagtcccagtgttccatgactacttggatgaggaagaagagttagcattggtgtttgaccaagcaaaaggcgcccatccatctatgagtcaagagggccaaacaaatcttcatttgttaaaaactaacccaccagttcctccctctggagacacagaattgctttcctttcctgtagaaattcaggtaacagcagctactcctatcccagaacaggataaagagtctaaagaagtgtttcaaactgaggagctggaacctaaagcaatgcctcaagatcaagttactcaatcaccaaaacacagatttgtatttttgtctgatattactaatgaaccaccaaaaatgttacaagaaatgccaaagcatgccaggtgtagagaaggggattccatcattcttgaatgtttaatatctggtgagccccagccagttgtaacatggtttcaaaatggagtccttttaaagcagaaccagaagtttcagtttgaagaagttaattgtagccacaaattatatattaaggatgttaattctcaagattctggaaaatataaatgtgttgctgaaaacaattcaggggcagttgaaagtgtttcagatctaacagtggagcctgtcacttatagagaaaatagtcaattcgaaaatattggtgaaatttatggaaaatattccagagatcagcaactgcaagaccagggagaatctgtaagggcacatttttatgattatccagctggtccctttactccctggacaaatgtaaaagaatattcagtaagggactattttcaaagccttgagactattgagcaaatagaccagaaagagcaggtgcgttgcataccttctagagaaaaaattcccagatttgtgcatggtgcttcaagaaccataaaaatcagcaagcccatcagggctgaattcatacaatgtcaggctgaagggaaagagagacatgtaagtgaaaaatcaaagctgcaccaagcagagggtactgtttatccatttgttgatgatttcagtgatgtcactattaagaaagaaataagaaataattttggaaaacttggtagatcagaaaaggaaaatgtacaagaatgtgcccaaagtgactatttaccaaatattcactctgagagaatttctgacagttacaatacaaaagattcatctgccattgtatatgaagaatcccttggtgaagagatacactacccggggaaaaaggtgaagcatagaattatcgaatttgaaaaattacatgtagaaaaaggagttctagaaaaaagacctaccagaacatcaattgttaatcctcctcaaaagaagattgatgacaaagccttttcattaaagcaaagagaatcaagatcaagcaatctaaatgcaaatatgtatcaggcagagaaaatgtctccaaatactgaatcagattcatctaacattgcaataaatttaaagctgctttcctctcaaactcataaagaatttgacgcacaagaaagggaacaacaggaaaaaataagtcttatagataaacctgcaatttctaaaagagctgaacatgaatcacctattacatttgacttaaagcagtttcacactcaaataaaacacacagatgtgaaattccaagaattagatagtggtcaaccagaagaagcttattttaaaatccaacatcctgctgacactgagaacattgtatttgatctaaaacaaatgtattctcatataggagatccagctctggagttccaagggcaagaaactagggaacagcaggaaatacattataaagaaaaaattcctagccctgaaacgttacaacctgacacacacaatatctctaaaagtgtgcaaaataatgtatttgccagtcaagaaatttcttccagtcaagagctttcaaatagaactatggtggagaaaagtagtattgatgaaaattccatttctttagaaaaagaagtccgacatgtacaggaacaaaacttagacattttaaaaactgatctttctcttaaatccttttctgaagaaatctatagtgaatcatgtgccctacttccaacctcatctgcagatatagaagaaactgatctttctgagaaaagttgtcctctagaaaatggaggcagaagttccatctcacatttgaaaaaagcagcaagtgaggaaaagcctttaggggttggtgaaatggaagaagaatgcactctagaaccagagttggcagcatttccaaagcaggatggtgggacacaggaatatacagatgccactttggaagaccacagaggtgatgttcaggaagctgacacactccatagacagctctccctgagtcagtgcttcccactcttgatgactgaagaacaacagaatccaggtgaacaaataagtacaaacattcatgcctctggagaagaaaaatgttatgaagaagttcaagttcagaatgaagcttctttctccactttagaaggagaaatgatagaaactagtttttctcaaaatattcctaaattagatgaggcacataccactgaggcagcagaatctgagacctccctaacacaatatttacttgctgctggaaagcgtgaggttcctgaaactaaagacaccagagaccaggcaaagcttgtccagagtgaatcaatcacttcaatggaggtggaagaagtaactttcaacactgtgtatgaatactacaaccagaaacaggaatcactaggtcgtccactttctcctgagtctgacatttccattggtgtgggaagtacaaccagtgaagaaatatctgagttagatcagttttataccccaccatcatctgttgaatattttgaatctccaaagtcccctgacttatattttaatccttcagatataactaaacaatcctcaatacattcaggaggtgagacagttgaaagatattccacacctttaggggaagttgctgaaagatattcaacaccttccgaaggtgaggtaggagaaagatactccacacccccaggggagacactagagagatactccacacctccaggagagactctagagagatactccacacccccaggagagactctagagagatattccacacccccaggagagactctggagagatactccacacccccaggagagactctagagcgatattccacacccccaggggaggcactagagagatattctattcctactggaggaccaaaccccactggtacttttaaaacatatccatcaaaaatagaaagggaagacggtacaccaaatgagcatttctacacacctacagaagagaggggttcagcttatgaaatatggcgttccgattcatttggtacacccaatgaagccattgagccaaaagacaatgaaatgcctccatcttttattgaacctctgaccaaaaggaaggtatatgaaaacacaacactaggcttcattgttgaagttgaaggtcttccagttcctggtgtgaaatggtatcgaaataaatctttactagagccagatgaaagaatcaaaatggaaagagtgggtaatgtgtgttcactggaaatttctaacattcaaaaaggagaagggggagagtacatgtgtcatgctgtaaacatcataggggaagcaaagagctttgcaaatgtagacataatgccccaggaagaaagagtggtggcactaccacctccagtaacacatcagcatgtcatggagtttgatttggaacacaccacatcatcaagaacaccttctcctcaagaaattgtcctggaagttgaattaagtgaaaaagacgttaaagaatttgagaagcaggtgaaaatagtgacagttcccgaatttactcctgaccataaaagtatgattgtgagtctagatgttcttccatttaattttgtagatccaaatatggattcaagggagggagaagacaaagaactaaaaattgatttagaagtatttgaaatgcctcctcgctttataatgcctatttgtgattttaaaattccagaaaattcagatgctgtattcaaatgttcagtcatagggatcccgactcccgaagttaagtggtatatagtgtatatgtgtgttgagccagataatattggggacgtgattagcgaggagaagggaagtcacactcttaccactcgaaatgtctgtctttctgatagtgcaacatacaggtgcagagctgtgaattgtgtaggagaggctatctgtcggggattcctcaccatgggagattctgaaatatttgctgtgatagcaaagaaaagcaaagtgactttaagcagtttaatggaagaattggtcttaaagagcaactacacagacagtttttttgaatttcaggtggtggaagggcctcccaggtttatcaaaggtatttctgactgttatgcaccaataggtacagcagcatattttcagtgcttag

SEQ ID NO: 7781 - DNA, 383 bp, Homo sapiens
  SIMILAR (2)..(382): 1001254mologous to Homo sapiens Unknown (protein for MGC:3162),accession number BC001191,Smith-Waterman Score=669.
  misc_feature (1)...(383): n = a,t,c or g
cgacgacacccgctaccacaccatgcaggcagccgtggatgccgtggcccgggtcactggccagcaccccgaggtgccccccgccttttggaacaatgccttcacgctgctgtctgccgtgagcctgccccgccgggagcccaccgtctccagcttctatgtgaagcgggcggagctgtgggacacctggaaggttgctcacctgaaggagcacaggagggttttccaggccatgtggctcagcttcctcaagcacaagctgcccctcagcctctacaagaaggtgctgctgattgtgcatgacgccatcctgccgcagctggcgcagcccacgctcatgatcgacttcctcacccgcgcctgcgacctcgggggggccctcn

SEQ ID NO: 7782 - DNA, 1683 bp, Homo sapiens
  SIMILAR (1)..(1677): 1001254mologous to Homo sapiens E2IG3,accession number AF191018,Smith-Waterman Score=2869.
aaaaggcctaagttaaagaaagcaagtaaacgcatgacctgccataagcggtataaaatccaaaaaaaggttcgagaacatcatcgaaaattaagaaaggaggctaaaaagcagggtcacaagaagcctaggaaagacccaggagttccaaacagtgctccctttaaggaggctcttcttagggaagctgagctaaggaaacagaggcttgaagaactaaaacagcagcagaaacttgacaggcagaaggaactagaaaagaaaagaaaacttgaaactaatcctgatattaagccatcaaatgtggaacctatggaaaaggagtttgggctttgcaaaactgagaacaaagccaagtcgggcaaacagaattcaaagaagctgtactgccaagaacttaaaaaggtgattgaagcctccgatgttgtcctagaggtgttggatgccagagatcctcttggttgcagatgtcctcaggtagaagaggccattgtccagagtggacagaaaaagctggtacttatattaaataaatcagatctggtaccaaaggagaatttggagagctggctaaattatttgaagaaagaattgccaacagtggtgttcagagcctcaacaaaaccaaaggataaagggaagataaccaagcgtgtgaaggcaaagaagaatgctgctccattcagaagtgaagtctgctttgggaaagagggcctttggaaacttcttggaggttttcaggaaacttgcagcaaagccattcgggttggagtaattggtttcccaaatgtggggaaaagcagcattatcaatagcttaaaacaagaacagatgtgtaatgttggtgtatccatggggcttacaaggagcatgcaagttgtccccttggacaaacagatcacaatcatagatagtccgagcttcatcgtatctccacttaattcctcctctgcgcttgctctgcgaagtccagcaagtattgaagtagtaaaaccgatggaggctgccagtgccatcctttcccaggctgatgctcgacaggtagtactgaaatatactgtcccaggctacaggaattctctggaattttttactatgcttgctcagagaagaggtatgcaccaaaaaggtggaatcccaaatgttgaaggtgctgccaaactgctgtggtctgagtggacaggtgcctcattagcttactattgccatccccctacatcttggactcctcctccatattttaatgagagtattgtggtagacatgaaaagcggcttcaatctggaagaactggaaaagaacaatgcacagagcataagagccatcaagggccctcatttggccaatagcatccttttccagtcttccggtctgacaaatggaataatagaagaaaaggacatacatgaagaattgccaaaacggaaagaaaggaagcaggaggagagggaggatgacaaagacagtgaccaggaaactgttgatgaagaagttgatgaaaacagctcaggcatgtttgctgcagaagagacaggggaggcacttctgaggagactacagcaggtgaacagtctacaaggtcttttatcttggataaaatcattgaagaggatgatgcttatgacttcagtacagattatgtgtaacagaacaatggctttttatgatttttttttttaacat

SEQ ID NO: 7783 - DNA, 2583 bp, Homo sapiens
  SIMILAR (220)..(840): 501254mologous to Homo sapiens E2IG3,accession number AF191018,Smith-Waterman Score=409.
tggacagaaaaagctggtacttatattaaataaatcagatctggtaccaaaggagaatttggagagctggctaaattatttgaagaaagaattgccaacagtggtgttcagagcctcaacaaaaccaaaggataaagggaagataaccaagcgtgtgaaggcaaagaagaatgctgctccattcagaagtgaagtctgctttgggaaagagggcctttggaaacttcttggaggttttcaggaaacttgcagcaaagccattcgggttggagtaattggtttcccaaatgtggggaaaagcagcattatcaatagcttaaaacaaggaacagatgtgtaatgttggtgttatccatgggggcttacaagggagcatgcaagttgtccccttggaccaaacagatcacaatcatagataagtccgagcttcatcgtatctccacttaattcctcctctgcgcttgctctgcgaagtccagcaagtatttgaagtagtaaaaccgatgggaggctgccagtgccatccttttccaggctgattgttcgacaggtagtactgaaatatactgtcccagggctacagggaattctctgggaattttttacttatgcttgctcagaggaaggaggtatggcaccaaaaaggtgggaatccccaaatgtttggaaggtgctgccaaactgctgtggtctgagtggacaggtgcctcattagcttactattgccatccccctacatcttggactcctcctccatattttaatgagagtattgtggtagacatgaaaagcggcttcaatctggaagaactggaaaagaacaatgcacagagcataagaggtgagaattgtgtgtcgctgctgtcttcatcagctgacaggccagtggagctcttacctgtttacatgggcttgctttctttcccagccatcaagggccctcatttggccaatagcatccttttccagtcttccggtctgacaaatggaataatagaagaaaaggacatacatgaagaattgccaaaacggaaagaaaggaagcaggaggagagggaggatgacaaagacagtgaccatgaaactgttgatgaagaagttgataagaagttggattccatgggttccaagagaagaagagctacctccccttccagcagtgtcagcggggactttgatgatgggcaccattctgtgtcaacaccaggcccaagcaggaaaaggaggagactttccaatcttccaactgtagatcctattgccgtgtgccatgaactctataataccatccgagactataaggatgaacagggcagacttctctgtgagctcttcattagggcaccaaagcgaaggacagattcagaaatatatgaagatgcagtagaacttcagcagttttttattaaaattcgtgatgaactctgcaaaaatggagagattcttctttcaccggcactcagctataccacaaaacatttgcataatgatgtggagaaagagagaaaggaaaaattgccaaaagaaatagaggaagataaactaaaacgagaagaagaaaaaagagtagaaggaatcatacagagattacactactgtacaaacccagattcaaaaccaaagtatcctgcccaacgaacaccacagatacatcttcagggagaagtcctcttctacgaaagtaaattcagaacactggaagaagtgactgttgtactagacacacatataatatcaataaatcaaccagactattatgaagtggtttctcagcccattgacttgatgaaaatccaacagaaactaaaaatggaagagtatgatgatgttaatttgctgactgctgacttccagcttctttttaacaatgcaaagtcctattataagccagattctcctgaatataaagccgcttgcaaactctgggatttgtaccttcgaacaagaaatgagtttgttcagaaaggagaagcagatgacgaagatgatgatgaagatgggcaagacaatcagggcacagtgactgaaggactcctgaaaatctcgataactcaaaaaatacgcccggtagtgatcttatttcattatggtgaaagttggaacctcttacgtgccgatcaacgtctcattttcgccaaaagttggcccagggcttcccggtatcaacagggacaccaggatttatttattctgcgaagtgatcttccgtcacaggtatttattcgcgataagctcatggagcggcgtaaccgtcgcacaggaaggacagagaaagcgcggatctgggaagtgacggacagaacggtcaggacctggattggggaggcggttgccgccgctgctgctgacggtgtgacgttctctgttccggtcacaccacatacgttccgccattcctatgcgatgcacatgctgtatgccggtataccgctgaaagttctgcaaagcctgatgggacataagtccatcagttcaacggaagtctacacgaaggtttttgcgctggatgtggctgcccggcaccgggtgcagtttgcgatgccggagtctgatgcggttgcgatgctgaaacaattatcctga

SEQ ID NO: 7784 - DNA, 366 bp, Homo sapiens
  SIMILAR (14)..(148): 711254mologous to Caenorhabditis elegans predicted using Genefinder~contains similarity to Pfam domain: PF00293 (Bacterial mutT protein), Score=47.3, E-value=1.4e-12, N=1~cDNA EST yk139a2.3 comes fr,accession number Z82053,Smith-Waterman Score=172.
  misc_feature (1)...(366): n = a,t,c or g
cgtgttcctcagcgagcaggatgaggtgctactgatccaggaggccaaaagggagtgccgggggtcgtggtacctgcctgcggggagaatggagccaggggagaccatcgtggaggcgctgcancgggaggtgaaggaggaggcggggctgcactgtgagcccgagacactgctgtccgtggaggagcggggcccctcctgggtccgcttcgtgttcctcgctcgccccacaggtatggcccacctggaggcagtgtgaacagggccagttgacacctttcccccagctcctcggtgaggtgagcccctctacagccagtcctgttatggctggcacagcctggcatgggcagattccagcctttg

SEQ ID NO: 7785 - DNA, 359 bp, Homo sapiens
cgaaccctgctagttcccggtcttgggggtcagcggaaaccgcccccatttcggcctggaggggcgaatggggacaaagccccgccgcccgccccgaccccacctggtatccccaggtgcgctgcccaggagtctcttggggccgctgcaagtgggcaggtgccctggtgttctcgtgggccggccccaggccctttgcggagcgtgtgccgcgctgaaggaaggggccgtcccccttaccatgccccattcttttaggcttgggggaccgaactaactccccccgcccccacttgcaaagttcagcctccgctttagaagctgacctctcagtttcacttggatgggtttcttcttag

SEQ ID NO: 7786 - DNA, 336 bp, Homo sapiens
  misc_feature (1)...(336): n = a,t,c or g
ggcacgagcggcacgaggctgctggacgaccagatccagagtctggtgagccagtgagtgagggcagctggctgtggcccagcgctgtgtgacccggaggagccactcactctctctgagatgctggacatcataagtggggaagctcaggccaggggactcccaggagtgtctggaggcctgagttccattctcagctctgccgtatgcttgctgtgctctagaggagttcctcttcctctccgagcctcggtttatgcacctgtgcagcgggagatccacctctgatgttcaatgaagactaccagaaaagtctgctagagcagtaccatctgn

SEQ ID NO: 7787 - DNA, 365 bp, Homo sapiens
  SIMILAR (3)..(365): 1001254mologous to Homo sapiens MARK,accession number AF154845,Smith-Waterman Score=636.
aaataatgaaagatcgatggatgaatgttggtcatgaagaggaagaactaaagccatatactgagcctgatccggatttcaatgacacaaaaagaatagacattatggtcaccatgggctttgcacgagatgaaataaatgatgccttaataaatcaaaagtatgatgaagttatggctacttatattcttctaggtagaaaaccacctgaatttgaaggtggtgaatcgttatccagtggaaacttgtgtcagaggtcccggcccagtagtgacttaaacaacagcactcttcagtcccctgctcacctgaaggtccagagaagtatctcagcaaatcagaagcagcggcgtttcagtgatcat

SEQ ID NO: 7788 - DNA, 243 bp, Homo sapiens
  SIMILAR (2)..(241): 1001254mologous to Homo sapiens Human SREBP-1c protein,accession number AAY50701,Smith-Waterman Score=415.
ggaattctcggatgccctcgggtacctgcagctgctgaacagctgttctgatgctgcgggggctcctgcctacagcttctccatcagttccagcatggccaccaccaccggcgtagacccggtggccaagtggtgggcctctctgacagctgtggtgatccactggctgcggcgggatgaggaggcggctgagcggctgtgcccgctggtggagcacctgccccgggtgctgcaggagtctga

SEQ ID NO: 7789 - DNA, 392 bp, Homo sapiens
  SIMILAR (75)..(149): 521254mologous to Homo sapiens Human SREBP-1c protein,accession number AAY50701,Smith-Waterman Score=54.
cccacgcgtccgcccacgcgtccgcccacgcgtccgtggacgcgtgggctgttctgatgctgcgggggctcctgcctacagcttctccatcagttccagcatggccaccaccaccggtgagtccccggcccctgtcctggctcccttctcagctcccccgtgcagcgtgactgagggttcaggggaccctccctcttctgcaggcgtagacccggtggccaagtggtgggcctctctgacagctgtggtgatccactggctgcggcgggatgaggaggcggctgagcggctgtgcccgctggtggagcacctgccccgggtgctgcaggagtctgagtgagtgcacggcaggttcctcctgcctggtcccgggctcagccttcctcatcccc

SEQ ID NO: 7790 - DNA, 793 bp, Homo sapiens
  SIMILAR (697)..(792): 1001254mologous to Rattus norvegicus tRNA selenocysteine associated protein,accession number AF181856,Smith-Waterman Score= 172.
cagagcctttgccaccatgggggagaccgtaatgagcgtcaaaattatccgaaaccgcctcactgggatcccagctggctactgctttgtagaatttgcagatttggccacagctgagaagtgtttgcataaaattaatgggaaaccccttccaggagccacacctgtaaggacatttagataatgatgatgttgccattattattgtcattgcttactaccatctattgaatccctactgtatacttattttatttaatcctaaaacaaccctttacagtaggcattgttatctttgtaggcccaggaaactgaagctcagggaattgaaataacttgtccaaggcaacacaggtagtaaatggcagagccaggattcagactgaagattggttgcctcccaaatccatgcctttccattctgcattgctgcctcccataaccgaagacttgaaactctagacctcttgcctgattgggaaactagaataggctggcagcagcaaggacacatttcaagagagttgcattctgctcttcccacagttacttagcttacagctgcaccagctggcacacctgggctcatagaaccatggagcttggcagtgcccttagccggtcatccgtgcaaccccctcattttatacaggagaaaaagctgaggcttagagagggggagatgttttggccaaggcgaaacgttttaaactgaactatgccacttacgggaaacaaccagataacagccctgagtattccctctttgtgggggacctgaccccggacgtgg

SEQ ID NO: 7791 - DNA, 381 bp, Homo sapiens
  SIMILAR (95)..(379): 981254mologous to Homo sapiens Human secreted protein, SEQ ID NO: 8176,accession number AAG04095,Smith-Waterman Score=502.
atgccggaccctatgtgaggggcctcagagatttgaagaatatgagtatttagggtataaggctggtctgtatgaagctattgcagatcactacatgcaggtgcttgtttgtcagcatgaatgtgtgagggaacttgccacccgccctggccgcctctctcccatcgagaattttcttcctctgcactatgattacctacagtttgcctactatcgagttggtgagtatgtgaaagccctggagtgtgccaaagcctatcttctatgccatccagatgatgaggatgtcctagacaatgtggattactatgagagtctgctggatgatagcattgacccggcatccattgaggccagagaggatttaacaatgtttgtgaa

SEQ ID NO: 7792 - DNA, 653 bp, Homo sapiens
  misc_feature (1)...(653): n = a,t,c or g
cactttgtacaagaaagctgggtacgcgtaagcttgggcccctcgagggatactctagagcggccgcccttttttttttttttttttttcagcaactggggcatgtttatttcctcctgggcctggcaggctgggagcagaatatagacaaaggcactggggcacctgggtctggcacggtctggagcttggccgcctgggtagcaaccgtgaagggtgtgccagggcgtgcagggactggagtcatcctcccagaactgagagagggccctcggggcatggaggcatcacaagtgctaggcttggcacaggtacaggggagaggttacggagtgggtgtgtgcagggcctggtgggaatggggagacccgtggacagagcttgttagagtgtcctagagccagggggaactccaggcagggcaaattgggccctggatgttgagaagctgggtaacaagtactgagagaacaaaagcttgtgggtcagcaggccccacaaagatgtgactgcagacaggatcggccctgggagagaccgaggctccaggtgactcctatagcaaggcagtgaggnggcgggtctggngctccagttcaggaatacatagtcagctgcagccactcctggatttcacctggatttgtcagtgc

SEQ ID NO: 7793 - DNA, 1736 bp, Homo sapiens
  SIMILAR (63)..(881): 491254mologous to Mus musculus putative,accession number AK010578,Smith-Waterman Score=695.
cactttgtacaagaaagctgggtacgcgtaagcttgggcccctcgagggatactctagagcggccgcctactacagcggagactacgagcgagcggtgcgcgacttggaagcggcgctgcgcagccaccggcgcctgcgggaaatccgcacgcgctgtgcccgccactgcgcggcgcgccacccgctcccgcccccgccccccggcgagggccccggcgctgagctgccccttttccgctccttgttggggcgggcgcgctgttatcgcagctgtgagacccagcgcctcgggggccccgcatcccgccaccgcgtcagcgaggatgtgcgcagcgacttccagcgcagagtgccctacaactacctgcagcgggcctacatcaagcttaaccagctcgaaaaagcagtggaggcagctcacacatttttcgtggctaaccctgagcacatggaaatgcagcagaacattgagaattacagggcgacagctggtgttgaagcattgcagttggtagacagagaagccaagccacacatggagagttacaatgcaggagttaaacattatgaggctgatgactttgagatggctatcaggcacttcgaacaagccttaagagaatatttcgttgaagatacagaatgccggaccctatgtgaggggcctcagagatttgaagaatatgagtatttagggtataaggctggtctgtatgaagctattgcagatcactacatgcaggtgcttgtttgtcagcatgaatgtgtgagggaacttgccacccgccctggccgcctctctcccatcgagaattttcttcctctgcactatgattacctacagtttgcctactatcgaggaagtgggaactttaaggagccaaacaaagactgtttctatgttgatgccttgttgccagaaaacagaaatcagatcctcacccagatcctccaatcagcaaatctgagtgccaacaagctcttcacagtgggaggacaaatagcaatctacctttgcaaagctcaagaacttttagttggtgagtatgtgaaagccctggagtgtgccaaagcctatcttctatgccatccagatgatgaggatgtcctagacaatgtggattactatgagagtctgctggatgatagcattgacccggcatccattgaggccagagaggatttaacaatgtttgtgaaacgtcataagctggagtctgagctgataaaatcagctgcagaaggtctggggttttcatacactgaaccgccatttaaagacaaagtcacctcagcccgtgctttcctgtcaccaatgcgaaatgtagccagtagcacagtcgtagaatcacatcacactcaatttcgtgctcttgaggtcaaggcccagcagaatgaaaggaactggcaggccagtgagttacctagaggaaacaatgttgaaggacagaaagaaaatggcctgtttggcagctctgctcatgcccaacataaaacactgctgatttatggccctcaagggatgccacccacattggtgaagatgatcttctttactcagtctactgattccaatgctaatctcttccagaaacatcctcacagacacaatcagaaatgtttttctagctatctgggcccattcaagtcgacatctaaaattgactgtcacacagatgaaaaaacagaaattcaaatatttgaaacaaattacctaaggccacgcggagattaa

SEQ ID NO: 7794 - DNA, 441 bp, Homo sapiens
  SIMILAR (26)..(439): 481254mologous to Mycobacterium tuberculosis sucA,accession number AL021006,Smith-Waterman Score=348.
cctgacctcctctgtggacctgtactttggggcgcaccatcccctccatgtgacaatgttgcccaatccctcgcacctggaggccgtcaaccccgtggccgtgggcaaaactcgcggcaggcagcagtctcgccaagacggcgattactctccagacaactcagcccagccgggggacagggtcatttgcttacaggtccatggtgatgcttctttctgtggtcaagggattgttcctgaaacattcacgctgtccaatctcccacatttcaaaattggtgggagtgtgcatttgattgttaataaccagctgggttacaccactccagctgaaagaggaaggtcttctttatactgcagtgatattgggaagcttgtgggctgtgccatcatccatgtcaatggagacagcccagaggaagtggtccgtgccacacgact

SEQ ID NO: 7795 - DNA, 569 bp, Homo sapiens
  SIMILAR (442)..(567): 951254mologous to Mus musculus alpha-adaptin C,accession number AF006990,Smith-Waterman Score=218.
ggtgtctgcaaggttaggaatgttgagaaaagcacactttctaacattaaaaagacagagaacttaagattgtatactgtagaattcggggacatagacatgcaagtttttgtttcattctttgtgcaaatgcctttgcctttttaaagaaaaaacatcacactatttgcacagactgggagttctgggaaacagatgaatggggagaagtgaggcacagggacgtcctgcctgagtatgcgggcctggcctgtcctcctgtctgagggtgacactggacactgagccacacacgatccgtggggactgaaggctcggccccccgacccgctctggggggtggcagtagatcgggacgcttctcactccaggctctttcccggtccctggggctctcagaggagtagctgactgtctctttctgctgctgctgctgctggcaggtatgggggcaccttccagaacgtgtctttgcagctgcccatcactctcaacaaattcttccagccgacagaaatggcttctcaggatttctttcaacgttggaagcagttgagcaatccacagcg

SEQ ID NO: 7796 - DNA, 3120 bp, Homo sapiens
  SIMILAR (2)..(2809): 921254mologous to Rattus norvegicus alpha-c large chain (AA 1 -938),accession number X53773,Smith-Waterman Score=4339.
gcggggcctggcggtcttcatctcggatatccgcaactgtaaaagtaaagaagcagaaataaaaaggataaacaaggaactggcaaatatcagatcaaaatttaaaggtgacaaggctcttgatggctatagtaaaaaaaagtacgtctgcaagttgctcttcatctttctccttggtcatgacattgactttggacacatggaggctgtgaacctgctgagttcaaacagatacacggaaaagcagatcggctaccttttcatctctgtgttggtgaactcaaacagtgagctgatccgcctgatcaacaacgccatcaagaatgacctggccagccgcaaccccaccttcatgggcctggccctgcactgcatcgccagcgtgggcagccgggagatggccgaggccttcgccggggagatccctaaggtcctcgtagccggagacactatggacagcgtgaagcagagcgcggccctgtgcttgctgcgcctgtacaggacgtcccccgatcttgtccccatgggcgactggacatcccgagtggtgcacctgctcaatgaccagcacttgggtgtggtaactgcagccacaagtctgatcaccactttagcacagaagaacccagaagagtttaaaacctccgtgtctctggctgtctctaggctaagcagaatcgtgacgtctgcatccacagatctccaggattacacttactattttgtcccggctccctggctgtctgtcaaactgctgagactgctgcagtgctacccacccccagaccctgcagtgcgaggccgcctgactgagtgcctggagaccatcctgaacaaagcccaagaaccgcccaagtcgaagaaggtccagcactccaacgcgaagaatgccgtgcttttcgaggccatcagcttaatcattcaccatgacagtgagccgaacctgctcgtccgtgcctgcaaccagttgggccagtttctgcagcaccgcgagaccaacctgcgctacctggccctggagagcatgtgcacgctggccagctctgagttctcccatgaggctgtcaagacgcacatcgagacggtcatcaacgccctgaagactgagcgggacgtgagcgtgcggcagcgggccgtggacctcctctacgccatgtgcgaccgcagcaacgccccacagatcgtggccgagatgctgagctatctggagacagctgactactccatccgagaagagattgtgctgaaggtcgccatcctggctgagaagtacgcggtggactacacctggtatgtggataccatcttgaacttgatccgaattgctggtgattacgtgagtgaagaggtgtggtaccgagtcattcagatcgtcatcaaccgggacgacgtgcagggctacgcggccaagactgtgttcgaggctcttcaggctcccgcgtgccacgagaacctggtcaaagtgggcggctacatcctgggggagtttggaaacttgatagctggagacccgagatccagcccgctgatccagttccacctgctgcactccaagttccacctgtgcagcgtccccacccgcgcgctgctcctgtccacctacatcaagttcgtgaacctcttcccggaggtgaagcccaccatccaggacgtgctgcgcagcgacagccagctcaggaacgcagacgtggagctgcagcagcgtgctgtggagtacctgcggctcagcaccgtggccagcaccgacattctggcgaccgtgctggaggagatgcccccattcccggagcgggagtcctccatcttggcaaagctcaagaagaagaagggccccagcacggtgacagacctggaggacaccaagcgggacaggagtgtggacgtgaacgggggtcctgagcctgccccagccagtaccagcgccgtgtctacgccttctccgtcggcagacctgctgggtctcggggctgccccccctgcccccgcgggccccccaccctcctccggcggcagcgggctgctcgtggacgtgttctcagactcggcctctgtggtcgcgcctctcgctcctggctccgaagacaactttgccaggtttgtttgtaaaaacaatggtgtgttgtttgaaaaccagctgcttcaaattggacttaagtctgaatttcggcagaatttaggtcggatgtttatcttttatggtaataagacctccacgcagttcctaaactttaccccaacactaatctgttcagacgaccttcagcctaacctgaacctgcagaccaagcccgtggacccgaccgtggaggggggcgcgcaggtgcagcaggtggtcaacatagagtgcgtgtccgacttcacggaggcgccagtcctcaacattcaagttcacggtagtgggggcaccgttccagaaccgtgtctttgcagctgcccatcactcttcaacaaattcttccagccagacagaaatggcttctcaggatttcttttcaacgttgggaaggcagtttgaggcaatccacagcagggaagttgcaggaacatcttttcaaaggcaaagcacccaatggacacagaagtcaccaaagccaagatcattggatttggttctgcacttcttgaagaagttgatcctaatcctgcgaatttcgtgggagctggaatcatccacacgaaaaccacccagattggatgcctcgtgcgcttggagccgaacctgcaagcccagatgtaccgagctcacgctgcgcacaagtaaggaagccgtttctccagaagattatgtgaattgctctcagcgcagttttagttcctgaaggatggaagaccaggctcgtgtgtcttgtgttggtcttcggtctgtgccgtttgtccttcgtgggccatcctgcagaatgagcaccgtgtccagtgccacagcacaaggcgcctccccgccccaccgccccacacctctcccctttgggctggacgggaacacacgtgtgtggctcaggaggaaaagctcagcctggactgtggcagccacggcagaaggtggatcttgggatcaatttttataaaaatcgagacagttctgtggttaaatctacaaattaaagggaaattagaagttgg

SEQ ID NO: 7797 - DNA, 834 bp, Homo sapiens
gagttgattttgggtaacattaaatgtcaacaggagggtgaaacaaatgaaaataacaccagtccctcaagtcacgatatagcagctctagtctctgccaggcccttctttactataatgttgcctaatgactggcaacctaggaacaattgttaggtgcttgtccccaaactagctcttatttttcagaactacccataaggaatgggatccagggatgtgtgataggaatggggatggagtggggaccaccaaatgaggactaatctaggggacctgagctatcccagatcagctagtctagtcacttgctaggaatgggggatctttagaggcaccagaaagatacattttctaagagatacaagagccagtagatatgccattctggcagctttttaacaaaagtacaaggcattcaggatgaaccagatggttaggaaaggcttagaaccagaagtctgaagggccactctggtcagaacttgatttcaggagataatctgtcctcagaaaaggggaacacttctgtctaagacaagacccaaatggcaattaattagaggctgataaacttgctttatttagatatgtttaagtgcagactaaatctccatcccacagggctatctatactgcagaggcctgcaagtccccagtgacctgcctcatcacccctctgccctctgttgctgcccctctcctggctccattggcttctcactgctcaccaaacaaaccagacaggtgcctgcctcaggccttgcttgtcttctggctggaggttggggaaactcgtgcagcacctgctccctcacctccttttatacttgc

SEQ ID NO: 7798 - DNA, 397 bp, Homo sapiens
  SIMILAR (8)..(397): 321254mologous to Homo sapiens testis-abundant finger protein,accession number AB046381,Smith-Waterman Score=215.
aagcaagaagaggaagaggcaggaagagaagcatgtgtgtaagaagcataatcaggttttgactttcttctgtcagaaagacctagagcttttatgtccaaggtgcagtttgtccactgatcaccaccatcactgtgtttggcccataaagaaggctgcctcctatcataggaaaaaactggaggaatacaatgcaccgcggaaggagagagtggaactaactgaaaaagtcataactatgcaaaccaggaaatcactggaactgaagaaaaaggtaaaacatagggcagaagaagtcaagcctgaatttgagcaacttaggttatttctccaaaatgagcaggagactgttcttaggcatttacaagatgaacagatggatattttaccacaactg

SEQ ID NO: 7799 - DNA, 438 bp, Homo sapiens
  SIMILAR (3)..(437): 771254mologous to Homo sapiens interferon-induced Mx protein,accession number M30817,Smith-Waterman Score=554.
agatcgcgtcccgaaatgtcccggatctgactctaatagaccttcctggcatacccacaggggctgcgggcaatcagccggctgacattggggataacatcaagactctcatcaagaagctcatccagaggcacgagacaatccgcctggcggtggtccccaggattgtggacatcgccgccacagaggctctcaccatggcccaggaggtggaccccgagggagaccggaccatcgaaatcttgacgaaacctgatctggtggacaaaggaactgacaacaaagctgtggacgtggtgcggaacctcgtgctccacctgaagaaggcgcacatgattgtcaagtgccgtggccagcagggagatccagaccagatgagcctgcccgaaaccctgccgagagacaagatcttctttgagaaccacccatatatcaagg

SEQ ID NO: 7800 - DNA, 354 bp, Homo sapiens
acaacgatgagcaagccccagcacagtcactcttgacacctccacgcccagcagccatcatgcccctccgctctgtgccctcagcgtccccgtcacccccgtcggcctccagtaccgggctccacgcagccccacaggccttcccagtccccacaggtccccgtcctgataggtccctggagctccactggccctcaggtaaactccaagcgccacactactgtctacaaacgctggtgatctggacctgcagcccttctcgccttggtggaggcccctccccacgctctggaaagtgcctcaggccctctcagctatggtctatgcaccttccattcccctcacatagatcac

SEQ ID NO: 7801 - DNA, 339 bp, Homo sapiens
agttaaagctataccccaatgagacaatagtagggaatgggtcgccaagccaaacgaacaatggcgcaatgttgatatggattaaacgaaaaatccacttcgtgggtacaaaaagttatcctgcgtcagtttccaaagtagctgggaaaaaaggtacccggctccacgcccagagatttttagtacatttagaaaggacagggggcaaatgccattatacaatgataaaagggtcaattcatctggaatatacagcaattataattatatatgcaccaaacatcagaacacccaaatatataaagcaaacattgacaaaactgaagggagaaataaaat

SEQ ID NO: 7802 - DNA, 338 bp, Homo sapiens
ctccttcgggtgtacagcttcatggccctcaaaatgtaccatcagctccccacccaggtgtcaagttccacggccctcaacttgcaacatcaactccccaccgggtctccagatgcacggccctcaaaatggaacatcaactccccacccaggtttccagctccacggccctcaacctgcaacatcagctccccaccgggtctccagatgcacagccctcaaactggaacatcaactccccgtcgtgtctccagatgcacggcctgcaaactggaacatcagctcccgtcaggtctccagctgcacagccctcaaactgcaaccgcggccgcgtcgac

SEQ ID NO: 7803 - DNA, 70 bp, Homo sapiens
ggcaactatggcggtggtcctggttatagtagtagagggggctatggtggtggtggagtcgacgcggccg

SEQ ID NO: 7804 - DNA, 374 bp, Homo sapiens
  misc_feature (1)...(374): n = a,t,c or g
cggacgcgtgggctagttcggatcgcgagcggccacccnnnnnnnnnnnnnnnnnnnnnngggaagggggggattttttttgggcccccgggggccaaaaaagaaaaccccggggggggagggatttacccgattttttgacccggggtggggaaaaggccccgaaaaaaaaaccccacccccctggggggggaaagggggccccaaaaaaatgaacctttggggtgccggaaaaataaaatttttagaaataaaggggaaaagtttccctcgggggaccacccccaatttttttggcccccccctttttttttcccccccaaaaacccagggcccggggaattttttggatttttcttttaaactaaaaaaca

SEQ ID NO: 7805 - DNA, 374 bp, Homo sapiens
  SIMILAR (2)..(373): 571254mologous to Rattus norvegicus CRP2 (cysteine-rich protein 2),accession number D17512,Smith-Waterman Score=428.
tccgcgttgccagcaacctgttttcttcgctgagaaggtgagctccctgggcaagaactggcaccgcttctgcctgaaatgtgagcgctgccacagcatcctgtcccctggcgggcatgcagagcacaatgggaggccatactgccacaagccatgctatggggctctctttggacccaggggggtgaacattggtggtgtaggctcctacttgtacaatccccccactcccagccctggctgcaccactcctctcagccccagcagcttcagccctcccaggccaaggactggcctcccccaaggcaagaaaagccctccccatatgaagacattcactggggagacctcgctgtgccctggctgtggggagc

SEQ ID NO: 7806 - DNA, 342 bp, Homo sapiens
agactcacagtcttgctgccccttctcctcttcaaagtttgtttccgaagtaccaccccttgcacctcacatcccagccaactctgcctacctgtcagccccagccctcctcaggcctgcctcagcctcacagccaggatcctaccaacaccaacaccgcgccaaataacccctcccaaaagcctcaccggaactaatctggggactctgcctattattaggaacaccttggatgaagcccctacccgcagaattctggcagtagcagcagaattttcaggcatgtgcctaattttgttggggtggtggttgattattttttttaaatctaggatttctggg

SEQ ID NO: 7807 - DNA, 351 bp, Homo sapiens
  SIMILAR (344)..(15): 751254mologous to Homo sapiens PRO2987,accession number AF116719,Smith-Waterman Score=419.
ggcacgagccgtacgaggtctcacgttatcattaagctcctagaccaggggccatggggcatttcacacaggacgacatggctactattacaagcctgtcgggccaggtgaatgtggaagatcctcgaggagaaaccctggcatggctcctgttcgtctacccatggacccataggctctttgacagctttggcaccctgacctctgcctctgccatcatgggcaactccaaattcaaagcacctggcaagatggtgctaacttccttgatagatgccatatcgcacctggatgatctcatgggctccttctaccagctgattgaactgcactgtgacaagctgcctgtcc

SEQ ID NO: 7808 - DNA, 743 bp, Homo sapiens
  SIMILAR (607)..(723): 481254mologous to Rattus norvegicus elongation factor-1 alpha,accession number L10339,Smith-Waterman Score=78.
  misc_feature (1)...(743): n = a,t,c or g
ttttttttttngcaagggttttgccgccagaacacaggtgttgtgaaaactacccttaaaagccaaaatgggaaaggaaaagantcatatcaacattgtcgtcattggacacgtagattcgggcaagtccaccaatactggccatatgagctataaatgcggtggcatcgactaaagaaccattgaaaaatttgagaaggacgctgctgagatgggaaagggctccttcaagtatgcctgggtcttggataaactgaaagctgaccgtgaacgtggcatcaccattgatatctccttggggaaatttgagaccagcaagtactatgtgactatcattgatgccccaggacacagagactttatcaaaaacatgattacagggacatctcaggctgactgtgctgtcctgattgttgctgctggtgttggtgaatttgaagctggcatctccaagaatgggcagacccgagagcatgcccttctggcttacacactgggggtgaaacaactaattggcggcgttaccaaaatggattccactgagccacccttcaggcgcaagagatatgaggaaattgttaagggaagtcaggcaccttacattaagaaaaattgggttacaacccccgacacaaggagcttttgggcccaatttctggctgggaatggtggaccaacatggctgggaacccaagtgcttaacaatgcccttgggtttcagggggaagggcaaaggccacccc

SEQ ID NO: 7809 - DNA, 1389 bp, Homo sapiens; identical to SEQ ID NO: 307
  SIMILAR (76)..(855): 941254mologous to Oryctolagus cuniculus elongation factor 1 alpha,accession number U09823,Smith-Waterman Score=1290.

SEQ ID NO: 7810 - DNA, 1868 bp, Homo sapiens
  SIMILAR (200)..(658): 501254mologous to Rattus norvegicus elongation factor-1 alpha,accession number L10339,Smith-Waterman Score=281.
  misc_feature (1)...(1868): n = a,t,c or g
gagaagccgctgattacgccaaggttggcacgaggggtttgccgccagaacacaggatgacgtgaaaacttacccccttaaagccaaaatgggaaagtgttaagactcatatcaacctttgccgtcattggacacagtagattcgggcaagtcccaccactactggccatctgatctataaatgcggtggcatcgacacaaagaaccatttgaaaaatttgacgaaggaggctgctgagatgggaaacgggctcctttcaagtatgcctgggtcttggataaactgaaagctgagcgtgaacgtggtatcaccattgatatctccttgtggaaatttgagaccagcaagtactatgtgactatcattgatgccccagggacacagagactttatcaaaaacattgattacagggacatctcaggcttgacntggtttggggggccccctttttgggggggttntcccctgattgttgctgctgggtgttggtgaatttgaagctggtatctccaagaatgggcagaacccgagagcatgcccttctggcttacaccactgggtgtgaaacaactaaattgtcgggtgttaacaaaaatgggattccactggagcccacccctacagcccagaagaagatattgaaggaaattgttaagggaaagtcagcactttccattaaagaaaatttggctacaacccccgacacagtagcattttgtgcccaatttcttggtttggaattggtgacaacatgcttggagcccaagtgcctaacatgccttggtttcaaggggatggaaaagtcacccgtaaggattggcaatgccagtggaaccacgctgctttggagggctctggactgtatcctacccaccaactcgtccaactgaccaagcccctttgcgccctgccttttcaaggatgtcttaccaaaaattggtgggtatttgggtacctggttccttgtttggcccgagtgggagactggtgttcttcaaacccgggtatgggggtcaccttttgctccagtcaacgttacaacgggaagtaaaatctgtcgaaatgcaccatgaagctttgagtgaagctccttcctggggacaatgtgggcttcaatgtcaagaatgtgtctgtcaaggatgttcgtcgtggcaacgttgctggtgacagcaaaaatgacccaccaatggaagcagctggcttcactgctcaggtgattatcctgaaccatccaggccaaataagcgccggctatgcccctgtattggattgccacacggctcacattgcatgcaagtttgctgagctgaaggaaaagattgatcgccgttctggtaaaaagctggaagatggccctaaattcttgaagtctggtgatgctgccattgttgatatggttcctggcaagcccatgtgtgttgagagcttctcagactatccacctttgggtcgctttgctgttcgtgatatgagacagacagttgcggtgggtgtcatcaaagcagtggacaagaaggctgctggagctggcaaggtcaccaagtctgcccagaaagctcagaaggctaaatgaatattatccctaatacctgccacccaactcttaatcagtggtggaagaacggtctcagaactgtttgtttcaattggccatttaagtttagtagtaaaagactggttaatgataacaatgcatcgtaaaacctttcagaaggaaaggagaatgttttgtggaccactttggttttcttttttgcgtgtggcagttttaagttattagtttttaaaatcagtactttttaatggaaacaacttgacccccaaatttgtcacagaattttgggacccattaaaaggttaactggg

SEQ ID NO: 7811 - DNA, 447 bp, Homo sapiens
  SIMILAR (2)..(211): 1001254mologous to Homo sapiens Proline synthetase associated,accession number AB018566,Smith-Waterman Score=367.
agccatccagccccggctagtggcggtcagcaaaaccaaacctgcagacatggtgatcgaggcctatggacatgggcagcgcacttttggcgagaactacgttcaggaactgctagaaaaagcatcaaatcccaaaattctgtctttgtgtcctgagatcaaatggcacttcattggccacctacagaaacaaaatgtcaacaaattgatgggaaagtctgagttcttaataaaaagagaaaacatcatgccaagaacagaatgaattcaccattttctgggttatatatacttggaaacctacccaacctcatgtttattattatttggtggtctttcagaaaaattataaagaattgtagcccataaatttttttaactagcaaaagagacatttctgttctttttcctttaaataaaaggctacagtaaataaaatacaataca

SEQ ID NO: 7812 - DNA, 631 bp, Homo sapiens
  SIMILAR (9)..(251): 931254mologous to Homo sapiens Proline synthetase associated,accession number AB018566,Smith-Waterman Score=390.
gcggcacgcgggatctcccagccatccagccccggctagtggcggtcagcaaaaccaaacctgcagacatggtgatcgaggcctatggacatgggcagcgcacttttggcgagaactacgttcaggaactgctagaaaaagcatcaaatcccaaaattctgtctttgtgtcctgagatcaaatggcacttcattggccacctacagaaacaaaatgtcaacaaattgatgggtaagataaaattaaatatgaaaacaaaattgttctgtcattgtattgcttctactaccctttgtggaagagagagcaacttttagaatagccccaattcaccatttgtttttggaatttctttaggaaagtctgagttcttaataaaaagagaaaacatcatgccaagaacagaatgaattcaccattttctgggttatatatacttggaaacctacccaacctcatgtttattattatttggtggtctttcagaaaaattataaagaattgtagcccataaatttttttaactagcaaaagagacatttctgttctttttcctttaaataaaaggctacagtaaataaaatacaatacagtaaagtaagtatagtaaagtaaaattaagaattatagt

SEQ ID NO: 7813 - DNA, 898 bp, Homo sapiens
  SIMILAR (49)..(618): 491254mologous to Homo sapiens Proline synthetase associated,accession number AB018566,Smith-Waterman Score=326.
cgtcggtccccgggggatgtggagagctggcagcatgtcggccgagctgggagtcgggtgcgcattgcgggcggtgaacgagcgcgtgcagcaagctgtggcgcggcggccgctggcgatctcccagccatccagccccggctagtcggcggtcagcaaaacgcaaacctgcagacatgggtgatcgaggcctatggacatgggcagcgcacttttggcgagaactacgttcaggaactgcgtagaaaaagcatcaaaatcccaaaattctgtctttgtgtcctgagatcaaatggcacttcattcggccacctacagaaacaaaatgtcaacaaattgatggctgtccccaatctcttcatgctgggaaacagtgggattctgtgaagttgggcagacaaagtgaacagttcctgggcagaggaaaaggttctcctgaaaggttaaaggttatgggtccaggatttaacaccagccgagaagagatatacctgttttctgtttctcttcttgaaggtaaacatgggccttccaccttcagagaccatagccatcgtggagcacataaacgccaagtgttcctaacctgggagtttgtggggttgattgaccttagggaagctttgggcatgatcttagtcaaggaccaaatccagacttccagctgttattgtcgctcccggaagagactgtggtaaaaagctgaagaatccctgctgaccaggttgagctgagcatgggcctgtccgcagatatgcagcatgcggttgaagtaagatctacagatgtctggataagaagcacggtatttggagaaccggattactcaaagaaacccaccccggacaagtgcgcagcagacgtgaaggccccgctggaggtggcacaggagcactga

SEQ ID NO: 7814 - DNA, 349 bp, Homo sapiens
ggtcgacttttttttttttttttttttttgggttcttaccactttattgacgggaatggggtggcaaagcagcaaggacgatgacatccgacgtcctcggctgggagctacaagaacgagagtgatagatcagcgggtgtgcgcgcgcccgcccgccagccccctcccagctccgctcgggcaggctcagactccagttagcatcgcccgcgtcagcagtctaacacgtgctttaattggaaatgtcatcacagcaggccggcccccctacgcctccctgctcccgagccacgacctccggggcccacccagccagacgacccgccaggaatacaacctgacctcccgg

SEQ ID NO: 7815 - DNA, 129 bp, Homo sapiens
gatctaagttgtcattctcatggagaggcaacacaaaagcattctgaaaaatgtaaggcttcctgtacacacatgttcataacagctttattcctaattgccaaacactggaatcagcccacatgtctc

SEQ ID NO: 7816 - DNA, 387 bp, Homo sapiens
  SIMILAR (3)..(377): 941254mologous to Homo sapiens KIAA1690 protein,accession number AB051477,Smith-Waterman Score=630.
agccccagacagtggctgcgaccacagtgcccaccaatacctcatgggcacccaccaccacctccctggggcctgcaaaggacaagccaggccttcgcaaagcagcccaggggggtggttctaccttcaccagccaaggagggacaccagatgccacagcagcctcaggggcccctgtgagtccacaagctgccccagagccttctaagcgcccccaccacggagacccacaggatggccccagccatagagactcttggcttactgttacccctggcaccagcagacctctgtctaccagctctggggtcttcacggctgccacggggcccaccccagctgccttcgataccagtgtctcacccccttccaggggattcctcagga

SEQ ID NO: 7817 - DNA, 693 bp, Homo sapiens
  SIMILAR (550)..(669): 921254mologous to Mus musculus U5-116kD,accession number U97079,Smith-Waterman Score=185.
ggattcggcaggagaagcagcttggggtacacaggaccatcccaagtcctgggccagcttcttcccttttccttccttatcctggtggtgtagcctggaaatggaaatttaagtcatttctaaactgtcatttgctcctcatttctgagaagggtttggcgttggacgtatttgagaagagatatcaagaggatgatgagattggaatggtttatagaccctgattgggcttcatggaccaaatgtacaattctggaatttattctacatccacaaaaatgtaaatatgtgcagaagaaggaaataaacttctaggaaagctctaagtctgagcatggcctgaagcaaacactaagaacatatgcttaacttctgacctctgccatgggccttgcttattcagttagaacgcccacctcccatttgatttctgtaccatgtctttcatgactgcaagacagctgcagtgttgcaggagactgctactctgccatggccccatgacaggcccagaacctctccccagtcactccctccacctcctttacagtgattcggaatgtccagtttaagatcctggatgcggtggttgcccaggagcccctgcaccggggcgcgggccagatcatccccacagccaggagagtcgtctactctgccttcctcatgggggcacgtgacttaggatgcaac

SEQ ID NO: 7818 - DNA, 365 bp, Homo sapiens
  SIMILAR (33)..(212): 731254mologous to Homo sapiens alpha globin,accession number V00488,Smith-Waterman Score=211.
ggcacgagccacagactcagagagaacccaccatggtgctgtctcctgcctgcaagaccaacgtgaaggccgcctggggtaaggtcggcgcgcacgctggcgagtatggtgcggaggccctggagaggatgttcctgtacttccggatgaccaggacatacttgtggtacttctgcctgtgccactgctgtaggcaagcttggggacctggctttaacttctggaccacctgtgacggttgtcagacaaggaggcactgatttacatgtccgttggaagctgtgactaattttttaggctccaattgttttggcgcttcggtgcatttaagcctgcttttagctggccctcactatctagtggcg

SEQ ID NO: 7819 - DNA, 3455 bp, Homo sapiens
  SIMILAR (61)..(2625): 681254mologous to Caenorhabditis elegans the above GenBank entry begins at aa 120,accession number U50193,Smith-Waterman Score =3139.
ggcggaagcacgatctccggcagcggcctgggaactcttagctgagcaggcgagagcatcatggataccgacttatatgatgagtttgggaattatattggaccagagcttgattctgatgaagatgatgatgaattgggtagagagaccaaagatcttgatgagatggatgatgatgacgacgacgatgacgtaggagatcatgacgatgaccaccctgggatggaggtggtgctgcatgaggacaagaagtactacccaacagccgaggaggtgtatggtcctgaggtggagaccatagttcaagaggaagacactcagcctctcacagaacccattattaagccagtgaaaaccaagaaattcactctgatggagcagacattacctgttacggtgtatgagatggatttcttggcggatctgatggataactcagagctcatcagaaatgtgaccctttgtggacatctccaccatggcaagacatgttttgtggattgtttaattgaacagactcacccggaaatcagaaagcgctatgaccaagatctgtgctatactgacatcctcttcacagagcaagagagaggtgtaggcatcaaaagcactcctgtgacagtggtcttgccagacaccaaaggaaaatcttatctcttcaatatcatggacactccaggacatgtgaatttctctgatgaggtcacagctggcttgcgcatctcagatggagtggtccttttcattgatgctgctgagggggtgatgctgaacacagagcggctgatcaagcatgcggtgcaggagaggctggcagtcactgtgtgcatcaacaagattgaccggctgatcctggagctgaagctgcctccaactgatgcttattacaagctgcgccacattgtggatgaggtcaatggattaataagcatgtattccactgatgagaacctgatcctttccccactcctgggtaacgtctgcttctccagctcccagtacagcatctgcttcacgctgggctcctttgccaagatctatgccgacacctttggtgacattaattaccaagaatttgctaaaagactctggggtgacatctacttcaaccctaagacgcgaaagttcaccaaaaaggccccaactagcagctcccagagaagtttcgtggagtttatcttggagcctctttataagatcctcgcccaggttgtaggtgacgtggacaccagcctcccacggaccctagacgagcttggcatccacctgacgaaggaggagctgaagctgaacatccgccccttgctcaggctggtctgcaaaaagttctttggcgagttcacaggctttgtggacatgtgtgtgcagcatatcccttctccaaaggtgggcgccaagcccaagattgagcacacctacaccggtggtgtggactccgacctcggcgaggctatgagtgactgtgaccctgatggccccctgatgtgccacactactaagatgtacagcacagatgatggagtccagtttcacgcctttggccgggtgctgagtggcaccattcatgctgggcagcctgtgaaggtactgggggagaactacaccctggaggatgaggaagactcccagatatgcaccgtgggccgcctttggatctctgtggccaggtaccacatcgaggtgaaccgtgttcctgctggcaactgggttctgattgaaggtgttgatcaaccaattgtgaagacagcaaccataaccgaaccccgaggcaatgaggaggctcagattttccgacccttgaagttcaataccacatctgttatcaagattgctgtggagccagtcaacccctcagagctgcccaagatgcttgatggcctgcgcaaggtcaacaagagctatccatccctcaccaccaaggtggaggagtctggcgagcatgtgatcctgggcactggggagctctacctggactgtgtgatgcatgatttgcggaagatgtactcagagatagacatcaaggtggctgacccagttgtcacgttttgtgagacggtggtggaaacatcctccctcaagtgctttgctgaaacgcctaataagaagaacaagatcaccatgattgctgagcctcttgagaagggcctggcagaggacatagagaatgaggtggtccagattacgtggaacaggaagaagctgggagagttcttccagaccaagtacgattgggatctgctggctgcccgttccatctgggcttttggccctgatgcgactggccccaacattctggtggatgatactctgccctctgaggtggacaaggctcttcttggttcagtgaaggacagcatcgttcaaggtttccagtggggaaccagggagggccccctctgtgatgaattgattcggaatgtcaagtttaagatcctggatgcggtggttgcccaggagcccctgcaccggggcgggggccagatcatccccacagccaggagagtcgtctactctgccttcctcatggctactcctcgtctgatggagccttactactttgtagaggtccaggcccctgcagattgcgtctctgcagtttataccgtcctggccaggcgcaggggggcacgtgactcaaggatgcacccatcccaaggcttcccctctgtagaccatcaaagcttttaatcccggccatcgactcttttggctttgagactgatctccggactcacacccagggacaagccttttctctgtctgtcttccaccactggcagattgtgcctggtgatcccctggacaagagcattgtcatccgccccttggagccacagccagctcctcacctggcccgggaattcatgatcaaaacccgccgtaggaagggcctcagtgaagatgtgagcatcagcaaattcttcgatgatcctatgttgctggaacttgccaaacaggatgttgtgctcaattaccccatgtcccaacagctgcttcaagcatctgaccacacaacctggggaaaccacttatctgacagttcacgaaacactttcacatgtattgtgtatctgagaaacctcacagcagcctgcaagatggatgatgatgacgacgacgatgacgtaggagatcatgacgatgaccaccctgggatcgcccttgccgcgtataggagtcccaggcctttagttgtagcgtgcagaagagcccaattcttcctcactcgcgagcaggaggacctttcacggggccgacgtacagagggccaggccccggtggcagatgtgcaggcccagtctaggtccagcatagatgagcggaggggtcctgaccacccgtacgggtgtgaccatcccaagatgaacttaaaggacagccttgatgtggcaaagccggcggacgccaagaatggcaattccatccgcttggctttgacagtgtcagaagcatga

SEQ ID NO: 7820 - DNA, 639 bp, Homo sapiens
  SIMILAR (5)..(637): 951254mologous to Homo sapiens Human TANGO 234,accession number AAB66037,Smith-Waterman Score=1095.
agcagttgttgtgatctgttctgacgcatcggatatggagctgatgcttgtgggtggatttttcaggtgtgctggaaaagttgaggtgaatgtccagggtgccgtgggaattctgtgtgctaatggctgtggaatgaacattgctgaagttgtttgcaggcaacttgaatgtgcgtctgcagtcacggtctccagagagcctcatttcacagaaagaacattacacatcttaatgtcgaattctggctgcactggaggggaagcctctctctgggattgtatacgatgggagtggaaacagactgcgtgtcatttaaatatggaagcaagtttgatctgctcagcccacaggcagcccaggctggttggagctgatatgccctgctctggacgtgttgaagtgaaacatgcatacacatggcgctctgtctgtgattctgatttctctcttcatgctgccaatgtgctgtgcagagaattaaactgtggagatgccatatctctttctgtgggagatcactttggaaaagggaatggtctaacttgggccgaaaagttccagtgtgaagggagtgaaactcaccttgcattatgccccattgttcaacatccggaagacacttgtatccacagcagaaa

SEQ ID NO: 7821 - DNA, 439 bp, Homo sapiens
  SIMILAR (232)..(83): 331254mologous to Homo sapiens Unknown (protein for IMAGE:2907142),accession number BC005847,Smith-Waterman Score=51.
  misc_feature (1)...(439): n = a,t,c or g
aaggagggagtcccgagctcctggcacagtggctgagacctacttgttgggcagattaggtggaatgtccccttttctgcagctgggaggagacctcagagagtgggacggggtctttcttgcggggacctgtggccacggagcgggagggaggcgagtgcagtttccctcctgccctctcctcatgccttccgggtgcctcttcacgccctccctttccatcccttcctcctcctcccgcgctctctttccactcccctccccctactccatccgatcaggtccttcctatagctgtgccgccccccaccccttacctagccagagttgatcttgacctctaggatggtgagggggcctgaggcctggaggccgccgttgctgcggacgcgtgggtcgatccgggnagtccgttcggangcntctcaattgttcaaan

SEQ ID NO: 7822 - DNA, 522 bp, Homo sapiens; identical to SEQ ID NO: 7099
  SIMILAR (220)..(237): 1001254mologous to Oryctolagus cuniculus elongation factor 1 alpha,accession number U09823,Smith-Waterman Score=38.
  misc_feature (1)...(522): n = a,t,c or g

SEQ ID NO: 7823 - DNA, 1803 bp, Homo sapiens
  SIMILAR (962)..(1405): 411254mologous to Artemia sp. EF-1-alpha,accession number X03349,Smith-Waterman Score=194.
  misc_feature (1)...(1803): n = a,t,c or g
acgggtttgccgccagaacacaggtgtcgtgaaaactacccctaaaagccaaaatgggaaaggaaaagactcatatcaacattgtcgtcattggacacgtagattcgggcaagtccaccactactggccatctgatctataaatgcggtggcatcgacaaaagaaccattgaaaaatttgagaaggaggctgctgagatgggaaagggctccttcaagtatgcctgggtcttggataaactgaaagctgagcgtgaacgtggtatcaccattgatatctccttgtggaaatttgagaccagcaagtactatgtgactatcattgatgccccaggacacagagactttatcaaaaacatgattacagggacatctcaggctgactgtgctgtcctgattgttgctgctggtgttggtgaatttgaagctggtatctccaagaatgggcagaccccgagagcatgcccttctggcttacacactgggtgtgaaacaactaattgtcggtgttaacaaaatggattccactgagccaccctacagccagaagagatatgaggaaattgttaaggaagtcagcacttacattaagaaaattggctacaaccccgacacagtagcatttgtgccaatttctggttggaatggtgacaacactgctggagcttttgttctaacatgccttggttcaagggaatgaaaagtcacccgtaaggatggcaatgccagatggaaccacgctgcttgaggctctggactgcatcctaccaccaactcgtccaactgacaagcccttgcgccatgcctctccaggatgtctacaaaattggtggtattggtactgttcctgttggccgagtggagactggtgttctcaaacccggtatggtggtcacctttgctccagtcaaccgttacaacggaagtaaaatctgtcgaaatgcaccatgaagctttgagtagaagctcttcctggggacaatgtgggcttcaatgtcaagaaatgtgtcgtgtcaaggatgttccgtcgtggcaacgttgctgggtgacagcaaaaatgacccaccaatggaagcagctggcttcacttgctcaggtgattatcctgaaccatccaagaccaaaaaaacgcccggcatatgccccttgaattggattgccacacggctcacattgcatgcaagtttgcctgagcctgaaggaaaagatttgatcgccgttctgggtaaaaagctgggaagatggcccctaaaattctttgaagtctgggtgatgctggccattggttgatatggttccctgggcaagccccatgtgtgtttgagaagcttctcaagactatccaacctttgggtcgcttttggccgttccgttatatgagacagacagntttgcggttgggtgtcaatcaaaagcagttggacaaaaaaggctgctgggagctggcaaggttcaccaaagtctggcccagaaagcttaaaaaggctttaatggaatttaatcctaatacctgccaccccactcttaatcaatgggtggaagaacggtctcaagaactgtttggtttcaattggccatttaagtttaagtagtaaaaagactgggttaatggataacaatgcatcgtaaaaccttcaagaaggaaaggagaatgttttgtggaccactttggttttcttttttgcgtgtggcagttttaagttattagtttttaaaatcagtactttttaatggaaacaacttgaccaaaaatttgtcacagaattttgagacccattaaaaaagttaaatgagaaaaaaaaaa

SEQ ID NO: 7824 - DNA, 442 bp, Homo sapiens
  SIMILAR (68)..(433): 401254mologous to Arabidopsis thaliana extensin-like protein,accession number AL031032,Smith-Waterman Score=223.
ggcaaacgcagctctctgtcagcatccgacgggctgtcagaccagtgctgatcttcactggactcttcctcctcctcgtcatagtcctcctcctcctcctcttcatattcttcctcctcctcgtcatagacctcctcctcctcctcttcatattattcctcctcctcctcctccttttcattcccaggcccaaagctctttgaggcctctagctcctcttcacttttccctttcagaagggcatggatccgcacggcctccttccacggaacaccacccaggtcagatgggggcaggcgaggctcctcctcctcctcctctccctcctcctccctctcagactcggaaatactgccggggacgtcctcctcggcgccagaatccagcaaactgctcaggttgtgctcggcctgagtctctcctgcctcccctcgacccggga

SEQ ID NO: 7825 - DNA, 413 bp, Homo sapiens
  misc_feature (1)...(413): n = a,t,c or g
acnnnnnnnnnnnnnnnnnnnnnnnnnnnnnnnnnnnnnnnnnnnnnnnnnnnnnnnnnnnnnnnnnnnnnnnngcttcggcttgtaaacatcagcaactcattcgaatatcaaaacacagggcaggacaaaatgcatgtcaggtcatacatagcctgtgaactcagcgtagacttccagtgggtgttagttaccccacatcagtgtcctgggatcgtaggggtgagtgaagaaacaagtgtgagtgccaagatgatgccaagggctgtgatttcctggtgggaagaaagaaggaatagaagccaaaggaagggggatgaaaagcacaaccacgaatcacaaggaatcaagttcggagagaattttggcagagattttgagaggggggctttaagtcagccatggacatactg

SEQ ID NO: 7826 - DNA, 954 bp, Homo sapiens
ttttaagcttttggatgatttttattgatttcatgccattattaaggttaataccctcagaatctccataggcagtagtagcccaacccaggccctgcagggcccagctcttggcgactttcacattccaagaaacttggtttagaaatcaaaggtaatttaaaagttatttgaatctttactgtcattgcttgaagaatattaaaaagaattcaacttgtaacctataatgggaggcttaaatcctccttggccccattcttcttcttttttccccccttttcttttttcccttcattcctcttgcttcagtatgtccatgggctgacttaaagcccccctctcaaaatctctgccaaaattctctccgaacttgattccttgtgattcttggttttgcttttcatcccccttcctttggcttctattccttctttcttcccaccaggaaatcacagcccttggcatcatcttggcactcacacttgtttcttcactcagcccttttctccttggtcactgattctgctccatgagcagtcagaaatggagctggcaagctcagcctctcagctggagacactggagtcagggccctgtcccctccctgcccgcaaaactactcttcaaaggcttccttccgggcaccgcgaagccagcgtgctcagcattcagggaggcagcggcgctcgccttcatccaggacaacaaaactgccatttccgaagagaaaggaaacggctcgcggtttctggggttcccaagcgcgcgcctgcgagggaggccgcgagccgagtcgccacgcccagaaccccgagcccgcccccgcgccacccagcccggccccgccgccccggctgcgcacgcgacgccccctccaggccccgctcctgcgccctatttggtcattcggggggcaagcggcgggaggggaaacgtgcgcggcccgaaggg

SEQ ID NO: 7827 - DNA, 206 bp, Homo sapiens
  SIMILAR (66)..(206): 821254mologous to Homo sapiens transcription factor LBP- 1b,accession number AF198487,Smith-Waterman Score=193.
cggccgcgtcgaccacacccacccggggctgccacgccccctctgtccacacagccccgacccacacagcctatgtatatacaaggccttcgggagcgtccgctttcgcctccccacagcagagcactgtcagtgtcccggacagcaattcttcttccccaaatcatcagggagatggagcttcacagacctctggtgaacaaatt

SEQ ID NO: 7828 - DNA, 206 bp, Homo sapiens
  SIMILAR (66)..(206): 761254mologous to Homo sapiens transcription factor LBP- 1b,accession number AF198487,Smith-Waterman Score=178.
cggccgcgtcgaccacacccacccggggctgccacgccccctctgtccacacagccccgacccacacagcctatgtgaataacaagcctgtgggggcgtcggccctcgcctccccccaggagagcactggcagagtatcagacagcaattcttcttccccaaatcatcagggagatggagcttcacagacctctggtgaacaaatt

SEQ ID NO: 7829 - DNA, 661 bp, Homo sapiens
  SIMILAR (378)..(659): 531254mologous to Mus musculus putative E1-E2 ATPase,accession number AF011337,Smith-Waterman Score=280.
cggaaggcaaatggctggcgtggaagcacaacccgctttcactcttcgaatttgtgcttagctcttttcttgtaccttgcgactcgcgaccaacatgctgtgatgtgtgccgagggaggaattggtcagctacacaacctggatcttaccacagtttggatatgactgaggctctccaatgggccagatatcactggcgacggctgatcagaggtgcaaccagggatgatgattcagggccatacaactattcctcgttgctcgcctgtgggcgcaagtcctctcagatccctaaactgtcaggaaggcaccggattgttgttccccacatccagcccttcaaggatgagtatgagaagttctccggagcctatgtgaacaatcgaatacgaacaacaaagtacacacttctgaattttgtgccaagaaatttatttgaacaatttcacagagctgccaatttatatttcctgttcctagttgtcctgaactgggtacctttggtagaagccttccaaaaggaaatcaccatgttgcctctggtggtggtccttacaattatcgcaattaaagatggcctggaagattatcggaaatacaaaattgacaaacagatcaataatttaataactaaagtttatagtagaaaaaaaaaaaaaaa

SEQ ID NO: 7830 - DNA, 327 bp, Homo sapiens
  SIMILAR (6)..(326): 471254mologous to Homo sapiens Amino acid sequence of human intracellular signalling molecule INTRA2,accession number AAB64370,Smith-Waterman Score=250.
gcacgaggaacgacgagaggcccgcggcagagtacgagcagccatgggagtggaagaaggagcagatcgtgcgggctctgtcagtccagtttgaaggagctgagcgaccttccttcagggaggagacagtgaggcagcaccaccggcagaagagctggacccagaagatcctgaagccagccctctcggaccacagtgagggagagaaagtggacccgggcctgcccctggagaagcagccctggtatcatggtgccatcagccgtgctgaggctgagagtcgactacagccctgcaaagaagctggttacctggttcgaaatagtg

SEQ ID NO: 7831 - DNA, 324 bp, Homo sapiens
  SIMILAR (56)..(322): 821254mologous to Homo sapiens Gene product with similarity to Ubiquitin binding enzyme,accession number AC002400,Smith- Waterman Score=352.
  misc_feature (1)...(324): n = a,t,c or g
gctcgagnnnnnnnnnnnnnnnnnnnnnnnnnnnnnnnnnnnnnnnnnnnnnnntttccccctggacagcacaggctccgagctgaaacaaaatatactctcttttacaggtctcccgcctgccatgcaaaaagttatgtataagggactcccccccgaggataaaacattgagagaaataaaagtgaccagtggggccaagatcatggggggtggctcccccatcaatggtgttttatctgtacacacacccatatattctgcgcaccttgatgcaaaggccgaaaaaaacaagaaagagcctctctgcaggcaaaaacaaag

SEQ ID NO: 7832 - DNA, 259 bp, Homo sapiens
ttcttttcaccccgaaatacaacagcccataacagagacttcctcggaccccactaacagggcaaggaacaagaagactacaccgctcatcacaaaccctgcctgtatcgaaagtctattttaaaaactatgttccttgccgtagattgcagagctaatttatcacgtttctctcctgtgagacccccccttttatatgatatatccagaggaagttttgtaatataaaacaggacgcccacaaaaaaaaaaaaaaaaa

SEQ ID NO: 7833 - DNA, 502 bp, Homo sapiens
cacggtcactatttattctttgttcctttttctttttgtaagaaacattcacaaaaaccagtgcaaaaccatcagtgtgggcgtcctgttttatattacaaaacttcctctggatatatcatataaaagggggggtctcacaggagagaaacgtgataaattagctctgcaatctacggcaaggaacatagtttttaaaatagactttcaacatatggacccatgggggaaggaggagggggctttcgatacaggcagggtttgtgatgagcggtgtagtcttcttgttccttgccctgttagtggggtccgaggaagtctctgttatgggctgttgtattttcgggtgaaaagaaacaaaggagtttccctgtccacccctcccccacaaccccatccaccaccagaacctgctgtgggttgtatctggaccaagccagctaaaccctgtttctccctgtgctctggagggaggctcaagcctgatatgggctgaactttc

SEQ ID NO: 7834 - DNA, 921 bp, Homo sapiens
ctacaaatgtgccaaggaaccctcaatcagccctgattcagctcgccagccattcactgtccaccctcttaggctggaaagggaagacaggcagtttctgctcctgttggcattcgctcaggctggtagctatttgcaagactgcctgaggccattccttggaggcaaggcaaagaaagctcagcccaaatcaggcttgagcctccctccagagcacagggagaaacagggtttagctggcttggtccagatacaacccacagcaggttctggtggtggctggggttgtgggggaggggtgggcagggatacctctttgtttcttttcaccccggaaatacaacacgcccataaccagagacttcctcggacccccactaacagggcaagggaacaagaagactacaccgctcatcacaaaccctgcctgtaatcgaaaagccactttccctgctctgaaagctactgccctccttaagagaaagggaatagctctttattggactgggggtgagggccccctccccagggtccctgttaatttctggccttggtgctcaggcctgtccacaagcctcccttgtctatgtctctatccatgcttaaggggcccgggacaggatttcccaaaccaaccgaggccccagcacccgccgtctccccagaagcccccctcctccttcccccatgggtcatatgttgaaagtctattttaaaaactatgttccttgccgtagattgcagagctaatttatcacgtttctctcctgtgagacccccccttttatatgatatatccagaggaagttttgtaatataaaacaggacgcccacactgatggttttgcactggtttttgtgaatgtttcttacaaaaagaaaaaggaacaaagaataaatagtgaccgtgaaaaaaaaaaa

SEQ ID NO: 7835 - DNA, 667 bp, Homo sapiens
  SIMILAR (37)..(108): 911254mologous to Mus musculus nuclear poly(C)-binding protein, splicevariant E,accession number X97982,Smith-Waterman Score=118.
ggaggacggtccgtattgccggtcgacccacgcgtccgctctcattttcccatgacgcatggcaataccggattaagtgcaggtttggatgcatctgctcagactactttctcatgaactcaccattccaaacgatttgattggctgcataatcgggcgtcaaggcgccaaaatcaatgagatccgtcagatgtctggggcgcagatcaaaattgcgaacccagtggaaggatctactgataggcaggttaccatcactggatctgctgccagcattagcctggctcaatatctaatcaatgtcagtttagaaaacgctaaaccctcctcccaggcagcctccgtcacgatccctgatcacctcagcatcaacctctctcaaccctccaccccttcttcttctttctcctccaccaccaccccctcgctcgccacagcggggacctccgacgcaccctccagcctccccaacccctcttccgaccgccccttgtgtctccagtctgcttggcatgaaacccatccctttcctggctctcccccgccccgcttgttgctccccgctaccccccccctctagtttccacccaccacccccctttgtgccgcgcccttgtgtaccctacccaacacgtgaaggcgcgacaacaccataacatccctctcc

SEQ ID NO: 7836 - DNA, 1320 bp, Homo sapiens
  SIMILAR (81)..(380): 611254mologous to Homo sapiens hnRNP-E2,accession number X78136,Smith-Waterman Score=241.
aattatcactttggctggacccactaatgccatcttcaaagcctttgctatgatcattgacaaactggaagaggacataagcaagctctatgaccaatagcacagctgccagtagacccccggtcaccctgaggctggtggtccctgctagtcagttgtggttctctcattggaaaaggtggatgcaagatcaaggaatatacgagagagtataggggcttcaggtccaaggtggcaggggatatgctacccaacttaactgagcgggccaattactattgctggcattccaccaatccatcattgagtgtgtcaaacagatctgcgtggtcatgttggagactctctcccagtcccccccgaagggcgtgaccatcccggtaccggcccaaagccgtccagctctccggtcatcttgcaaggtggtcagccctataccattcaaggacagtatgccattccacagccagatttgaccaagctgcaccagttggcaatgcaacagtcatcattttcccatgacgcatggcaacaccggaattcaatggcatttgaatccagcttctccaagaggttcaaaggcctattggggcaggtttggaatgcatctgctcagactacttcttcatggaactcaccatttccaaacggttttgattgggctggcataatcggggcgttcaagggcgccaaaatccaatgagatccgtcagatggtctggggcgcagatcaaaattgcgaacccagtggaaaggatctacctgataggcaggttaccagtcacgtggatctgctgccagcattagccctggcgtcaatatcataatcaatgtcaggctttcctcggagaacgggtggcatggggagcagctagaaacaatgcagattcatccataaatccctttctgctgttcaccaccacccatgatccatctgtgtaagtttctgaacagtcagcgattccagggttttaattagtttgtaaattttcagtttctacacactttatcatccacttgtgaattttttaattaaagcgttttaattcctttctctgttcagctgttgaatgctgagatccatatttagttttataagcttctccctggtttttttttttttttggttttttttttttggctcatgaatttttctgtttgtcatggaaatgtaagagtggaatattaatacatttcagtttagttctgtaatgtcaggaatttttcaaaaaaattaaaagatggactggagctttttctttgtgaatagaaactggatgccccagtgattcatgtgggttttaaaaaaaaaaaaaaaaa

SEQ ID NO: 7837 - DNA, 376 bp, Homo sapiens
  SIMILAR (3)..(359): 951254mologous to Homo sapiens dJ18C9.2.1 (novel gene similar to Gamma-glutamyltranspeptidase isoform 1),accession number AL049709,Smith-Waterman Score=596.
ggcacagttctggcctgggcggtgggggcgtgatgctggtacatgacatccgacgaaatgagagccacctaattgatttccgggagtccgcaccaggggccctcagggaagagaccctgcaaagatcctgggagaccaagcctgggctcttggtgggggttcccggaatggtgaaggggctacatgaagctcaccagctctatggcaggctgccatggtcccaagtcctggcctttgcagcagctgtggcccaagatggcttcaacgtgactcatgatctagcccgtgccctggctgaacagctgccacccaacatgtccgagcgcttccgggagacgttcctgccattcggcccgcccgccactacctggctcgt

SEQ ID NO: 7838 - DNA, 1968 bp, Homo sapiens
  SIMILAR (1)..(1965): 961254mologous to Homo sapiens dJ18C9.2.1 (novel gene similar to Gamma-glutamyltranspeptidase isoform 1),accession number AL049709,Smith-Waterman Score=3251.
atggcggcggagaacgaggccagccaggagagcgccctgggcgcctactcgccagtggactacatgagcatcaccagcttcccgcggctgcccgaggacgagccggcgcccgcggccccgctgaggggccgcaaggacgaggacgcctttctgggagaccccgacaccgacccggactccttcctgaagtctgcacggctgcagcggctgccatcgtcgtcgtcggagatgggcagccaagacgggtcgccgctacgcgagacgcgcaaagacccgttctccgccgcagcggccgagtgctcctgccgccaggatgggctcacggtcatcgtcacggcctgtctcaccttcgctaccggtgtcaccgtggcgctggtcatgcagatctacttcggggacccccagatcttccagcagggtgccgtggtgaccgatgctgcccgctgcacttcactgggcatcgaggtgctcagtaaacagggatcttctgtggacgcagcggtggcagcagccttgtgtttgggtatcgtggctccacacagttctggcctgggcggtgggggcgtgatgctggtacatgacatccgacgaaatgagagccacctaattgatttccgggagtccgcaccaggggccctcagggaagagaccctgcaaagatcctgggagaccaaggtggggaccctggacctcctccaccccctgctctccggcccccccaggctgccatggtcccaagtcctggcctttgcagcagctgtggcccaagatggcttcaacgtgactcatgatctagcccgtgccctggctgaacagctgccacccaacatgtccgagcgcttccgggagacgttcctgccatcgggccgcccgccactacctggctcgttgctgcatcggcccgacctggctgaggtgctggatgtacttggcacctccggcccggctgccttctacgcaggtggcaacctcacactggagatggtggccgaggctcagcacgcagggggtgtcataaccgaagaggacttcagcaattacagcgcccttgtggagaagcctgtgtgtggcgtgtacagaggccacctggttcttagtcccccacctccgcacacgggccctgccctcatcagtgctctcaacatcctggagggcttcaatctcaccagcctggtatcccgagaacaggctcttcactgggtggcagagaccctgaagattgcattagccctggccagcagactgggagatcccgtctatgattctaccatcactgagagcatggatgacatgctcagcaaggtggaggccgcctacctccggggccatatcaatgactcccaggcagcccctgccccactcctgcctgtctatgaactagacggagctcccacggctgcccaggtgctgatcatgggacctgatgacttcattgtggccatggttagctccctgaaccagccctttggcagcggccttatcaccccctcggggatcctgctcaacagccagatgctggacttctcctggcccaaccggacagctaaccactctgcacccagcctggagaattcagtgcagccagggaagcggccactctctttcctgctgcccacagtggtccgacccgcggaggggctctgtggaacctacctcgctctgggggccaatggagctgcgcggggcctcagcggcctgacacaggttctgctgaatgtcctgaccttgaaccggaacctgagtgacagcctggcccgcggccgcctacacccggacctgcagtccaacctcctgcaggtggacagtgagttcacagaggaagagattgagttcctggaagccaggggtcaccacgtggagaaagtagatgtcttatcctgggtccatggcagccgaaggaccaacaacttcatcatcgctgttaaggaccctcggagcccagatgcagctggagccaccatcctgtag

SEQ ID NO: 7839 - DNA, 876 bp, Homo sapiens
  SIMILAR (34)..(255): 541254mologous to Homo sapiens Human secreted protein encoded by DNA clone vr2 1,accession number AAB34736,Smith-Waterman Score= 186.
tgagatggagtcttgctctgtcacctaggcacgatctcagctcactgcaacctccacctcccaggatcaagcagttctcctgcttcagtctcacaaatagctggggttacaggtgtgcactaccacgtatggctaaattttttccttttagtagagacatggttttgccatgttggccaggctgacaccccgtttctgccaaaaaaaaaaaaaaaaaaagcctggagtggcgtgtgcgcctttaagccccggctactcgggagggcttaggcgggagactcgcttgagcccgggaggcagatgttgctaggagccgagatcgcgccactgcactccagccggggcgcaggacagaacaagagacccggagaccccgtctgggggtgggagtgggcggcgggaaacggcgacaaaagagggagcgagaatgggagaaaacgcaaaaagagaccaataggaggtgccacacagcatcccccgcctcgcgccaagactataattaaaaagcctaccccgaggaaaacccaagagccgtcaccgctgaaacaggaggcgaaaacctttctcgcgacattgccaagcaggagcgaacagcccggaaacgccccggagtttacgagctagtctctgtcattgagccatcaagaaggaaaaaccactcagaccgcgttctctccctctcactccccaatacggagacaagaacgatcatcaatggctgacggcagttgcagcgaaacaacacgccaaaaagccggcttcacgctcaggagaaaaacgctacctctcttcctcgtggttttcggtgctctacacgttcagagaaacttctctagtaacacactatagcggacgcgtgggcggacgcgtgggcga

SEQ ID NO: 7840 - DNA, 410 bp, Homo sapiens
  SIMILAR (374)..(3): 991254mologous to Homo sapiens PRO2987,accession number AF116719,Smith-Waterman Score=633.
ggggcttctggaacgtctgaggttatcaataagctcctagtccagacgccatgggtcatttcacagaggaggacaaggctactatcacaagcctgtggggcaaggtgaatgtggaagatgctggaggagaaaccctgggaaggctcctggttgtctacccatggacccagaggttctttgacagctttggcaacctgtcctctgcctctgccatcatgggcaaccccaaagtcaaggcacatggcaagaaggtgctgacttccttgggagatgccataaagcacctggatgatctcaagggcacctttgcccagctgagtgaactgcactgtgacaagctgcatgtggatcctgagaacttcaagctcctgggaatcaaataataaatctattctgctaagagattccca

SEQ ID NO: 7841 - DNA, 464 bp, Homo sapiens
  SIMILAR (377)..(463): 1001254mologous to Homo sapiens ribosomal protein L8,accession number Z28407,Smith-Waterman Score=137.
cgctggtgaacaggacccgtcgccatgggccgtgtgatccgtggacagaggaagggcgccgggtctgtgttccgcgcgcacgtgaagcaccgtaaaggcgctgcgcgcctgcgcgccgtggatttcgctgagcggcacggctacatcaagggcatcgtcaaggacatcatccacgacccgggccgcggcgcgcccctcgccaaggtggtcttccgggatccgtatcggtttaagaagcggacggagctgttcattgccgccgagggcattcacacgggccagtttgtgtattgcggcaagaaggcccagctcaacattggcaatgtgctccctgtgggcaccatgcctgagggtacaatcgtgtgccaccgttatctccaagaaggttatctcctcagccaacagagctgtggttggtgtggtggctggaggtggccgaattgacaaacccatcttgaaggctg

SEQ ID NO: 7842 - DNA, 846 bp, Homo sapiens
  SIMILAR (475)..(807): 561254mologous to Homo sapiens ribosomal protein L8,accession number Z28407,Smith-Waterman Score=249.
  misc_feature (1)...(846): n = a,t,c or g
gtgaacaggacccgtcgccatgggccgtgtgatccgtggacagaggaagggcgccgggtctgtgttccgcgcgcacgtgaagcaccgtaaaggcgctgcgcgcctgcgcgccgtggatttcgctgagcggcacggctacatcaagggcatcgtcaaggacatcatccacgacccgggccgcggcgcgcccctcgccaaggtggtcttccgggatccgtatcggtttaagaagcggacggagctgttcattgccgccgagggcattcacacgggccagtttgtgtattgcggcaagaaggcccagctcaacattggcaatgtgctccctgtgggcaccatgcctgagggtacaatcgtgtgctgccttggaggagaagcttggaagacccgtggcaagcttgcccgggcatcagggaactatgccaccgttatctcccacaacccctgagaccaagaagacccgtgtgaagctgccctccggctcccaagaaggttatctcctcagccaacagagctgtggttggtgtggtggctggagggtggcccgaattgacaaacccatctttgaaggctggcccgggcgtaccacaaatataaggcaaagagnagaggaactgctggccaccgaatacggggtggtggccatgaatcctgtggagcatacttttggaggggggcaaccccccagcacatcgcaagccctccgaccatccgcagagatgcccctntggccgcaaagtgggtctcattgctgcccgccggactggacgtctccggggaaccaagactgtgcaggagaaagagaactagtgctgagggcctcaataaagtttgtgtttatgccaa

SEQ ID NO: 7843 - DNA, 349 bp, Homo sapiens
  SIMILAR (14)..(337): 471254mologous to Mus musculus Pro-Pol-dUTPase polyprotein,accession number Y12713,Smith-Waterman Score=254.
acggtaatagtccattttacaaaaggctaaggctaaaatactagaatttgcaacccctaccactaaaaaggaggcccagaaatttattggcttgtttggatactggagacatcatatgccccacatgggtaacattttacaacctctgcgtgcagtcactagaaaacgctatgactttcactggggacagaaagagagcgtggcttttcaacaagctgaacaagcggtgcaactgaccccagatctatggcccatacgaaacaggccagtagaactgcaagtagctgtcctagatcaacatgctaattggagtcttaggcagaaacaaggtgggaagagggtacctttg

SEQ ID NO: 7844 - DNA, 759 bp, Homo sapiens
ttattgcctttcttcttgtttcactgtgtatgctgttgcttcttgtgttgaatgcttagctactttatttttaaccttttgtttcctgatagatataacccatacagttccatctaactggtgttttagaaaactgggcgctaactgaagagtgtgtctgtccccgctgaagctgcctgtgggacgtggaatgagacaatcgggcactgtgcagcgggctcgccacccgatcacctggcgcctcttcataagaggtgaaagcggctcagagtccctctcaagtgttagctggggcatcttctgaagatcaaaaagtgattcagctgctgatctgcccagccgcagagccaggctctctggcactggtgaaaaggcctctgagaacaaaggggaccctgtgcacctgtaggctgatggaggttttgtcccacttgaagactctctgtgtatgtgattccctgcttgggcctccagtccatctgctgccctctccatcgggctcactgtccaagtggctggcctgcagggtctgccatgggctccctgggttgtgccactgggaagcactggcaggcgatcctctggagagctggaggaaagtgaggcaggatatctatccacctcctccactgatggcttgctgggttcatttaaggagggctgcagctcctgttgatagacctttcctgtagctgcagttcttactgcattcaggtaaatgttcctttcccttgcacattcaggctgattggtggtcat

SEQ ID NO: 7845 - DNA, 1138 bp, Homo sapiens
  SIMILAR (463)..(723): 751254mologous to Homo sapiens Membrane-bound protein PRO1115,accession number AAY66673,Smith-Waterman Score=314.
cttccaagttgttgataaacatccttttctttattcttcttcaagatttattttcttggccttcccaagctgctttcgcagactttctgcctggctctttcaaatccacagcagcccctctctttatatgcccaccttcctttcttaaacacgcacacattctccaagcatgtccgtgacagccgttctttgcatcaaggagcacttacaaatgatccagagaccgaggagaatactgtctaggcacacctgctggagactcctccccgaaactctccaacatccctcttgccagatacaatcaacatgtgaagataatgaagaccaagaaaaaagcctcctagggcataggatacagctgatcctcctccctacattcagcgattggcctgctctgctctcgctcctccgacagcttcacctgctcctcttcatgttcctgtgcctggggtccaggggctcatccaggcagtgctgctcgtcttgatttttgttctcagaaagagaataaaattgacagttgagcttttccaaatcacaaataaagccatcagcagtgctcccttcctgctgttccagccactgtggacatttgccatcctcattttcttctgggtcctctgggtggctgtgctgctgagcctgggaactgcctgtggccgacccaggtgcacagggtccctttgttctcagaggccttttcaccagtgccagagagcctggctctgcggctgggcagatcagcagctgaatcactttttgatcttcagaagatgccccagctaacacttgagagggactctgagccgctttcacctctccagtgttcattaaggtggtctggaagctccagagtctgtacaatagaagagaaccatattggattttggcagggagtggacttcccgcgaggtctgtgctgcagttagaagatttaatcacaggactgcacacagcatacaccgtgtacttgggatacacaaaggggtgagctgtttcccggctttcgccctgaagccagagcgcccctgaacgtttgtctaaaccaatggttctcaagccccccgcgccccccggtgactttttgcccctgatatggcatttggcaatgtgtggacacatttttgggttgtcgtgg

SEQ ID NO: 7846 - DNA, 381 bp, Homo sapiens
  SIMILAR (9)..(371): 471254mologous to Homo sapiens KIAA1372 protein,accession number AB037793,Smith-Waterman Score=226.
ggcacgaggcatacgcacctcggatattctttgagggttccagacctccatgggttactcccagatcacagcaagactgttctgaatacctcagatttctccttgacaggctccatgaagaagaaaagatcttgaaagttcaggcctcacacaagccttctgaaattctggaatgcagtgaaacttctttacaggaagtagctagtaaagcagcagtactaacagagacccctcgtacaagtgacggtgagaagactttaatagaaaaaatgtttggaggaaaactacgaactcacatacgttgtttgaactgcacgagtacctcacaaaaagtggaagcctttacagatctttcgcttgccttttggccttcctcttctg

SEQ ID NO: 7847 - DNA, 371 bp, Homo sapiens
  SIMILAR (1)..(186): 881254mologous to Homo sapiens elongation factor Ts,accession number L37936,Smith-Waterman Score=270.
  misc_feature (1)...(371): n = a,t,c or g
ggcacgaggcaggaaggaaacacaactgtattagtagaggtaaactgtgagacagattttgtttctagaaatttaaaatttcaactgttggtccagcaagtagcccttggaaccatgatgcattgtcagaccctaaaggatcaaccctctgcatacagtaaagtaagtttgggatttgtctccagtgtgctgaatttgctgtcctcattgggtcttttgctgttcctattgtagacattctcatgtctcattctgttacttcacatctctgcttaaatgctatctctttgcatagaattacccttcccccgttgctatatccccgtgtcatgctgcatttaaaattttttattatggtgcttatatattan

SEQ ID NO: 7848 - DNA, 356 bp, Homo sapiens
  SIMILAR (9)..(356): 871254mologous to Rattus norvegicus KPL2,accession number AF102129,Smith-Waterman Score=554.
ggcacgagtggatgcaccttacccaacctgaattacaggaattaacatctttattaacagtcaactccgagttcgtggactggcggaagttcctgttagtaacctcaatgccttggcccattcccttggaggaggagctccttgagacccttcagaagttcaaggctgtggataaggagcagttgggcaccatcacttttgagcagtatatgcaggctggtctgtggtttacaggagatgaagatataaaaattccagaaaatcctcttgaaccccttccatttaataggcaggagcatcttatagagtttttctttaggctatttgctgactatgagaaggatccaccccagctt

SEQ ID NO: 7849 - DNA, 376 bp, Homo sapiens
  SIMILAR (8)..(373): 791254mologous to synthetic construct synthetic antithrombin III,accession number A06100,Smith-Waterman Score=498.
  misc_feature (1)...(376): n = a,t,c or g
ggcacgagagggcctgtggaagtctaagttcacccctgagaacaccacgaaggaactgttctacaaggctgatggagagtcttgttcaacatctatgatgtaccaggaaggcaagttcccttatcgacacatggctgaaagcacccaggtgcttgagttgcccttcaaaggggattacatcaccatgggcctcatcttgtccaagcctgacaagatcctggcccccgtagacaaagaactcaccccaaaggtgctgcctgactggctggatgaattggaggacatgatgcttgtggtccacatgccccgcttactcattgaggacggcttcagcttgaaggatcagcttcctgacaatggccttgtccatctgaan

SEQ ID NO: 7850 - DNA, 482 bp, Homo sapiens
  SIMILAR (2)..(334): 981254mologous to unidentified Chimere G.CSF-Gly4-SAH en aval region prepro de SAH,accession number A76867,Smith-Waterman Score= 583.
caaattccagaatgcgctattagttcgttacaccaagaaagtaccccaagtgtcaactccaactcttgtagaggtctcaagaaacctaggaaaagtgggcagcaaatgttgtaaacatcctgaagcaaaaagaatgccctgtgcagaagactatctatccgtggtcctgaaccagttatgtgtgttgcatgagaaaacgccagtaagtgacagagtcaccaaatgctgcacagaatccttggtgaacaggcgaccatgcttttcagctctggaagtcgatgaaacatacgttcccaaagagtttaatgctgaaacattcaccttccatggtgaaacacaagcccaaggcaacaaaagagcaactgaaagctgttatggatgatttcgcagcttttgtagagaagtgctgcaaggctgacgataaggagacctgctttgccgaagaaggtaaaaaacttgttgctgcaagtcaagctgcctta

SEQ ID NO: 7851 - DNA, 478 bp, Homo sapiens
  SIMILAR (319)..(405): 961254mologous to Homo sapiens gamma-G globin,accession number X55656,Smith-Waterman Score=154.
  misc_feature (1)...(478): n = a,t,c or g
acgtctgaggttatcaataagctcctagtccagacgccatgggtcatttcacagaggaggacaaggctactatcacaagcctgtggggcaaggtgaatgtggaagatgctggaggagaaaccctgggaaggctcctggttgtctacccatggacccagaggttctttgacagctttggcaacctgtcctctgcctctgccatcatgggcaaccccaaagtcaaggcgatcctgagaacttcaagctcctgggaaatgtgctggtgaccgttttggcaatccatttcggcaaagaattcacccctgaggtgcaggcttcctggcagaagatggtgactggagtggccagtgccctgtcctccagataccactgagctcactgcccatgatgcagagctttcaaggataggctttattctgcaagcaatcaaataataaatctattctgctaagagatcacanaaaanaaaaaaaaaaaa

SEQ ID NO: 7852 - DNA, 536 bp, Homo sapiens
  SIMILAR (451)..(486): 661254mologous to Homo sapiens alloalbumin Venezia,accession number M12523,Smith-Waterman Score=43.
  misc_feature (1)...(536): n = a,t,c or g
gggcatgtttttgtatgaatatgcaagaaggcatcctgattactctgtcgtgctgctgctgagacttgccaagacatatgaaaccactctagagaagtgctgtgccgctgcagatcctcatgaatgctatgccaaagtgttcgatgaatttaaacctcttgtggaagagcctcagaatttaatcaaacaaaattgtgagctttttgagccagatatatgcacactttctgagaaggagagacaaatcaagaaacaaactgcacttgttgagcttgtgaaacacaagcccaaggcaacaaaagagcaactgaaagctgttatggatgatttcgcagcttttgtagagaagtgctgcaaggctgacgataaggagacctgctttgccgaggagggtaaaaaacttgttgctgcaagtcaagctgccttaggcttataacatcacatttaaaagcatctcagcctcccctgagaattagagaaagaaaatgaagatccaaagcttattcntctgtttttctntttcgttggtgtaaagc

SEQ ID NO: 7853 - DNA, 732 bp, Homo sapiens
  SIMILAR (257)..(730): 981254mologous to synthetic construct protein fusion prepro- HSA-V1V2,accession number A21285,Smith-Waterman Score=816.
  misc_feature (1)...(732): n = a,t,c or g
gcggtcgcttttttttttgaaagtaaggatgtttgcaaaaactatgctgaggcaaaggatgtcttcctgggcatgtttttgtatgaatatgcaagaaggcatcctgattactctgtcgtgctgctgctgagacttgccaagacatatgaaaccactctagagaagtgctgtgccgctgcagatcctcatgaatgctatgccaaagtgttcgatgaatttaaacttcttgtggaagagcctcagaatttaatcaaacaagcttggagagtacaaattccagaatgcgctattagttcgttacaccaagaaagtaccccaagtgtcaactccaactcttgtagaggtctcaagaaacctaggaaaagtgggcagcaaatgttgtaaacatcctgaagcaaaaagaatgccctgtgcagaagactatctatccgtggtcctgaaccagttatgtgtgttgcatgagaaaacgccagtaagtgacagagtcaccaaatgctgcacagaatccttggtgaacaggcgaccatgcttttcagctctggaagtcgatgaaacatacgttcccaaagagtttaatgctgaaacattcaccttccatgcagatatatgcacactttctgagaaggagagacaaatcaagaaacaaactgcacttgttgagctcgtgaaacacaagcccaaggcaacaaaagancaactgaaagctgttatggatgatttcgcagcttttgt

SEQ ID NO: 7854 - DNA, 475 bp, Homo sapiens
  SIMILAR (89)..(436): 971254mologous to synthetic construct human serum albumin,accession number A30884,Smith-Waterman Score=590.
  misc_feature (1)...(475): n = a,t,c or g
cggagtgggcatgtttttgtatgaatatgcaagaaggcatcctgattactctgtcgtgctgctgctgagacttgccaagacatatgatgcagaagactatctatccgtggtcctgaaccagttatgtgtgttgcatgagaaaacgccagtaagtgacagagtcaccaaatgctgcacagaatccttggtgaacaggcgaccatgcttttcagctctggaagtcgatgaaacatacgttcccaaagagtttaatgctgaaacattcaccttccatgcagatatatgcacactttctgagaaggagagacaaatcaagaaacaaactgcacttgttgagctcgtgaaacacaagcccaaggcaacaaaagagcaactgaaagctgttntggatgatttcgcngcttttgtagagaagtgctgcaagggtgacganaagggagaactgctttgncgaagganggtanaaaacttgttg

SEQ ID NO: 7855 - DNA, 641 bp, Homo sapiens
  SIMILAR (286)..(606): 931254mologous to Homo sapiens Sequence of human serum albumin (HSA) on plasmid pXL53,accession number AAP60839,Smith- Waterman Score=518.
gaattctcgatgttggaaaaatcccactgcattgccgaagtggaaaatgatgagatgcctgctgacttgccttcattagctgctgattttgttgaaagtaaggatgtttgcaaaaactatgctgaggcaaaggatgtcttcctgggcatgtttttgtatgaatatgcaagaaggcatcctgattactctgtcgtgctgctgctgagacttgccaagacatatgaaaccactctagagaagtgctgtgccgctgcagatcctcatgaatgctatgccaaagtgttcgatgaatttgtgaacaggcgaccatgcttttcagctctggaagtcgatgaaacatacgttcccaaagagtttaatgctgaaacattcaccttccatgcagatatatgcacactttctgagaaggagagacaaatcaagaaacaaactgcacttgttgagcttgtgaaacacaagcccaaggcaacaaaagagcaactgaaagctgttatggatgatttcgcagcttttgtagagaagtgctgcaaggctgacgataaggagacctgctttgccgaggagggtaaaaaacttgttgctgcaagtcaagctgccttaggcttataacatcccatttaaaagcatctcagcctaccctg

SEQ ID NO: 7856 - DNA, 1043 bp, Homo sapiens
  SIMILAR (1)..(582): 1001254mologous to Homo sapiens HSA-vWF(470-713) fusion protein,accession number AAR39472,Smith-Waterman Score=1034.
  misc_feature (1)...(1043): n = a,t,c or g
gccaagtatatctgtgaaaatcaagattcgatctccagtaaactgaaggaatgctgtgaaaaacctctgttggaaaaatcccactgcattgccgaagtggaaaatgatgagatgcctgctgacttgccttcattagctgctgattttgttgaaagtaaggatgtttgcaaaaactatgctgaggcaaaggatgtcttcctgggcatgtttttgtatgaatatgcaagaaggcatcctgattactctgtcgtgctgctgctgagacttgccaagacatatgaaaccactctagagaagtgctgtgccgctgcagatcctcatgaatgctatgccaaagtgttcgatgaatttaaacctcttgtggaagagcctcagaatttaatcaaacaaaattgtgagctttttgagcagcttggagagtacaaattccagaatgcgctattagttcgttacaccaagaaagtaccccaagtgtcaactccaactcttgtagaggtctcaagaaacctaggaaaagtgggcagcaaatgttgtaaacatcctgaagcaaaaagaatgccctgtgcagaagactatctatcccgtggtcccngaaccagtaggatgtttgcaaaaactatgctgaggcaaaggatgtcttcctgggcatgtttttgtatgaatatgcaagaaggcatcctgattactctgtcgtgctgctgctgagacttgccaagacatatgaaaccactctagagaagtgctgtgccgctgcagatcctcatgaatgctatgccaaagtgttcgatgaatttaaacctcttgtggaagagcctcagaatttaatcaaacaaaattgtgagctttttgagcagcttggagagtacaaattccagaatgcgctattagttcgttacaccaagaaagtaccccaagtgtcaactccaactcttgtagaggtctcaagaaacctaggaaaagtgggcagcaaatgttgtaaacatcctgaagcaaaaagaatgccctgtgcagaagactatctatcccgtggtcccngaaccagt

SEQ ID NO: 7857 - DNA, 2194 bp, Homo sapiens
  SIMILAR (1)..(963): 991254mologous to Homo sapiens Sequence of prepro human serum albumin (HSA),accession number AAP60092,Smith-Waterman Score=1689.
atgaagtgggtaacctttatttcccttctttttctctttagctcggcttattccaggggtgtgtttcgtcgagatgcacacaagagtgaggttgctcatcggtttaaagatttgggagaagaaaatttcaaagccttggtgttgattgcctttgctcagtatcttcagcagtgtccatttgaagatcatgtaaaattagtgaatgaagtaactgaatttgcaaaaacatgtgttgctgatgagtcagctgaaaattgtgacaaatcacttcataccctttttggagacaaattatgcacagttgcaactcttcgtgaaacctatggtgaaatggctgactgctgtgcaaaacaagaacctgagagaaatgaatgcttcttgcaacacaaagatgacaacccaaacctcccccgattggtgagaccagaggttgatgtgatgtgcactgcttttcatgacaatgaagagacatttttgaaaaaatacttatatgaaattgccagaagacatccttacttttatgccccggaactccttttctttgctaaaaggtataaagctgcttttacagaatgttgccaagctgctgataaagctgcctgcctgttgccaaagctcgatgaacttcgggatgaagggaaggcttcgtctgccaaacagagactcaagtgtgccagtctccaaaaatttggagaaagagctttcaaagcatgggcagtagctcgcctgagccagagatttcccaaagctgagtttgcagaagtttccaagttagtgacagatcttaccaaagtccacacggaatgctgccatggagatctgcttgaatgtgctgatgacagggcggaccttgccaagtatatctgtgaaaatcaagattcgatctccagtaaactgaaggaatgctgtgaaaaacctctgttggaaaaatcccactgcattgccgaacaagaaacctaggaaaagtgggcagcaaatgttgtaaacatcctgaagcaaaaagaatgccctgtgcagaagactatctatccgtggtcctgaaccagttatgtgtgttgcatgagaaaacgccagtaagtgacagagtcaccaaatgctgcacagaatccttggtgaacaggcgaccatgcttttcagctctggaagtcgatgaaacatacgttcccaaagagtttaatgctgaaacattcaccttccatgcagatatatgcacactttctgagaaggagagacaaatcaagaaacaaactgcacttgttgagctcgtgaaacacaagcccaaggcaacaaaagagcaactgaaagctgttatggatgatttcgcagcttttgtagagaagtgctgcaaggctgacgataaggagacctgctttgccgaggagggtaaaaaacttgttgctgcaagtcaagctgccttaggcttataacatcacatttaaaagcatctcaggtaactatattttgaattttttaaaaaagtaactataatagttattattaaaatagcaaagattgaccatttccaagagccatatagaccagcaccgaccactattctaaactatttatgtatgtaaatattagcttttaaaattctcaaaatagttgctgagttgggaaccactattatttctattttgtagatgagaaaatgaagataaacatcaaagcatagattaagtaattttccaaagggtcaaaattcaaaattgaaaccaaggtttcagtgttgcccattgtcctgttctgacttatatgatgcggtacacagagccatccaagtaagtgatggctcagcagtggaatactctgggaattaggctgaaccacatgaaagagtgctttatagggcaaaaacagttgaatatcagtgatttcacatggttcaacctaatagttcaactcatcctttccattggagaatatgatggatctaccttctgtgaactttatagtgaagaatctgctattacatttccaatttgtcaacatgctgagctttaataggacttatcttcttatgacaacatttattggtgtgtccccttgcctagcccaacagaagaattcagcagccgtaagtctaggacaggcttaaattgttttcactggtgtaaattgcagaaagatgatctaagtaatttggcatttattttaataggtttgaaaaacacatgccattttacaaataaga

SEQ ID NO: 7858 - DNA, 748 bp, Homo sapiens
  SIMILAR (1)..(444): 991254mologous to Homo sapiens Prepro-HSA-G-CSF chimera encoded by pYG1259,accession number AAR39473,Smith-Waterman Score= 777.
  misc_feature (1)...(748): n = a,t,c or g
gctgacttgccttcattagctgctgattttgttgaaagtaaggatgtttgcaaaaactatgctgaggcaaaggatgtcttcctgggcatgtttttgtatgaatatgcaagaaggcatcctgattactctgtcgtgctgctgctgagacttgccaagacatatgaaaccactctagagaagtgctgtgccgctgcanatcctcatgaatgctatgccaaagtgttcgatgaatttaaacctcttgtggaagagcctcagaatttaatcaaacaaaattgtgagctttttgagcagcttggagagtacaaattccagaatgcgctattagttcgttacaccaagaaagtaccccaagtgtcaactccaactcttgtagaggtctcaagaaacctaggaaaagtgggcagcaaatgttgtaaacatcctgaagcaaaaagaatgcccgtgaacaggcgaccatgcttttcagctctggaagtcgatgaaacatacgttcccaaagagtttaatgctgaaacattcaccttccatgcagatatatgcacactttctgagaaggagagacaaatcaagaaacaaactgcacttgttgagcttgtgaaacacaagcccaaggcaacaaaagagcaactgaaagctgttatggatgatttcgcagcttttgtagagaagtgctgcaaggctgacgataaggagacctgctttgccgaggaaggtaaaaaacttgttgctgcaagtcaagctgcct

SEQ ID NO: 7859 - DNA, 1518 bp, Homo sapiens
  SIMILAR (298)..(1515): 1001254mologous to Homo sapiens HSA-vWF(470-713) fusion protein,accession number AAR39472,Smith-Waterman Score=2089.
atgaagtgggtaacctttatttcccttctttttctctttagctcggcttattccaggggtgtgtttcgtcgagatgcacacaagagtgaggttgctcatcggtttaaagatttgggagaagaaaatttcaaagccttggtgttgattgcctttgctcagtatcttcagcagtgtccatttgaagatcatgtaaaattagtgaatgaagtaactgaatttgcaaaaacatgtgttgctgatgagtcagctgaaaattgtgacaaatcacttcataccctttttggagacaaattatttgtagaggtctcaagaaacctaggaaaagtgggcagcaaatgttgtaaacatcctgaagcaaaaagaatgccctgtgcagaagactatctatccgtggtcctgaaccagttatgtgtgttgcatgagaaaacgccagtaagtgacagagtcaccaaatgctgcacagaatccttggtgaacaggcgaccatgcttttcagctctggaagtcgatgaaacatacgttcccaaagagtttaatgctgaaacattcaccttccatgcagatatatgcacactttctgagaaggagagacaaatcaagaaacaaactgcacttgttgagcttgtgaaacacaagcccaaggcaacaaaagagcaactgaaagctgttatggatgatttcgcagcttttgtagagaagtgctgcaaggctgacgataaggagacctgctttgccgaggagggtaaaaaacttgttgctgcaagtcaagctgccttaggcttaacctgtgaagcctgccaggagccgggaggcctggtggtgcctcccacagatgccccggtgagccccaccactctgtatgtggaggacatctcggaaccgccgttgcacgatttctactgcagcaggctactggacctggtcttcctgctggatggctcctccaggctgtccgaggctgagtttgaagtgctgaaggcctttgtggtggacatgatggagcggctgcgcatctcccagaagtgggtccgcgtggccgtggtggagtaccacgacggctcccacgcctacatcgggctcaaggaccggaagcgaccgtcagagctgcggcgcattgccagccaggtgaagtatgcgggcagccaggtggcctccaccagcgaggtcttgaaatacacactgttccaaatcttcagcaagatcgaccgccctgaagcctcccgcatcgccctgctcctgatggccagccaggagccccaacggatgtcccggaactttgtccgctacgtccagggcctgaagaagaagaaggtcattgtgatcccggtgggcattgggccccatgccaacctcaagcagatccgcctcatcgagaagcaggcccctgagaacaaggccttcgtgctgagcagtgtggatgagctggagcagcaaagggacgagatcgttagctacctctgtgaccttgcccctgaagcccctcctcctactctgccccccgacatggcacaagtctaa

SEQ ID NO: 7860 - DNA, 3977 bp, Homo sapiens
  SIMILAR (2807)..(2929): 1001254mologous to Homo sapiens Prepro-HSA-G-CSF chimera encoded by pYG1259,accession number AAR39473,Smith-Waterman Score= 210.
atgaagtgggtaacctttatttcccttctttttctctttagctcggcttattccaggggtgtgtttcgtcgaacccccctgggccctgccagctccctgccccagagcttcctgctcaagtgcttagagcaagtgaggaagatccagggcgatggcgcagcgctccaggagaagctgtgtgccacctacaagctgtgccaccccgaggagctggtgctgctcggacactctctgggcatcccctgggctcccctgagctcctgccccagccaggccctgcagctggcaggctgcttgagccaactccatagcggccttttcctctaccaggggctcctgcaggccctggaagggatatcccccgagttgggtcccaccttggacacactgcagctggacgtcgccgactttgccaccaccatctggcagcagatggaagaactgggaatggcccctgccctgcagcccacccagggtgccatgccggccttcgcctctgctttccagcgccgggcaggaggggtcctggttgctagccatctgcagagcttcctggaggtgtcgtaccgcgttctacgccaccttgcgcagcccggtggaggcggtgatgcacacaagagtgaggttgctcatcggtttaaagatttgggagaagaaaatttcaaagccttggtgttgattgcctttgctcagtatcttcagcagtgtccatttgaagatcatgtaaaattagtgaatgaagtaactgaatttgcaaaaacatgtgttgctgatgagtcagctgaaaattgtgacaaatcacttcataccctttttggagacaaattatgcacagttgcaactcttcgtgaaacctatggtgaaatggctgactgctgtgcaaaacaagaacctgagagaaatgaatgcttcttgcaacacaaagatgacaacccaaacctcccccgattggtgagaccagaggttgatgtgatgtgcactgcttttcatgacaatgaagagacatttttgaaaaaatacttatatgaaattgccagaagacatccttacttttatgccccggaactccttttctttgctaaaaggtataaagctgcttttacagaatgttgccaagctgctgataaagctgcctgcctgttgccaaagctcgatgaacttcgggatgaagggaaggcttcgtctgccaaacagagactcaagtgtgccagtctccaaaaatttggagaaagagctttcaaagcatgggcagtagctcgcctgagccagagatttcccaaagctgagtttgcagaagtttccaagttagtgacagatcttaccaaagtccacacggaatgctgccatggagatctgcttgaatgtgctgatgacagggcggaccttgccaagtatatctgtgaaaatcaagattcgatctccagtaaactgaaggaatgctgtgaaaaacctctgttggaaaaatcccactgcattgccgaagtggaaaatgatgagatgcctgctgacttgccttcattagctgctgattttgttgaaagtaaggatgtttgcaaaaactatgctgaggcaaaggatgtcttcctgggcatgtttttgtatgaatatgcaagaaggcatcctgattactctgtcgtactgctgctgagacttgccaagacatatgaaaccactctagagaagtgctgtgccgctgcagatcctcatgaatgctatgccaaagtgttcgatgaatttaaacctcttgtggaagagcctcagaatttaatcaaacaaaattgtgagctttttgagcagcttggagagtacaaattccagaatgcgctattagttcgttacaccaagaaagtaccccaagtgtcaactccaactcttgtagaggtctcaagaaacctaggaaaagtgggcagcaaatgttgtaaacatcctgaagcaaaaagaatgccctgtgcagaagactatctatccgtggtcctgaaccagttatgtgtgttgcatgagaaaacgccagtaagtgacagagtcaccaaatgctgcacagaatccttggtggaaaatgatgagatgcctgctgacttgccttcattagctgctgattttgttgaaagtaaggatgtttgcaaaaactatgctgaggcaaaggatgtcttcctgggcatgtttttgtatgaatatgcaagaaggcatcctgattactctgtcgtgctgctgctgagacttgccaagacatatgaaaccactctagagaagtgctgtgccgctgcagatcctcatgaatgctatgccaaagtgttcgatgaatttaaacctcttgtggaagagcctcagaatttaatcaaacaaaattgtgagctttttgagcagcttggagagtacaaattccagaatgcgctattagttcgttacaccaagaaagtaccccaagtgtcaactccaactcttgtagaggtctcaagaaacctaggaaaagtgggcagcaaatgttgtaaacatcctgaagcaaaaagaatgccctgtgcagaagactatctatccgtggtcctgaaccagttatgtgtgttgcatgagaaaacgccagtaagtgacagagtcaccaaatgctgcacagaatccttggtgaacaggcgaccatgcttttcagctctggaagtcgatgaaacatacgttcccaaagagtttaatgctgaaacattcaccttccatgcagatatatgcacactttctgagaaggagagacaaatcaagaaacaaactgcacttgttgagctcgtgctgtgccgctgcagatcctcatgaatgctatgccaaagctgttatggatgatttcgcagcttttgtagagaagtgctgcaaggctgacgataaggagacctgctttgccgaggagggtaaaaaacttgttgctgcaagtcaagctgccttaggcttataacatcacatttaaaagcgtcaactccaactcttgtagaggtctcaagaaacctaggaaaagtgggcagcaaatgttgtaaacatcctgaagcaaaaagaatgccctgtgcagaagactatctatccgtggtcctgaaccagttatgtgtgttgcatgagaaaacgccagtaagtgacagagtcaccaaatgctgcacagaatccttggtgaacaggcgaccatgcttttcagctctggaagtcgatgaaacatacgttcccaaagagtttaatgctgaaacattcaccttccatgcagatatatgcacactttctgagaaggagagacaaatcaagaaacaaactgcacttgttgagcttgtgaaacacaagcccaaggcaacaaaagagcaactgaaagctgttatggatgatttcgcagcttttgtagagaagtgctgcaaggctgacgataaggagacctgctttgccgaaggagggtaaaaaacttgttgctgcaagtcaagctgcctttaggcttaacccccctgggccctgccagctccctgccccagagcttcctgctcaagtgcttagagcaagtgaggaagatccagggcgatggcgcagcgctccaggagaagctgtgtgccacctacaagctgtgccaccccgaggagctggtgctgctcggacactctctgggcatcccctgggctcccctgagctcctgccccagccaggccctgcagctggcaggctgcttgagccaactccatagcggccttttcctctaccaggggctcctgcaggccctggaagggatatcccccgagttgggtcccaccttggacacactgcagctggacgtcgccgactttgccaccaccatctggcagcagatggaagaactgggaatggcccctgccctgcagcccacccagggtgccatgccggccttcgcctctgctttccagcgccgggcaggaggggtcctggttgctagccatctgcagagcttcctggaggtgtcgtaccgcgttctacgccaccttgcgcagccctga

SEQ ID NO: 7861 - DNA, 6124 bp, Homo sapiens
  SIMILAR (3634)..(5388): 991254mologous to Homo sapiens Prepro-HSA-G-CSF chimera encoded by pYG1259,accession number AAR39473,Smith-Waterman Score= 3085.
atgaagtgggtaacctttatttcccttctttttctctttagctcggcttattccaggggtgtgtttcgtcgagatgcacacaagagtgaggttgctcatcggtttaaagatttgggagaagaaaatttcaaagccttggtgttgattgcctttgctcagtatcttcagcagtgtccatttgaagatcatgtaaaattagtgaatgaagtaactgaatttgcaaaaacatgtgttgctgatgagtcagctgaaaattgtgacaaatcacttcataccctttttggagacaaattatgcacagttgcaactcttcgtgaaacctatggtgaaatggctgactgctgtgcaaaacaagaacctgggagaaatgaatgcttcttgcaacacaaagatgacaacccaaacctcccccgattggtgagaccagaggttgatgtgatgtgcactgcttttcatgacaatgaagagacatttttgaaaaaatacttatatgaaattgccagaagacatccttacttttatgccccggaactccttttctttgctaaaaggtataaagctgcttttacagaatgttgccaagctgctgataaagctgcctgcctgttgccaaagctcgatgaacttcgggatgaagggaaggcttcgtctgccaaacagagactcaagtgtgccagtctccaaaaatttggagaaagagctttcaaagcatgggcagtagctcgcctgagccagagatttcccaaagctgagtttgcagaagtttccaagttagtgacagatcttaccaaagtccacacggaatgctgccatggagatctgcttgaatgtgctgatgacagggcggaccttgccaagtatatctgtgaaaatcaagattcgatctccagtaaactgaaggaatgctgtgaaaaacctctgttggaaaaatcccactgcattgccgaagtggaaaatgatgagatgcctgctgacttgccttcattagctgctgattttgttgaaagtaaggatgtttgcaaaaactatgctgaggcaaaggatgtcttcttgggcatgtttttgtatgaatatgcaagaaggcatcctgattactctgtcgtgctgctgctgagacttgccaagacatatgaaaccactctagagaagtgctgtgccgctgcagatcctcatgaatgctatgccaaagtgttcgatgaatttaaacctcttgtggaagagcctcagaatttaatcaaacaaaattgtgagctttttgagcagcttggagagtacaaattccagaatgcgctattagttcgttacaccaagaaagtaccccaagtgtcaactccaactcttgtagaggtctcaagaaacctaggaaatttaaagatttgggagaagaaaatttcaaagccttggtgttgattgcctttgctcagtatcttcagcagtgtccatttgaagatcatgtaaaattagtgaatgaagtaactgaatttgcaaaaacatgtgttgctgatgagtcagctgaaaattgtgacaaatcacttcataccctttttggagacaaattatgcacagttgcaactcttcgtgaaacctatggtgaaatggctgactgctgtgcaaaacaagaacctgggagaaatgaatgcttcttgcaacacaaagatgacaacccaaacctcccccgattggtgagaccagaggttgatgtgatgtgcactgcttttcatgacaatgaagagacatttttgaaaaaatacttatatgaaattgccagaagacatccttacttttatgccccggaactccttttctttgctaaaaggtataaagctgcttttacagaatgttgccaagctgctgataaagctgcctgcctgttgccaaagctcgatgaacttcgggatgaagggaaggcttcgtctgccaaacagagactcaagtgtgccagtctccaaaaatttggagaaagagctttcaaagcatgggcagtagctcgcctgagccagagatttcccaaagctgagtttgcagaagtttccaagttagtgacagatcttaccaaagtccacacggaatgctgccatggagatctgcttgaatgtgctgatgacagggcggaccttgccaagtatatctgtgaaaatcaagattcgatctccagtaaactgaaggaatgctgtgaaaaacctctgttggaaaaatcccactgcattgccgaagtggaaaatgatgagatgcctgctgacttgccttcattagctgctgattttgttgaaagtaaggatgtttgcaaaaactatgctgaggcaaaggatgtcttcttgggcatgtttttgtatgaatatgcaagaaggcatcctgattactctgtcgtgctgctgctgagacttgccaagacatatgaaaccactctagagaagtgctgtgccgctgcagatcctcatgaatgctatgccaaagtgttcgatgaatttaaacctcttgtggaagagcctcagaatttaatcaaacaaaattgtgagctttttgagcagcttggagagtacaaattccagaatgccgctattagttcgttacaccaagaaagtaccccaagtgtcaactccaactcttgtagaggtctcaagaaacctaggaaaagtgggcagcaaatgttgtaaacatcctgaagcaaaaagaatgccctgtgcagaagactatctatccgtggtcctgaaccagttatgtgtgttgcatgagaaaacgccagtaagtgacagagtcaccaaatgctgcacagaatccttggtgaacaggcgaccatgcttttcagctctggaagtcgatgaaacatacgttcccaaagagtttaatgctgaaacattccaccttccatgcagatatatgcacactttctgagaaggagagacaaatccagaaaacaaactgcacttgttgagcttggtgaaacacaagccccaaggcaacaaaagagcaactgaaagctgttatggatgatttcgcagcttttgtagagaagtgctgccaaggctgacgataaggagacctgctttgccgaggagggtaaaaaacttgttgctgcaagtcaagctgcccttaggcttaacccccctgggccctgccagctccctgccccagagcttcctgctcaagtgcttagagcaagtgaggaagatccagggcgatggcgcagcgctccaggagaagctgtgtgccacctacaagctgtgccaccccgaggagctggtgctgctcggacactctctgggcatcccctgggctcccctgagctcctgccccagccaggccctgcagctggcaggctgcttgagccaactccatagcggccttttcctctaccaggggctcctgcaggccctggaagggatatcccccgagttgggtcccaccttggacacactgcagctggacgtcgccgactttgccaccaccatctggcagcagatggaagaactgggaatggcccctgccctgcagcccacccagggtgccatgccggccttcgcctctgctttccagcgccgggcaggaggggtcctggttgctagccatctgcagagcttcctggaggtgtcgtaccgcgttctacgccaccttgcgcagcccggtggaggcggtgatgcacacaagagtgaggttgctcatcggtttaaagatttgggagaagaaaatttcaaagccttggtgttgattgcctttgctcagtatcttcagcagtgtccatttgaagatcatgtaaaattagtgaatgaagtaactgaatttgcaaaaacatgtgttgctgatgagtcagctgaaaattgtgacaaatcacttcataccctttttggagacaaattatgcacagttgcaactcttcgtgaaacctatggtgaaatggctgactgctgtgcaaaacaagaacctgagagaaatgaatgcttcttgcaacacaaagatgacaacccaaacctcccccgattggtgagaccagaggttgatgtgatgtgcactgcttttcatgacaatgaagagacatttttgaaaaaatacttatatgaaattgccagaagacatccttacttttatgccccggaactccttttctttgctaaaaggtataaagctgcttttacagaatgttgccaagctgctgataaagctgcctgcctgttgccaaagctcgatgaacttcgggatgaagggaaggcttcgtctgccaaacagagactcaagtgtgccagtctccaaaaatttggagaaagagctttcaaagcatgggcagtagctcgcctgagccagagatttcccaaagctgagtttgcagaagtttccaagttagtgacagatcttaccaaagtccacacggaatgctgccatggagatctgcttgaatgtgctgatgacagggcggaccttgccaagtatatctgtgaaaatcaagattcgatctccagtaaactgaaggaatgctgtgaaaaacctctgttggaaaaatcccactgcattgccgaagtggaaaatgatgagatgcctgctgacttgccttcattagctgctgattttgttgaaagtaaggatgtttgcaaaaactatgctgaggcaaaggatgtcttcctgggcatgtttttgtatgaatatgcaagaaggcatcctgattactctgtcgtactgctgctgagacttgccaagacatatgaaaccactctagagaagtgctgtgccgctgcagatcctcatgaatgctatgccaaagtgttcgatgaatttaaacctcttgtggaagagcctcagaatttaatcaaacaaaattgtgagctttttgagcagcttggagagtacaaattccagaatgcgctattagttcgttacaccaagaaagtaccccaagtgtcaactccaactcttgtagaggtctcaagaaacctaggaaaagtgggcagcaaatgttgtaaacatcctgaagcaaaaagaatgccctgtgcagaagactatctatccgtggtcctgaaccagttatgtgtgttgcatgagaaaacgccagtaagtgacagagtcaccaaatgctgcacagaatccttggtgaacaggcgaccatgcttttcagctctggaagtcgatgaaacatacgttcccaaagagtttaatgctgaaacattcaccttccatgcagatatatgcacactttctgagaaggagagacaaatcaagaaacaaactgcacttgttgagcttgtgaaacacaagcccaaggcaacaaaagagcaactgaaagctgttatggatgatttcgcagcttttgtagagaagtgctgcaaggctgacgataaggagacctgctttgccgaggagggtaaaaaacttgttgctgcaagtcaagactgccttaggcttaacctgtgaagcctgccaggagccgggaggcctggtggtgcctcccacagatgccccggtgagccccaccactctgtatgtggaggacatctcggaaccgccgttgcacgatttctactgcagcaggctactggacctggtcttcctgctggatggctcctccaggctgtccgaggctgagtttgaagtgctgaaggcctttgtggtggacatgatggagcggctgcgcatctcccagaagtgggtccgcgtggccgtggtggagtaccacgacggctcccacgcctacatcgggctcaaggaccggaagcgaccgtcagagctgcggcgcattgccagccaggtgaagtatgcgggcagccaggtggcctccaccagcgaggtcttgaaatacacactgttccaaatcttcagcaagatcgaccgccctgaagcctcccgcatcgccctgctcctgatggccagccaggagccccaacggatgtcccggaactttgtccgctacgtccagggcctgaagaagaagaaggtcattgtgatcccggtgggcattgggccccatgccaacctcaagcagatccgcctcatcgagaagcaggcccctgagaacaaggccttcgtgctgagcagtgtggatgagctggagcagcaaagggacgagatcgttagctacctctgtgaccttgcccctgaagcccctcctcctactctgccccccgacatggcacaagtctaa

SEQ ID NO: 7862 - DNA, 562 bp, Homo sapiens
  SIMILAR (27)..(470): 951254mologous to Homo sapiens gamma-globin,accession number M15386,Smith-Waterman Score=740.
  misc_feature (1)...(562): n = a,t,c or g
ggaacgtctgaggttatcaataagctcctagtccagacgccatgggtcatttcacagaggaggacaaggctactatcacaagcctgtggggcaaggtgaatgtggaagatgctggaggagaaaccctgggaaggctcctggttgtctacccatggacccagagctttggcaacctgtcctctgcctctgccatcatgggcaaccccaaagtcaaggcacatggcaagaaggtgctgacttccttgggagatgccacaaagcacctggatgatctcaagggcacctttgcccagctgagtgaactgcactgtgacaagctgcatgtggatcctgagaacttcaagctcctgggaaatgtgctggtgaccgttttggcaatccatttcngcaaagaattcacccctgaggtgcaggcttcctggcagaagatggtgactgcagtggccagtgccctgtcctccagataccactgagctcactgcccatgattcananctttcaagggataggctttattctgcaagcaatacaaataataaatctattctgctgagagatctcc

SEQ ID NO: 7863 - DNA, 351 bp, Homo sapiens
  misc_feature (1)...(351): n = a,t,c or g
caagaatctgtgaattatctgtggctctgtttcttattaaccaataacgactcctaaaaatacaactgtttacatgtggggatgggctatagaannnnnnnnnnnnnnnnggtcaaaacctgtttttannnnnnnnnngacaggttgccaaccccccttggttgttggattatttaaaacaacttcaaatttccccatatgctggctttttaaagagggtgaggccttaaagaattttaaagctttttctcccaaacccaggccagtgaacaattaaccaaatccaagcaaggattggccttgagaaccttgcctccagtccaatttcctcctccaccacccagacctgan

SEQ ID NO: 7864 - DNA, 340 bp, Homo sapiens
tgtcggtcgggttggtcttgaactcctggcctcaagtgatctgcctacctcgggctctccaagtgctgggattacaggcatgagccactgcccctggcccaactttctgttaatctttattggatactttttcactgtgctgaccccatgtgaatactattcaggaggtatgacagtaccattatggttatagctgtggacattccttcttttatgctctgtactcatagctcttcacctttaggaactagagtagatgtaaagcatttaaagaattttaaggtttgagctatttcatgaatcaacctgaaagggccataacttgtaggtaatacgtatt

SEQ ID NO: 7865 - DNA, 370 bp, Homo sapiens
cggcaccacaaataaaacggcatttagaggtgaaagcttcgccttcctctctggaaggggagtcctcactctcccagcagcccacacctctgcctcaaaccttcatggctcccaagagactggataaagctaaggaggctcaacgcaccccaagtcctgggggtggtcagcccctctcacccctccctcatcctttcacacaagagttgtttactgttcctccagttatgcctggtcacgcagacactctgctgctcaaatgcccttaccccatcctcaggcctgctcccaggccacctgcctacagaatccaccctgtctgccaggaggccatagggaccctcgccatactgtctgctttgtgcagtgc

SEQ ID NO: 7866 - DNA, 354 bp, Homo sapiens
  SIMILAR (1)..(354): 1001254mologous to Homo sapiens Human kinesin-like protein HKLP SEQ ID NO: 4,accession number AAB36227,Smith-Waterman Score= 595.
  misc_feature (1)...(354): n = a,t,c or g
actttgagcactctgagatatgcagatcgtgcaaaacaaattaaatgcaatgctgttatcaatgaggaccccaatgccaaactggttcgtgaattaaaggaggaggtgacacggctgaaggaccttcttcgtgctcagggcctgggagatattattgatattgatccattgatcgatgattactctggaagtggaagcaaatatctgaaagattttcagaacaataagcatagatacttgctagcctctgagaatcaacgccctggccatttttccacagcatccatggggtccctcacttcatccccatcttcctgctcactcagtagtcaggtgggcttgacgtctgtgacn

SEQ ID NO: 7867 - DNA, 454 bp, Homo sapiens
  SIMILAR (53)..(451): 671254mologous to Homo sapiens BC273239_1,accession number AC007204,Smith-Waterman Score=531.
  misc_feature (1)...(454): n = a,t,c or g
ntcccgatnncccttcgctgagcacgtaataannggcgnganccacgcgtgcgagagaattcacactggggagaagccttacatatgctttgaatggggctctttttttcgaaaacactcgaatcttacgcaacatcagagaattcacactggggaaaaaccccataaatgtgacgaatgtgggaaaactttccaaacaaaggcaaacctctctcagcatcagagaattcatagtggagagaaaccctataaatgtaaagaatgtggcaaagccttttgtcagagcccatctcttattaaacaccagcgaattcatactggagaaaaaccatataagtgtaaagaatgtggcaaagcgtttactcagagcaccccactcactaaacatcagagaatacatacaggggagagaccctacaaatgcagtgaatgtggtaaagccttcattcagaaa

SEQ ID NO: 7868 - DNA, 408 bp, Homo sapiens
  SIMILAR (270)..(398): 691254mologous to Homo sapiens PRO0478,accession number AF090930,Smith-Waterman Score=156.
caaagggctcagatgtttagcctagtctactgcagacagaaatttaaatccagtgagggctaatgaatcacatacgtgtttccacattttattttgttttcgttttttaggcatatgggaagtagttgcaatttttcagggaagaatatgttttgaatctcacactgtattctccttgaatctcacactgtattcttgaatgagacaagattttgagatcattcttttcctttttgtgtcaacgttagtttgttgttcattggttataaaaaggaaaatgtggccaggcgcaatggcttacgcctgtaatcccagcactttgggagacagaggcaggcagatcacaaggtcaggagttcaagaccagcctggccaatatggtgaaacctcgtctctactaaaaaaaaa

SEQ ID NO: 7869 - DNA, 386 bp, Homo sapiens
cccacgcgttcgggtacttttaagtcaggagttctgtacaaaggacatggggagatccccaattgggctgatgaaaacagcgtggatgaagcggaggtttgcgcttcataactcctaagccgaggcctctatatcctcttattctcagatgagaaaagcgacctgtcattcaggattcatagcccaggcttggtccatgcattcaaaaccctaccctgcagataattttctaggcatatggtgccgctggaaacttctagagcaatttgcacttctttaatttcttcactttagctagtgacatgggttctaactaacattagccacttgacagagaggactcaagaaggaacactaatggggattgtacgaataccgcagtactg

SEQ ID NO: 7870 - DNA, 462 bp, Homo sapiens
  SIMILAR (51)..(461): 961254mologous to Homo sapiens Human type V adenylyl cyclase protein sequence,accession number AAW30600,Smith-Waterman Score= 674.
  misc_feature (1)...(462): n = a,t,c or g
ggatgttccggggggngggcctgaaaactgagtaccatcaanacgnccagcttggcacgaggcacaacatcagcgcgagccaggtcaacgcgtggcacgtggcggagtcggccgtcaactacagcctgggcgatgagcagggcttctgtggcagcccctggcccaactgcaacttccccgagtacttcacctacagcgtgctgctcagcctgctggcctgctccgtgttcctgcagatcaactgcatcgggaagctggtgctcatgctggccatcgagctcatctacgtgctcatcgtggaggtgccaggtgtcacgctcttcgacaacgccgacctgctggtcaccgccaacgccatagacttcttcaacaacgggacctcccagtgccctgagcatgcaaccaaggtggcattgaaggtggtgacgcccatcatcatctcagtctttgtgctggccctgg

SEQ ID NO: 7871 - DNA, 1098 bp, Homo sapiens
  SIMILAR (289)..(591): 411254mologous to Drosophila virilis failed axon connections protein,accession number AF096709,Smith-Waterman Score=182.
atgcactggggggttggctttgcttcgtccaggccgtgcgtggtggatctgagctggaaccagagcatctccttcttcggctggtgggccgggtccgaggagcccttctccttttatggggacatcatcgctttccctttgcaggattacggtgggatcatggcagggctgggctccgatccctggtggaagaaaaccctttacttgaccgggggagctttgctggccgcagctgcgtatctgctccacgaactcctggtcattaggaaacagcaagagattgactctaaagatgctattattttgcatcagtttgcaagacctaacaatggtgttccaagtttatctcctttctgtttaaagatggaaacttatttaaggatggctgacttaccgtatcagaactattttggtggaaaactctctgctcaagggaaaatgccttggattgaatataatcatgaaaaagtttctggcacagaattcataattgactttctggaagagaagcttggagtgaatttaaacaaaaaccttggccctcatgaaagagccatctccagagcggtgaccaagatggtggaggagcacttctactgccttgagctggcggtggtaccatcctgtacccacgtgccccttacagaagttcttgcagttcgtcaggcagctgatgctcttcatgcgtacaccttcaccctctgctctgcccggacattagcttattgccagtgggtggacaatctcaatgagacccggaagatgctctctcttagtggtggtggtcccttcagcaacctgctgaggtgggttgtgtgccacataacgaaaggaattgtgaaacgcgagatgcacggccacggcattggccgcttctccgaggaagagatttacatgctgatggagaaggacatgcggtctttagcagggcttttggatcatgcaacagcacctcatagagatgcccacctcatctccacattaggccttcaagtcttggccagaagctgcttgcttacaacacagcagccacacactcataccttctatgaaagtgaatgggaaaagccttcagaaccaggcagtggaaaaggatga

SEQ ID NO: 7872 - DNA, 1209 bp, Homo sapiens
  SIMILAR (955)..(1050): 371254mologous to Drosophila virilis failed axon connections protein,accession number AF096709,Smith-Waterman Score=58.
tttcgtgcgcagcatgcactggggggttggctttgctttgtttcaggccgtgcgtggtggatctgagctggaaccagagcatctccttcttcggctggtgggccgggtccgaggagcccttctccttttatggggacatcatcgctttccctttgcaggattacggtgggatcatggcagggctgggctccgatccctggtggaagaaaaccctttacttgaccgggggagctttgctggccgcagctgcgtatctgctccacgaactcctggtcattaggaaacagcaagagattgactctaaagatgctattattttgcatcagtttgcaagacctaacaatggtgttccaagtttatctcctttctgtttaaagatggaaacttatttaaggatggctgacttaccgtatcagaactattttggtggaaaactctctgctcaagggaaaatgccttggattgaatataatcatgaaaaagtttctggcacagaattcataattgactttctggaagagaagcttggagtgaatttaaacaaaaaccttggccctcatgaaagagccatctccagagcggtgaccaagatggtggaggagcacttctactgccttccagccgttaacctttgcttttggaataaagttcagctccctgtcctcaggcctgtcctgattgtgcccttgccggcgcctccagcctcgcctcttacaggcttcctcaaatgcagcctgtacccacgtgccccttacagaagttcttgcagttcgtcaggcagctgatgctcttcatgcgtacaccttcaccctctgctctgcccggacattagcttattgccagtgggtggacaatctcaatgagacccggaagatgctctctcttagtggtggtggtcccttcagcaacctgctgaggtgggttgtgtgccacataacgaaaggaattgtgaaacgcgagatgcacggccacggcattggccgcttctccgaggaagagatttacatgctgatggagaaggacatgcggtctttagcagggcttttggatcatgcaacagcacctcatagagatgcccacctcatctccacattaggccttcaagtcttggccagaagctgcttgcttacaacacagcagccacacactcataccttctatgaaagtgaatgggaaaagccttcagaaccaggcagtggaaaaggatga

SEQ ID NO: 7873 - DNA, 452 bp, Homo sapiens
  SIMILAR (305)..(3): 1001254mologous to Homo sapiens PRO2987,accession number AF116719,Smith-Waterman Score=532.
ggaacgtctgaggttatcaataagctcctagtccagacgccatgggtcatttcacagaggaggacaaggctactatcacaagcctgtggggcaaggtgaatgtggaagatgctggaggagaaaccctgggaaggctcctggttgtctacccatggacccagaggttctttgacagctttggcaacctgtcctctgcctctgccatcatgggcaaccccaaagtcaaggcacatggcaagaaggtgctgacttccttgggagatgccacaaagcacctggatgatctcaagggcacctttgcccagtggccagtgccctgtcctccagataccactgagctcactgcccatgatgcagagctttcaaggataggctttattctgcaagcaatacaaataataaatctattctgctaagagatcacaaaaaaaaaaaaaaacggccgcgaattc

SEQ ID NO: 7874 - DNA, 454 bp, Homo sapiens
  SIMILAR (11)..(301): 951254mologous to Homo sapiens binding protein,accession number L23113,Smith-Waterman Score=473.
atgattttccaatgccgagagagttggaggcctcgaggaagagcgggaatccgtgggcccactgcggcaggacttcagtatgagtagcagtgctctcattggcgtgctggtcatcgcagtggccattgccacggtcatcgtcatcagcctggtgatgctgaggaagaggcagtatggcaccatcagccacgggatcgtggaggttgatccaatgctcaccccagaagagcgtcacgtgaacaagatgcagaaccatggctatgagaaccccacctacaaatacctggagcagatgcagatttaggtggcagggagcgcggcagccctggcggagggatgcagatgtgcaggctcctcctctctggactttctccaaaggcactgaccctcggcctctactttgtcccctcacctccaccccctcctgtcaccggccttgtgacattcactcaga

SEQ ID NO: 7875 - DNA, 2086 bp, Homo sapiens
  SIMILAR (1)..(2085): 1001254mologous to Homo sapiens binding protein,accession number L19597,Smith-Waterman Score=3621.
atggcggccaccgggaccgcggccgccgcagccacgggcaggctcctgcttctgctgctggtggggctcacggcgcctgccttggcgctggccggctacatcgaggctcttgcagccaatgccggaacaggatttgctgttgctgagcctcaaatcgcaatgttttgtgggaagttaaatatgcatgtgaacattcagactgggaaatgggaacctgatccaacaggcaccaagagctgctttgaaacaaaagaagaagttcttcagtactgtcaggagatgtatccagagctacagatcacaaatgtgatggaggcaaaccagcgggttagtattgacaactggtgccggagggacaaaaagcaatgcaagagtcgctttgttacacctttcaagtgtctcgtgggtgaatttgtaagtgatgtcctgctagttccagaaaagtgccagtttttccacaaagagcggatggaggtgtgtgagaatcaccagcactggcacacggtagtcaaagaggcatgtctgactcagggaatgaccttatatagctacggcatgctgctcccatgtggggtagaccagttccatggcactgaatatgtgtgctgccctcagacaaagattattggatctgtgtcaaaagaagaggaagaggaagatgaagaggaagaggaagaggaagatgaagaggaagactatgatgtttataaaagtgaatttcctactgaagcagatctggaagacttcacagaagcagctgtggatgaggatgatgaggatgaggaagaaggggaggaagtggtggaggaccgagattactactatgacaccttcaaaggagatgactacaatgaggagaatcctactgaacccggcagcgacggcaccatgtcagacaaggaaattactcatgatgtcaaagttcctccaactcctctgccaaccaatgatgttgatgtgtatttcgagacctctgcagatgataatgagcatgctcgcttccagaaggctaaggagcagctggagattcggcaccgcaaccgaatggacagggtaaagaaggaatgggaagaggcagagcttcaagctaagaacctccccaaagcagagaggcagactctgattcagcacttccaagccatggttaaagctttagagaaggaagcagccagtgagaagcagcagctggtggagacccacctggcccgagtggaagctatgctgaatgaccgccgtcggatggctctggagaactacctggctgccttgcagtctgacccgccacggcctcatcgcattctccaggccttacggcgttatgtccgtgctgagaacaaagatcgcttacataccatccgtcattaccagcatgtgttggctgttgacccagaaaaggcggcccagatgaaatcccaggtgatgacacatctccacgtgattgaagaaaggaggaaccaaagcctctctctgctctacaaagtaccttatgtagcccaagaaattcaagaggaaattgatgagctccttcaggagcagcgtgcagatatggaccagttcactgcctcaatctcagagacccctgtggacgtccgggtgagctctgaggagagtgaggagatcccaccgttccaccccttccaccccttcccagccctacctgagaacgaaggatctggagtgggagagcaggatgggggactgatcggtgccgaagagaaagtgattaacagtaagaataaagtggatgaaaacatggtcattgacgagactctggatgttaaggaaatgattttcaatgccgagagagttggaggcctcgaggaagagcgggaatccgtgggcccactgcgggaggacttcagtctgagtagcagtgctctcattggcctgctggtcatcgcagtggccattgccacggtcatcgtcatcagcctggtgatgctgaggaagaggcagtatggcaccatcagccacgggatcgtggaggttgatccaatgctcaccccagaagagcgtcacctgaacaagatgcagaaccatggctatgagaaccccacctacaaatacctggagcagatgcagattt

SEQ ID NO: 7876 - DNA, 2018 bp, Homo sapiens
  SIMILAR (3)..(2009): 1001254mologous to Homo sapiens binding protein,accession number L23114,Smith-Waterman Score=3517.
cagccaatgccggaacaggatttgctgttgctgagcctcaaatcgcaatgttttgtgggaagttaaatatgcatgtgaacattcagactgggaaatgggaacctgatccaacaggcaccaagagctgctttgaaacaaaagaagaagttcttcagtactgtcaggagatgtatccagagctacagatcacaaatgtgatggaggcaaaccagcgggttagtattgacaactggtgccggagggacaaaaagcaatgcaagagtcgctttgttacacctttcaagtgtctcgtgggtgaatttgtaagtgatgtcctgctagttccagaaaagtgccagtttttccacaaagagcggatggaggtgtgtgagaatcaccagcactggcacacggtagtcaaagaggcatgtctgactcagggaatgaccttatatagctacggcatgctgctcccatgtggggtagaccagttccatggcactgaatatgtgtgctgccctcagacaaagattattggatctgtgtcaaaagaagaggaagaggaagatgaagaggaagaggaagaggaagatgaagaggaagactatgatgtttataaaagtgaatttcctactgaagcagatctggaagacttcacagaagcagctgtggatgaggatgatgaggatgaggaagaaggggaggaagtggtggaggaccgagattactactatgacaccttcaaaggagatgactacaatgaggagaatcctactgaacccggcagcgacggcaccatgtcagacaaggaaattactcatgatgtcaaagttcctccaactcctctgccaaccaatgatgttgatgtgtatttcgagacctctgcagatgataatgagcatgctcgcttccagaaggctaaggagcagctggagattcggcaccgcaaccgaatggacagggtaaagaaggaatgggaagaggcagagcttcaagctaagaacctccccaaagcagagaggcagactctgattcagcacttccaagccatggttaaagctttagagaaggaagcagccagtgagaagcagcagctggtggagacccacctggcccgagtggaagctatgctgaatgaccgccgtcggatggctctggagaactacctggctgccttgcagtctgacccgccacggcctcatcgcattctccaggccttacggcgttatgtccgtgctgagaacaaagatcgcttacataccatccgtcattaccagcatgtgttggctgttgacccagaaaaggcggcccagatgaaatcccaggtgatgacacatctccacgtgattgaagaaaggaggaaccaaagcctctctctgctctacaaagtaccttatgtagcccaagaaattcaagaggaaattgatgagctccttcaggagcagcgtgcagatatggaccagttcactgcctcaatctcagagacccctgtggacgtccgggtgagctctgaggagagtgaggagatcccaccgttccaccccttccaccccttcccagccctacctgagaacgaagacactcagccggagttgtaccacccaatgaaaaaaggatctggagtgggagagcaggatgggggactgatcggtgccgaagagaaagtgattaacagtaagaataaagtggatgaaaacatggtcattgacgagactctggatgttaaggaaatgattttcaatgccgagagagttggaggcctcgaggaagagcgggaatccgtgggcccactgcgggaggacttcagtctgagtagcagtgctctcattggcctgctggtcatcgcagtggccattgccacggtcatcgtcatcagcctggtgatgctgaggaagaggcagtatggcaccatcagccacgggatcgtggaggttgatccaatgctcaccccagaagagcgtcacctgaacaagatgcagaaccatggctatgagaaccccacctacaaatacctggagcagatgcagatttaggtggca

SEQ ID NO: 7877 - DNA, 505 bp, Homo sapiens
  SIMILAR (314)..(505): 981254mologous to Homo sapiens binding protein,accession number L23113,Smith-Waterman Score=293.
gaatgacaatgccaagcttggcacgaggggctttttggcagtctgttctgagatacgtctccacaacggttacttgaaggaaaatgcatacgggaccagctgccataatatagtcttccctccatacctgccccttcattaggggtttggggagtggatttggaaggctgtgacagaactggttggttaatgggggtcccacaggtacctgcttccttccatcaagcagcaggtagcagaggaaggaggcagtaaataccaaactccccgttcacccagttgcttgctgccgacattctcatgactgtttcaggtcattgacgagactctggatgttaaggaaatgattttcaatgccgaaagagttggaggcctccaggaagagcgggaatccgtgggcccactgcgggaggacttcagtctgagtagcagtgctctcattggcctgctggtcatcgcagtggccattgccacggtcatcgtcatcagcctggtgatgctgagg

SEQ ID NO: 7878 - DNA, 1606 bp, Homo sapiens
  SIMILAR (3)..(1226): 851254mologous to Mus musculus amyloid precursor-like protein 2, isoform 751,accession number U15571,Smith-Waterman Score=1810.
atgaagaggaagactatgatgtttataaaagtgaatttcctactgaagcagatctggaagacttcacagaagcagctgtggatgaggatgatgaggatgaggaagaaggggaggaagtggtggaggaccgagattactactatgacaccttcaaaggagatgactacaatgaggagaatcctactgaacccggcagcgacggcaccatgtcagacaaggaaattactcatgatgtcaaagctgtctgctcccaggaggcgatgacggggccctgccgggccgtgatgcctcgttggtacttcgacctctccaagggaaagtgcgtgcgctttatatatggtggctgcggcggcaacaggaacaattttgagtctgaggattattgtatggctgtgtgtaaagcgatgattcctccaactcctctgccaaccaatgatgttgatgtgtatttcgagacctctgcagatgataatgagcatgctcgcttccagaaggctaaggagcagctggagattcggcaccgcaaccgaatggacagggtaaagaaggaatgggaagaggcagagcttcaagctaagaacctccccaaagcagagaggcagactctgattcagcacttccaagccatggttaaagctttagagaaggaagcagccagtgagaagcagcagctggtggagacccacctggcccgagtggaagctatgctgaatgaccgccgtcggatggctctggagaactacctggctgccttgcagtctgacccgccacggcctcatcgcattctccaggccttacggcgttatgtccgtgctgagaacaaagatcgcttacataccatccgtcattaccagcatgtgttggctgttgacccagaaaaggcggccccagatgaaattcccaggtgatgacacatctcccacgtgattgaagaaaggaggaaccaaagcctctctctgctctacaaagtaccttatgtagccccaagaaaattcaagaggaaattgatgagctccttcaggagcagcgtgcagatatggaccagttcactgcctcaatctcagagacccctgtggacgtccgggttatgctctgatgagagtgaggagatcccaccgttccaccccttccaccccttcccagccctacctgagaacgaaggatctggagtgggagagcaggatgggggactgatcggtgccgaagagaaagtgattaacagtaaagaataaagtggatgaaaaacatggtccattgaacgagactctggatgttaaggaaatgattttcaatgccgagagagttggaggcctcgacggaagagcgggaatccgtgggcccactgcgggaggacttcagtctgaagtagcagtgctctcattggcctgctggtcatcgcagtggccattgccacgggtcatcgtcatcagcctggtgatgctgaggaagaggcagtatggcaccatcaagccacgggatcgtggaagggttgatccaatgctcaccccagaagagcgtcacctgaacaagatgcagaaccatggctatgagaaccccacctacaaatacctggagcagatgcagatttaggtggcagggaacgcgg

SEQ ID NO: 7879 - DNA, 3750 bp, Homo sapiens
  SIMILAR (73)..(2037): 911254mologous to Homo sapiens amyloid protein,accession number L09209,Smith-Waterman Score=3098.
gtcgcggtgtgctaagcgaggagtccgagtgtgtgagcttgagagccgcgcgctagagcgacccggcgagggatggcggccaccgggaccgcggccgccgcagccacgggcaggctcctgcttctgctgctggtggggctcacggcgcctgccttggcgctggccggctacatcgaggctcttgcagccaatgccggaacaggatttgctgttgctgagcctcaaatcgcaatgttttgtgggaagttaaatatgcatgtgaacattcagactgggaaatgggaacctgatccaacaggcaccaagagctgctttgaaacaaaagaagaagttcttcagtactgtcaggagatgtatccagagctacagatcacaaatgtgatggaggcaaaccagcgggttagtattgacaactggtgccggagggacaaaaagcaatgcaagagtcgctttgttacacctttcaagtgtctcgtgggtgaatttgtaagtgatgtcctgctagttccagaaaagtgccagtttttccacaaagagcggatggaggtgtgtgagaatcaccagcactggcacacggtagtcaaagaggcatgtctgactcagggaatgaccttatatagctacggcatgctgctcccatgtggggtagaccagttccatggcactgaatatgtgtgctgccctcagacaaagattattggatctgtgtcaaaagaagaggaagaggaagatgaagaggaagaggaagaggaagatgaagaggaagactatgatgtttataaaagtgaatttcctactgaagcagatctggaagacttcacagaagcagctgtggatgaggatgatgaggatgaggaagaaggggaggaagtggtggaggaccgagattactactatgacaccttcaaaggagatgactacaatgaggagaatcctactgaacccggcagcgacggcaccatgtcagacaaggaaattactcatgatgtcaaagctgtctgctcccaggaggcgatgacggggccctgccgggccgtgatgcctcgttggtacttcgacctctccaagggaaagtgcgtgcgctttatatatggtggctgcggcggcaacaggaacaattttgagtctgaggattattgtatggctgtgtgtaaagcgatgattcctccaactcctctgccaaccaatgatgttgatgtgtatttcgagacctctgcagatgataatgagcatgctcgcttccagaaggctaaggagcagctggagattcggcaccgcaaccgaatggacagggtaaagaaggaatgggaagaggcagagcttcaagctaagaacctccccaaagcagagaggcagactctgattcagcacttccaagccatggttaaagctttagagaaggaagcagccagtgagaagcagcagctggtggagacccacctggcccgagtggaagctatgctgaatgaccgccgtcggatggctctggagaactacctggctgccttgcagtctgacccgccacggcctcatcgcattctccaggccttacggcgttatgtccgtgctgagaacaaagatcgcttacataccatccgtcattaccagcatgtgttggctgttgacccagaaaaggcggcccagatgaaatcccaggtgatgacacatctccacgtgattgaagaaaggaggaaccaaatcctctctctgctctacaaagtaccttatgtagcccaagaaattcaagaggaaattgatgagctccttcaggagcagcgtgcagatatggaccagttcactgcctcaatctcagagcacccctgtggacgtccgggtgagctctgaggagagtgaggagatcccaccgttccaccccttccaccccttcccagtcctacctgagaacgaagacactcagccggagttgtaccacccaatgaaaaaaggttctggagtgggagagcagcatgggggactgatcggtgccgaagagaaaagtgattaacagtaagaaataaagtggatgaaacattggtcaattgacgagactctggatgttaaggaaatgattttcaatgcgaagagagttggaggcctcgatgaagatctggaaatccgtgggcccactgcgggaggacttctgtctgagtagcagtgctctcattggcctgctggtcatcgcagtggccattgccacgggtcatccgtcatcatcctggtgatgctgaggaagaggcagtatggcaccaatcagccacgggatcgtggatggttgatccaattgctcaccccaagaagagcgtcacctgaaccaagatgcagaaccgatggctatgagaaccccacctacaaatacctggagcaagatgcaagatttaggtggcaggtagcgcggcagccctggcggagggatgcaggtgggccggaagatcccacgattccgatcgacttgccaagcagcaagccgctgccaggggctgcgtcctggacatcctgacctcctggacttgtaggactatataaagtactactgtagaacttgcaatttccattcttttaaatgggtgaaaaatggtaatataacaatatatgatatataaaccttaaatgaaaaaaatgatctattgcagatatttgatgtagttttcttttttaaattaatcagaaaccccacttccattgtattgtctgacacatgctctcaatatataataaatgggaaaatgtcgattttcaataatagacttatatgcaggctgtcgttccggttatgttgtgttaagtcaactcttcagcctcattcactgtccgggcttttatttatggaaaaaaaaggcagtattgcttttttaaatgagctttcaggaagttgctgagaaatggggtggaatagggaactgtaatggccactgaagcacgtgagagaccctcgcaaaatgatgtgaaaggaccagtttcttgaagtccagtgtttccacggctggatacctgtgtgtctccataaaagtcctgtcaccaaggacgttaaaggcattttattccagcgtcttctagagagcttagtgtatacagatgagggtgtccgctgctgctttccttcggaatccagtgcttccacagagattagcctgtagcttatatttgacattcttcactgtctgttgtttacctaccgtagctttttaccgttcacttccccttccaactatgtccagatgtgcaggctcctcctctctggactttctccaaaggcactgaccctcggcctctactttgtcccctcacctccaccccctcctgtcaccggccttgtgacattcactcagagaagaccacaccaaggaggggccgcggctggcccaggagagaacacggggaggtttgtttgtgtgaaaggaaagtagtccaggctgtccctgaaactgagtctgtggacactgtggaaagctttgaacaattgtgttttcgtcacaggagtctttgtaatgcttgtacagttgatgtcgatgctcactgcttctgctttttctttctttttattttaaaaaatctgaaggttctggtaacctgtggtgtatttttattttcctgtgactgtttttgttttgtttttttcctttttcctcccctttagccctattcatgtctctacccactatgcacagattaaacttcacctacaaactccttaatatgatctgtggagaatgtacacagtttaaacacatcaataaatactttaacttccaa

SEQ ID NO: 7880 - DNA, 628 bp, Homo sapiens
  SIMILAR (422)..(625): 661254mologous to Homo sapiens myelin gene expression factor 2,accession number AF106685,Smith-Waterman Score=222.
  misc_feature (1)...(628): n = a,t,c or g
tcgcgctcggagcccctcagctcaggcggccgaggcggaggcagcggcggcgggatggcggacgccaacaaggccgaggtgcccggggccactggtggcgacagcccgcacctgcagcccgcagagccgccgggcgagccgcggcgagagccgcaccccgcggaggcggagaagcagcagccgcagcacagcagcagctccaatggcgttaaaatggagaatgatgaatcagcaaaagaagagaaatctgacttaaaggaaaaatctacaggaagtaagaaggccaatagatttcatccttattcaaaagacaagaattcgggcactggagaaaagaagggtccaaatcgtaacagagttttcattagcaacatcccatatgacatgaaatggcaagctattaaagatctaatgagagagnaaggatcctgatggagaaaatgctcgtagggcattgcagcgaacaggaggatcatttncaggaggacacgtncctgatatgggattcagggtgatgaatttaccaccttccatactcaataatcccaacattcctcctgaagtatcagtaattttcagggccggagacttggttccacaattttgtgcccatcttgacttcaagtgg

SEQ ID NO: 7881 - DNA, 754 bp, Homo sapiens
  SIMILAR (700)..(753): 721254mologous to Homo sapiens myelin gene expression factor 2,accession number AF106685,Smith-Waterman Score=68.
ggtttttgttttttgagccgcaccccgcggaggcgaggaagcagcagccgcagcacagcagcagctccaatggcgttaaaatggagaatgatgaatcagcaaaagaagagaaatctgacttaaaggaaaaatctacaggaagtaagaaggccaatagatttcatccttattcaaaagacaagaattcgggcactggagaaaagaagggtccaaatcgtaacagagttttcattagcaacatcccatatgacatgaaatggcaagctattaaagatctaatgagagagaaagttggtgaggttacatacgtggagctctttaaggatgcggaaggaaaatcaaggggttgtggtgtggttgaattcaaagatgaagaatttgtaaagaaagccctagaaactatgaacaaatatgatcttagtggaagacgcgttaatattaaagaggatcctgatggagaaaatgctcgtagggcattgcagcgaacaggaacatcatttcaaggatcacatgcctccgatgtgggatctgggttggtgaatttaccaccttccattctcaataatccaaacattcctcctgaggttatcagcaatttgcaggctggtagacttggttccacaatttttgttgctaatcttgacttcaaagttggttggaagaaattaaaggaagtgttcagcatagctggaactgtgaaagcgggcagatattaaagaagacaaagatggccagagcagaggaatgggcactg

SEQ ID NO: 7882 - DNA, 346 bp, Homo sapiens
  SIMILAR (35)..(346): 321254mologous to Drosophila melanogaster helicase DOMINO A,accession number AF076776,Smith-Waterman Score=169.
catgccgtgtgatgaagaaccatcccaattagaggagctagctgacttcatggagcagcttacaccaattgaaaaatatgctttaaattacctggaattattccatacttctattgagcaagaaaaggagagaaccagtgaggacgcagtgatgactgcagtgagggcatgggagttctggaacctgaagaccctgcaggagagggaggcccggctgcggctggagcaggaggaggcggacctcctgacctacacgcgagaggatgcctacagcatggagtatgtctacgaagatgtcgatgggcagacagaagtcatgccgctctggaccccacccaccccgccc

SEQ ID NO: 7883 - DNA, 431 bp, Homo sapiens; identical to SEQ ID NO: 1616
  SIMILAR (13)..(420): 411254mologous to Mus musculus TSG118.1,accession number AF034580,Smith-Waterman Score=214.

SEQ ID NO: 7884 - DNA, 547 bp, Homo sapiens
  SIMILAR (102)..(242): 871254mologous to Homo sapiens ubiquitin binding protein p62,accession number AF060494,Smith-Waterman Score=219.
gcgcggcggctgcgaccgggacggcccattttccgccagctcgccgctcgctatggcgtcgctcaccgtgaaggcctaccttctgggcaaggaggacgcgggcgcgcgagattcgccgcttcagcttatgctgcagcactgagcctgaggcgcaagccgaggttgcggcgggtccgggaccctgcgagcggctgctgatccgggtggccgccctgttccccgcggtgcggcctggcggctttccaggcgcactaccgcgatgaggacggggacttggttgccttttccagtgacgaggaattgacaatggccatgtcctacgtgaaggatgacatcttccgaatctacattaaagagacaaatgagtgcctggctgtaccaccgcccacctgatgctcatgagcgcgctcccgtaacatggttcaccttaatgagatctgtgatggctgaaatggtcctgtggccggaaccctttacatgtgtagcttctgcccatattactacttgtgtacaccctttaatgtataggtcttctactctctcctcc

SEQ ID NO: 7885 - DNA, 539 bp, Homo sapiens
  SIMILAR (379)..(465): 961254mologous to Homo sapiens gamma-G globin,accession number X55656,Smith-Waterman Score=154.
  misc_feature (1)...(539): n = a,t,c or g
ggaacgtctgaggttatcaataagctcctagtccagacgccatgggtcaagcctgtggggcaaggtgaatgtggaagatgctggaggagaaaccctgggaaggctcctggttgtctacccatggacccagaggttctttgacagctttggcaacctgtcctctgcctctgccatcatgggcaaccccaaagtcaaggcacatggcaagaaggtgctgacttccttgggagatgccataaagcacctggatgatctcaagggcacctttgcccagctgagtgaactgcactgtgacaagctgcatgtggatcctgagaacttcaagctcctgggaaatgtccatttcggcaaagaattcacccctgaagtgcaggcttcctggcagaagatggtgactggagtggccagtgccctgtcctccagataccactgagctcactgcccatgatgcagagctttcaaggataggctttattcctgccnnccatacnaatnataaatctattctgctnnnaaatctccnnnnaaaaaaaaaaaaa

SEQ ID NO: 7886 - DNA, 1980 bp, Homo sapiens
  SIMILAR (593)..(1024): 331254mologous to Mus musculus TSG118.1,accession number AF034580,Smith-Waterman Score=157.
atggaggtggacttcaaaatcagaaaagtcggccagtggacaatcacccttcaggagcacccagtcagtgttttgctattcatagaagagacccatccagaaaacaaacccacaagtacagcagtagaagaaagccacatcagccgtgatactgtgatggttaattttcagtgtcaacttgactggagtaagggatacctagaggcctatttgaccaaaataaactcgatctgctcccacagattcttgcttgacggctcggtgacctgccacgacgagacaggcagctcgcgggacgcgagagacacggtgggcaccggcgtccgggtgaacgacgagtctgtagagcagctgggcttgaggcgcactatgtggctggggatttgccgcggtgccgccatggccgcggtttccacggtaaccgcgttcgccggaaggccgcgacccggaagaagccggaacccgagagggtgggccggcgactcgaagtggacttccgggtcacggcggagctggctctcacgtggaggcggggaaatttcgcccaccggaatgatcaccaagacacacttttgtttaccttgggctcccagagaagaaaaagaagaagagggtggtcaaagaaccagagactcgatactcagttttaaacaatgatgattactttgctgatgtttctcctttaagagctacatccccctcgtaagagtgtggcccatgggcaggcacctgagatgcctctagtgaagaaaaagaagaagaaaaagaagggtgtcagcaccctttgcgaggagcatgtagaacctgagaccacgctgcctgctagacggacagagaagtcacccagcctcaggaagcaggtgtttggccacttggagttcctcagtggggaaaagaaaaaataagaagtcacctctagccatgtcccatgcctctggggtgaaaacctcccaagaaccctagacagggtgaggaggaaaccagagttggcaagaagctcaaaaaaacacaagaaggaaaaaaaggggggcccaggaccccacagccttctcggtccaggacccttggttctgtgaggccagggaagccagggatgttggggacacttgctcagtggggaagaaggatgaggaacaggcagccttggggcagaaacggaagcggaagagccccagagaacacaatgggaaggtgaagaagaaaaaaaaaatccaccaggagggagatgccctcccaggccactccaagccctccaggtccatggagagcagccctaggaaaggaagtaaaaagaagccagtcaaagttgaggctccggaatacatccccataagtgatgaccctaaggcctccgcaaagaaaaagatgaagtccaaaaagaaggtagagcagccagtcatcgaggagccagctctgaaaaggaagaaaaagaagaagaggaaagagagtggggtagcaggagacccttggaaggaggtagtttttccttcagaaatggactttgccgtgggagaattaagggaaacagacacggacttagaggtggtgttggaaaaaaaaggcaacatggatgaggcgcacatagaccaggtgaggcgaaaggccttgcaagaagagatcgatcgcgagtcaggcaaaacggaagcttctgaaaccaggaagtggacgggaacccagtttggccagtgggatactgctggttttgagaacgaggaccaaaaactgaaatttctcagacttatgggtggcttcaaaaacctgtccccttcgttcagccgccccgccagcacgattgcaaggcccaacatggccctcggcaagaaggcggctgacagcctgcagcagaatctgcagcgggactacgaccgggccatgagctggaagtacagccggggagccggcctcggcttctccaccgcccccaacaagatcttttacattgacaggaacgcttccaagtcagtcaagctggaagattaa

SEQ ID NO: 7887 - DNA, 376 bp, Homo sapiens
cactgctggctttctgcttccccaagggctgccatgcaagtatcaccttatgtatggtagtcaccttatgcccaatgtatggagaaggacaacgaccagagagccaaaaccactcggggatgcagagcccaacacaaggtccctcatgtgggaggtaaagcgttcatcatctggcccttgggtattcaaatcaaacatagcctgccacatacccatcttccgaattacctccaccagctctgcatatgattgccatttactcacagtttttgataattctctggcatcattccaccctgtccacatggctgccatcagccattcagtcaggatatggtcacctttcccttgtgccaactgcctgctcacctgcacc

SEQ ID NO: 7888 - DNA, 958 bp, Homo sapiens
  SIMILAR (527)..(949): 431254mologous to Mus musculus Pro-Pol-dUTPase polyprotein,accession number Y12713,Smith-Waterman Score=310.
gggtctatcacaaccaaaacctcggaaggagactcccattccatctgataccgaggaggaagaacccctgctgcaggctcaccctgtggtctgccagaaaatagagcatgaacagccacttgggccccaagggttgggccagggaccccctaccgtggtggagcacacttcatatagtgcctacacccccactgagttgtgggagttagctcacccctccctccatcagcggttgcaggtgagcaggcagttggcacaagggaaaggtgaccatatcctgactgaatggctgatggcagccatgtggacagggtggaatgatgccagagaattatcaaaaactgtgagtaaatggcaatcatatgcagagctggtggaggacaccagagatcagaggccacatgtggaattggcaatccactggtaccccaccaatgtacagcaggtgttggtgctggtaggtactgatgcagattatagcctcgtctatgggaaacgggataagtttttaggcaaggctgcatacacagatggttatagaggccagtcagtgaaaatgacagtggactatcaagaactaaataaagtaacagcccctttacatgcagcagtcctgtctatcacggatttgatggaccacctgacgatggaattgggacagtaccattatgcagtggatttggctaatgcatccctttcagatgatatcgctccagagagccaggaacagtttggcttcacatgggaagggcgacaatggactttcacagtgttgccacagggctacgtgcatagtcccaccatatgtcatggtctcgttgctacggatttagccacctggaaatttccaaaggggatccgcctattccattacattgatgatattatgttaacctctgattctcctgcagatttagaagctgtggtgcccctcttgcaacaacatttggcagcatga

SEQ ID NO: 7889 - DNA, 847 bp, Homo sapiens
  SIMILAR (338)..(697): 1001254mologous to Homo sapiens gamma-G globin,accession number X55656,Smith-Waterman Score=632.
  misc_feature (1)...(847): n = a,t,c or g
acgtctgaggttatcaataagctcctagtccagacgccatgggtcatttcacagaggaggacaaggctactatcacaagcctgtggggcaaggtgaatgtggaagatgctggaggagaaaccctgggaaggctcctggttgtctacccatggacccagaggttctttgacagctttggcaacctgtcctctgcctctgccatcatgggcaaccccaaagtcaaggcacatggcaagaaggtgctgacttccttgggagatgccataaagcacctggatgatctcaagggcacctttgcccagctgagtgaactgcactgtgacaagctgcatgtggcctgtggggcaaggtgaatgtggaagatgctggaggagaaaccctgggaaggctcctggttgtctacccatggacccagaggttctttgacagctttggcaacctgtcctctgcctctgccatcatgggcaaccccaaagtcaaggcacatggcaagaaggtgctgacttccttgggagatgccataaagcacctggatgatctcaagggcacctttgcccagctgagtgaactgcactgtgacaagctgcatgtggatcctgagaacttcaagctcctgggaaatgtgctggtgaccgttttggcaatccatttcggcaaagaattcacccctgaggtgcaggcttcctggcagaagatggtgactggagtggccagtgccctgtcctccagataccactgagctcactgcccatgatgcagagctttcaaggataggctttattctgcaagcaatcaaataataaatctattctgctaaganatcccnnnaaaaaaaaaaaaaaaaaaa

SEQ ID NO: 7890 - DNA, 689 bp, Homo sapiens
  SIMILAR (536)..(622): 961254mologous to Homo sapiens gamma-G globin,accession number X55656,Smith-Waterman Score=154.
ggaacgtctgaggttatcaataagctcctagtccagacgccatgggtcatttcacagaggaggacaaggctactatcacaagcctgtggggcaaggtgaatgtggaagatgctggaggagaaaccctgggaaggctcctggttgtctacccatggacccagaggttctttgacagctttggcaacctgtcctctgcctctgccatcatgggcaaccccaaagtcaaggcacatggcaagaaggtgctgacttccttgggagatgccataaagcacctggatgatctcaagggcacctttgcccagctgagtgaactgcactgtgacaagctgcatgtggatcctgaggtgctgacttccttgggagatgccataaagcacctggatgatctcaagggcacctttgcccagctgagtgaactgcactgtgacaagctgcatgtggatcctgagaacttcaagctcctgggaaatgtgctggtgaccgttttggcaatccatttcggcaaagaattcacccctgaggtgcaggcttcctggcagaagatggtgactggagtggccagtgccctgtcctccagataccactgagctcactgcccatgatgcagagctttcaaggataggctttattctgcaagcaatacaaataataaatctattctgctaagagatcacaaaaaaaaaaaa

SEQ ID NO: 7891 - DNA, 1365 bp, Homo sapiens
  SIMILAR (241)..(654): 921254mologous to Homo sapiens gamma-G globin,accession number X55656,Smith-Waterman Score=661.
ggaacgtctgaggttatcaataagctcctagtccagacgccatgggtcattttacagaggaggacaaggctactatcacaagcctgtggggcaaggtgaatgtggaagatgctggaggagaaaccctgggaaggctcctggttgtctacccatggacccagaggttctttgacagctttggcaacctgtcctctgcctctgccatcatgggcaaccccaaagtcaaggcacatggcaagaagggctactatcacaagcctgtggggcaaggtgaatgtggaagatgctggaggagaaaccctgggaaggctcctggttgtctacccatggacccagaggttctttgacagctttggcaacctgtcctctgcctctgccatcatgggcaaccccaaagtcaaggcacatggcaagaaggtgctgacttccttgggagatgccataaagcacctggatgatctcaagggcacctttgcccagctgagtgaactgcactgtgacaagctgcatgtggatcctgagaacttcaagctcctgggaaatgtgctggtgaccgttttggcaatccatttcggcaaagaattcacccctgaggtgcaggcttcctggcagaagatggtgactggagggaggagaaaccctgggaaggctcctggttgtctacccatggacccagaggttctttgacagctttggcaacctgtcctctgcctctgccatcatgggcaaccccaaagtcaaggcacatggcaagaaggtgctgacttccttgggagatgccataaagcacctggatgatctcaagggcacctttgcccagctgagtgaactgcactgtgacaagctgcatgtggatcctgagaacttcaagctcctgggaaatgtgctggtgaccgttttggcaatccatttcggcaaagaattcacccctgaggtgcagagcttcctggcagaagatggtgactggagtggccagtgccctgtccttcagataccactgagctcactgcccatgatgcagagctttcaaggataggctttattctgcaagcaatcaaataataaatctattctgctaagagatcactgagtgaactgcactgtgacaagctgcatgtggatcctgagaacttcaagctcctgggaaatgtgctggtgaccgttttggcaatccatttcggcaaagaattcacccctgaggtgcaggcttcctggcagaagatggtgactgcagtggccagtgccctgtcctccagataccactgagctcactgcccatgattcagagctttcaaggataggctttattctgcaagcaatacaaataataaatctattctgctaagagatcacaaaaaaaaaaaa

SEQ ID NO: 7892 - DNA, 951 bp, Homo sapiens
  SIMILAR (714)..(848): 931254mologous to Macaca mulatta gamma-globin,accession number M19434,Smith-Waterman Score=215.
gaggttatcaataagctcctagtccagacgccatgggtcatttcacagaggaggacaaggctactatcacaagcctgtggggcaaggtgaatgtggaagatgctggaggagaaaccctgggaggttatcaataagctcctagtccagacgccatgggtcatttcacagaggaggacaaggctactatcgacaagcctctggtgcaaggtgaatgtggaagatgctggaggagaaaccctgggaaggctcctggttgtctacccatggacccagaggttctttgacagctttggcaacctgtcctctgcctctgccatcatgggcaaccccaaagtcaaggcatatggcaagaaggtgctgacgatccttgggagatgccataaagcacctggatgatctcaaagggcacctttgcccaagcctgaagtgaactgcacttgtgacaaagctgcatgtggatcctgagaacttcaaagctcctggggaaatgtgctggtgacccgtttttggcaatcccattttcggcaaaagaattcacccctggaggttgcaggcttcctgggcagaaagatgggtgacttggagttggccagtgccctggtcctccagataccactgaagctcaattgcccatgaatgcagagcttttcaaggatatggctttattcttgcaagcaattacaaataataaatctatttctgctaagagatcaaacttcaagctcctgggaaatgtgctggtgaccgttttggcaatccatttcggcaaagaattcacccctgaggtgcaggcttcctggcagaagatggtgactggagtggccagtgccctgtcctccagataccactgagctcactgcccatgatgcagagctttcaaggataggctttattctgcaagcaatcaaataataaatctattctgctaagagatcaaaaaaaaaaaaaaaa

SEQ ID NO: 7893 - DNA, 664 bp, Homo sapiens
  SIMILAR (383)..(538): 381254mologous to Homo sapiens beta-globin,accession number M34059,Smith-Waterman Score=74.
cggtcgacccacgcgtgcggacacaactgcgtacactagcaacctcaaacagtttccattttgcacctgactcctgaggagaagtctgccgttactgccctgtggggccaaggtaaacctggatgaagtcgatgttgaggccctgggcaggcttcatggtggtctacccttggacccagaggttattggagtcctttgggaatctgtccactcctgatgctgttatgggcaaccctaaggtgaaggctcatggcaagaaagtgctcggtgccttttagtgatggcctggctcacctggacaacctcaagggcacctttgccacactgagtgagctccactgtgacaagctgcacgtggatcctgagaacttcaggctcctggggcaacgtgcctggtctgtgtcgctgggcccatcacttttggcaaagaattcaccccaccagttgcaggcttgcctatcagaaagttggtggctggttgtggctaatgccctggcccacaagtaatcacttaagcctcgctttccttgctggtccaatttccaattaaaaggttcctttggttccctaagtccaaatacttaaactggggggatattattgaaagggccttgagcatcttggattttgcctaataaaaaaaatttatttttcattgcaaaat

SEQ ID NO: 7894 - DNA, 772 bp, Homo sapiens
  SIMILAR (373)..(35): 461254mologous to Homo sapiens PRO2987,accession number AF116719,Smith-Waterman Score=155.
  misc_feature (1)...(772): n = a,t,c or g
aattttgccctcgaggccaagaattcggcgagggcaataagctcctagtcccagacgcccatggggtcatttcacagaggaggaccaaggctactatcgacaagcctgtggggcaaaggtgaatgtggaaagatgctggaggagaaacccctgggaaggctcctggttgtctacccatggacccagaggttctttgaccagctttggcaacctgtcctctgcctctgccatccatgggcaacccccaaagtcaaggcacatggccaagaaggtgctgactttccttgggagatgccaacaaagcacctggatgatctcaaagggcacctttgcccaagcctgaagtgaactgcacttgtgacaaagctgcatgtggatcctgagaacttcaaagctcctggggaaatgtgctggtgacccgttttgggcaatcccattttcggcaaaagaattcacccctgaaggttgcagggcttcctgggcagaaagatgggtgacttggagttggccagtgccctgttcctccagataccactgaagcctcttggcccatgaattcagaagctttcaaggataaggcttttattcttgcaagcaattacaaataataaatctatttctgctaagagatcaccaaannnnnatnntnnnnnnncccccggattttttatttagcgggccgcacctttttccccttttagggggggtaaatttatattgggccttgggccggggttttcaaaagcggggggannnnnnnnnnaaagagccc

SEQ ID NO: 7895 - DNA, 435 bp, Homo sapiens
  SIMILAR (292)..(435): 1001254mologous to Mus musculus putative,accession number AK002988,Smith-Waterman Score=258.
agcggctgctgttggttgggggccgtcccgctcctaaggcaggaagatggtggccgcaaagaagacggtgagtgaggcgggccaggcccggaagacgattcacgtggagagatgtcttggccagggcgggcagatgtgagcccacgggggtgacagcatgcctgctggcatttggagggccccagaaggaatcccagtggccctctcaatgacttggggtcctcgacttcggaagtttaaggggctcggcttcaaaaagctgggtccggttttgaggcggttgcaggcgaggcccttaggaaatctgaaatagagtactatgctatgttggctaaaactggtgtccatcactacagtggcaataatattgaactgggcacagcatgcggaaaatactacagagtgtgcacactggctatcattgatccaggtgac

SEQ ID NO: 7896 - DNA, 449 bp, Homo sapiens
  SIMILAR (357)..(449): 1001254mologous to Mus musculus putative,accession number AK002988,Smith-Waterman Score=167.
gtacataatacctactttagagattggcatggaaatataaagtatgtgggccttactaatgctagataatgctttgctttcttttatttgcatcttaccctcttccgtgagtattgatactgtcttaaacatagtaggggttgattagatatttgctggttgccccttcacttgcaagggatacatacaaatgttggtttgtattggataatgaatatgatgtttttaagagtaatatgtgattttgttactttttgaaggccttaacaacattaacactagtaaaagaagtagtaacatttagtctgtcagtcacttggtatcgcatttatttatttgcccattttggttcccaaaggaaatctgaaatagagtactatgctatgttggctaaaactggtgtccatcactacagtggcaataatattgaactgggcacagcatgcggt

SEQ ID NO: 7897 - DNA, 587 bp, Homo sapiens
  SIMILAR (83)..(445): 481254mologous to Mus musculus putative,accession number AK002988,Smith-Waterman Score=169.
gttccccggccatcttagcggatgctgttgggttgggggcccgtccccgctccctaaggcagggaagatgggtggcccgcaaaagaagacgaaaaaagtcgctggaagccgatcaacctcctagggctcccaactccgtttatgaaaaagtgggaaagtacgcccctggggtacaagccagactctgaagatgatcagacaaaggcaaagcgaaaattggtcattcctcgctaacaactgcccaagctttgaggaactctgaaaatagagtactatgctatgttggctaaaacttggtgtccatcactacagtggcaataatattgaactgggcacagccatgcgggaaaatacttacagagtgttgcacactgggctattcattgatccagggtgacttctggacattcattaggaagcatgccagaacgagactggtgaaaaggtaaaccttttcvacctacaaaatgttcagcctgcaaagccttaaaccctgcaaaattttcctttaataaaaattgcgtgtgtttaaaccagcaaagaagaataagaagatttggcccccagtagggggtttataaagcgag

SEQ ID NO: 7898 - DNA, 369 bp, Homo sapiens
  SIMILAR (116)..(66): 581254mologous to Homo sapiens Human galectin 10 splice variant,accession number AAW56506,Smith-Waterman Score=41.
ctgtaatgaggaacacaaaacccaaataaatcactctccgtctaataggaaacacgaagtattacatttcacagatcatactgtatatagtttgcatcactagatacaggaccacgttatcacaatctaagatacaaaatccagatgatcaggaatggtaccgacaaacgggattaccgggttatagatgataatctgtaggttgattaaggacaacatcattcttttccagcttcttgtcgattggagtctcttctgtgtatgacctaagattttaggcaagtttcatttaaaggtcccctggattgaaactgaggcactggccccaaagactggtgtttcaggcgctccacggagcaggttgtttgt

SEQ ID NO: 7899 - DNA, 534 bp, Homo sapiens; identical to SEQ ID NO: 1
  SIMILAR (38)..(421): 1001254mologous to Homo sapiens alpha globin,accession number V00489,Smith-Waterman Score=657.

SEQ ID NO: 7900 - DNA, 763 bp, Homo sapiens
  SIMILAR (166)..(249): 891254mologous to Equus caballus alpha 2 globin,accession number X07053,Smith-Waterman Score=129.
ggcttctggacttaggaggtccgggcagctggtccatggttgttcaggtagtgccgcagggctgtgggataatccgttatgacgccagtggctcccacgctgaaggctgcttcaaaatccgactcttctggtccccacagactcagagagaacccaccatggtgcttgtctcctgccgacaagaccaacgtcaaggccgcctggggtaaggtcggcgcgcacgctggcgagtatggtgcggaggccctgggagaggatgttcctgtccttccccaccaccaagacctacttcccgcacttcgacctgagccacggtttctgcccaggtttaaggggccacgggcaaggaaggtggccgacgcgcttgaccaacgccgtggcgcaacgtgggacggacattgcccaacgcgctgtccggccctgaagcgaccctgcacgcgcacaaagcttcggggtggacccggttcaactttcaagctcctaaagccacttgccttgcttgggtgaaccttgggccgcccacctccccggccgagtttcaccccttggcggttgcaaggcttccctggggacaaatttcctggggtttttgttgaagcaaccttgttgaactttcaaataacctttaaaggttggaagcttggttggccattgtttttttgccccttgggcctccccaccgccccttcctcccctctttgcacccgtacccccgtggtcgttgaataaagtctgagtgggcggcaaaaaaaaaaaaaaaaaa

SEQ ID NO: 7901 - DNA, 330 bp, Homo sapiens
aaataattaagggagccctatacccggaaggaaacacatcaaaatataaaacccactggtagagcaaatacacaaataaaaaagagaaagaatttatatgtcaccactaccgaaaaaccaccaaccacaatgaaaaacaacatgagagaaagaaaggaagaaatgctatacaaaaaccagaaatcaattactaaaatgacaggaataagccctgtcatatcaataataatcctgaatacaaatgaattaaacttatcacttaaaagatacagaggggctgaaagaatttttttaaatgatccaaccacatgctgcctacaagaaattcat

SEQ ID NO: 7902 - DNA, 379 bp, Homo sapiens; identical to SEQ ID NO: 3752
  SIMILAR (189)..(371): 1001254mologous to Homo sapiens metallothionein,accession number X64177,Smith-Waterman Score=380.

SEQ ID NO: 7903 - DNA, 724 bp, Homo sapiens
  SIMILAR (367)..(408): 711254mologous to Homo sapiens ferritin light chain,accession number M11147,Smith-Waterman Score=51.
ggcacgagcgcgggtctgtctcttgcttcaacagtggttggacggatcatatccggggacatctgttccagcctccgaccgccctccgatttcctctccgcttgcaacctccgggaccatcttctcggccatctcctgcttctgggacctgccagcaccagtttttgtggttagctccttcttgccaaccaaccatgagctcccagattcgtcagaattattccaccgacgtggaggcagccgtcaacagcctggtcaatttgtacctgcaggcctcctacacctacctctctctgggcttctatttcgaccgcgatgatgtggctctggaaggcgtgagccacttcttccgcgaactggccgaggaagaagcgcgagggatacgagcgtcttcttgagaatgcaaacccagcgtggcggccgcgctctcttccaggacatcaagaagccagctgaagatgagtggggtaaaaccccagacgccatgaaagctgccatggccctggagaaaaagctgaaccaggcccttttggatcttcatgccctgggttctgcccgcacggacccccatctctgtgacttcctggagactcacttcctagatgaggaagtgaagcttatcaagaagatgggtgaccacctgaccaacctccacaggctgggtggcccggaggctgggctgggcgagtatctcttcgaaaggctcactctcaagcacgactaa

SEQ ID NO: 7904 - DNA, 264 bp, Homo sapiens
catcatatatcgcctgagagcacaacaaggggacaatgatcgggatataaactcaggcattcaagcagggagtggcaaccccctttgggtcccctcccatcgtatgggagctctgttttcactctattaaatcttgcaactgcacgctcttctggtctgtgtttgttacggcttgagctgagcttttgctcactgtccaccaccgctgtttgccgctgttacagacctgccattgactcccacccgggtccaccactgctgttt

SEQ ID NO: 7905 - DNA, 1232 bp, Homo sapiens
  SIMILAR (174)..(1229): 651254mologous to Homo sapiens HPF1 protein,accession number M27877,Smith-Waterman Score=1313.
gaatctctcttcctgacctgaatattaactccatgttggagcaaaggagggagccctggtctggtgagagtgaagtgaaaatagcaaaaaattcagatgggagggagtgcatcaaaggtgtgaacacagaaatgtcttccagtgtcaaaacccccatttttaataggaatgattttgatgattcttcatttctcccacaagaacagaaagtacaccttagagaaaaaccttatgaatgtaatgagcatagcaaagtctttagagtatcttccagccttactaaacatcaagtaatccatactgtagagaaaccttacaaatgtaattcatgcggcaaggtctttagtcgcaattcacaccttgcagaacattgtagaattcatactggagagaaaccttacaaatgtaatgtctgtggcaaggtttttagttacaattcaaactttgcacgacatcaaagaattcataccagagagaagccgtatgaatgtaatgaatgtggtaaagtcttcagtaataattcttaccttgcacgacatcaaagaattcatgctgaagagaaaccttacaaatgtaatgaatgtggtaaaggcttcagtcataagtcatctctagcaaatcattggagaatttatactggagagaagccttacaaatgtgatgaatgtggcaaggccttctataggattgcgctccttgtacgacatcagaaaattcatactggagagaaaccttacaaatgtaatgaatgtggaaaggtctttattcaaaattcgcacctagcacaacattggagaattcatacaggagagaaaccttacaaatgtaatgaatgtggaaaagtatttaatcaactttcaaatcttgcacgacatcgaagaattcatactggagagaagccttacaaatgtaatgaatgtggtaaagcatttagtgagtattcaggcctttcagcccatcttgtaatccacactggagagaagccttacaaatgtagtgaatgtggcaaggcattcagacacaagttatcactaaccaatcatcagagaatccatactggagaaagaccttacaaatgtaatgaatgtggcaaggtcttcaatcgaattgcacaccttgcacgacatcggaaaattcatactggagagaaaccttacaaatgtaatgagtgtggcaaggcctttagtcgcatttcatacctagcacaacattggacaattcatatgggatag

SEQ ID NO: 7906 - DNA, 496 bp, Homo sapiens
  SIMILAR (48)..(311): 571254mologous to Homo sapiens HTRM clone 438283 protein sequence,accession number AAY73345,Smith-Waterman Score=224.
aaggtcacgccgcggcgcgattgacttctaaagagtcatgctgggatgaaaaagcccaaaagagaaagaagaggaaagcctacgagtcagggatggctcttcctcagggacacttaacattcagggacgtggccatagaattctctcaggcggagtggaaatgcctggaccctgcacagagggctttatacaaggatgtgatgttggagaactacaggaacctggtctccctgggaatctctcttcctgacctgaatattaactccatgttggagcaaaggagggagccctggtctggtgagagtgaagtgaaaatagcaaaaaattcagatgggagggagtgcatcaaaggtgtgaacacagggagcagctatgcattgggaagcaatgcagaagacaaaccaattaaaaaacaacttggagtatcctttcacttacatctgtctgaactggagctatttccagatgaccgggtaataaatggatgtaatcaaaa

SEQ ID NO: 7907 - DNA, 1624 bp, Homo sapiens; identical to SEQ ID NO: 187
  SIMILAR (167)..(967): 1001254mologous to Homo sapiens C33 antigen=type III integral membrane protein,accession number S48196,Smith-Waterman Score= 1413.

SEQ ID NO: 7908 - DNA, 2773 bp, Homo sapiens
  SIMILAR (408)..(1277): 1001254mologous to Homo sapiens Na/K-ATPase beta 2 subunit,accession number M81181,Smith-Waterman Score=1575.
ccacctctctctgcctttttgtaccccgctttttttctgcgttctgctcggtttttgtagccgtctgtttttgcaccccatttcgttttgtttctagacggtttggcggggggtgaagctgcattcataccccttcctcttgttattctcccctgctctgacagcaccccttttcatcgcagttggggggcctaggatcggtgcatcttccgccgcgctgccagcaccccgcagcgcgtggtcgtgcaccccggaatctgcagcagctgcatatctgaggggggtctcctttgcccgcgccgccttcgctccccgtgcttttgggtgtgtggagggcttcagtgcgcggcgcccccgcttctccgcaaccccccgccccgcgcccggactcgccccgcgccaccaagatggtcatccagaaagagaagaagagctgcgggcaggtggttgaggagtggaaggagttcgtgtggaacccgaggacgcaccagtttatgggccgcaccgggaccagctgggcctttatcctcctcttctacctcgttttttatgggttccccaccgccatgttcaccctcaccatgtgggtgatgctgcagactgtctccgaccatacccccaagtaccaggaccgactggccacaccgggcttgatgattcgccccaagactgagaaccttgatgtcattgtcaatgtcagtgacactgaaagctgggaccagcatgttcagaagctcaacaagttcttggagccttacaacgactctatgcaagcccaaaagaatgatgtctgccgccctgggcgctattacgaacagccagataatggagtcctcaactaccccaaactggcctgccaattcaaccggacccagctgggcaactgctccggcattggggactccacccactatggttacagcactgggcagccctgtgtcttcatcaagatgaaccgggtcatcaacttctatgcaggagcaaaccagagcatgaatgttacctgtgctgggaagcgagatgaagatgctgagaatctcggcaacttcgtcatgttccccgccaacggcaacatcgacctcatgtacttcccctactatggcaaaaagttccacgtgaactacacacagcccctggtggctgtgaagttcctgaatgtgacccccaacgtggaggtgaatgtagaatgtcgcatcaacgccgccaacatcgccacagacgatgagcgagacaagttcgccggccgcgtggccttcaaactccgcatcaacaaaacctgaggccccttcctcccaccccatctctctcctgtggatgctcctggaatgtccctgaccctgcctgatccctccctcacccaccccaaaggtatttttgataacagagctatgacttgtctgagcctcacatccttttccttgacttctcaacccagcctgaagtccattgcggttccgtcactcgcctttcccaccaacttctcccaacctcagatcagtcagacagggagctgggctaagatggccacagaggagttaggagcctttctagttctggtttagctgtgagagctatccactctcctgcctgcatatcccctgagagttatcggaagtgcccactgacccacccacccacctacaccccccgccacacacacacacaaacgtgcacacgcagtctcatttgacccctttgcttccagagatgaatgtggcactccctccttccattcctaagctctagccaccgtcccttgatctctcatactttctccctgtctacacagtcgccatcttggtgactttgaatttatctggctcctgggcaggtcttctcctcctctccatccctattccctcctctgaaatgcacccctttgtaattgaggacaaggtggttctgtggccttttccctctttgctggcacgttctgcttctcaccctctggtgactctgtgagctgggaaatgcgggactggaagtgaggcctgtgttgacccttcctgaaaatcctctagcagcccccgacttcagcagtttctttctttgtttttttgagatggagtttcgctcttgttgcccaggctggagtgcaatggtgcaatctcagctcactgcaacttccgcatcccaggttcaagcgattctcccgcctcaggttcccgagtagctgggactacaggcatgtgccaccatgcccggctaatttctttctttctttttttttttttttttgcattttttagtagagatgggggtttctccttgttggtcaggctggtctcgaactcccgacctcaggtgatccacctgcctcggcctcccaaagtgttgggattacaggcgtgagccaccgcgcctggccttcagtttcttcctaggccgttctgtcacccaaatagctgctacccagaggggcggggttgacctaggctgaatatccactttgtttttatggatggctcccttcccccattcgccttcccagaatatccttcaagttccacttcccagggagctctgggggaggggcggccattctggctccgtccccagtggccaccttggaaacatcggctggctttgggactattccacctccttcccctgagcccagatctgcccccaccatcctttctctggcttcttttagcaagttatcaactaatcactaactccttccttttcctctgcatgccagcctgaaaattccaaatctagcctctgaatgtcttggctccatctcttcagacccctttgcctttaaaaa

SEQ ID NO: 7909 - DNA, 392 bp, Homo sapiens
  SIMILAR (364)..(203): 681254mologous to Homo sapiens PRO1902,accession number AF118082,Smith-Waterman Score=180.
gcaagttacccagaggatggggttgggaggagggggacaggattggcaaagatgttggtcaaaggacacacaagtttggttagagaggagacataagctcaagagatctattgtccctcatgatgactataattaataacaatatattatatacctgaaaattgccagcctgggcaacatagtgagacctcgtctctataaaaaaaataaaaaaattagctgggtgtggtggcacacacctgtagtcccagctacttggtaggctgaggcgggaggattacttgagcccaggaggtcaaatctgcagtgagccatgatcataccactgcactccagcctgggtaacagggcaagaccctgcctcaaaaaaaaaaaaaaaaaaaaagaaaaga

SEQ ID NO: 7910 - DNA, 3592 bp, Homo sapiens
  SIMILAR (345)..(1619): 1001254mologous to Homo sapiens thrombin receptor,accession number M62424,Smith-Waterman Score=2187.
ggcggggggcgcacagagccagaggggcttgcgagcggcggctgagggaccgcggggagggggcgccgagcggctccagcgcagagactctcactgcacgccggaggccccttcctcgctccgcccgcgcgaccgcgcgccccagtcccgccccgccccgctaaccgccccagacacagcgctcgccgagggtcgcttggaccctgatcttacccgtgggcaccctgcgctctgcctgccgcgaagaccggctccccgacccgcagaagtcaggagagagggtgaagcggagcagcccgaggcggggcagcctcccggagcagcgccgcgcagagcccgggacaatggggccgcggcggctgctgctggtggccgcctgcttcagtctgtgcggcccgctgttgtctgcccgcacccgggcccgcaggccagaatcaaaagcaacaaatgccaccttagatccccggtcatttcttctcaggaaccccaatgataaatatgaaccattttgggaggatgaggagaaaaatgaaagtgggttaactgaatacagattagtctccatcaataaaagcagtcctcttcaaaaacaacttcctgcattcatctcagaagatgcctccggatatttgaccagctcctggctgacactctttgtcccatctgtgtacaccggagtgtttgtagtcagcctcccactaaacatcatggccatcgttgtgttcatcctgaaaatgaaggtcaagaagccggcggtggtgtacatgctgcacctggccacggcagatgtgctgtttgtgtctgtgctcccctttaagatcagctattacttttccggcagtgattggcagtttgggtctgaattgtgtcgcttcgtcactgcagcattttactgtaacatgtacgcctctatcttgctcatgacagtcataagcattgaccggtttctggctgtggtgtatcccatgcagtccctctcctggcgtactctgggaagggcttccttcacttgtctggccatctgggctttggccatcgcaggggtagtgcctctcgtcctcaaggagcaaaccatccaggtgcccgggctcaacatcactacctgtcatgatgtgctcaatgaaaccctgctcgaaggctactatgcctactacttctcagccttctctgctgtcttcttttttgtgccgctgatcatttccacggtctgttatgtgtctatcattcgatgtcttagctcttccgcagttgccaaccgcagcaagaagtcccgggctttgttcctgtcagctgctgttttctgcatcttcatcatttgcttcggacccacaaacgtcctcctgattgcgcattactcattcctttctcacacttccaccacagaggctgcctactttgcctacctcctctgtgtctgtgtcagcagcataagctcgtgcatcgaccccctaatttactattacgcttcctctgagtgccagaggtacgtctacagtatcttatgctgcaaagaaagttccgatcccagcagttataacagcagtgggcagttgatggcaagtaaaatggatacctgctctagtaacctgaataacagcatatacaaaaagctgttaacttaggaaaagggactgctgggaggttaaaaagaaaagtttataaaagtgaataacctgaggattctattagtccccacccaaactttattgattcacctcctaaaacaacagatgtacgacttgcatacctgctttttatgggagctgtcaagcatgtatttttgtcaattaccagaaagataacaggacgagatgacggtgttattccaagggaatattgccaatgctacagtaataaatgaatgtcacttctggatatagctaggtgacatatacatacttacatgtgtgtatatgtagatgtatgcacacacatatattatttgcagtgcagtatagaataggcactttaaaacactctttccccgcaccccagcaattatgaaaataatctctgattccctgatttaatatgcaaagtctaggttggtagagtttagccctgaacatttcatggtgttcatcaacagtgagagactccatagtttgggcttgtaccacttttgcaaataagtgtattttgaaattgtttgacggcaaggtttaagttattaagaggtaagacttagtactatctgtgcgtagaagttctagtgttttcaattttaaacatatccaagtttgaattcctaaaattatggaaacagatgaaaagcctctgttttgatatgggtagtattttttacattttacacactgtacacataagccaaaactgagcataagtcctctagtgaatgtaggctggctttcagagtaggctattcctgagagctgcatgtgtccgcccccgatggaggactccaggcagcagacacatgccagggccatgtcagacacagattggccagaaaccttcctgctgagcctcacagcagtgagactggggccactacatttgctccatcctcctgggattggctgtgaactgatcatgtttatgagaaactggcaaagcagaatgtgatatcctaggaggtaatgaccatgaaagacttctctacccatcttaaaaacaacgaaagaaggcatggacttctggatgcccatccactgggtgtaaacacatctagtagttgttctgaaatgtcagttctgatatggaagcacccattatgcgctgtggccactccaataggtgctgagtgtacagagtggaataagacagagacctgccctcaagagcaaagtagatcatgcatagagtgtgatgtatgtgtaataaatatgtttcacacaaacaaggcctgtcagctaaagaagtttgaacatttgggttactatttcttgtggttataacttaatgaaaacaatgcagtacaggacatatattttttaaaataagtctgatttaattgggcactatttatttacaaatgttttgctcaatagattgctcaaatcaggttttcttttaagaatcaatcatgtcagtctgcttagaaataacagaagaaaatagaattgacattgaaatctaggaaaattattctataatttccatttacttaagacttaatgagactttaaaagcattttttaacctcctaagtatcaagtatagaaaatcttcatggaattcacaaagtaatttggaaattaggttgaaacatatctcttatcttacgaaaaaatggtagcattttaaacaaaatagaaagttgcaaggcaaatgtttatttaaaagagcaggccaggcgcggtggctcacgcctgtaatcccagcactttgggaggctgaggcgggtggatcacgaggtcaggagatcgagaccatcctggctaacacggtgaaacccgtctctactaaaaatgcaaaaaaaattagccgggcgtggtggcaggcacctgtagtcccagctactcgggaggctgaggcaggagactggcgtgaacccaggaggcggaccttgtagtgagccgagatcgcgccactgtgctccagcctgggcaacagagcaagactccatctc

SEQ ID NO: 7911 - DNA, 7884 bp, Homo sapiens
  SIMILAR (1200)..(3320): 921254mologous to Mus musculus putative,accession number AK004884,Smith-Waterman Score=3407.
ggcttttcttccccttctgattttcccctccccccttttctccctttccgggtttggttccccccttttcttcccctctcccccctccttcccaagcccctttcccctcccccgtcccagtcccccctgcttcccagccctcggccccggggaagccccggccgagaaaagcccgcccccagaagcgcgccgccgccggccgtcggggccgagccgcagccgagcggccgtgggcccgggcggcgggcggagacgtgggcgccctccccgccaaggcccgtgcgagaggttagacttgtttcttatatgtgatgccattccagcactggactcatggaggctgagcatttattcaggagtccatagaggccactgtattctattgaagaacatgtctaacagtaacactactcaagagaccctggaaataatgaaagaatcagaaaaaaaaactggtggaagaatctgtaaacaaaaacaagtttatatctaagactccaagtaaggaagaaattgagaaagaatgtgaagataccagtttgcgtcaggagacacagaggcggacatctaaccatggtcatgccaggaaaagagccaagtctaattccaagctaaagttggtgcgtagcctggcagtgtgtgaggagtcctccaccccatttgctgatgggccattagaaacccaggatataattcaattgcacatcagttgcccttctgacaaggaggaagaaaagtccacaaaagatgtctctgaaaaggaagacaaggacaaaaacaaagaaaagatcccaaggaagatgctgtccagagactccagccaggaatatacggactccactggaatagacctacatgaatttcttgtaaatacactgaaaaagaacccaagggacagaatgatgctgctaaaattagaacaggagattctggaatttattaatgacaacaataatcagttcaagaagttccctcagatgacctcatatcaccggatgctattacaccgggtagctgcctattttgggatggaccacaatgttgatcaaactgggaaagctgtcatcatcaacaaaactagtaacacaagaatccctgaacagaggttctcagaacatataaaggatgagaagaatacagaatttcaacagaggttcattctcaagagagatgatgccagtatggaccgagatgataaccagactggccagaacggatatctaaatgacatcagactctccaaagaagccttttcttctagctctcacaagagaaggcagatttttagggggaaccgtgaaggactgagccgcacctcaagcagccgccagagcagcacagacagcgaactcaaatccctggagccacgcccttggagcagcacagactctgatggctctgtccggagcatgcgaccccctgtcaccaaagctagcagcttcagtggaatctctatccttacccgaggtgacagcatcggcagcagtaaaggcggcagtgcgggaaggatctccaggccaggtatggcactaggtgccccagaagtgtgcaaccaggtcacctcatcccagtctgtccgggggcttctcccttgtactgcccagcagcaacagcagcagcagcagcagcaacttcctgctctcccacccacgcctcagcaacagccacccttgaataatcacatgatctcacaggcagatgacctcagcaacccctttggacaaatgagccttagtcgccaaggttctactgaagcagctgacccatctgcagctctattccagaccccacttatctcccagcaccctcagcagactagcttcatcatggcttccacgggtcagcccctccccacttccaactattccacctctagccatgcaccacctactcagcaagttctgccaccccaggggtacatgcagccccctcaacagatccaggtttcttactatccccctggacaatatcctaactccaaccagcaatatcgacctctctctcacccggtggcctatagcccccaacgtggtcagcagctgcctcagccatcccagcagcctggtttacagcccatgatgcctaaccagcagcaggcggcttaccaaggcatgattggggtccagcagccacagaaccagggcctgctcagcagccagaggagcagcatggggggccagatgcaaggcctggtggttcagtacactccactgccttcttaccaagttccagtgggtagtgactcgcaaaatgtggtccagccgcctttccagcaacccatgctggtccctgtgagccagtctgtgcaaggaggcctcccagcagcgggggtaccagtgtactatagcatgatcccacctgctcagcagaacggtacgagcccttctgtagggtttctgcaaccccctggctctgagcagtaccagatgcctcagtctccctctccctgcagtccaccacagatgccacagcagtactcaggagtgtcaccttctggaccaggtgtagtggtcatgcagctgaatgtccctaatggaccccagccccctcagaacccatccatggtccagtggagtcattgtaaatactacagcatggaccagcgggggcagaagcctggagacctgtacagtcctgacagcagcccccaggccaacacacaaatgagcagcagccctgtcacatctcctacccagtctccagcaccctctcctgtcaccagcctcagcagtgtctgcacaggactcagtcccctgcctgtcctcacacagttcccccggcctgggggtccagcacagggtgatgggcgctactcccttttgggccagccattacagtacaatctgtccatctgccctcccttgctccatggccagtcaacttacacggtgcaccagggacagagtggactgaagcatggaaaccggggcaagagacaagcactcaaatctgcctccactgacctggggacagcagatgttgtcctggggcgggtgctggaggtgacagatctccctgagggcatcacccgtactgaggcggacaaactcttcacgcagctcgccatgtctggcgccaagatccagtggctcaaggatgctcaggggctgcctggagggggtgggggggacaacagtgggactgctgagaatggccgccactcggacctcgctgccttgtacaccattgtggctgtgttccccagccccctggctgcccaaaatgcctcccttcgtctcaacaactccgtgagtcgcttcaaacttcgaatggccaaaaagaactatgacctgaggatcctggagcgagccagctcccaataaatggaggaggggaaagggactgtcacagaagaagcaagggcagggtggagggggttgaaggatcctgacagaccatggacagaggcaggaagtaaggaaactgatgttaaactggaacctaagacagtgatgaagatggaaacacagatacctacactggcattggactccttcttgctcccctgccatgggtcctctctttttccctggttgaccccccttgcatcactcttcttcccatcctcttctttttttttttttttttttttttgagacggagtttcgctcttgtcaccccagctggagtgcagtagcacgatcttggctaactgcaacctccagctcctgggttcaggtgattctcctgcctcagcctcccaagtagctggcactacagacacgcgccaccatgcccggctaattttctgtattttttagtagagacggggtttcaacatgttggccagggtggtcttgaactcctgaccttaggtgatctgcccgcctcggcctcccagagtgctgggattataggtgtgagccactgcgcctggccaccactgcattcttatgctgagaaatgggaaggagctaagtgtggataaaggctgaggggcttctgatgtcgtctgaaaaagtaatctgaaactacagaccaggggccgactacaaaggcactgtgcaagctggaagcctgtcacttccctgtgtttgtctatgcccctcccattcccactgtttctctatcctgggctgctgcctcctccactcccaggcttggaggagacactgggttgggggagggggagaaacagttaccacagaagaggaggggagcccgggtggcaggggctgcagggagaggcacagaggagtgccaaggcgcaggtggctcctgggtagaggtggtcactctcgcccactcccccagtaccaggaacccttcccagtcctccctgctttccctcctgggagtcctggctctctctcacctccccgtgttcagtcctacggccacaactgccccactcgggtggaagtcagcacagagaccagtctcctgggagaggggagaaggtgaattcaagatgatgtctttctagtgagggaaccagagtgaaccccttgtcctcctaacttcaaagccacttactcccaaggagaagatgggaagagagggaagggatacccgggtatcactggagcctgaacagggagtgataccaaaatatttaaccacagaactgatgccaatagctgtgctggagattaaccatttaggtgctggatcaagaggaagtctgaggggttctgggggcggcagggagtgcccaggtggtactagaagcatcagcttttaccagtcagtacagaaaaattaatatttgagtagccagtgcagccataccagtacaaactggccacctctgggaggcagaaggcaaggtgctggggaaggcgtggtggccacaggtgtcctggtgggtgtggcatgggggatccaggggcacagggctctaccttgaggtcgatgctccaggccagtgcatggctctccccatcccacaggcagagctgccggtcgtggccgcaggtgaggaagcggttctgggaggggtgtgtgcagagcccccagagctcatcagtgtggccctgcagcacagcatgactgtcactcctgcccctctctcacacccctttgtcccttcctcccctgagcccttaacccccaacctggattacaggggagaagccctgggccaggtctcccctcagcaatgcattcttcgtggttcccaccagcagctcagagccaagcccttcagcaatggctcgcacggccccgaagtgctcgggaatctgcagagtggtagcagaatgtcaagagcccactgactattgctcttctccctcactcccttgaccccagcccagccctcacctcagcctcctggagggccaccaacccgggcccccactgtaccagccggcggtcccgcccgccaccactcagcactgtcccgtccctccggagacacaaggcgaagatagaaccttcatgagcgtgagcctgggccacaatcccataggtctctgttggcaaagccccaggtagatcatgttttgggggtgcaggggagtgagaaacagggccagcttggctgtcgcaatacagtaagaactcccagccattgcatgcactgactactatgtctcatcctcatactgccaacacatctgttattctccccattttacaaacaggacaactgagactcacagaaatgaggtaacttcctaaaggcaaggcaactaatagcaaaactggaatctgaacctgagatctggcaaacacaaagctccagccgtttctcctttgctgtgctgcccacacgcttctagactagcccccaagagaactatcaactctcaaggtaaaaaggtgggaaacctggctgggcgccgtggctcacgcctgtaatcccagcactttgggaggccaaggcgggcggatcacctgaggtcaggaattcgagaccagcctggccaacatggcaaaaccccatctctactaaaaatacaaaaattagctgggcgtggtggcgtgtgcctgtacttccagctacttgggagactgaggaaggaggatcacttgaacctgggaggcagaggttgcagtgaaccaagatcgcgccactgcaatccagcctgggcaacagagtaagacctcatctcaaaaaaaaaaaaaaaaaagatgggaatgggaaaccctctcctctgttcccacagaacctctggagtactacacttcccagatgcccctcccagccacatacctttggcgccacccctgcctggggtcttggaatctgaagggctccgcccccaggtgagaatgttcccctctgagtctccagtgagaatgtctccatccggaaggaacacaaagcaagggataaacttgggtttcttgtatttctagtgggaggggagagcagacagtagaggtcaaagggaagggcaaagattaaaagtcgcagggcaggccaggtgcagtggctcatgcctgtaatcccagcactttgggaggccaaggcgggcgggtcacctgaggccaggagtttgtgaccagcctggccaatatggtgaaatcccgcactgcactccagcctgggtgatagagcaaggcactgtctcaaaaacaaaaaaaacaaaaaaaaaacgggcatgatggccaacatgatgaaaccgtatctctattaaaaatacaaaaatcagccggcgcgcatctgtaatcccagctactccgggaggctgaggcaggagaattgctcgaacccaggaggcagacgttgcagtgagccgagatcttgccattgcactctggcctgggtgacaagagcaagactccgtctcaaaagaaaaaaaaaaaaaggtcacaggggcaggtgggggttagggaacctcagggtccatagtactcagcccagtgcttcctcttccactctgccctccccatcaccttccacttatccatgcctcaccccaaagacaccctgtttccgggtaagggtcccattcccaggaacccctactccaccactccaattccagaagtggacgtgagatttcccactggtgacgatgcagctgctgtcacgagggttgaagccaacggccaggactgagtcatttgtactctgaagggaagacactagattcagccaccccaagccctgggtaccttcattctacttgactctcctcaatttgcatcatgacagctggctggcagaggtccagaaaccccaggacaacccttctttcaaaaccctggtcccctaagagcactatttcctgtcaatcataattaatcaccctaatacctaacacattatgcctcatgaggtcagaacccatgtcacaaatgaagaaactaagggtcagagaagctaggagatttgccccatgtgacccagccaaaaaggaaggaaatgtatgggtgagtctggagctccctgcactccaccactcccacccccaacctcagagcccctccaagccacatggactcctcaccttgatctcagccagcttcattccccggctgcagtcccacaccgacagcatgtgctcattggaatcatccaccacacaaagaaaggcaccctgatcctgaagaagggtgacacataggaggtgcagagtgaaccctggaggtccaggggttcatggtcattaggttaagaggtaccatcacagatggagagggcagaaaaagttgacacacatggccctttctcaagagaaccagctgggtggggttcaggaaggccagaacttccaaggcttcctggtgacatgcaagagtggggttcctaggcaagaatgggggtctagaggcttcagggccagctcaccgcagctgaaaaggccagggccccaacaccccgctcgaaggcccccagtccaatctcctgcagtttcaacagcgtctctgagtcccagatgtgaaccacaaggctgcaagggctggtggaggaagagtcacaagtgtgaa

SEQ ID NO: 7912 - DNA, 551 bp, Homo sapiens
atgcccacactagcctctccaggggctctgcccttggcatccccgtcccccacctgggctctggcagagaagtcaggcgggaagaagccggctgagtgcccgccactcctctgtggtcgtgtgcgcgcgggcgcgcacacacacacgcacgcatgcaccttccctaagcaggaagctgctctttgccaagatcgaatggaattcagatttccagagggtgtccttggcctccagctctacggctgcatgatgaagaaaggtcctagtgtgtgtgccgggggctgggagagaggggcctccagctctgctcacatctatctgggccccaagaaaaacccacaactggctgtgctctccccagccacacccagccttggtcacattccttcccttcctgagcccacactgggtggccccggcaaaccagcttccacacctccctccccaccggcagggagacctagcccaagcccccatggggcagccagcaagtacaaatgaggggctgcaccccaggcccaaagagccagaaagcacggagggctcgtgcc

SEQ ID NO: 7913 - DNA, 375 bp, Homo sapiens
ggcacgaggacacacccttgttcattctccttgagaagcagctattatcaacagaacattgacagaacctgtgtttggggaaaggactgatggctttgagtctaggttggaaagcacacaggaaccactgtggtctcctcttgcaggctctgcgaagcagtggtcttctcttgtttccctgtggccagtgtccctggagaggagctggaagctttttggaccctgagataaaggctttcctggaggagaacactgaagtcaccagcagtggtagcctcacccctgaaatccagttgcggcttttgacccccagatgcaaattctggtgggagagagctgacctgtggccccacagtgatccttactgggcaatct

SEQ ID NO: 7914 - DNA, 374 bp, Homo sapiens
  SIMILAR (48)..(371): 761254mologous to Homo sapiens fau,accession number X65923,Smith-Waterman Score=402.
caacagcccatcttcccgttacctgagaccgccgttcagtcgccaatatgcatctctctgtccgcggggaggaactgcacaccttcgaggtgaccggccacgaaacggtcgcccagatcaaggctcatctaacctcactggagggcattgccccgaaagatcaagtcgagctcctggcagacgcgcccctgaaggacgaggccactctgcgccaaagcggagcggaggccatgactaccctggaagtagcaagccgcatgcttggacggaaagcccatggttccctggcccgagctggaaaagttagaggtcatactcctaaggaggccaaccaggactggaagaagagcatgacaggtcgtgctaagcggtgc

SEQ ID NO: 7915 - DNA, 801 bp, Homo sapiens
  SIMILAR (1)..(690): 1001254mologous to Homo sapiens carrier protein-like; similar to Q01888 (PID:g266574),accession number AC004973,Smith-Waterman Score=1186.
atggctacgtggaggcgggacggccgactgacaggcggccaaaggctgctgtgcgctgggctggcggggacgctcagcctcagcctcaccgcgcccctggagctcgccaccgtgctggcccaggttggcgtcgtgcgaggccacgcccggggaccgtgggccacagggcaccgggtgtggcgggcagaggggctccgggccctgtggaaggggaacgcggtggcgtgcctgcgcctcttcccctgcagcgccgtgcagctcgccgcctaccgcaaatttgttgtgctgttcacagatgacctgggccacatttcccagtggagctccatcatggctgggagtctcgcaggcatggtttccaccattgtaacatatcctacagacctcatcaaaacccggttgatcatgcagaacatactggaaccatcgtacagggggctcctccatgctttttctactatttaccaacaggaagggttccttgccctttatcgaggggtttccctcactgttgtaggtgctctcccgttctctgctggctcccttcttgtttacatgaacctggagaaaatctggaacggaccccgagatcagttctctctcccacagaactttgctaatgtctgtctggctgctgcagtgacccagaccctctcctttccctttgagaccgtgaagagaaagatgcagaatattcaactttttctattcattggtgtctccatttcatcaaatataaaaccaagtgtgagcctgttgctttataccccagtggactttgaccccatcacagctcacaag

SEQ ID NO: 7916 - DNA, 1388 bp, Homo sapiens
  SIMILAR (1310)..(1387): 1001254mologous to Homo sapiens hypothetical protein,accession number AL590525,Smith-Waterman Score=133.
acaaccatcatgactttgcatctatttgaaacttcttcttatgctctatatatgcattatttggaaggctcccatacgaggaaaaagatgatcaggattacccccaaatacccacttctagtgtatcttaccccagtttatagtgggttgttgtggtaggggtatagaatgcagatggtgtagaatgcggtgttggctggattctcccagatgaggtcactgttctagctctcaggaagagaaagcaaaactaaggttatggggaagactgggacccttacccgtcccatttagatgtcattgaacttcatctgaaacctttttcttttcttttctcttttttttgagacaaaacaaaacaacagattgtattggaaagtctcaggtcaaactgagtgaaactaggctgacgttggtttgtgcaagctttgcattgactacaagtgacccagtggctgacctcacaacgtggtatccactcagccgcttcaattacctgttgctttgagatgtcatggcaatgccctttctttggtgtcatgtttctattcagagcgtaaattgtacattttatcactgctagactctggttataaaatctcgtggaatgccatcatgatacactcttgttgggaaaccttctcatagtgcaggtgttcacagggacatcagtttggagatctgaggtggtgcatggccaaaccatctcatttcccagagcagcagacagcagtagcttctcatccctcctcaggtgctcagagaagaggagtcgtgtatcggtgattgcaacatgctgtcatgtcgagtgcacttctagttccattccattttatagagttggttttttaggcttcggttttctcgttttgaagaacttctttaattctcgtaattcctggggctgcaaactctgatcgactcctggggtcaatttatagctcagtggagacagaatgtaaccattttgataaagacagattctcttgcagaactcaaaggtgctaaacataattccaaaatatggaactatcttcagtaaattggctgtcaatccattccagagccccaggaccccctgggccttcactatctgccggaagcagtccactgctcctgagaaatggacatctactcctccactgtgtgggaggtaggggctctgagcctgacaggaaacagaagctgggatgaggcgattgaaacattaggaaataaatgtcctagtggaaggagccagggtctcaagtctacattctggatgctgggttcctggccaagatgatggcaaagaatggctgctgtggggttgatcatgcagaacatactggaaccatcgtacagggggctcctccatgctttttctactatttaccaacaggaagggt

SEQ ID NO: 7917 - DNA, 1059 bp, Homo sapiens
  SIMILAR (154)..(471): 861254mologous to Mus musculus putative,accession number AK010346,Smith-Waterman Score=473.
atggagccttccaatatctgcaagttaggcttgctaatcaggcccaaagctgatgattgtagagttgtcttggcaaaacaggaaattacaaggttactggaaacattgcagaaacagcagcagcagtttacagaagttgcagatcacattcagttggatgccagcatccctgtcacttttacaaagactgatgaagtatttctggaagcccagattcagaatatgacaacctcacctatgtttatggagaaggtttcactggagccatctattatgtacaatgtaacagaattaaattcagtcagccaagctggagaatgtgtgtctacgtttgggtcaagagcatatttgcaaccaatggatacacgccagtacttatactgcctaaagccaaagaatgaatttgcagaaaaagcaggcatcattaagggagtaacagtaattggaaaattggatatagtatggaaaacaaatctaggtgaaaggggaaggttacagaccagccaacttcaaagaatggctccaggttatggagatgttaggttgtctttggaggcaataccagataccgtaaaccttgaagaaccttttcatattacctgtaaaataacaaactgcaggtacaagatactaaatattttaggctttgcaggccgtaaggtttctgtcacaaatactgaactctgcatcgtacttcaagagcagccagtagcaaaaaagtacagtggtgtcacaaaagaacagttgactcgggaagctgagcagaaatcacttaaccggaggcgagataatcgagttcacattggaccaaaaatggaaattcgggtcgttacgttaggattggatggtgctggaaaaactactatcttgtttaagttaaaacaggatgaattcatgcagcccattccaacaattgctgttgtgtttgttgtagatagcagtcatagagacagaattagtgaagcacacagcgaacttgcaaagttgttaacggaaaaagaactccgagatgctctgctcctgatttttgctaacaaacaggtctttgctgcaggttag

SEQ ID NO: 7918 - DNA, 1467 bp, Homo sapiens
  SIMILAR (807)..(1466): 971254mologous to Mus musculus putative,accession number AK013956,Smith-Waterman Score=1107.
cgtattgttacctaggggtggtttcttttcctgcagtcgcgatgtgtgattgcagatggaaaacaaagtattttatgcctacgtttctaagatagaagaaatggacttgttgaaaagaagccagtttgtaaaggacacagtaggagaatttaaggtaccaccaccagagagaggttgagagtgcgtttgacttttggttttgtcaaacgcgaggttttccgtttccttccggggcaagttgaacctgtccagcccccgtaggctgtgggtcaaaagtgccggtcaaaatggaagtgaatccccctaaacaggagcacctgctggcgctaaaaggtcctgtttccctctgatttggcaagagagacaatcttgcaataataaattaacattctagctctgaggagttcaactaagaaattttctcatcactaagagtaactggattactgcagaatgactacagaagtaatattacattatcgaccatgtgagagtgatcccacacaactgccaaaaattgcagaaaaagcaattcaagactttcctactcgtccgctatcaagatttataccttggtttccatatgatgggtccaagcttccactcagacctaaaagatcaccacctgtgatttctgaagaggcagctgaagatgtgaaacagtacttaaccattttcagaacatgatgctaagtcacacagttatggtttgcacagtagatctattggagtttcaacctagcttgaaaaagcagtatttaacctggtcacacacactgaaggaacagactaattctggaaatctggtgatgcggctgactaagcctactttattcaccaatatcccagtaacatgtgaagagaaagacttacctggagatctctttaaccagctgatgagagatgatccttcaaccgttaatggtgcagaagttttaatgttgggagaaatgctgactttaccacagaattttgggaatatatttttgggagagaccttttccagttatatcagcgttcataatgatagcaatcaagttgtaaaagacatattagtaaaagctgatcttcagacaagttctcagcgtttaaatctttcagcctccaatgctgcagtggctgaacttaaaccggattgttgtattgatgatgtcatacatcatgaagtcaaagaaattggaacacacatcttggtatgtgctgtgagttatacaactcaggctggagaaaaaatgtatttcagaaaattcttcaaatttcaggttctcaaaccattggatgtgaaaaccaaattttacaatgcagagagtgacctcagttctgtgactgatgaagtatttctggaagcccagattcagaatatgacaacctcacctatgtttatggagaaggtttcactggagccatctattatgtacaatgtaacagaattaaattcagtcagccaagctggagaatgtgtgtcta

SEQ ID NO: 7919 - DNA, 414 bp, Homo sapiens
  SIMILAR (228)..(413): 701254mologous to Homo sapiens zinc finger; Method: conceptual translation supplied by author,accession number U45325,Smith-Waterman Score=254.
cacacgcatggcagcctcttaggacctgtgagagcttcttgccactgcactctcccttgcagagtctccatgctgggggaggcttcggggcttgtacctgcaccttaaccagccgtcgtcacctgacaacacttgttccccttagaaaggacccagagggggccctggctgaaggagagatgggaaaccctctcagtccccacacccctgtggcttcatctggcatgaaacatactggggagaaaccctttgagtgccccagatgtggtaggcgacactttctgaaggagaacctcctgcagcatgacgcccggatttgcatgagccgctcggaacaagtcttcacgtgctctgcgtgccaggtgacattccgtctaaagaagaagctgcgggtgcacaggagtgctcacacag

SEQ ID NO: 7920 - DNA, 359 bp, Homo sapiens
  SIMILAR (225)..(248): 1001254mologous to Mus musculus putative,accession number AK005825,Smith-Waterman Score=39.
tgaggtcctcagaatggcgggcacaggtttggtggctgtagaggttgtggtggatgctctgccggattttgaggaaggttatgaaggccctggtgggcgggaagcggctgcagcgctggtggaggatgaaactcgcagataccgacctactatgaactacctgagctacctgacatccccggattattctgcctttgaaactgacatcctgaatatatgactctgaaagactggctgctcgacaacccaatttaattgcttactatgaaactatattatctttcatccccttcatgtggtcattactttgtcttactgcatgtctataattgtttatctctttatttcccatctcctac

SEQ ID NO: 7921 - DNA, 414 bp, Homo sapiens
  SIMILAR (191)..(409): 731254mologous to Homo sapiens AF-9,accession number L13744,Smith-Waterman Score=272.
  misc_feature (1)...(414): n = a,t,c or g
cccacgcgtccgtaagcgagcgagcgagcaagcgagcgcggggggaaaaaggcagagaatgtccgccatctaccctccgctcctgggcgcgctctcattcatagcagcctcttcatgaattacagctgagggggggcggaggaggggggggtaccacacancaccccagcaaacctccgggcccccaggcatggctagctcgcgtgccgtgcaggtgaagctggagctggggcaccgcgcccaggtgaggaaaaaacccaccgtggagggcttcacccacgactggatggtgttcgtacgcgggtcggagcacagtgacgtacagcattttgcggagaaatgctgtttcctgttgcatgaaagcggtactactctccttcgagtgtactcgcatccctcttacagggtgtaacg

SEQ ID NO: 7922 - DNA, 489 bp, Homo sapiens
  SIMILAR (191)..(487): 981254mologous to Homo sapiens unknown,accession number AF062385,Smith-Waterman Score=528.
tctttttaaactttttttatttaaataaggagaattctttcatatggaaagagctagtacaatcacatatttgaaaggagaaacaataggtactgaaccggagggaaagggcgagggtgagtgtgccagcaccggcctggtgaatccacgattcgatttcccatccaaggtaagtttcccaaaataccgtataaacaaaaggaaacaaaaacaaaacacaaccctctcaggaaccaaacaaaacccccaaatccttttttactacacaaggcatgaggtcaaaagcttgagtacagtgtcccctttagatcacgggagaaaggcgtccacacagagccttagcaggaatttccactctgaggcttcagaacatgctgaagatggggctctgagggtgccactaccatcctggaggccaccaagtggggtggaaacagtgaagagcaggtctcacatgcccgaagaccaccagccaactacacattggtg

SEQ ID NO: 7923 - DNA, 6396 bp, Homo sapiens
  SIMILAR (961)..(908): 501254mologous to Homo sapiens BC85722_1,accession number AC006486,Smith-Waterman Score=44.
tttttttttttttttttatctttttaaacttttttttatttaaattaaggagaattctttcatatggataagagctagtacaatcacatatttgaaaggagaaacaataggtactgaaccggagggaaagggccgagggtgagtgtgccagcaccggccttggtgaatccacgattcgatttcccatccaagggtaagtttccccaaaataccggtataaacaagtctgcacattacacctctaggccatcgtctgcccctttcaaaatatctggtccttacatgggaaaggacaaagagggaaagggccaaaacataaacaaaagggaaacaaaaaacaaaaacacaaccctcttcagggaacccaaacaaaacccccaaattccttttttttaaactacacaagggcatggaggtcaaaagcttgagtaccagtgtccccctttagatcacggggagaaaggcgttccacacagagcctttagcaggaattttccactcttgaggcttcagaacatgctgaagatgggggctcctgagggtgccactaccatcctgggagggcacccagtggggtgggaacagtgaagagcaggttttcacatgcccgagagaccaccagccaactacacattggtggccctggtggagcatggctgggcgacagcgtccatccccaacactgagccacttcctgtcctggatgacttcctgcttaggtccgtcacatttcagaagagagctggctttctggaagcctacgtttcccattcatcacagaacacgacagagtgcacacatcctggtacccttggtcttcaaaggccatttccagcagaccctctaacccaggcttgttctgcaggaagtgaaaagggacaaatgaatatttgaggggcagcctgcagctacttggcacaggggaaccaaacggcaagggagaaggctccaccagagctgccatgctgccgtagcaggccagaccacagcatggctgtgcacctgtgtgtgctcagcttccagaagctgtcactgaccatcccgaaggcagatccagaagataggagggtgacagcacggctggagagcactgatgtcaacgtttaacaaggttccccagtgtccctagaagtggctggaaggaccacagctttggaactgaactgattttcttgaatgtgaaataaagtcatcttttgttttcccccttaaggaacctagagccagagtgtctatgaattccaagtttgaaaacaatatgaatgtttaaaaaaaaacaaaaaacgctgtggggagaagccaacagttaagaaaaccaaaccaaatgcagctggcattgaagtccccagtgggtagatgggcatctgagatgtatacccacactctggacttcatcccactctagtggatggtggacaataccgcaaggccactggtggctgagcaacgagccgcatccccagtgaccaaggcagagctgccagcgtcaggagggcaactttaacaggcaaaagtgagtgggttctgaccccccaatccctacctcagcagcaggaaagggaagtgctggtctccacctgttcccactaaggccccgtggtatcctggcagaagcctctgcatgtatctgcgctctgaggatgggggtttgaaaacaaaataagaccctacgtcctactaccttgagcttggctctaaaaccacgggaaaggaagagatatattgcaccttaaaacatctctgcactaagaactgcatttcattagaccaaggaggggttggggcgctgggaggcctgaggcctgccctcagccccccaagtctcatttaaaacctgcatctcagcgaagagactgcagctcaggtcacacagaggtggtgactgcaccgaacttcacatgcaatttcctggcctttcctgcacagaattaattcagacattatatataaatagagcagtgaaacatttacttctttttttttcacctagacctacaacatcaatacatataaataaattctagtgttttttgtttttttatttggggtgggggaggagaaaggaaggaaataccaggtaagagaaaagggctggagaacaggtgacctttttgtttttattttttctcaaacagcaagtactgtgggtctgataccaggttcacctgaagggtacatcttaacagcatccagaaggctttcttttgacaaatcacacgcaccaccgcatcaggtgggaggggtctggccatgcggctcaagtgtccaggtggagatgaatgtgtggctcccgcaggcctgaactcacccaggaatggcttggcaaggagggccggtggggacagagagggctcatcccaggccccacaagcagccgcctgcagtgggagaaggaaaagcagacaagaagctcaggtagggaatgcctggaactgtcgggtgggcagcccctggggaagggactcaagcataaaggcttgggataaagagggaaaagaccaggtgagggcaggaggggagctgctgaaagatgcaggtgaacagtaaagcacctttcagtaaaactgccctttcccaggcagctctggggtgggcgctgttggtaggaggccgttctcccgcttccttagaattgtgagagcagtaagaagttacttcagcagttcctaagatgctccttccccatgttctacactagacacagagcttagagcccaagcctgagcgctgtcctgcacccgtgagacgctgaaggcagcctctggtggggggtgcatccccggccccctcctctaggtgttctgagccagcctcctctggaggaggaggtagacgctcagtgacccctaagaacagctgagaaacctgaactgtccccttccctttccttggaatgacagaatctggagtgatttccttgtttcttacttaaaaacaagcccagcacacgatggctcacacaagcctctggctggagaagctgccctcccggaggctgcgcaggccctttggaccttggtcagccctccacccagcctcaccctggacctgcccccgccgtctgaagacaaacgagactgatgcctactgcttagctcaggccctcctgtcctgacaacctgggtctgctgctgggagtgaagcaaaggaggaaaaggacaaactcccagtggcctcacttggggaccacacacgggtccactccctccatcaccaagtggtgttcacgatgagctgtgtgggaggtggagacaggtccagagaaagcagcaggctccggaagaggaaggaaggaaaatgacaggttacagaaggcttcagggaaagaaatgtgtgaaaaacacagcacccccgcagggcagggtatggagccccagaagcagagcccacggggcctgggatgggcctgtggtatgtcagctcaccccatctgggccaacctgggagccaccagcagccatctccatgatttgtctctggtgcccagcacatccactggctttagaggagcccaggacagggaccctgtgtgattctcatgctaaaactgtcatcaacttcatgggctgcctgtaagcgccctgggctcatcaagccaggagctggaacccaactatgacccccccccctcccccaacctgcctgctgctctgagcaccccattgcttcccaggcggggagccaggcaccagaatgctcgcaatcggtgccctcaagaacctccttttctttttgcaaataacctcaagggtgaaccagctgaggaatcaggaggggatgcattcttaagagtcacctcttaaggtactgcagtgacgtatcaaactaaacaggacagaggctagagatggaagggagcggaggggctggcaagaaacatataaaagttcagctatacacatggagcttgcgtttttgttttcttttcctttcccctttgtaaaaaccttggctacattttaaaacaaaaagcctcaaagtaaaatgaccctgctgccaaatcactgtgcctagggatgggcggctgggccggaagcactgctgagaaggcgccctggctgcgcggcaggacagggaggaggcagggagggcaaatctgcactgcacaggaggcgtcactccacagtcacggtaggagcagatgggatgaaggagtcgtctgcttttttgtttcgtatcaaagcaagcgggtcaatgccatatatccacgggtgcaagctggttgacaacggagctttcgggagtggagaggagggaggtctctcagtctgggccacgcatttggacggtggatctggtgaggctcccgagtgtcggctgtgtcgaggccgcatggcggcaccgtcctcagtagggagaggcgaggtggcagccaggcactgtcaggccttactctcctccactttgacagcccgaggcttgatcgctccggttcgcttcatctgggaggcagccgagggggcctcctgcagcttcacggctcccaggctgggtttctcatccactcgttgttttgcctgttgcacgtagtgtccctgcacagagcccatgttaactgctgatccagagggcttcccactggggctagcagagctaggcctgtaggtctgtggcgatggcacggggcctcctgaagggacattctgtttactgtcggcaaagtggaagcctttcatctccatctgagagggctctctgctggtgttcaggactggcggctgggacccgggcggaggaatccttcggggggccccaacggagaggctctgcccaggtggcagctgaatagactggggcaggatcagtggctgctgcccggagccgtaccgaggcagtggcatggtcagctgtgggagctgggagtccaacatctgggaggcacccaggccagcagcctggctgagctggccctcgtagaccagggcttggttcccgctcatgggctggtagggtgagccagactgcggcttcaccatctccaagggctgcatgcctgggaacgccgagtatggaggcttcaaggctgtgcccccagagaggatcatggtgctgggcggtgacaggctggggtgcatgtacacctgagatctgaagggctgcaaggagctgaagatctcctgggactgggacacaggaagcccacccctcagtccaagctgagcttgtgcctgcagagatgtgtgaagggagatcgggatctgctgggcagcggcggcctgttggtaactctgctgctgaggtatcgtttgaggaaccagccggggctgacttgcaaacacatggccatccaggtacaggggcgggaggtggctgcctggcatagaagcagaaggtgctacagaggccacaggcatgggtggcatggacactccaccgaaggagctgtagttgaccccgctggaggcacccacagaggatggaggctggatgcctgagccagcgccgcctggagagctctgctccggcaaactgggggagttttcccaagccttgcgcgcagactccatcttcagagtaaggtcggcggtggggaaggacattggggagagaccgatggccctctggatgtgatggtcccgccgcaggatggggatactctgtgttaaccctgcattactggccaaggcatcctgaagtttaacaactggactcccagtaggaccagaggcagaaccaggtggcaagctgaaatcggagtcttttggactgactccaaattcaatgggtggcacaggcagcacggagtccacgtgaatctccaccccgttaacaggcgggacgacagccccttgcagccgctcggccccctccgagccctttctgtttttcagagaacgctcgttgccgatgggtcctggtctgtgctccttgctctgtccagagccttgttctgaatccttctgctcagatggctttggagcctgctccttgtggctgtcggccttgggttccgccaggccgggcccgctcatctcctctggcttcagagtcccatatggggagctgcgctgcgaggaggtcgcagacgactcccgagactcggcactcaagtcaacgccactatctccctggctgctcttaaaaccctgctccgcagagccagtctcggtgctgctgaaggcagtgacagctttcctccaggagtcgttggctggggcctgcacagggagagcctggctgctgctctcccagatctcagtgcccaggctgctgccaggcacggtcacgtcaccttgctccagacataagttgttctgcttttttgcaaatcgaggaggaatacgggaggaaaggcctcgacctttgacaggcacctgcacggcctgctccttctttcttctctcttcctccagcaggcggcgctgcttcttggtcaggacttcgatgaagccttcg

SEQ ID NO: 7924 - DNA, 431 bp, Homo sapiens
  SIMILAR (94)..(426): 731254mologous to Homo sapiens nuclear pore complex interacting protein NPIP,accession number AF132984,Smith-Waterman Score=407.
aaggtgaccttgaggatccctgggagctcaggaaggtaggagagcccagaagcagggacagggagctggttggggaggaccagaaatcagggtatcaatactctggctgaccatcgtcatcgtgagactgactttggcggaagtccttggataattatcattattgagtttctgggacgttacaaatttaccattctcttctgcacaatttacctttgggagcctttcctgaagactatcttctggtctcgaaatggacatgatagatccagggatgtacagcaaagagctatgaggtccaaccgctgtctacaggaaggaattaaaattggccctgaagacatctgtactttatggaaacaggcggaaacaaaagttcaagctaaaatccgtaagatgaaggtcacaaagaaagtcaaccatcattacaa

SEQ ID NO: 7925 - DNA, 341 bp, Homo sapiens
  SIMILAR (70)..(270): 791254mologous to Homo sapiens Extended human secreted protein sequence, SEQ ID NO. 225,accession number AAY35976,Smith- Waterman Score=272.
gtggactggattagctgcggagccctggaagctgcctgtccttctccctgtgcttaaccagaggtgcccatgggttggacaatgaggctggtcacagcagcactgttactgggtctcatgatggtggtcactggagacgaggatgagaacagaccgtgtgcccatgaagccctcttggacgaggactccctcttttgccagggccttgaagacttctactcatagttggggaccattgattgccagggtgatcttgagagtagcaactacagcccgtggataccgtgctatgattcgtgccaaattccgaagcattcttcctgctaacgccattggacacg

SEQ ID NO: 7926 - DNA, 419 bp, Homo sapiens
  SIMILAR (38)..(418): 851254mologous to Homo sapiens cardiac ventricular myosin light chain 2,accession number AF020768,Smith-Waterman Score=540.
aattcttctcgggaggcagtgatgggacctttccaccatggaacctaagaaagcaatgaagagagccgggggcgccaactccaacggggtgtccatgttcgaacagacccaaatccaggaatttaaggaggccttcactatcatggaccagaacagggatggcttcattgacttgaacgatctgagagacacctttgctgcccttgggcgagggaacgtggataatgaagaaattgatgaaatgatcaaggacgctccgggtccaaataactttactgcgatcctcacaatgtttggggagaaacttatgggagcggaccctgaggaaaccattctcaacgcattcaaagtgtttgaccctgtcctcaaaagggagctgaaggctgattaccttcggaaaatgctgaccacgcaggcgg

SEQ ID NO: 7927 - DNA, 843 bp, Homo sapiens
  SIMILAR (86)..(217): 811254mologous to Homo sapiens ventricular myosin light chain 2 (AA 1-165),accession number X14332,Smith-Waterman Score=184.
ctcgcacggaaccccgggtcgacccacgcgtccggtggaattcttctcgggaggcagtgctgggtccttttcaccatggctcctaagaaagcaaagaaaagagccgggggtgccaacctccaacgtgttctccatgttcgaacagacccaaatccaggaatttaaggaggccttcactatcatggaccagaacagggatggcttcattgacaagaaccgatctgagagacacctttgcttgcccttggcggaagttgaacgtgaaaaatgaagaaattgatgaaatgatcaatggaggctccgggtccaattaactttactgtgttcctcacaatgttttgggggagaaacttaaagggagcggaccctgaaggaaaaccatttctcaaccgcatttcaaaagtgtttgaccctgaaggcaaaggggttgctgaagggctggattacgttcgggaaatgctgaacaacgcagggcggagaggttttccaaggaaggaggttgaccagatgttcgccgccttccccccctgacgtgactggcaacttggactacaagaacctggtgcacatcatcacccacggagaagagaaggactaaggagggggctcgctgctggcccctgggctctgtctttgcagagtggtccctgccctcatctctctcccccgagtaccgcctctgtccctaccttgtctgttagccatgtggctgccccatttatccacctccatcttctttgcagcctgggtggctatgggtacttcgtggccgcacatcctacagttggaaatccatccagaggccatgttccaataaacaggaggtcgtgatattggtcacga

SEQ ID NO: 7928 - DNA, 452 bp, Homo sapiens
  SIMILAR (227)..(99): 421254mologous to Rattus norvegicus MAP2 RNA trans-acting protein MARTA1,accession number AF308818,Smith-Waterman Score=78.
cccccttttctctttaaaaagggcccccttgtgagaccggggcgcgtctttttttttctcggccccccctccatgcttttttctttaaggtttgggggggggaaaaagaaacctttttgtgtgcccgggggggttttttttaaccccccccgccccccccctttcccctttaagaaaggaaccccccccgggggggggggggggggtttcccaggggggcccttttttttttttcccccccctttttaaggggggggttttcgggggggccccccaaacccagggccccgcccccccccccttttttaaaggggggcccccccccggggggcccggggggggtggccccccttttttttcccccctgcccgggggggggggggggttttttgaaaataaaacccccccccccttccgggcccccccccaataaacccttttttttggggggg

SEQ ID NO: 7929 - DNA, 245 bp, Homo sapiens
  misc_feature (1)...(245): n = a,t,c or g
cctttaccngggncccggggnttgcacctttnttgccggtnttcnccgntnattgggnnatggcgnttcccgnnggaccgntcttgttttattcccccnggttacncnccnttcaaacngggttttngcctnnttgggcaaancngggtggnccgcctttnttgcaantttntcagggccnggcggtnnagggcnatcaantttttcccgtttcanttgtngaaaggaaaaccccccttgggccc

SEQ ID NO: 7930 - DNA, 2303 bp, Homo sapiens
  SIMILAR (191)..(1930): 1001254mologous to Homo sapiens MXR7,accession number Z37987,Smith-Waterman Score=3057.
ccctgccccgcgccgccaagcggttcccgccctcgcccagcgcccaggtagctgcgaggaaacttttgcagcggctgggtagcagcacgtctcttgctcctcagggccactgccaggcttgccgagtcctgggactgctctcgctccggctgccactctcccgcgctctcctagctccctgcgaagcaggatggccgggaccgtgcgcaccgcgtgcttggtggtggcgatgctgctcagcttggacttcccgggacaggcgcagcccccgccgccgccgccggacgccacctgtcaccaagtccgctccttcttccagagactgcagcccggactcaagtgggtgccagaaactcccgtgccaggatcagatttgcaagtatgtctccctaagggcccaacatgctgctcaagaaagatggaagaaaaataccaactaacagcacgattgaacatggaacagctgcttcagtctgcaagtatggagctcaagttcttaattattcagaatgctgcggttttccaagaggcctttgaaattgttgttcgccatgccaagaactacaccaatgccatgttcaagaacaactacccaagcctgactccacaagcttttgagtttgtgggtgaatttttcacagatgtgtctctctacatcttgggttctgacatcaatgtagatgacatggtcaatgaattgtttgacagcctgtttccagtcatctatacccagctaatgaacccaggcctgcctgattcagccttggacatcaatgagtgcctccgaggagcaagacgtgacctgaaagtatttgggaatttccccaagcttattatgacccaggtttccaagtcactgcaagtcactaggatcttccttcaggctctgaatcttggaattgaagtgatcaacacaactgatcacctgaagttcagtaaggactgtggccgaatgctcaccagaatgtggtactgctcttactgccagggactgatgatggttaaaccctgtggcggttactgcaatgtggtcatgcaaggctgtatggcaggtgtggtggagattgacaagtactggagagaatacattctgtcccttgaagaacttgtgaatggcatgtacagaatctatgacatggagaacgtactgcttggtctcttttcaacaatccatgattctatccagtatgtccagaagaatgcaggaaagctgaccaccactattggcaagttatgtgcccattctcaacaacgccaatatagatctgcttattatcctgaagatctctttattgacaagaaagtattaaaagttgctcatgtagaacatgaagaaaccttatccagccgaagaagggaactaattcagaagttgaagtctttcatcagcttctatagtgctttgcctggctacatctgcagccatagccctgtggcggaaaacgacaccctttgctggaatggacaagaactcgtggagagatacagccaaaaggcagcaaggaatggaatgaaaaaccagttcaatctccatgagctgaaaatgaagggccctgagccagtggtcagtcaaattattgacaaactgaagcacattaaccagctcctgagaaccatgtctatgcccaaaggtagagttctggataaaaacctggatgaggaagggtttgaaagtggagactgcggtgatgatgaagatgagtgcattggaggctctggtgatggaatgataaaagtgaagaatcagctccgcttccttgcagaactggcctatgatctggatgtggatgatgcgcctggaaacagtcagcaggcaactccgaaggacaacgagataagcacctttcacaacctcgggaacgttcattccccgctgaagcttctcaccagcatggccatctcggtggtgtgcttcttcttcctggtgcactgactgcctggtgcccagcacatgtgctgccctacagcaccctgtggtcttcctcgataaagggaaccactttcttatttttttctatttttttttttttgttatcctgtatacctcctccagccatgaagtagaggactaaccatgtgttatgttttcgaaaatcaaatggtatcttttggaggaagatacattttagtggtagcatatagattgtccttttgcaaagaaagaaaaaaaaccatcaagttgtgccaaattattctcctatgtttggctgctagaacatggttaccatgtctttctctctcactccctccctttctatcgttctctctttgcatggatttctttgaaaaaaaataaattgctc

SEQ ID NO: 7931 - DNA, 473 bp, Homo sapiens
  SIMILAR (78)..(227): 901254mologous to Homo sapiens Tat-SF1,accession number U76992,Smith-Waterman Score=237.
cggcggagcatgccagctccagcgtcatttcggcctcttagttcttctgaaccctgctcctgagctaggtaggaaacatgagcggcaccaacttggatgggaacgatgagtttgatgagcagttgcgaatgctagaattgtacggagacggcaaggatggtgacacccttaccgatgccggcggagaacccgattctcttggtcagtattcgacggacacttcctactgagtgggaacctggacatttaggcttgttttttcatgatttctgaatatttcttgtttacatatttggtccaattcatggcttttttattatattgtggatttatgtttttatgatgtgtttagttacgcattagttttacttgatatgttattgttttatcaatgtttttttattagcattctgttattttatttctggttgatgtgatttaattatattctgttcatgttgtccggcttattt

SEQ ID NO: 7932 - DNA, 4443 bp, Homo sapiens
  SIMILAR (1291)..(1380): 401254mologous to Mus musculus papilin,accession number AF314171,Smith-Waterman Score=40.
gggcagggaaggccaaaggtccaagggagccggcccagggagccctggccctgacctcccagaggctctagctctgtgggtgaaggctgctgtggcaccagccgggggcaggtctgcacagtggacagactctggtggaagcatcctggatcccagggccaggtcaggcccccagacaggggtgtagacatgctttataagtggggaagggcctgcttcctgagtcggaggctgagaggatggagggtgcagctttagtactgggcacctcagtgacttatatcacacccatgccctgcagcctaccccgtgcggtgcctgctgcccagtgcccatggctcttgcgcagactgggctgcccgctggtacttcgttgcctctgtgggccaatgtaaccgcttctggtatggcggctgccatggcaatgccaataactttgcctcggagcaagagtgcatgagcagctgccagggatctctccatgggccccgtcgtccccagcctggggcttctggaaggagcacccacacggatggtggcggcagcagtcctgcaggcgagcaggaacccagccagcacaggacaggggccgcggtgcagagaaagccctggccttctggtggtctctggcggcaagaccaacagcctgggccaggggaggccccccacacccaggcctttggagaatggccatgggggcaggagcttgggtccagggcccctggactgggtggagatgccggatcaccagcgccacccttccacagctcctcctacaggtgaggcccaccttccccaggtgagggggttaggacgcccagacaaggagcatgccagttggagctaaacccctgaagtcagccggccctccctccccatccctaacttctgtttctcccgagagccctgcctggtgggccttgttgccatcattctacagatggagaagctggggcttcagagacttgaggctactctgatgtctaatagacatctgtgcagatggtggctccggggttctccatcagatctcgccagtataccccggggcctgtctggctggaaaagtttattggcttcgtgacctttggcaagtcacccaacttctccaagcctcagtttcttgacctgtaaaatggtggcattaccttctgccctgtatacctcacaggtgtgggttctggtcaagatgactcctgggactggatcatattaatgaaggatttgggaaggttaaaaacaaaattaaaagcgttgtgttccacatgggtcgagcgtgtagtttagcccccacatgaacctggtgtgtgccgtccctcccgacctctccccaccccttgggctttgcacctaccttgttgctgctacaagaacaggttgaggcagtgatgcttgggggagccgggggcaggttggggagggtagattcctgaatccatgggcttctggggctctgcctcccatagggaccctctagccccaaaagtgcctgtgacaggatgggccccaagctgtctgtcatggaacacactgattagggtggttctggtcctggcgctcatgccagtcagcagatctcacttcccacctctccaggattagcttggcaggtgtggagccctcgttggtgcaggcagccctggggcagttggtgcggctctcctgctcagacgacactgccccggaatcccaggctgcctggcagaaagatggccagcccatctcctctgacaggcacaggctgcagttcgacggatccctgatcatccaccccctgcaggcagaggacgcgggcacctacagctgtggcagcacccggccaggccgcgactcccagaagatccaacttcgcatcatagggggtgacatggccgtgctgtctgaggctgagctgagccgcttccctcagcccagggacccagctcaggactttggccaagcgggggctgctgggcccctgggggccatcccctcttcacacccacagcctgcaaacaggctgcgtttggaccagaaccagccccgggtggtggatgccagtccaggccagcggatccggatgacctgccgtgccgaaggcttcccgcccccagccatcgagtggcagagagatgggcagcctgtctcttctcccagacaccagctgcagcctgatggctccctggtcattagccgagtggctgtagaagatggcggcttctacacctgtgtcgctttcaatgggcaggaccgagaccagcgatgggtccagctcagagttctgggggagctgacaatctcaggactgccccctactgtgacagtgccagagggtgatacggccaggctattgtgtgtggtagcaggagaaagtgtgaacatcaggtggtccaggaacgggctacctgtgcaggctgatggccaccgtgtccaccagtccccagatggcacgctgctcatttacaacttgcgggccagggatgagggctcctacacgtgcagtgcctaccaggggagccaggcagtcagccgcagcaccgaggtgaaggtggtctcaccagcacccaccgcccagcccagggaccctggcagggactgcgtcgaccagccagagctggccaactgtgatttgatcctgcaggcccagctttgtggcaatgagtattactccagcttctgctgtgccagctgttcacgtttccagcctcacgctcagcccatctggcagtagggatgaaggctagttccagccccagtccaaaatagttcatagggctagggagaaaggaagatggactcttggcttcctctctctggctggcaaagggagttatcttctggaatacattagctctttcaaaacccacccagtgtttagcctcaacggcagccagttaccagcttctctctgtagccttcagcagtgtttgcatctctgacataaccacaggctgctgttttcaagaagagcaatctgtttggataagaaaaacctttactttacagcttccctttataatttgttacacaggaatagttaaatgcatttgtttgtttgttttttgagacagagtttcactcttgttgcccaggctggagggcaatggcgcgatctcagctcactgcaccctctgcctcccaggttcaagcgattctcctgcctcagcctcccaagtagctggtactacaggtgcgtgccaccacacctggcttattttagttattttagtagagatagggtttcaccatgttggccaggctggtctcggaactcctgactgcaggtgatccgtcctccttgggctcccaaagtgctgggattacaggcatgagccaccacgcccagccatcaatgcattttttttattttttttttgagacagagtttcgcacttcttgcccaggctggagtacaatggtgcgatcttggctcactgcaacctccacctcctgggttcaagcgcttctccagcctcagcctcctgagtagctgggattacaggtatgtgccaccatgcctggctaatttttaggtttttctttcacatagacggggtctcactctgttggccaggctggtttcgaactcctggactcaagcagttccccccacctcagcctcctaaagtgctgggattacaggtgtaagccatcaggcctggcctccggtacactgtactttgaaattagaaaaacggttaacagatccagctctgactccagccccacaaggacacagggttcctttccctggagcagatgcccctagctcccctactgggggccctctattgcttagggagcaatggacctttagacagcggccaaggtgacaggcaccttggaagaggcacttagagtgagcagtcttgggtcatcatcaaggaggtaccagtcttgggctggctgaggggtgaggccagaaggaaccatcgggaactgaccggtgagctgagtcaagcggagctggcgcagagcgtggctggagttggtgttatagttcaacatgacgaagatggcaaacttcccatcgtagacctgggtccctcgcaccacgcggaggttgggcaatggtagagtagagaattcattcatggccacgaggacatagcctgtcacttctcgaatccactgcaggaaggagaggtcggcattgtgtcccgtgagcacaatctcaaggttccccatcaccacctcacacctctcgtagagcttgtacagtgtctggtattggttctcagcatcgccggtcacactcaggccattcagagtcccaggacacactgcctgagagttgcccacctcggagccccgggccaggctgaaaagcaagcccagcacctgcagagcgtcgttcgccctcatgactccgcagagggtgaagggagcccagccaagtccggcccgggggcccctaggctaggacatcgaggcaagagccacctgaaccgctggcgaattggt

SEQ ID NO: 7933 - DNA, 1236 bp, Homo sapiens
  SIMILAR (889)..(782): 771254mologous to Homo sapiens cardiac ventricular myosin light chain 2,accession number AF020768,Smith-Waterman Score=134.
tttttttgcctgggccccagacagagacagaagtcagtaccactccctcagtttgctagggaagaagtacagacaacttctactttatctgaaactagaagtcaccctcttaggattagcaggtgtgattactggtgaacgagctatgttcctaccatgtgtcagtccgcttccttcttgtcactgtcactggcaggagaggcattccgatggcatcccaagggacagatgtcatggaagcaaggccctctaaatgcttgagctctttggaagagagggctttggtcatccaggtaacattccaggaaaacgtgatccttgatagaaacagttctgagtggctgcaaaagtctaccttacataaagagtcagcaagattcaataataatgactgcaaggctgtcactagctcatctgcctttgccttccttacacaaggcactgtttgtcagagaaatgtcgtgaccaaatacacgacctcctgtttattggaacatggcctctggatggatttccaactgtacgatgtgccgccacgaagtacccatagccaccctagctgcaaagaagatggaggtggataaatggggcagccacatggctaacagacaaggtagggacagaggcggtactcgggggagagagatgagggcagggacccactctgcaaagacgagccccagggcgccagcagcgaagcccccctcctagtccttctcttctcccgtggggtgatgatgttgcaccaaggttcttgtagtccaagttgccagtcacgtcagggggggaaggcggcgaacatctggtcaacctcctccttggaaaacctctccgcctgggtggtcagcatttcccgaacggtaatcagccttcagcacccctttgccttcagggtcaaacactttgaatgcgttgagaatggtttcctcagggtccgctcccttaagtttctccccaaacattgtgaggaacactgtaaagttaattggacccggagcctccttgatcatttcatcaatttcttcatttttcacgttcactcgcccaagggcagcaaaggtgtctctcagatcgttcttgtcaatgaagccatccctgttctggtccatgatagtgaaggcctccttaaattcctggatttgggtctgttcgaacatggagaacacgttggagttggcgcccccggctctcttctttgctttcttaggtgccatggtggaaaggacccagcactgg

SEQ ID NO: 7934 - DNA, 334 bp, Homo sapiens
  misc_feature (1)...(334): n = a,t,c or g
tcagtatttaaacagatcacatcatgcgtgagtacaagctagtggtccttggttcaggaggcgttgggaagtctgctctgacagttcagtttgttcatgtaatttctgttgtactatattacctattgatcttatgatctctacatatatcatcttctatactattgtttatactctattctctcattttctcttatctgttatttccttcttctcttttattctatatttatttcttttatctgcttcttttcttttctatgtttttatcttttctannnnnnnnnnnnnnnnnnnnnnnnnnnnnnnnnnnnnnnnnnnnnnnnnnnnnnnn

SEQ ID NO: 7935 - DNA, 1005 bp, Homo sapiens
atgaagaggccagatgtaggtgttctgcttgataacgcagctgaggcccagctggacagccacatgaagcccaaacatgggagaaaccccttgtcctccttgatgcggaaggcttgttcaagagggaaagctatgacagagcagtgtatggaggttcgcatcatgaacttttgctccagaacgattgcaggaataaatcaggaaagccaagagaacccacagcgctctgaaggaagcagattgctcctgcaggacccaggggacaccccaaatactggatccttgaggaaagctgccagaggcactggaaaaggccactgcagaagaaaacctccagctgaagtttgtaacaatttgaaccgacagagaatctcctggccagaactcgggggagggcatgaatccagtgtgcagacttcacaggaagccacatccctaggaaaagagggagagtactacatcaagggaacaccctgtgggacaaaagaatctgaacaacagccttcagccctagaccttccctctgacaaagcctacccaaatgagaaggaaccagaaaaccaactctgctcaccagcaatggatccaaatcaagaagaaatccctgatttatctgaaaaagaattcaggttagttaataagctaatcagagaggcaccagagaaagtaattgctattaacaccaagaggacctacattaataactttctaaaagaacagcttattatcaaccattcaaaaggcctgggtgctaccaacactacctgtgggcaagcagtatttcagatcatggcctgctttggactgaaagtcggcagtgaaaaagctgggactggtcgggcagatttcttccctctagctctccatgagtcttatttcagagttggagttgggtgccttgcattggccaagtctgatacacctgccatgggagccagggaaacagcctacggggatcagccctttgagacactgaggagactaggagaagaacatagaacgtga

SEQ ID NO: 7936 - DNA, 293 bp, Homo sapiens
cagagttggttttctggttccttctcatttgggtaggctttgtcagagggaaggtctagggctgaaggctgttgttcagattcttttgtcccacagggtgttcccttgatgtagtactctccctcttttcctagggatgtggcttcctgtgaagtctgcacactggattcatgccctcccccgagttctggccaggagattctctgtcggttcaaattgttacaaacttcagctggaggttttcttctgcagtggccttttccagtgcctctggcagctttcctcaaggatcc

SEQ ID NO: 7937 - DNA, 2335 bp, Homo sapiens
tcagagttggttttctggttccttctcatttgcataggctctgtcagagggaaggtctagggctgaaggctgttgttcagattctttgatgtagactctcccccttttcctatagatgtagcttcctgtgagttgaactgcagttattgttgtctctcttctgggtctgctcactagtgtgaagcggtcatagtgggagattgctacatgttccatgaaggggttgaaagggagatgggatgaagaggaatgaggtgcgttatacagcacagtcaggaaaattttctctccgagaaggtgagagttgagctgaggaattgctggtgatacaaagacagactggggggtgggggtccggtgaatgtgtgctcttttgggcacttcctcttccactatgtcatccaaagaatttggcagaagtggtggatgccactttgaataaatgcaaccatcagttccaaacacccacttctgagagtcatctccactatgtctgtaacgaaaatgtaatttagagattgacatcttctctccacagaaacacttgtaggttttaaataaaatgatcattttccagatagcctggcaggaggactgcccacactctaccaaagattctgccaccatcacttttatctcagcagctaaagctttccctaagacaaccaatttccctgctacaatgctctggtaccagactaaagatagaaaagaggtctcctttggcaggtccattagtccattgattttacatgtaggggcttttgcaaattcaaaagcttttatgggccagacaggtattagaaattcatgaagcagtgagagccagcatgagggctgccaaagggaacggtggagaatatggcaaactggaggatgtatgttccatctaaaggggacatcaccactcagttccttcctgatgggtgtcatgacagaattcagatccagtgccatttcagattttttcttggtgatcagccacacactggctacaggccacaggatcgatggcgctatttgactcctgctgcttgcttcactgcctgagaaactccactttccaatggaaacagaggcatgaaggacaatattgggatctaccttgttctgtagaaaatggttctccaagtccaccttttcaaactggtcaggtatctgttgactggtacagttgaaattaattggaaatccctcacaaacttcccaattgccacatccaggtagcagaacagcattaggatccaaaaaggtcttatatgcaaccatgatatcacctctggcaaatgcactcactcggtcaaaggtcaaacccaaagcaagatttagtggagatctgtatgctctaccataagagacccaaattttttgctcattcttcagcgaaagtggattcttaatttcttggccattctcatcaaaaagccgcattgaagaataattgaggcctggtgggttgatggaagaaccttgaagcctttgatgaatcttgagaagtaatctttccatcatatggtcagtttgaattgggctatccgatcccaaatcttttttactgataccaacagagatctctccagtgtttttaccattttcaaatacctctattttggtcaatttaacaacaaactgaaacacaatgttgtcctctacaatgaaatcttctctgttgcacatgttctcctttctcatcaccagtaagtgctccacaaacctgcaccagtaactgtatcgcattgttagtccaccaacaacaatggctggtttcctcacacctacaaaaacattttcttcacctccatatatttctagcttctcatagtctttaacttttccctccattctttttaaatttttgactttgacccatggaagcttcctccttgaccaatatctccgaccctttcctctttgccttccaacaggcatatagctcttattcttccctgcagctgcatgactgaggactttgatttcaagatgccacctgcagttgcccgctatatgacctctccgcaggcagttcacattatagcagtttgcccctttaaggccagtaggaaagtgtcccactctagtttgaagatttggttgtttaaaagtgtgtagcacctcctccttcgctctctcttcctcctgctccagccgtgtaagacatgcgtcttcctcttcaccttctgccatgattataagtttcctgaggtctccccaaccatgcttcccatacagcatgcagattttcttcctcctttgccaccctgaagacagcaacactaacttctcctcttcctcttcctcctcagcccactcaacatgaagatactcagataaggac

SEQ ID NO: 7938 - DNA, 969 bp, Homo sapiens
  SIMILAR (421)..(969): 671254mologous to Homo sapiens putative p150,accession number U93563,Smith-Waterman Score=605.
agtttttatttttctccttcttaattgatctaacagacaatattttgttctcctcctctcctgaacacatccccactggagaaactggaggtctgtttgtgggagaagtttctgaccttacctggagctgagtcaatttagagagccaaggacccagaagagagacaacaatcactgcagtttggcttacaagaagccacatccataggaaaaggaggacagtactacatcaagggaacaccccatgggacaaaagaatctgaacaacagccttcagccctagatcttccctctgacagagcctacccaaatgagaaggaaccagaaaaccaactctggtaatatgacaaaacaaggctctttaacaccgtacccctacccccgccccacaaaaaaataataaaaaaaattatacaagacattaagggagaaatattgagagcattccctctgagaactggaacaaaacacagatgcccactctcaccactcctcttcaacatattactggaagtcctagccagagcaatcagacaagagaaagaaataaagagcatccaaattggtaaagaggaagtcaaactctcactgtttgctgatgatataatcatttaccttgaaagccctaaatactcctccagaaagctccaagaactgataaaagaattcagcaaagtttccagatatgagattaatgtacacaaatcagtagctcttctatacaccaacagcaaccaagctgagaatcaaatcaagaaatcaaccccttttacaatagctgcaaaaaataaaataaaatacttaggaatatacctaaccaaggatgcaaaagacggctacaaggaaaactacaaaacactgatgaaagaaattatagatgacaaaaacaaacagaaatacatcccatgatcatggaagggtagaatcaatattgtgaaaacaaccatactgtcaacagcaatctacaaa

SEQ ID NO: 7939 - DNA, 1776 bp, Homo sapiens
  SIMILAR (372)..(13): 721254mologous to Homo sapiens NAG13,accession number AF194537,Smith-Waterman Score=448.
tcattctcttctcagttctaggagctttctggagtctttagggttttctacataaacaatcatatcatcagcaaacagcaacagtttgactttcgctttaccgatttggatgccctttatttctttctctttgctgattgctctggctaggacttccagtactaagttgaagagaagtagtgagaatgggcatccttgtcttgttccagtttccagagagaatgctttcaacttttccccattcagtatattggctgtgggtttgccatagatggcttttattacattaaggtatgtcccctgcatgccgattttgctgagagttttaatcataaagggatgttggattttgtcaaatgttttttctgcatctttctctgttgcctctctgattagcttattaactaacctgaattctttttcagataaatcagggatttcttcttgatttggatccattgctggtgagcagagttggttttctggttccttctcatttgggtaggctttgtcagagggaaggtctagggctgaaggctgttgttcagattcttttgtcccacagggtgttcccttgatgtagtactctccctcttttcctagggatgtggcttcagtatttggggtgtcccctgggtcctgcaggagcaatctgcttccttcagagcgctgtgggttctcttggctttcctgatttattcctgcaatcgttctggagcaaaagttcatgatgcgaacctccatacactgctctgtctgtaaccttcgcctattcataggggtaggtgtgggatcagtgcaccaggggtaccatcctggctttgcagtgccactcagtttattctcttcttgttctaagtagaaagctttttgtttggtttccttccctgcagccgcccatgctctttcttgcttctgctgttttatagcacttgtctctgtccgaagttctcgtctgtgtttgctaaatctgtgtttaccaaaagtaagtttcatgagagcatgggctttctttgctaaatctctgcttcctagttcagtgcagggcaaaaataaaggatcagaagtgaggattctagttctggttcctggctcctccagctcattcttgtaatgccctggtgtttccttttcctttttctgatcaggagtcatgcttttctccccatcattccaaacacccagagaggtcagcatagctttccttcttgaacaagccttccgcatcaaggaggacatctctgcttgcctgcaggggacccatggctttcgaaaagaggaatcgctcgccaggaagttactggaagcggggcatggcccactccctgtgctgcttggcagatgtctgctggcaaacccaatccttgtcctctccttacccatctcagactgctggctctctgtcagcaagcatccaactgggctcagccatgggaggagagttgtgtcgttagctgggagttttggcacagttgggcaaaaatggaggattgtggtcccaagccatggagtttcagaccatgcaagctcaggccctcctttgcctccctcgatggctcggctcttccctcccgcctcttgtctgcctcgctcctcaggcttgaggaagagaatcaggatttcctccaggccccaggatggctctttcagttgaagcgccagcaaaaggccaggcgcggtggctcgtacctgtaaccccagcacttcgaccgaggcgggaggatcacctgaggccaggagtttgagaccagcctgggcaacatagtgagaccccat

SEQ ID NO: 7940 - DNA, 810 bp, Homo sapiens
  misc_feature (1)...(810): n = a,t,c or g
cccacgcgtccggatgacccgagtccaattagctgaaaaccttctgtagaaaggtgattgtatgaaaaattcaatcaacattaaaaaagggaagtgaggaggttaatacttacttgaacaaaatattcttaaatgaagttgcatctctttttaaaattaagatatcattcatgcaccatacggtttatcctattaaggtgtaaacttcaatgtttttaatcatattcactaagttgtgcaacatcaccactccctaacttcagaacactttcatcacctccaaaaganaccccataccatttgcaatcactcctcctcctccttcccccagcatccggcaaccactaatctactttctgtccctatgcntgttgcctatcctggacatttcatatagtcaaacaacatgtgggccttttgtgtctgggttctctaagtcaaggagccacaattggagttgattttatgattaagacagtggagattaatggtgaaaaagtaaaggaaaaggggggagagtatcacatcaagggaacatcctgtgggacaaaagaatctgaacaacagccttcagccctagaccttgcctctctgacagagcctacccaaataagaaggaaccagaaaaccaactctggtaatatgacaaaacaaggctctttaacacctccaaaaaaaatcacactagctcaccagcaatggattcaaaccaataagaaatccctgatttacctgaaaaagaattcagcgaggcaccagagaaaagcgaagcctgacgcaaggaaatccaaaaaacaatacgagaagtga

SEQ ID NO: 7941 - DNA, 1551 bp, Homo sapiens
  SIMILAR (574)..(1548): 1001254mologous to Homo sapiens Polypeptide isolated from prostate tissue,accession number AAY02465,Smith-Waterman Score= 1640.
atgttaccagaaagggttcctgatccagaccccaagaaagggttctgggatcttgtagaagagagaattcaaggcgaatccataagctgtaggaaaagaatacagcgggcaagtgtagaagcaggaggctattgcaaggtccagtcaaaagatgatgagggccagaggaggggtggtaaaggcggaaatggtgagaagctgtcagattctgctctgttgcccaggctggagaagctgtcagatattaggaagaagccgccgcggtacccgcttcaccgggcatgctcagtcctccggccaggctttgactgcgggacgccagcgtccggccccctgcgcgcgtccggagtccgggtccctttaaatcgggcaggctcgttgctaggcaaccgcgcggcccgcgctggcgctgcactgcggtggctcagcccggagccggcccggcggggtcgcggtggccagagccgaacggggggctgccgcgcgcgggtggtggttgtctttgaggaagagaggttcgggctctccagacggcatccacgcttccagatattggaagaggtgcctggagaaatggatgctagaagaaaacactggaaggagaatatgtttactcctttttttagtgcacaagatgttctagaagagacttctgagcctgaatcttcttctgaacaaacgactgcagatagcagcaagggaatggaagaaatttataatttgtccagtagaaagtttcaggaagaaagtaaatttaagaggaaaaaatatattttccaactaaatgaaatagaacaagaacaaaatttaagagagaacaagagaaacatttcaaagaatgaaacagacacaaattctgcatcctatgaatcatctaatgtggatgttacaacagaagaaagctttaacagcacagaagataactctacctgcagtacagataacttaccagctctactaagacaagacataagaaagaaatttatggaaagaatgtctccaaaactttgcctgaatcttttgaatgaagaactggaagaacttaatatgaaatacagaaaaatagaagaggaatttgaaaatgctgaaaaagaacttttgcactacaaaaaagaaatattcacaaaacccctaaattttcaagaaacagagacggatgcttcaaaaagtgactatgaacttcaagctttaagaaatgacctgtctgaaaaagcaacaaatgtaaaaaacttaagtgaacagctccagcaagccaaagaagtcatccacaaattgaacctagagaacagaaatctaaaagaagctgttaggaagttaaagcatcaaaccgaggttggaaatgtgctcctaaaagaagaaatgaaatcatattatgaattagaaatggcaaagatccgcggagagctcagtgtcatcaagaatgaactgagaactgagaagaccctacaagcaagaaataacagagccttggagttgcttagaaaatactatgcttcttcaatggtaacatcatcaagtatccttgaccactttactggggattttttttaa

SEQ ID NO: 7942 - DNA, 1377 bp, Homo sapiens
  SIMILAR (87)..(797): 451254mologous to Homo sapiens Membrane-bound protein PRO1198,accession number AAY66746,Smith-Waterman Score=366.
  misc_feature (1)...(1377): n = a,t,c or g
tgggaccctccgggccggacggtttggtctattatttcccgggcgccggcgcggcaaaaggggggaagaggggaggcacttgagaaatgtctttcctccaggacccagagtttcttcaccatggggatgtggtccattggtgtaggagccctgggggctgctgccttggcattgctgcttgccaacacagacgtgtttctgtccaagccccagaaagcggccctgggagtacctgggaggatatagacctgaaaacactggagaaggaaccaaggactttcaaagcaaaggagctatggggaaaaaaatggagctgttgattattggccgtgcggaggccagggcttgttttcctcttgttcgagagggaagctgcggatcttgtcctccctgaaaagcatgtttggaccagctgggcgtccccctctatgcagtgggaaaaggagcacatcaggactgaagttgaaggatttccagccttatttcaaaggagaaatcttcctggatgaaaagaaaaagttctatggtccacaaaggcgggaggatgatgtttatgggatttatccgtctgggaagtgtggtacaacttcttcccgagcctggaaccggaggcttctctgggaaacctggaaggaagaaaggcttcatccttgggggagttttcgtggtgggatcaggaaagcagggcattcttctttgagcaccgagaaaaagaatttggagacaaagtaaacctactttctgttctggaagctgctaagatgatcaaaccacagacttttggcctcagagaaaaaaatgattgttttgaactgcccagctcagggataaccagggacattcacctgtgttcatgggatgtattgtttccactcgtgtccctaaggagtgagaaacccatttatactctactctcagtatggattattaatgtattttaatattctgtttaggcccaactaagggnaaaattagccccaaaaacaaagacttgaccaaaaaatctgaaaaactaaatgaggattattaagctaaaaccctgggaaattaggaggccttaaaattgaacttccaggctgggttcggtggctcacacctgtaatcccagcactttgggaggccaaggtgagcaagtcacttgaggtcgggagttcgagaccagcctgagcaacatggcgaaaccccgactctaactaaaaatacaaaaatcacccgggtgtggtggcaggcacctgtagtcccagctacccgggaggctgaggcaggagaatcacttgaacctgggaggtggaggttgcggtgagctgagatcacaccactgtattccagcctgggtgactgagactctaactaaaaaaaaaaaaaaaaaaagacgac

SEQ ID NO: 7943 - DNA, 2205 bp, Homo sapiens
  SIMILAR (626)..(934): 371254mologous to Mycobacterium tuberculosis proline-rich mucin homolog,accession number AF071081,Smith-Waterman Score=121.
tttttttttttttttttgcgaatctgttgatttatttacggctcggtgagacgacgctggacgcttggttagggtaagggttagggcaagcattagcaagcaggggcatggcctggggaagcacctggacccccagaacataagacaggagggagagatgccatccattcaagcgggcacttatgccccacgaccagctgaacccagaccagcattccccattcaccaccccttactccctcaagatgcaaatgaagctcaggggctgggcggaagctgtgcagggctgtcccacagggaggaccccccgtgtgtctctcgggctgccccaggtggctctgtcccacccttctgtctgggaggctcctttaaggctggggagggcccagaggaaagggagatcctgaggggctggcagattcaggccctccctgcgagctgaggtttgaagaggagagcagaccacccagagtagtgggagaaagcaccggcagaaaagctggcatatccaccgagggcctctctgcttcttttgacctttttcagagtttcagagttatgaaccaaatcgccttcatgagagatgacgaatcacatgctacatagtgggggaggcggcagctggcctggctcccccacttccccaggacctccgcctggaggaagcctgcccagggccgcagccctgcccccaaagaccccaggacagaccagagctcctgctggagccgggtgtccccatgctgacctggccatgtccccaggtcccaccccagggtcacctcctgtagctccgacttctctagtggctgattgcagttcccagaatgtataacatcccagggtgccagagcccacccaagcagccactcctgtccagttccccaagaatgtaataacatccccagggtgccagagcccgcccaagcagccactcctgtcccagttcccagaatgtataacatcctagggtgacagagcccgcccaagcagccactcctgagtcactcgggcatgtcccagaactcaggtccacacagacagtggcaacagctagccctgggcatctaacccccatgaaggggaccctcggttctgcgagagagatccccgaagtgggaactgggcccccatggtgcccagtgcctctccccctctcctctgccactctgccctgcacccagaggcagcgctggaggccttactctaccactcagggcttctcaaacctctggttccacttttctccttataagctttccattttgtaaactcacctcccccttcccaggcttgggggtccaaggaaccccagctggtgggagaagcgtctgcactgtggtgcagggggtggtgagtgagcgaggaggcactagtgtggggcagctacttcacctccctgtgcctctgtgtcctcctctgtcaaaggggcaagataatggctcccattgccgggctgctatacagtgttcagggccaccagtgcagtggggggacccacgtccaacgccaccttgatgcatacaacccggacaagtttactgctgtgatttctgccggcgctgctgtgccggttccctggtgctgcacagccacgcactccccatgagtgggcctgcccagcattagctgagtgccttccgtgtgctctacgccaggtgccaagggcaggccagccaggctgaaccatgtgtggggctgggacaggtccaggctgctggaaaggtggacagaaggaggcaggaggcaggtgtgagaagctgcccaccccacccctcaacaccacagcacttccagctccagcaggtccttgttctcagctgcccctgagccatgggtggccaggtctcctccccttcaccccactgagactcgagacagggaggacctgatcctggagtccctcccagccctggctgaggaagccacccaacccgacaatgggcttgcgcaagccgcgcaagtgactgctcccagcctctcccaagagacttaggaagcccaaagccgcctccctcccggtgaggcatcccaaggcatcgctgggctgcagctgagagggcctcatttgggcactgccttgaggctggcacttgcaggtgggggcccttgggagctctgggaggcacctggcagcctcccagacaccccgggccggtcctaatatccagagcttaggggctacagccacaacctctgacgaaa

SEQ ID NO: 7944 - DNA, 1088 bp, Homo sapiens
  SIMILAR (69)..(1): 911254mologous to Homo sapiens putative p150,accession number U93567,Smith-Waterman Score=105.
ctgtcttgtgccaattttcaaagggaatgcttccagtttttgcccagtcagtatgatattggctgtgggtgagatatgtcccatcaatacctagtttattgagagtttttagcatgaagggctgttgaattttgttgaaggccttttctgcatctattgagataatcatgtggtttttgtctttggttctctggtagaattcagctgtgaatccatctggtcctggactttttttggttggtaggctattaattattgcctcaaattcagagcctgttattggtctattcagggattcaacttcttcctggtttagtattgggagggtatatgtgtccaggaatttatccatttcttctagattttctagtttatttgcgtaccagtaccaaataatataaacagtagtttgtatttctgtgggatcggtggtgatatcacctttatcattttttattgtgtctatttgattcttctctcttttcttctttattagtcttgctagtgttctatcaattttgttgatcttttcaaaaaaccagctcctggattcattgattttttgaagggttttttgtgtctctatctccttcagttctgctctgatcttagttgtttcttgccttctgctagcttttgaatgtgtttgctcttgcttctctagttctgttaattgtgatattagggtgtcaattttagatctttgctgctttctcttgtgggcatttagtgccataaatttcccactatacattgctttaaatgtgtcccagagattctggtatgttgtgtctttgttctcattggtttcaaagaacatctttatttctgccttcatttctttatatacccagtagtcattcaggagcagattgttaagtttccatgtagttgagcggttttgagtgagtttcttaatcctgagttctaatttgattgcactatggtctgagagacagtttgttataatttctgttcttttacatttgctgaggagtgctttacttccaactatgtggtcaattttagaataagtgggatgtggtgctgagaagaatgtatattctgttgatttggggtggagagtt

SEQ ID NO: 7945 - DNA, 1926 bp, Homo sapiens
  SIMILAR (16)..(813): 991254mologous to Escherichia coli O157:H7 Mg2+ transport ATPase,accession number AP002568,Smith-Waterman Score=1353.
  misc_feature (1)...(1926): n = a,t,c or g
atgttctctgattccttgacgccgatgcataaagaacgcattgtgaccttactgaagcgcgaagggcatgtggttggctttatgggcgatggtattaatgatgcgcccgccttacgcgctgcggatatcggcatttctgtggacggcgcggtagatattgcccgtgaagcggctgatatcatcctgctggaaaaaagcctgatggtgctggaagagggggttattgagggacgtcgcactttcgccaacatgctgaaatacatcaaaatgacggcgagctctaacttcggtaatgtgttcagcgtgctggtagcgagtgctttcttgcccttcctgccgatgttgccgttacacttgcttattcagaacctgctgtacgatgtgtcacaggtggcgatcccgtttgataacgtcgacgacgagcaaattcaaaagccgcagcgttggaatccggcggatctggggcgctttatgatcttcttcggaccgatcagctcgatcttcgatattttgacgttttgcctgatgtggtgggtattccatgccaacacgccggaaacgcaaacgctgttccagtcgggatggtttgtggtgggcttactgtcgcaaacgctgattgtgcatatgatccgcacccgccgtgtgccgtttattcagagctgtgcatcgtggccgttaatgatcatgaccgtgatcgtgatgattgtcgggatcgcattgccgttttcaccgctggccagttatctgcaattacaggcgctgccgttaagctatttcccgtggctggttgcgattctggcaggattagcgacgaacagcgatcgcttcgatctcaatcttcacgtctttcggcagacgggcaacttcaacgcaagaacgtgccgggaaggtggcgttgtgttcggtgaagaaggcttcgccagcggcttcgacgatcgcttttacgttatccagcgactgacgtgcctgtgcagcgacgtctgccggtacttcgcccgttttcggatttaccgggatctgaccggaggtgatgatcatattgcccagatcaacgncctgtacgtaaggccgatagctgccggtccggcacccggtacctttcgattatggcattcacgtcgggcaatgctgctgacccgtgctgatatggaagaccgtgaacgcttcctgaacgcccgcgacaccctgcgagcgttgctcgataacaatatcgttccggtaatcaatgagaacgatgctgtcgctacggcagagattaaggtcggcgataacgataacctttctgcgctggcggcgattcttgcgggtgccgataaactgttgctgctgaccgatcaaaaaggtttgtataccgctgacccgcgcagcaatccgcaggcagaactgattaaagatgtttacggcattgatgacgcactgcgcgcgattgccggtgacagcgtttcaggcctcggaactggcggcatgagtaccaaattgcaggccgctgacgtggcttgccgtgcgggtatcgacaccattattgccgcgggcagcaagccgggcgttattggtgatgtgatggaaggcatttccgtcggtacgctgttccatgcccaggcgactccgcttgaaaaccgtaaacgctggattttcggtgcgccgccggcgggtgaaatcacggtagatgaaggggcaactgccgccattctggaacgcggcagctccctgttgccgaaaggcattaaaagcgtgactggcaatttctcgcgtggtgaagtcatccgcatttgcaacctcgaaggccgcgatatcgcccacggcgtcagtcgttacaacagcgatgcattacgccgtattgccggacaccactcgcaagaaattgatgcaatactgggatatgaatacggcccggttgccgtcaccgtgatgcatgattaccgttaa

SEQ ID NO: 7946 - DNA, 1605 bp, Homo sapiens
  SIMILAR (1)..(1602): 921254mologous to Homo sapiens Human secreted protein encoded by gene 3 clone HNHCT15,accession number AAB38012,Smith-Waterman Score=2499.
atgttctttgaaaccaatgagaacaaagacacaacataccagaatctctgggacacattcaaagcagtgcgtagagggaaatttatagcactaaatgcccacaagagaaagcagaaaagatctaaaattgacaccctaacatcacaattaaaagaactagagaagcaagagcaaacacattcaaaagcctacaggagtctagaaataactaagatcagagcagaactggaggagatagtcaaacaaaaaaccattcaaaaaatcaatgaatccaggagctggttttttgaaaacatcaacaaaattgatagaccactagcaagactaataaataagaaaagagacaagaatcaaatagacgcaataaaaaatgataaggagaatatcaccaccaatcccacagaaatacaaactaccatcagagaatactataaacacctctatgcaaataagccagaaaatctagaagaaatggataaattcctggacacatacaccctcccaagactaaaccaggaagaagctgaatccctgaatagaccaataacaggctctgaaattgaggcaataattaatagcctaccaaccaaaaaaagtccaggaccagatggattcacagctgaattctaccagaggtacaagaaggagctggtaccattccttctgaaactattccaatcaatagaaaaagagggaatcctccctaactcattttatgaggccagcatcatcctgataccaaagcctgacagagacacaacaaaaaaagagaattttagaccaatatcctcgatgaacatcgatgcaaaaatcctcaataaaacactcacaaaccaaatccagcagtacatcaaaaagcttatccaccatgatcaagtgggcttcatccctgggatgcaaggctggttcaacatacacaaatcaataaatgtaatccagcatataaacagaaccaaagacaaaaaccacacgattatctcaatagatgcagaaaaggcctttgacaaaatccaacagcccttcatgctaaaaactcttaataaactaggtattgatgggacgtatctcaaaataatgacagctatttatgacaaacccacagccagtaccatactgaatggacaaaaactggaagcattccctttgaaaactggcacaagacagggatgccctctctcaccactcctattcaacatagtgttggaagttctggccagggcaatcaggcaggagaaagaaataaagggtattcaattaggaaaagaggaagtcaaattgtccctgtttgcagacgacatgattgtatatttagaaaaccccattgtctcagcccaaactctccttaaactgataagcaacttcagcaaaatctcaggatacaaaatcaatgtgcaaaaatcacaagtattcccatacaccaataacagacaaacagagagccaaatcatgagtgaactcctattcacaattgcttcaaagagaataaaatacgtaggaattcaacttacaagggatgtgaaggacctcttcaaggagaactacaaaccactgctcaaggaaataaaagaggacacaaacaaatggaaggacattctgtgttcatga

SEQ ID NO: 7947 - DNA, 975 bp, Homo sapiens
  SIMILAR (526)..(960): 1001254mologous to Escherichia coli glutamate 5- kinase,accession number U70214,Smith-Waterman Score=719.
atgccctgggctgacaaaagaaatccctctggagcccaatccctgaatggttatgccccgccagacctcatctggggacccagtcatcgggcctttagagcgcaggtcgagtattcaattgggatcagtagcatctacaattctggaacacacaccctcccaatactaaaccaggaagattttgaatccctgaatagaccaataacaggctctgaaattgaggcaataattaatagcctaccaagcaaaaaaagtacaggaccagaccgattcacagctgaattctaccagaagtacaacaaggagctgccgctgtgggatatttttgccaaaatctgttctattcctcacccgtcctatcatgaagagcaactcgctgaatacattgttggttgggcaaaagagaaaggtttccatgtcgaacgcgatcaggtagtgttccaggccttgattcacttggtgaaaggcaacatgggcacagggatcctgggactaccccatcgctgtgaagaacgcgggcatcctgggcagagtcgactgattcaactgtgggaacagctgttttcgatttatggcattcacgtcgggcaaatgctgctgacccgtgctgatatggaagaccgtgaacgcttcctgaacgcccgcgacaccctgcgagcgttgctcgataacaatatcgttccggtaatcaatgagaacgatgctgtcgctacggcagagattaaggtcggcgataacgataacctttctgcgctggcggcgattcttgcgggtgccgataaactgttgctgctgaccgatcaaaaaggtttgtataccgctgacccgcgcagcaatccgcaggcagaactgattaaagatgtttacggcattgatgacgcactgcgcgcgattgccggtgacagcgtttcaggcctcggaactggcggcatgagtaccaaattgcaggccgctgacgtctttagagcacagtga

SEQ ID NO: 7948 - DNA, 358 bp, Homo sapiens
  SIMILAR (304)..(357): 1001254mologous to Mus musculus putative,accession number AK003163,Smith-Waterman Score=102.
atcagtgttctaggccattctagtcatttttcttgtttctttagactgttaatttatgttcctcatcttgctcatactcattatcatattatttataaatgaatttggattagaaggggaatgatatgttactatggcgtagatacaatgtagatattgttacatggtgacttttttcttgttatttttcagtgttccattggcaagctacaataatggggccagtaagtattcagattaatttcagaataaacagtttatgtaatttactcattttaatcccacttttcttgttatcaacagaatgacagtccctatcagggtggagtatttttcttgacaattcatttcccaacag

SEQ ID NO: 7949 - DNA, 425 bp, Homo sapiens
  SIMILAR (10)..(228): 981254mologous to Homo sapiens GPRC5C,accession number AJ276102,Smith-Waterman Score=382.
ggtggaattccaggggcctgggcccagggccatgtcccacccggctgcagccaaggcctcaaccccctgtactacaacctgtgtgaccgctctggggcgtggggcatcgtcctggaggccgtggctggggcgggcattgtcaccacgtttgtgctcaccatcatcctggtggccagcctcccctttgtgcaggacaccaagaaacggagcctgctggggacccagctaagaggccggtgtcaccatacagcgggtacaatgggcagctgctgaccagtgtgtaccagcccactgagatggccctgatgcacaaagttccgtccgaaggagcttacgacatcatcctcccacgggccaccgccaacagccaggtgatgggcagtgccaactcgaccctgcgggctgaagacatgtactcggcccag

SEQ ID NO: 7950 - DNA, 515 bp, Homo sapiens
  SIMILAR (513)..(253): 1001254mologous to Homo sapiens GPRC5C,accession number AJ276102,Smith-Waterman Score=456.
gttaataaagcatgaaatgtatttattaggcacccttggtggtcacagaggagcaagatccaggcctgagcgcctgggaagtctcttgaggttgcaggaatctccagagaaacataggcgctgcccagccaccaccccgagaacactatttggctggagtgtgaccgccgaggtgatcctggcaggaggctggggccaggtcctcagggccctccccaaatccgaccgcctctcctcgccaccgctgactcagtcccacacgtaggggtttctaaagacctgagagttcttgccgtctttcggcggtgtggccgcctggtggctctgggccgagtacatgtcttcagcccgcagggtcgagttggcactgcccatcacctggctgttggcggtggcccgtgggaggatgatgtcgtaagctccttcggacggaactttgtgcatcagggccatctcagtgggctggtacacactggtcagcagctgcccattgtacccgctgtatggtgacaccg

SEQ ID NO: 7951 - DNA, 737 bp, Homo sapiens
ggcacgaggggccgtcagccttgccggagccagacgtccgctgtgccgtcctcacagcaaggcctgctccgaggccccggggtgcgtcagcagccctcctcaaacaccctgggagtgcccagcagggcggaacacaccgggaaaccaacaccccaaaggcacaaggaagtatccctggagctaaaaatagttctggaaacttgccacggggccacaggctgggacgtgcgttaaggctccctggccaggctctgggttggtgtaatgtggaaggggcgcccaggtcggccctgggaggacatgaacaggcttatgccgagggctctcagatgtatttacctctgtgcctggcagctggcccgtggtgacaggcagagctggaggctggccatcttggaaggcggccgaaggcccatgtgtcctcttggcctctggccccggagggcggatggggatgtggaagttgctgacagagcattttctgagctgttgggtcaggggctggggggtctacagtgcacggaagctcagcagagttgttcactcccatgcatctgcacaaaggggagctaggcttgggagggggcccacgtgttcacaacctcaccctcaagttgccactcctgggttagagactatgccagggttggcctgccccctttacctcttccctgcccccagagagccttgcttggattgtgggaggtgtggaaaggagcttatagccctgcgatctc

SEQ ID NO: 7952 - DNA, 1808 bp, Homo sapiens
  SIMILAR (1808)..(504): 861254mologous to Homo sapiens Human Metabotropic Glutamate Receptor-like protein, MGRcm,accession number AAY44273,Smith- Waterman Score=1938.
ttaataaagcagaaatgtatttattaggcacccttgttcctcacagaggagcaagatccaggcctgagcgcctgggaagtctcttgaggttgcaggaatctccagagaaacataggcgctgcccagccaccaccccgagaacactatttggctggagtgtgaccgccgaggtgatcctggcaggaggctggggttggctcctcgactccacaaacactgaggagtgggtggggacacccatgacacccacccaaacactggcagagagggaggcccttccagatctggggcacatgttgctgggcctgccagggggaggaggagcctggagagtcccttgcccggggccaggtcctcagggccctccccaaatccgaccgcctctccatcgccaccgctgactcagtcccacacgtaggggtttcctaaaagacctgagagttcttgccgtctctctcgcggtgtggccgcctggtggctctgggccgagtacattgtcttcaagcccgcagggtcgagttggcactgcccatcaccctggctgttggcggtggcccgtgggaggatgatgtcgtaaagctcttcaggacggaactttgtgcatcagggccatctcaagtgggctggtacacactggtcagcagctgcccattgtacccgctgtatggtgacaccggcctcgttagcgtgcaaccggctcatccatggaaaaggccttgttctccacgaacatgctctgacccttctgctctttcaggatggtctcatagcccacggccccgggtggggtacatgtccccctggtagctttgctctgggctggacttggtcacctgggagacctcggggatgacgtagaagaggacgaaggcccaggcattggcggcgagggcgatggccagcgtggggtcatcccaggtgggactgttgtgctgcttgttgccgtaagtatacatgacgatccacaccacccatatggcaacggaggtggctgtggtgaggagcacaaagaccccatgcttacgccagcgcttgtagcggccacacagggcgggccaggcccccaggaaggcacccagcagcagcagcatgacgtagatgagtgccatgacaaagtccatgttggcgacggcacagggggaggccacggcccagcctgcgctgctgttgccctgagggccgccctcgccactgccccgaaccagggtgatgatcagccactctgtattgatgatgacctctaccagggtcagcagcagagccacagtgaagatcacccagccccggggcccgtggttcttccgggccaggaagttgagggcaaagacgtgagccgccagacaagagaagcagatggcgaacagaaccccaaagaggaagcgccgagaggcacaggtggagaagtcgggcttcaccacacaggcaaacacgaggcagaagaggcccagggtccccagaaggaagaatacctgggtccccagcaggctccgtttcttggtgtcctgcacaaaggggaggctggccaccaggatgatggtgagcacaaacgtggtgacaatgcccgccccagccacggcctccaggacgatgccccacgccccagagcggtcacacaggttgtagtacagggggttgaggccttggctgcagccgggtgggacatggccctgggcccaggcccctgggaacaggaagagaggcagtcccaggcacatcaccaaggctttgtggaatgccaatctggctcccaggccaggctctggttgggtccctccaggctgagccgactcgtactttccggctggtga

SEQ ID NO: 7953 - DNA, 389 bp, Homo sapiens
  SIMILAR (96)..(155): 1001254mologous to Homo sapiens bA16L21.1.3 (NADP-dependent leukotriene B4 12-hydroxydehydrogenase (isoform 3)),accession number AL135787,Smith-Waterman Score=97.
actaagacatggaccctgaagaagcactttgttggctatcctactaatagtgactttgagttgaagacagctgagctcccacccttaaaaaatggagagtggcagccaaaagattgaaggaaggtgatacaatgatggggcagcaagtggccaagtaattatttccatttgtcccagtgcttggaaaatatgtctcctctttacctcctgctgggtcctgtctctgtccattgctcctacaatttcttcagcctatgttgttgactcactgtgtgatcttggaatcaacttgggaaattctgtctccttcctaactagctggaaaggagggaaggatgtgaaattgtcattttttcagcttcactttgccatccttacttttaattact

SEQ ID NO: 7954 - DNA, 874 bp, Homo sapiens
  SIMILAR (176)..(9): 511254mologous to Homo sapiens Human secreted protein, SEQ ID NO: 4433,accession number AAG00352,Smith-Waterman Score=128.
  misc_feature (1)...(874): n = a,t,c or g
gggggtagggggggcaattcccctgaggtcaaaggtttagacccccccgggccacaatggggaaatccgttttttattaaaaaaacaaaaataaaccannnnnnnnnnnnnnccccgttaatcccccctccttggggggttaaggcagaaaattttttttaattgggaaggggggggttccattaaaccaaaattaaccccttcccctccagcccgggggcaaggggggggtcccttttccnnnnnnnnnnnccnnnnnnnnnnnncagagtcctaactcttccctgccctgagaaccccctcaaggcagggaggatcagctattcccagcgcctcaggactaagcacacctgcttgtgtcccttctgggtccacaaggaacttgttccatgccccacatgtggggcgggtgtcactgctcctcccggcaagttagaaagctgcagggcccagcaagaaggggccaggtcaggtcaacccagcctgattccggaagccaggagttggcatttaacggtctgtaggcccaaggcagttacctcttgagtgactgcatgctaggaagaatcgggccgggccagtgcccctgccaggcttgggaaaggagggaccaagcctccaaggcccgaaaaggacgcagctggcttcccttttaatggaagggcctcccactcaccccactatacatgatggcaccacagcccagcctgagctgtggccatgcaggggtccccagatgcagagttggggatcagggcctgcagcacacatttgggcccagacaaccccacccaccacatccctcctccagacacaggtctgattctgagtcctcatctctgctccaagcatcagcccacccagggaaggcagg

SEQ ID NO: 7955 - DNA, 493 bp, Homo sapiens
  SIMILAR (460)..(492): 811254mologous to Homo sapiens bA16L21.1.2 (NADP-dependent leukotriene B4 12-hydroxydehydrogenase (isoform 2)),accession number AL135787,Smith-Waterman Score=43.
  misc_feature (1)...(493): n = a,t,c or g
tggtacggctgcgagaagacgacagaaggggaccctctcttgggacctgtcataagtcggaccccgggcgcccggctgcgcagtcccagccgccttccccaggcagtggaaccttcgggctcctgagcttcaggatggttcgtactaagacatggaccctgaagaagcactttgttggctatcctactaatagtgactttgagttgaagacagctgagctcccacccttaaaaaatggagaggtcctgcttgaagctttgttcctcaccgtggatccctacatgagagttgtggaaagtaaaaatgtagccctaccaaaaggaactattgtactggcttctccaggctggacaacgcactccatttctgatgggaaagatctggaaaagctgctgacagagtggccagacacaataccactgtctttggctctggngacagttggcatgccaggcctggactgcctactttggcctacttgaaannggtggng

SEQ ID NO: 7956 - DNA, 1147 bp, Homo sapiens
  SIMILAR (971)..(1147): 891254mologous to Homo sapiens NADP dependent leukotriene b4 12-hydroxydehydrogenase,accession number D49387,Smith-Waterman Score=263.
atgctactatgccagaaggcaccatctctgaaaacaacctacaatcatcctcctgcggcagattccgctgggactgcattaaacttagagacgactgttaaacaaaccagggaaacacagttggaatacaacaacgtgggcactgacctgtcccccgaacccaaaagcttcaattacccattgctctcatcctcaggtgaccagtttgaaattcagctaaaccagcagctatggtccctcatccccaacaacgatgtgagaaggcttgtttctcatgttatccggaccttgaagacggactgcactgagacccatttgcaactggcctgtgccaagctcatctctaggacaggcctcctaatgaagcttctcagtgagcagcaagaattgagaactgtatcaatgacagcatggaagcccagaatgaacagaaagagcagaagtcgaatgagacagtctcactttgccagccatgctggaaggtggtggcacaatcatagcacactgcagccacaatctcccaagcttcagatggctgaactgagtgaggcaaggagaaggagcttcaggatggttcgtactaagacatggaccctgaagaagcactttgttggctatcctactaatagtgactttgagttgaagacagctgagctcccacccttaaaaaatggaggccttgagtttctaattgcctatggaatgctttattttgtagaggtcctgcttgaagctttgttcctcaccgtggatccctacatgagagtggcagccaaaagattgaaggaaggtgatacaatgatggggcagcaagtggccaaagttgtggaaagtaaaaatgtagccctaccaaaaggaactattgtactggcttctccaggctggacaacgcactccatttctgatgggaaagatctggaaaagctgctgacagagtggccagacacaataccactgtctttggctctggggacagttggcatgccaggccctgactgcctactttggcctacttgaaatctgtggtgtgaagggtggagaaacagtgatggttaatgcagcagctggagctgtgggctcagtcgtggggcagattgcaaagctcaagggctgcaaagttgttggagcagtagggtctgatgaaaag

SEQ ID NO: 7957 - DNA, 1074 bp, Homo sapiens
  SIMILAR (226)..(444): 931254mologous to Homo sapiens NADP dependent leukotriene b4 12-hydroxydehydrogenase,accession number D49387,Smith-Waterman Score=352.
atacgcgcacacacacacacaaacgcactcagatttcccggaccctggttttcctcctgtgaccctttcggggccgggctctcaccctaaagaagcagccccgccctggggtggccccaccctctcttgggacctgtcataagtcggaccccgggcgcccggctgcgcagtcccagccgccttccccaggcagtggaaccttcgggctcctgagcttcaggatgggttcgtactaagacatggaccctgaagaagcactttgttggctatcctactaatagtgactttgagttgaagacatctgagctcccacccttaaaaaatggagaggtcctgcttgaagctttgttcctcaccgtggatccctacatgagagtggcagccaaaagattgaaggaaggtgatacaatgatggggcagccagtggcccaagtaattatttccatttgtccccagtgcttggaaaatatgtctcctctttacctcctgctgggtcctgtctctgtccattgctcctacaatttgttcagcctatgttgttgactcactgtgtgatcttggaatcaacttgggaaattctgtctccttcctaactagctggaaaggagggaaggatgtgaaattgtcattttttcagcttcactttgccatccgggcttttaataactaaaaaaaaataagtatttgcccaggtcatgatttattgcgggatctggccagcagcccacaatgcaacagggttctctctttgttcccaggtggatcggcaggttgaaaaataatagacccacccaatatagggaaagctgggtccaggggcgtaaccgccttttggatccgtggggccaccaaagcactgaatatacccccatttattattaaggttaaagaaggcgggggaagggtaatgagggattttagggcatttgattattaggggagaaggccccatggggatgaaatatatctttaaccaacatctggatccaaaaatacatgtttcacagataagaattttcccatataaagggggcctaataaaatttttttaaaaggccttaaaaataaaaaaaa

SEQ ID NO: 7958 - DNA, 684 bp, Homo sapiens
gtgtctttgctttcctgaccacagcctctctgcccaagcctgtgtcctctccttccgttctggtctccttcatctcacggttccccagcctccaagctcttgaagagccgtgtcacactgagagcttccctgacctggtctcatttccctctgacagtgacctccagtgtgctgggttgaccaatgccaagcctctttttaaaccaaagtagttcaccatgggttgggatgatgtcaacaagcagtattcatgttaaaaagcaatgagggactccttccctggtgcacaattttcttcacttgtgatctctaaactgttttcaaattggaagactgggaagcattgctacagccccagccagtctcagccactgctcagcccagtggtggaaagctgagcacacagcgggtgcttactgcccccacttgccgtctgctctccagtagatcaagggacctcagacagggatctgagaagtggcaggttccaataaactgatcaacagaatgaagtcactctgggaagccatgaggtgactttacagcccaagcatgtaaatatacacacacacgatactatatatcctcttttcgggtttttttttgagacacagtctcgctctctcagccaacctggactgcagtggcgcaatcacggcccattgcaacctccgcctcctgagg

SEQ ID NO: 7959 - DNA, 1914 bp, Homo sapiens
  SIMILAR (229)..(1323): 861254mologous to Homo sapiens putative p150,accession number U93563,Smith-Waterman Score=1605.
atggggagaaaacagagcagaaaagctgaaaattctaaaaaccagagtgcctcttcttcaaaggattgcagttccttgccagcaactgaacaaagctggacagagaatgactttgatgagttgacagaagtaggtttcagaaggtcagtaataacaaacttctccgagctaaaaatgtatgttcgaacccattgcaaggaagctaaaaaccttgaaaaaaggagcacccaattcataaaacaagtccttagagacctacaaagagacttagattcccacacaataataatgggagactttaacactccactgtcaatattagaaagatcaacgacacagaaggttaacaacgatactcaggaattgaactcagctctgcaccaagtggacctaatagacatctacagaactctccaccccaaatcaacagaatatacattcttcttagcaccacatcatacttattccaaaattgaccacatagttagaagtaaagcactcttcagcaaatgtaaaagaacagaaatcacaacaaactgtctctcagaccacagtgcaatcaaattagaactcaggattaagaaactcactcaaaaccacacaactacatggaaactgaacaacctgctcctgaatgactactgggtaaataatgaaatgagagcagaaataaagatgttctttgaaaccaatgagaacaaagacacaatgtaccagaatctctgggacacatttaaagcagtgtgtagagggaaatttatagcactaaatgcccacaagagaaagcaggaaagatctaaaattgacaacctaacatcacaattaaaagaactagagatgcaagagcaaacacattcaaaagccagcagaaggcaagaaacaactaagatcagagcagaactgaaggagatagagacacaaaaaacccttcaaaaaatcactgaatccaggagctggtgttttgaaaagatcaacaaaattgatagactgctagcaagactaataatgaagaaaagagagaagaatcaaatagacacaataaaaaatgataaaggggatataaccacagatcccacagaaatacaaactaccatcagtggatactataaacacctctccacaaataaactagaaaatctagaagaaatggataaattgctggacacatacaccctcccaagactataccaggaacaagttgaatctctgaatacaccaataacaggccctgaaattgaggcaatagttaatagcccaccaaccaaaaaaattccagtatcagacgaattcacagctgaattctaccagagaaccaacgacaaaaaccacatgattatctcaatagatgcagaaaaggccttcgacgaaagtcaacagcacttcatgctgaaaactcttaataaactaggtattcatggaacgcatctcaaaatattaagagctgtttatgacaaacccacagccaatatcatactgaatgggcaaaaactggaagcattccctttgaaaacccgcacaagagaaggatgccctccgtcaccactcctattcaacatagtgttggaagttctgaccagggcaatcaggcaagagaaagaaataaagggtattcaattaggaaaagaggaagtcaaattgtccctgtttgcagatgacgtgattgtatatttagaaaaccccattgtctcagcccaaaaactccttaagctgataagcaatttcagcaaagtctcaggacttcgagtgctagcgaacgtctatgggagcttccaggacatggaaacacaagggctgaggttctttgggcagaattcagtcccccaacagctgcgcccctacaatggtgcctcgctgcagacactcgagtctggggaaaaggcaagtgcccctgcaaaagatcactgtctagtgtaa

SEQ ID NO: 7960 - DNA, 1382 bp, Homo sapiens
  SIMILAR (465)..(734): 981254mologous to Escherichia coli yehQ,accession number U00007,Smith-Waterman Score=469.
ccaaaaccccatttgtaggttaccaacatcaaagaccaaaggtagataaaaccacaaagatggggagaaaccagagcagaaaagctgaaaattctaaaaatcagagcacctcatctcctccaaaggatcgcagctccttgccagcaacggaacaaagctggacagagaatgactttgacgagttgacagaagtaggcttcagaaggtcggcaataacaaacttctccgagctaaaggagcatgttctaacccgtcgcaaagaagctaaaaaccttgaaaaaaggttagatgaatggcttactagaataaacagtgtagagaagaccttaaatgacctgatggagctgaaaaccatggcacaagaacttcgtgatgcacgcacaagcttcaatagctgattcaatcaagtggaaaaaaggatatcagtaattgaagatcaaattgatgaaataaagcaagacgacaaggcggcagagacctgcaactggcgctgggtgagtgaatcgctacggcaactgcgcgccagcgttgatgccttccacgcccgcgccagccactataatgccggagaatgcttacatcagcttgcggcattaaacagtcgattaaattgcgcacaagagatggcccggcgcgacagtattggtgaagttcctcctgtgccgtggcgcacggtcgttggctctggcattgccggagaagcaaagcttgatcatctgcggctggtgtctttaattggccgcgaagtgaacaaggaaaactcaccggcagctacccggtggctgtttagttttcaagctggcgcactggcgggcgggcaaattgttttacaagcagcaaaacccaatgcccatgggcagcctgtggtagctacccgcaacctgcttaatccagctggcattgtggcagtgctaaagcagcgccccagattggtggctgcagcagtccaggcattttacctacgagaccctattgacctgcgagcttgtcgtgttttcaagacattcttgcctgaaacacgaataatgacatcgtattatgccatagagtggtcgctctggacactagttgacgtgcttcatgcggagaatagtgagtcagcgcacatgtcccataactcgtatgatccgccatcggatgtcgcgcgtcatcttactcatttgcccatgtctcctatccctgattatatcatcgctaggttccgttaccgtcatcgctcaagagtgcgtcttaccgctcgaaagttaagtcccgcgttcatgcgttgctcgtccgagatacaaaggtattctactatgttggagagaggcttcaacgggggatattgtcgctctacaacagttagagtggtcaccgaggcgactcgtatgttgagtttctaa

SEQ ID NO: 7961 - DNA, 1194 bp, Homo sapiens
  SIMILAR (508)..(807): 771254mologous to Homo sapiens PRO2221,accession number AF116695,Smith-Waterman Score=387.
atggctcatgcctgtaatcccagcactttgggaggccaaggaaaaaaagtcaatgtcagtaatctggaaactcttctaaataatatagaaatcgaagttgggaaagaggaatatgaggacctactgaaccatctgccagttgatgaaaatgaaatggttgatgtgaatgtggtgatggatgaagcaaaagcttttacaggagaaaaagttaatgtcagtaatctggggaatgagctgaggaaaatggggctcgtactcactgatgaggagcacgagaagctgctgaaaactctgccaattcgcaggccaagggtcaacacaaaaaaggtggagatttttttggaaaacatgggaactaaaatcaaggatgaggaacttgaggaactcattacccaactaccaactgaggaaaggaatagcgtcaacatcaacgaaaaggtcatctacaccaaaaccccatctgtaggtcaccaacatcaaagaccaaaggtagataaaaccacaaagatggggagaaaccagagcagaaaagctgaaaattctaaaaaccagagcacgtcttctcctccaaaggattgcagctcctcaccagcaactgaacaaagctggacggagaatgactttgacaaattgacagaagtaggcttcagaaggtcagtaataacaaacttctccgagctaaaggagcatgttcgaacccatctcaaggaagctaaaagccttgaaaaaaggttagacgaatggctaactagaataaacagtgtagagaagaccataaatgacctgatggagctgaaaaccatggcacgagaacttcatgatgcatgcacaagcttcaatagccgattcgatcaagtggaagaaaaggtgaagagagctactgatacctataatttaggaattgcccttgaacaccgaaaagagatgctaaacctctggcagaagatccgaggggatttgattgggatggactctagaaatgagtccttttatgacaccttttctacttatacatggtcctggaatgtttgccaagaattactttctcctaaggacttaaggttatatgatgcctatgtgaatagaaattcctcccataactccagatcctcttcctcatcagataccagtgaatgttacacagactcaggaagaaaaagaaaacggaaaggtttaaagggatttcaacaatga

SEQ ID NO: 7962 - DNA, 359 bp, Homo sapiens
ggcacgagggacccaggagtctgggtgcacagcctccttctctctgagagtcaagagtctgatcagcagcctcttcctcctccaggacccagaagccctgagcttatccccatggagctctgccggtccctggccctgctggggggctccctgggcctgatgacctggctgattgcttgcggcaccgatcacctgccttggacctcgttgtctctcgtgcgcctatgatttgtggattgtaggttgatcggctcggtatctacctcatcctttcttctactgttgcgctgcttggcccgtccagcttcattcgcgcgccgctccgctgatctccttcttgcgttgatttgggggatggg

SEQ ID NO: 7963 - DNA, 392 bp, Homo sapiens
  SIMILAR (37)..(354): 821254mologous to Homo sapiens basal transcriptional activator hABT1,accession number AB027258,Smith-Waterman Score=432.
tgcacgagcgggactatgccgctcgtgtcagtctttatggaggcagatgaatcggagaaggccgcaagagagcaagagccgctggaagggacagaacagacactagatgcggaggaggagcaggaggaatccgaagaagcggcctgtggcagcaagaaacgggtagtgccaggtattgtgtacctgggccatatcccgccgcgcttccggcccctgcacgttcgcaaccttctcagcgcctatggcgaagtcggacgcgtcatctttcatgctgaagaccggttcctgagacgcatcaaaaatgcatatagtatctgccgtagaataatagcgttctacacctatgacttcacaaatcaattatatatttatattatatattttattaaatc

SEQ ID NO: 7964 - DNA, 388 bp, Homo sapiens
  misc_feature (1)...(388): n = a,t,c or g
ggcacgnnnnnnnnnnnnnnnnnnnnnnnnnnnnnnnnnnnnnnnnnnnnnnnnnnnnnnnnnnnnnnnnnnnnnnnnnnnnnnnnnnnnnnnnnnnnnnnnnnnnnnnnnnnnnnnnnnnnnnnnnnnnnnnnnnnnnnnnnnnnnnnnnnnnnncccttaatgcatattctcaaatatactatggtatatctggtctgtcctctgctttcttcttctcataaccttccttttactcctgtcaaactgctctcctactcgttattctatccctactttcacttctcccgtttccttcgtctctgctgccttcgcttatttctctctttcttctactcttcttccctcttgcactcactttattctttcccctttcttctctcccccc

SEQ ID NO: 7965 - DNA, 319 bp, Homo sapiens
accagtcttttagtgtctcaaaatagattattaatacatccataagtctgtggttcttgggattgtcatctataatccaccactaccaagagagatttctgtgatttaattgatttggatcctatatggtttttattgagattttttttgggatttcttcggctttttttgtttgttgatggcctaagatcgttgtactttaggtactgtaggtgttttttaatattactgcttttgtcgatatttgagttcatctttgttacttagttttatagatctttatgttttttttatttttttatatgtttttgtgtgtttt

SEQ ID NO: 7966 - DNA, 593 bp, Homo sapiens
  misc_feature (1)...(593): n = a,t,c or g
ttttttttttttttttgacagcaagggatgtgcgctggctgctttatttaagggcttgtgattgacagctgtccccatcccagcccttgcttcctcttacaaaagcaaactgaacatgaaacgggcttcctggttaccatggggagggggggcggcttcccttgtcagggcccagcccagggacctggggaacggcggcttttgaatccccggccacgggcactagaaggtggagaaggagggcggggaagtccagttgagatgggcacggtgctggtgaggaggtggnaanaaaagggtcctgttccagccttctagtgggcttccccttgtccaaggatgtcaagaaaacagtcccccaattccgccggggggaagccagaagccccaaggttgggggggccagggggctgcaagggaacacagcaaaggcttttcggagccaagtgagatcagttcaggcccctcaggcccaagaacccgacaccaccgcgtacctgtgagcacacactcacggccaccccagtgacacgtgcagccacacacacccacactcactcacacccacacccacacgcacacccacgtcgagc

SEQ ID NO: 7967 - DNA, 1550 bp, Homo sapiens
  SIMILAR (467)..(1036): 871254mologous to Homo sapiens sorting nexin 16,accession number AF305779,Smith-Waterman Score=818.
atggcaactccttatgtcccagttcctatgcccataggaaactctgcttccagttttacaacaaacagaaatcaaagaagttcttcttttggcagtgtctcaacaagctcaaattcttctaagggccagttagaagactcaaatatgggtaattttaaacagacaagtgttcctgatcaaatggataatacttcatctgtctgtagcagtcccctcattaggactaaatttacaggtacagcttcttccattgagtattctactagaccaagagacactgaagaacaaaatccggaaacagtgaattgggaagatagaccatctacacctactatactgggttatgaagtgatggaagaaagagctaaatttactgtatataaaatactagtaaagaaaaccccagaagaaagctgggtagttttcagaagatacactgacttctctaggcttaatgacaaattaaaagagatgtttccaggttttcgactacgcacttcctccaaaacgctggtttaaagataattacaatgctgactttttagaagacagacaattaggattacaagcgtttcttcaaaatttagtagctcacaaggacattgctaactgccttgcagtgagagaatttctttgtttggatgatccaccgggtccatttgatagcctagaagaaagcagggcattctgtgaaactttagaagagacaaactaccgctttacagaaagaactacttggaaaaacaaaaggaggtggattcacttaaagaaactgctcagtgagaagcaacttcatatagacactttagagaacagaatcagaacattgtctttagaacctgaagaatcactggatgtgtcagaaacagaaggtgaacagatcctaaaggtggagtcctctgcacttgaggttgatcaagatgtcctggatgaagaatctagagctgataataaaccatgcttaagttttagtgaacctgaaaatgctgtatcagagatagaagtagcagaagtggcatatgatgctgaagaagactaatgtatcacaagcagttccctccatttagactattcaaaaatttagaagagtggcaaatactattttaaaagaagaaccaagaactgtaaaacatatagaaaagagcaagaatgcacatgtataaagtttacataaagaagtttttttaagttattgagatagagaaatatattcactgctgcttttaattgtgttttatccaattgcatttaatacactaaaaaaaatcttgttggaattctgttatcaaggcccacattcttaaatactgtgcataaattattatggtgttttgcctatatattgctccaaactactgtgtatatatgtatgtgtgttaaatcaccaattatattaatcaaatggaaattaattgcatgttactatctgggtgatatattcttctttatatctctgacatgacatattttcattaatagtttaaatcagtgaccatcataataaagataaaatttagttgagtttttaaaaaaaaaaaaaaaaaaaaaag

SEQ ID NO: 7968 - DNA, 345 bp, Homo sapiens
gtctgtagtaggctggaccaaatcctaaattattctaggttcctctttccaactttatttcacaaaattactaaaaatgaaagcttctgtttctgaagccctattagctgaagctagataaattttaagaggcaagtcttgtgcctgatgtatgcctcatacaaaacgttcaccaaactgcttaatgacataaccagagacattcaaactgcaagccagtataagaacttgacagcttcacactctagacagcttttctcaagatgtcaaaataagattccacatcataatgagactctttcctctcttaatgcctatctttttcacttggcaggataatgttca

SEQ ID NO: 7969 - DNA, 1389 bp, Homo sapiens; identical to SEQ ID NO: 307
  SIMILAR (76)..(855): 941254mologous to Oryctolagus cuniculus elongation factor 1 alpha,accession number U09823,Smith-Waterman Score=1290.

SEQ ID NO: 7970 - DNA, 1257 bp, Homo sapiens; identical to SEQ ID NO: 303
  SIMILAR (430)..(1254): 991254mologous to Oryctolagus cuniculus elongation factor 1 alpha,accession number U09823,Smith-Waterman Score=1427.

SEQ ID NO: 7971 - DNA, 695 bp, Homo sapiens; identical to SEQ ID NO: 5616
  SIMILAR (57)..(629): 831254mologous to Rattus norvegicus elongation factor-1 alpha,accession number L10339,Smith-Waterman Score=823.

SEQ ID NO: 7972 - DNA, 895 bp, Homo sapiens; identical to SEQ ID NO: 5605
  SIMILAR (52)..(360): 1001254mologous to Oryctolagus cuniculus elongation factor 1 alpha,accession number U09823,Smith-Waterman Score=543.
  misc_feature (1)...(895): n = a,t,c or g

SEQ ID NO: 7973 - DNA, 1838 bp, Homo sapiens
  SIMILAR (467)..(1543): 821254mologous to Oryctolagus cuniculus elongation factor 1 alpha,accession number U09823,Smith-Waterman Score=1414.
  misc_feature (1)...(1838): n = a,t,c or g
gcttttttttttttttcgcaacgggtttgccgccagaacacacggtgtctgtgaaaaactaacccctaaaagccaaaatgggaaaggaaaagactcatattcaacattgtcgtcattggacacgtagataacgggcaagtccaccactacttggccatctgatctataaatgcggtggcatcgacacaaagaaccattgaaaaatttgagaaaggaggctgctgagatgggaaagggctccttcaagtatgcctgagtcttggataaactgaaagctgagcgtgaacgtggtatcaccattggatatctccttgtgggaaatttgagacccagcaagtactatgttgactaatcattgattgccccagggccacagagacttttattcaaaaacatgatttacagggaccatctcaaggcttgacntggtttggggggccccctttttgggggggttntcccctgattgtttgctgctggtgtttggtggaatttgaaagctggtatctcccaagaatggggcagaacccgagagcatgcccttttgggcttacacactggggtgtggaaacaaactaaattgttcggtgttaacaaaaattggatttccacttgaggccaccctacagcccagaagaagatattgaaggaaattgttaagggaaagtcagcacttacattaaggaaaattggctacaaccccgacacaagtagcattttgtgcccaatttctggttgggaatggtgacaacatgcctggagccaagtgcctaacatgccttggtttcaaggggatggaaaagtcacccgtaaggatggcaatgccagtggaaccacgctgcttgaggctctggactgcatcctaccaccaactcgtccaactgacaagcccttgggcctgcctctccaggatgtctacaaaattggtggtattggtactgttcctgttggccgagtggagactggtgttctcaaacccggtatggtggtcacctttggtccagtcaacgttacaacggaagtaaaatctgtcgaaatgcaccatgaagctttgggtgaagctcttcctggggacaatgtgggcttcaatgtcaagaatgtgtctgtcaaggatgttcgtcgtggcaacgttgctggtgacagcaaaaatgacccaccaatggaagcagctggcttccctgctcaggtgattatcctgaaccatccaggccaaataagcgccggctatgcccctgtattggattgccacacggctcacattgcatgcaagtttgctgagctgaaggaaaagattgatcgccgttctggtaaaaagctggaagatggccctaaattcttgaagtctggtgatgctgccattgttgatatggttcctggcaagcccatgtgtgttgagagcttctcagactatccacctttgggctgctttgctgttcgtgatatgagacagacagttgcggtgggtgtcatcaaagcagtggacaagaaggctgctggagctggcaaggtcaccaagtctgcccagaaagctcagaaggctaaatgaatattatccctaatacctgccacccaactcttaatcagtggtggaagaacggtctcagaactgtttgtttcaattggccatttaagtttagtagtaaaagactggttaatgataacaatgcatcgtaaaaccttcagaaggaaaggagaatgttttgtggaccactttggttttcttttttgcgtgtggcagttttaagttattagtttttaaaatcagtactttttaatggaaacaacttgaccaaaaatttgtcacagaattttgagacccattaaaaaagttaaatgag

SEQ ID NO: 7974 - DNA, 425 bp, Homo sapiens
  SIMILAR (2)..(229): 961254mologous to Homo sapiens Human secreted protein, SEQ ID NO: 6033,accession number AAG01952,Smith-Waterman Score=363.
agtgaccaaggagctcttacagatggacctgtacgcgctgctaggcattgaggagaaggcagcggacaaagaggtaaagaaggcgtataggcagaaggccctctcctgccacccagacaaaaatccagataatcccagagcagctgaactcttccaccagctttctcaggccttggaggtgctgaccgatgctgcagccacggctgcatacgacaaggtcatgtacgcctctatgcatgtcacataattgactcagattacttgcgagtattggtataatgttctcctatacttggcggcttcgaatctcatatcttcactctactactattctaatagctcttactcttctcgtatactattaccttttatattcatatactcgtatcatcacctgcacgttgctcatttaatcctatctctct

SEQ ID NO: 7975 - DNA, 420 bp, Homo sapiens
tgaaaatttgatgctgaccctttcgttcttccatagtgggttataaattttagcagtcagtacaaactttttcctttaagttttgttttcttgatggactgtattcaaaataaatacctgaacaaataccaactatataacatgaagccataaaacttggtctttatatataaataaagtttatcttggggtcagatgtctgtgctgttttctatattatcttatatccaatagtatggtctttttcctttcagttttgtatgcttttcttgtaatcgagccttggaagagacagagccactgagcccaaaacctagctttgtggtcggctgtggtggctcatgcctgtaatcccagcactttgggaggctaaggcgggaggattgcttaaactcaggagtatgagaccttgtctctatt

SEQ ID NO: 7976 - DNA, 3319 bp, Homo sapiens
  SIMILAR (2551)..(2132): 741254mologous to Homo sapiens heat shock protein hsp40 homolog,accession number U40992,Smith-Waterman Score=513.
ctttttaatccaaagattattatatatctatctataaatcatttattttacctgggagaaaatgcttaatcaagaaaattgcaataaataatgatgggtttaaaacagaaaccactatcattcaccacgttgactgatgcttttcagatctagatctttagacttgtgagaaaatttctgtaatgttcacacttctgtagggagttttaactgtcattcagagagacagttatagaggaatcatttatgaattagagtaataaatacgattagctgaattctgtggcattttttttcaagcattttccatttgcaactcaaatatatggttactcccagaaattccacttttaggtatatacccatgagaattgaaacacaaaaacttgcacacaaatgttcacagcagcattatttataatatcttaaaaagtagaaataagccaaatgcccataattaatgaaaagataaacaaattgtggtatatccatatgacgtgccacacaaaaaataaagtactgatacgtgatacaacatagatgaaccttgaaaacattaagctaaatgaaagaggccagaccaaaaaaaaaaaaaaagccatatattgtttgagtctatttatgtgatatgtccagaacagacaaatccatacagatgaaaagtagatggtagtgttttcaggggctggaggaagggaagaatgggaagtaactgctaatggatttaggatttctttttggggtgatgaaaattattctggaattagaaagtgatgatgattgtaccactttgtaaatatcactaaaaaccactgaattatatattttaagggtaaactttatggccatgtaaattatatctcaataaagtaataaagaatatggctattataacctatttatattggatttctaaaagaatatttcatattctactaaaaggcgataggatccagtatatatatatataatcctgaaaactattttataaccaaaaattttgcttcaaaacatcattctcgctatagttataaaacagaaaacaaaactaaatttttaaaacataaatatatttaaaaaattaaaacacctaagaaatgccaacctatacatgtgaaaaagtaaaatatttatatgccataacaagtagttgcaacattatcccataagcagcagttagtgtttattttcccctatattttggtttaacaccatagtgtagtggtagttcattctttttagggaaattacataaagtacatatagaatattattagtaagttatagaagactgtataactggaaaattaattccaagtaacagcatttcctcttaaaaccccatctattattaaacggaattacgtttaaactagcagagaacaaaatgagcctataatttattaagtacaagatatatagtcaacttgcataaaattacatatgggcattttaaaaagtctattctaaaatatcagtaattcaagcaattgggatttccacaggagagaaattgccattactttcctttttatgaagaaagatctgccttaagaacatcacaacgatgttattaagaaatgctacagcatactttaaaaatcaaaatggtgaaacagatgcatcaggatattcttttacagataccagccctatagcagcatttcagaaggtgatttaaatctaataactgacttgggtttttattctcttctagaaatacatattacatgtatagtttagttaagaattttcatttccattataaatgggaacttttcatactgattatctaaaggtataagaaattaagtaattggatagtctagcacttcattagaaatatatccactgactccacaaaaacaacttttacatataagcaaattactaaaaatatctgaatcagaagaaatgaaataaaattcagtgaatggttttctctttcatctctaactgtaaaaatcccttgggcctatttatttgagccgtctctattcatgcaatttaatgacccctcaaaagaatttgcacatctttatgcagaattcacatctacatcagtaaactaccagtccttctatattctcagtgccttatcaaaatatgtgtaacaaagttcttcattctatgaggcaggaagatgtttcctaagtacttctttggatgaagaagatatagtatctgggaaggacacctcaaattctattagaaggtcaccacgttggtcaggattttttggaaatggcagcccatatccaataattcttctcctcattccgggtttcacaatatcatttactgacataggtatgtttcttccatccagtgttggtacattaattgagcagccacgcaatgcctctcgtaaactaattttagcagtataaattatctttgatccatcccttttaaatgttgaatgataatttgtctttaatgataaaaacaatgtctgctggaatactatttggtgtttcatctccttctcttggaaaagtaattttggtgccttctttccacccttttttaatctcaatggtaagaattttgtcctcagatctgtaactccttccatcagcgtttagcctttttcgagaaatcttcatccgtttggtacaaccactatatatctcttcaagtgatactctaagttcatgaataactggaggatcttgtttgaggcgggatggccccacagaattcctgtctcttggatatccattcatgctgaaaccaaaggcactaaaaggatcaccatctatttccatttcttcagaatctctaccaccacccattcgtcttccaaagaaaatttcaaaggggttggaccctccgaaaaatgcagcaaatgtagcatgaggatcgccatgaaaggtgtaccggaaggtacctccttgtccatcagtacctcctgctcctcctttcaacccttcctccccaaactgatcatatatttctctctttttaggatcactcaatacttcataagcttctgcgacctctttaaatttttcctctgcctgaggagatttgttcttgtccggatgaaatttgagggcttgttttcggtaagcctttttaatatcttcatctgaagctcctttctcaattcccaaaatgcaataatagtctttccccatttcgaatgccttgaaattaacttagatttccctttgtaaaagaaaacagcgtccccagtcttagcaacagattctaagaaaaataaaccaagctgggtattttaaaagttaatcagcaattcagctagctgtcttaaggcagcaagcagacagcgtctcgtattcaatccttcccg

SEQ ID NO: 7977 - DNA, 631 bp, Homo sapiens
  SIMILAR (201)..(278): 1001254mologous to Homo sapiens Human secreted protein, SEQ ID NO: 5327,accession number AAG01246,Smith-Waterman Score=152.
ctggggcaaacgacacaagtcagcatttagtttcttgctttaggaagcggaagactaatgaccgaagcttcaagactttgacatgtgtgaaaacatgaaatgacccttggcgtcttattgttcttgctggtgtggtatgttcacggctgaaaagatggtcagaaggggaaaggaggaagtgagaagaaagaaacagggaaatgacagagtgttgctcagttacccaggctggagtgcaatggcatgatcttggctcactgcagcctccacctcctggggttcaagcggttctcgtgcctcagtctcccaagtagctgggattacagcaggctgagggaattaccaagggagggcagggaggtgggagcaaaacacaccaagcctgggtgcccaatcatttgacaatatttatgggaacttgacttcagccgcaaggaagacagcttcgactccttgtgatttcatccctaaccaatcagcactcctggctcactggcttcccccaacccaccaaattgtccttaaaaactctgctctccaaacgctgggggagactgatttgagtaataataaaaccctggtctcctgcaaaaaaaaaaaaaaaaaaaaaaaaaaaaaaaaaaaaaaaaaa

SEQ ID NO: 7978 - DNA, 425 bp, Homo sapiens
  SIMILAR (290)..(424): 951254mologous to Mus musculus putative,accession number AK020293,Smith-Waterman Score=250.
tttcgtggaaagagctgctggtggtcgggagagcggcggcatcgagaggcgagccagcggcgacgaatgaagaactgtttcacttactgcaggattttcagcttcagcaagcaggttctcatggagaactgttattgaagagagatccatttggtgggatataattaaaaaaaatgaatcaaaagaaaatctctaaatgcagattccagaaaaattacagcacatctcagtgaatttgcaagtggatcatccttccttgtgggttagcaggcagttataagattgcaaaatgggtctccggattcactttgttgttgacccacatggttggtgctgcatgggtttgattgtctttgtttggttatacaatattgttttaattcccaaaaatgtcctctttcctcactatgaagaaggacatattc

SEQ ID NO: 7979 - DNA, 1169 bp, Homo sapiens
  SIMILAR (414)..(854): 951254mologous to Mus musculus putative,accession number AK020293,Smith-Waterman Score=832.
agactttccgggtcgacgatttcgaggcggcggcgccggaggaggcggaggtggcgcggcaggatgaggtgaaagagctgctggtggtcggcagagcggcggcagcgagaggcgagccagcggcgacgaatgaagaactttttcacttactgcaggattttcagcttcagcaagcagttagcattttggaggcgctgctttgccagtcaatttctcatttaagcgtgacagcaactgtgttctcatggagaactgttattgaagagagatccatttggtgggatataattaataggaatgaaccagaagaaaatctctaaatgcagattccagaagaattacagcacatctcagtgaatttgctagtggatcatccttccttgtgggttagcaggcagctataagattgcagaatgggtctccggattcactttgttgttgacccacatggttggtgctgcatgggtttgattgtctttgtttggttatacaatattgttttaattcccaaaattgtcctctttcctcactatgaagaaggacatattccaggcatattaataataatattctatggcatttccatattctgtctggttgccttagtgagggcctccataactgatccaggaagactccctgagaaccccaagatcccacatggagaaagggagttctgggaattatgtaacaagtgtaatttgatgagaccaaagcgttcccatcactgcagccgctgcggccactgtgtgaggagaatggatcatcactgtccatggattaacaattgtgttggtgaagataatcattggctctttctgcagttgtgtttctacactgaacttcttagctgtacgcactgatgttttctttctgccactattactattttcttccactaaaaaagcgtaatttggacctctttgtttttagacatgaattggccataatgagactagcagcctttatgggcattactatgttagttggaataactggactcttttacactcaactaattggcatcatcacaccatgtgacatgcctgctcctactctgccttccatcatgaataaaagcttcttgaggcctcaccagaagccaagcagatgctggtgccatgcttatacagcctgcagagccatgagccaaataaaccttcttcttt

SEQ ID NO: 7980 - DNA, 412 bp, Homo sapiens
  SIMILAR (26)..(178): 921254mologous to Homo sapiens Human 5' EST related polypeptide SEQ ID NO:860,accession number AAY64699,Smith-Waterman Score=239.
cccacgcgtccgcccacgcgtccgcttgttaattctacttttggaaaatgtcagtggctatcgctttccggtaattttccagcttgatgcatcccctggccataagatacttccagactgtatgatatattctatcactgtcagccttatgttccctgtggttgactatataagcacgctttatggtttgggattgcatttaggaatgtccctacgtattgtctatgctcttattgttctgaatctatgtagtgtttcttactcaacactgtctttctattatcgatccatatcctattatactcttacgatcgactatatatatattactatattgtcagtctggatatggttcttcttcttctttttttatcttgatttgttcctgtttcacttttctcttacctcttcc

SEQ ID NO: 7981 - DNA, 571 bp, Homo sapiens
  SIMILAR (110)..(397): 951254mologous to Mus musculus putative,accession number AK011263,Smith-Waterman Score=498.
ggggcgcattccaaccttccaagcctgcgacctgcggagaaaaaaaattacttattttcttgccccatacatacctgagggcgagcaaaaaaattatattttaccatgaaggaaactcgtgcacatcagggctggtcagtgtggcaaccagatcggtgccaagttctgggaggtgatcagtgatgaacatggcatcgaccccaccggcacctaccacggggacagcgacctgcagctggaccgcatctctgtgtactacaatgaagccacaggtggcaaatatgttcctcgtgccatcttggtggatctagaacctgggaccatggactctgttcgctcaggtccttttggccagatctttagacaagacaactttgtatttggtcagtctggggcagagcccccatcacctcaggcttgtcagttcccttagccgtcttactcaactgcccctttcctctccctcagaatttgtgtttgctgcctctatcttgttttttgttttttcttctgggggggtttagaacagtgcctggcacatagtaggcgctcaataaatacttgtttgttg

SEQ ID NO: 7982 - DNA, 1748 bp, Homo sapiens
  SIMILAR (898)..(239): 431254mologous to Notothenia coriiceps beta tubulin,accession number AF255553,Smith-Waterman Score=350.
tttttttttttttttttttttttttttcaacaaacaagtatttattcgagcgcctactatgtgccaggcactcgttctagacccccccccagaagaaaaaacaaaaaacaagatagaggcagcaaacacaaattctgagggagaggaaagggggcagttgagtaagacggctaagggaactgagaagcctgaggtgatgggggctctgccttaggcctcctcttcggcctcctcaccgaaatacatcctcctcttctgcggtggcatcctggtaatggtgataatcacagaagaaggggtgtttatgttggccccaacctcggtgaaacccatctcgtccatgccctcggcctgtgtaccagtggaggaaggccttccgggcggaaacatggcagtggaacttgctccgaagatgcgctttgaagagctcctgggatgggctgtgctattggccaatgaagggtgactgccatcttgagggccacgaggtgggaatgtcacagacggctgtctttgacattgtttgggggatccattcccacaaagtagctgctgtttcttgttcttgcacgttaagcatctgctcaatggacctccttcatgggacatcccgaccacgggaagacagcaagccacggtgaggttatcggcgcgtgggcggggtcacaggcagcccatcatgttctttggatcgaaagaccttgctgggtgagttccggcactgtgagagctcgatactgctggctttccacggctggggagaagggcaaagccaggcattaaaaaaatggagacgtgggaaggggaccatgttgactgccaacttgcggaggtcagcattgagctggccagggaaacggaggcaggtggtgacaccactccatggtgcctgagacaaggtggttcagatccccgtaggttggtgtggtcagcctcagagtgcggaagcagattatcatagagggcctcgttgtcaatgcaataggtctcatcagtattctctaccaactgatggacggagagggtggcattgtagggctcgaccacggtgtccagacatttgggggaagggcaccacactgaaggttattcatgatgcgaatcagggtattctttctcgaatccttgctgataaaggagagtgcccattccagagcctgtgcccccgccccagtgagtgggtcagctggaagccctgcaggcagtcacagctctctgcctccttccgtaccacatccaggacaggaatcaaccaagctcggcgcccttctgtgctagtggccttttggcccaagttgttacctgcccccagacttgaccaaatacaaagttgtctggtctaaagatctggcccaaaaggacctgagcggaacagagtccatggtcccaggttctagatccacccaggatggcacggaggaacatatttgccaccttgtggcttcattgtagtacacaggagatgcgggtccagcttgcaggtcgcttgtccccgtgggtagggtgccggtggggtcgataccaatgttcatcactggatcacctcccagaacttggcaccgatctggttgccacactgaccagcctggatgtgcacgatttccctcatggttaaaatttaattttttttgctcgcctccaaggtatgtatggggcaagaaaataagtaattttttttctccgcagggtcgccaggctggaaggttggaattgcgccccagatggctggagcagcgaggtgcaaacgc

SEQ ID NO: 7983 - DNA, 451 bp, Homo sapiens
  SIMILAR (1)..(447): 971254mologous to Homo sapiens unnamed protein product,accession number AK000039,Smith-Waterman Score=771.
aatcaaatgacctccaaacaatacactggaaattccaacatgcctggggggctcccaaggcaagcttacacctttaaaacatcacagctggagcacaagtcacaaatgtaccaagttgaaatgaatcaagggcagtcccaaggtacagtggaccaacatctccagttccaaaaaccctcacaccaggtgcacttctccaaaacagaccatttaccaaaagctcatgtgcagtcactgtgtggcactagatttcattttcaacaaagagcagattcccaaactgaaaaacttatgtccccagtgttgaaacagcacttgaatcaacaggcttcagagactgagccattttcaaactcacaccttttgcaacataagcctcataaacaggcagcacaaacacaaccattccagagttcacatcttcctcaaaaccaacaacagcagcaaatat

SEQ ID NO: 7984 - DNA, 654 bp, Homo sapiens
  SIMILAR (1)..(213): 1001254mologous to Homo sapiens Human fetal brain cDNA clone vb3_1 derived protein,accession number AAY50907,Smith-Waterman Score=359.
tcagtggcactcaacacccgaaaattgtggagcatgcaccttcatgttcaagcaaagttgctccaagaaatagttcgctctttctctggcacaacctgccagcccattcaacatatgttacggcgtatttgtgttcaattgtgtgaccttgcctcaccaactgcacttctgattatgagaactgtgttggatttgattgtagaagacttgcaaaggtattttcattttgcattaaaaattttttcctcaaattatttttgacacatatattttttcccttacaatttggaaactagggtttggaatgcccagataacatatatacatgtaaatatacacatatacctacatatgcacacatatgaatatatgaatacttgtagacttttaaaattagaaagctttatttcatcatttcatgtgcaagatatcttgaaggtcttgatttgggattttcaaatggtgaatcctaaagaagtactgtgatttaagaaaatatattattagaaacctgaatttataaaatttttgcagtcattgtaaaattccagagaatttgtcattatacccaaggaattaaatgttttatgcaaaatttgtgtaagttgatgtgtattgacaaataaatactagtttaccaatgaaaatatatag

SEQ ID NO: 7985 - DNA, 1907 bp, Homo sapiens
  SIMILAR (12)..(1904): 991254mologous to Homo sapiens RIKEN cDNA 1110037F02 gene,accession number BC003701,Smith-Waterman Score=3247.
ccgtaacatatgttgaattgtgtgaccttgcctcaccaactgcacttctgattatgagaactgtgttggatttgattgtagaagacttgcaaagcacttcagaagataaagaaaaacagtatactagccaaaccaccaggttgcttgctcttcttgatgctctggcttcacacaaagcttgtaaattagctattttgcatctaattaatggaactattaaaggtgatgaaagatatgcagagatattccaggatcttttagctttggtgcggtctcctggagacagtgttattcgccaacagtgtgttgaatatgtcacatccattttgcagtctctctgtgatcaggacattgcacttatcttaccaagctcttctgaaggttctatttctgaactggagcagctctccaattctctaccaaataaagaattgatgacctcaatctgtgactgtctgttggctacgctagctaactctgagagcagttacaactgtttactgacatgtgtcagaacaatgatgtttcttgcagagcatgattatggattatttcatttaaaaagttctttaaggaaaaacagtagtgctctgcatagtttactgaaacgagtggtcagcacatttagtaaggacacaggagagcttgcatcttcatttttagaatttatgagacaaattcttaactctgacacaattggatgctgtggagatgataatggtctcatggaagtagagggagctcatacatcacggacgatgagtattaatgctgcagagttaaaacagcttctacaaagcaaagaagaaagtccagaaaatttgttccttgaactagagaagcttgttttggaacattcaaaagatgatgacaatctggattctttgttggacagtgtagttggacttaagcagatgctggagtcatcaggtgaccctttacctctcagtgaccaggatgtagaaccagtactttcagctccagaatctcttcagaatctgtttaacaataggactgcctatgtgcttgctgatgtcatggatgatcagttgaaatctatgtggttcactccatttcaggctgaagagatagatacagatctggatttggtaaaggttgacttaattgaactctctgaaaaatgctgtagtgactttgatttgcactcagaattagagcgctcatttttgtcagaaccatcatctccaggaagaaccaagactactaaaggattcaaacttgggaagcacaagcatgagacctttataacgtcaagtggaaaatctgaatacattgaacctgccaaaagagctcatgttgtgccaccaccaagaggaaggggcaggggaggatttggacagggtatacgacctcatgatatttttcgtcagagaaaacagaacacaagtagaccaccatctatgcatgtggatgactttgttgctgctgaaagtaaagaagtggttcctcaagatggaatacctccaccaaaacggccactcaaagtatcacagaagatttcttcccgtggtgggttttcaggcaatagaggaggacggggtgctttccacagtcagaataggtttttcacaccacctgcttcaaaaggaaactacagtcgtcgggaaggaacaagaggctccagttggagtgctcagaatactcctcgaggaaattacaatgaaagtcgtggaggccagagcaattttaacagaggccctcttccaccattacgaccccttagttctacaggttaccgcccaagtcctcgggaccgtgcttctagaggtcgtgggggacttggaccttcctgggctagtgcaaatagcggcagtggaggctcaagaggaaagtttgttagtggaggcagtggtagaggtcgtcatgtacgctcctttacacgataa

SEQ ID NO: 7986 - DNA, 651 bp, Homo sapiens
  SIMILAR (43)..(447): 1001254mologous to Homo sapiens Human signal peptide containing protein HSPP-12 SEQ ID NO:12,accession number AAY87235,Smith-Waterman Score=679.
gagtgtctctgcgtctcgacggctgtacgaattcggcacgagcttaaaactatgttaacggaactcctgagaggtggatcctttgagtttaaggacatgcgtgttccttcagcgcttgttactttacatatgctcctgtgctctatccccctctcaggtcgtttggatagtgatgaacagaaaattcagaatgatatcattgatattttactgacttttacacaaggagttaatgaaaaactcacaatctcagaagagactctggccaataatacttggtctttaatgttaaaagaagttctttcttcaatcttgaaggttcctgaaggatttttttctggactcatactcctttcagagctgctgcctcttccattgcccatgcaaacaactcaggtatcacttccatataacatgcatcttataaatgactgcagtaacactttttaaaaagccagtgattctgttaaaaaacaaaaaccctcatctcccttcctcccaaaaagacataaaataaccggatgagggggagataaaactgaaacaagttggtcattgaggaaatatgggggtaaaaattttaaataaatttttgttaaagtgagttttattttgctgttttgtatgtttgtacttacatttttctgttat

SEQ ID NO: 7987 - DNA, 1312 bp, Homo sapiens
  SIMILAR (144)..(596): 441254mologous to Mus musculus putative,accession number AK002367,Smith-Waterman Score=226.
ctcgcacggaaccccgggtcgacccacgcgtccggtggaattcttctcgggaggcagtgctgggtccttttcaccatggtttcctaagaaagcaaagaagagagccgggggtgccgactccaacgtgttctccatgttcgaacaagacccaaatgcaggaatttaaggaggccttctctatcatggaccagaacagggatggcttcattgacaagaaccgatctgagagacacctttgctgcccttggcgaagttgaaccgtgaaaaatgaagaaattgatgaaatgaatcaaggaagcttccgggtccattaaactttactgtgttcctcacaaatgtttggggagaaaatttaagggaagcggaccctgaggcaaaccattctcaaccgcattcaaaagtgtttgacccttaaaggccaaaggggtgcatgaaggctggattacggtttcggggaaaatgctgacccacgcagggcggaggaggttttccaaggaaggaggttgaaccaaatgttcgccggccttccccccctgacgtgactgggcaacttggactacaagaacctgggtgcacatcatcacccacgggagaagagaaggactaggaagggggctcgctgctgcgcccttggcttcgtcttttgcagagtggtccctgccctcatctctctcccccgagtaccgcctctgtccctaccttgtctgttagccatgtggctgccccatttatccacctccatcttctttgcagcctgggtggctatgggtacttcgtggccgcacatcctacagttggaaatccatccagaggccatgttccaataaacaggaggtcgtgtatttggtcgcgacatttctctgacaaacagtgccttgtgtaaggaaggcaaaggcagatgagctagtgacagccttgcagtcattattattgaatcttgctgactctttatgtaaggtagacttttgcagccactcagaactgtttctatcaaggatcacgttttcctggaatgttacctggatgaccaaagccctctcttccaaagagctcaagcatttagagggccttgcttccatgacatctgtcccttgggatgccatcggaatgcctctcctgccagtgacagtgacaagaaggaagcggactgacacatggtaggaacatagctcgttcaccagtaatcacacctgctaatcctaagagggtgacttctagtttcagataaagtagaagttgtctgtacttcttccctagcaaactgagggagtggtactgacttctgtctctgtctggggcccaggcaaaaaaa

SEQ ID NO: 7988 - DNA, 2115 bp, Homo sapiens
  SIMILAR (1357)..(2115): 1001254mologous to Homo sapiens RIKEN cDNA 1110037F02 gene,accession number BC003701,Smith-Waterman Score=1313.
cgtcagccaacgcgcccccgtacgtgtgtctgaatgttgatgcccaccttcttttgttgaaggtcaccagaaagatctgaagggaggtgttgccgttattcagcttttttctgctgaaggaatggacacgtttattcgagttctgcaaaaattgaacagtattctgactcagccttggaggctccatgtcaacatggggactacccttcacagagttactactatttcaatggctcgctgcacactcactcttcttaaaactatgttaacggaactcctgagaggtggatcctttgagtttaaggacatgcgtgttccttcagcgcttgttactttacatatgctcctgtgctctatccccctctcaggccgtttgaatagtgatgaacagaaaattcagaatgatatcattgatattttactgacttttacacaaggagttaatgaaaaactcacaatctcagaagagactctggccaataatacttggtctttaatgttaaaagaagttctttcttcaatcttgaaggttcctgaaggatttttttctggactcatactcctttcagagctgctgcctcttccattgcccatgcaaacaactcaggttattgagccacatgatatatcagggggcactcaacaccccgaaaattgtggagcatgcaccttcatgttcaagcaaagttgctccaagaaatagttcgctctttctctggcacaacctgccagcccattcaacatatgttacggcgtatttgtgttcaattgtgtgaccttgcctcaccaactgcacttctgattatgagaactgtgttggatttgattgtagaagacttgcaaagcacttcagaagataaagaaaaacagtatactagccaaaccaccaggttgcttgctcttcttgatgctctggcttcacacaaagcttgtaaattagctattttgcatctaattaatggaactattaaaggtgatgaaagatatgcagagatattccaggatcttttagctttggtgcggtctcctggagacagtgttattcgccaacagtgtgttgaatatgtcacatccattttgcagtctctctgtgatcagcaaagttctcatatagatgtggttcgttttccatgtgtggtttatatcaatgaagtccgagtcatacccccaggagtaagagcccatagcagtctgccagacaatagagcatatggatatcttcacagtcatcacttcttggagttggttaccttgcttctgtcaattccagtaacaagtgctcaccctggtgtgctgcaagccacaaaagatgttttgaagtttcttgcacagtcacagaagggtcttcttttttttatgtcggaatatgaagcaacaaatttattgatccgagctctgtgtcacttttatgatcaagatgaggaggaaggtctccaatctgatggtgttattgatgatgcatttgccttgtggctacaggactcaacacagacattgcaatgtattacagaactgttcagccattttcagcgttgtacagccagtgaagaaacagaccattcagatctcttgggaaccctgcacaatctttatttgattacttttaatcctgtgggaagatcagctgttggccatgtttttagtctggagaaaaatctccaaagtcttattactctaatggagtactattccaaagaagccttgggtgattccaaatctaagaagtcagtagcttataattacgcatgcatacttattttggtggtggttcagtcttccagtgatgttcaaatgctagaacaacatgcagcatctctcttgaagctttgtaaagcagatgaaaataatgctaaattgcaagaacttggcaagtggcttgaacctctgaaaaaccttagatttgaaattaactgcatcccaaacttaattgagtatgttaagcagaatatcgataacttgatgaccccagaaggagttggccttaccactgccttacgtgttctctgtaatgttgcatgcccaccacctcctgttgaaggtcaacagaaagatctgaaatggaatcttgccgttattcagcttttttctgctgaaggaatggacacgtttattcga

SEQ ID NO: 7989 - DNA, 477 bp, Homo sapiens
  SIMILAR (38)..(313): 1001254mologous to Homo sapiens FLJ00061 protein,accession number AK024468,Smith-Waterman Score=484.
tatcgtgtcgccggaagttcggtgggctccaggcgtcgcgatggaggagagcgggtacgagtcggtgctctgtgtcaagcctgacgtccacgtctaccgcatccctccgcgggctaccaaccgtggctacagggctgcggagtggcagctggaccagccatcatggagtggccggctgaggatcactgcaaagggacagatggcctacatcaagctggaggacaggacgtcaggggagctctttgctcaggccccggtggatcagtttcctggcacagctgtggagagtgtgacggattccagcaggtactttcgtgatccgcatcgaagatggaaatgggcgacgggcgtttatttgaatttggcttcggggaccgaggtgatgcctttgacctcaatgttgcattgcaggaccatttcaagtgggtgaaacagcagtgtgaatttgcaaaacaagcccagaacccagaccaaggc

SEQ ID NO: 7990 - DNA, 2188 bp, Homo sapiens
  SIMILAR (1614)..(1435): 981254mologous to Homo sapiens dJ798A10.1 (novel protein),accession number AL137802,Smith-Waterman Score=301.
  misc_feature (1)...(2188): n = a,t,c or g
tttttttttttttttttttgacagaagtaaaaatatttattttatcttaaaaatctggtcccgcaaaaaaggccaacactttttttcagttcacggtcttgacctttcaaagaagaaatctttcaactgagaggtgagttaataaaaggaatgttcagaggtgctttccagatttcttataaaccagtaaaccaagcaaccctgggacttctagtttactgagctccttcttctagccgattcacagttcctgaaggagaaaaagaagttgtttgcagataagggcactttaggaaaccaccaaagaggaaaacccaagtctgccgggggctggcactgtggaacatgtgaggccgagagggcccaccaggcaggacagagtgccaacttccccacagcttccatgacaacaagcaatccacctttcctggccccaacattgtttccgtttgggcttccagcacccgccttggctctgtgttggcctacctggggctaggaatacatgggaaacccagacaactggccagagatgaacactggctggcctgaagctcatgggcagctgcccacacgtgaggatacccttcaggaggcncccagctggggcaacgcccgagggaaccagttcccttttgccaaagatgaagttagtgcgggatccagcacatttagcaaaagcaaaaatatttaaacatttttaaaagctgcctaatccttccaattttccctcctggatttgtagctcaagctgcagcctctaaacctgctaaaaatcaggaaggaaaacccctcctctgggaggggcagatggactgaagtggctacagcccagtgtgggtacggaaagcctcccggctgaaactgtgatcatgtgaacacctgcaaaacccctgggaaaagggctgaactgaaaccctggcagcaaaactcaaccctccttccttttgccttggggggccttgtgtttaatacaggtccattgcgatggaaagaagtctcagagtctctctcaacatcaaagaggacagatgggggacagggatccctggagcttttcttctcctgtgttctggttgccatacttgaatccccaggaaaacagtgtgaacacggtgcccaatttactgcccaaacatgccccggtttgtcaacagagcccagacaaggaggagaaggaagagaattcatgtccccaaacacaggtccatgctgaaggaagggtcttacgtgcctgccttgcctttggccccagatgaagggaagcgccttcccagaaagtncacatgaggaaaaaccgtgctcaggtcagaactggacccagcctgtgcctggctgggtctggctggaagttgatcctgtagatttggtaaagtctccccagatgtcagcagtggcaggattgggctgtggccagggtacaggagcacctcctgaactgggagcaactgctggctggacgagggatccccccacagccaactgctccccagggggagggatcagggtggaggttttcccccctgggggagggggaagcaggctcagccctcctgtgctggcaggccggactcggggattcccagctgctccttccttcttcttcatgtatgcgcatgttgagattgatggtctggccctccttgaagcccaggtccagtttagggccttggtctgggttctgggcatgttttgcaagttcacactgctgtttcacccacttgaaatggtcctgcaatgcaacattgaagtcaaaggcatcacctcggtccccgaagccaattccaataaacgcccgtcgcccatttccatcttcgatgcggatcacgaagtacctgctggaatccgtcacactctccacagctgtgccaggaaactgatccaccggggcctgagcaaagagctccctatcgtcgccgcacttatgactgtcttctttatcatgcaactcgtaggacaggtgccggcagcgctctgggtcattttcggcgaggaccgctttcgctggagcgcgacgatgatcggcctgtcgcttgcggtattcggaatcttgcacgccctcgctcaagccttcgtcactggtcccgccaccaaacgtttcggcgagaagcaggccattatcgccggcatggcggccgacgcgctgggctacgtcttgctggcgttcgcgactgatatggctattttt

SEQ ID NO: 7991 - DNA, 2705 bp, Homo sapiens
  SIMILAR (106)..(2691): 911254mologous to Homo sapiens Human transcriptional regulatory factor SEQ ID NO:1,accession number AAY57452,Smith- Waterman Score=4087.
tttcgtgcggcggccacctggcccggaccaccgtgtgcccggagggccgtcaacaaagtggtgtacgatgaccacgagagcgaggaggaggaggaagaggaggacatggtctccgaggaggaggaggaggaggacggcgacgccgaggagacccaggattctgaggacgacgaggaggatgagatggaagaggacgacgatgactccgattatccggaggagatggaagacgacgacgacgacgccagttactgcacggaaagcagcttcaggagccatagtacctacagcagcactccaggtaggcgaaaaccaagagtacatcggcctcgttctcctatattggaagaaaaagacatcccgccccttgaatttcccaagtcctctgaggatttaatggtgcctaatgagcatataatgaatgtcattgccatttacgaggtactgcggaactttggcactgttttgagattatctccttttcgctttgaggacttttgtgcagctctggtgagccaagagcagtgcacactcatggcagagatgcatgttgtgcttttgaaagcagttctgcgtgaagaagacacttccaatactacctttggacctgctgatctgaaagatagcgttaattccacactgtatttcatagatgggatgacgtggccagaggtgctgcgggtgtactgtgagagtgataaggagtaccatcacgttcttccttaccaagaggcagaggactacccatatggaccagtagagaacaagatcaaagttctacagtttctagtcgatcagtttcttacaacaaatattgctcgagaggaattgatgtctgaaggggtgatacagtatgatgaccattgtagggtttgtcacaaacttggggatttgctttgctgtgagacatgttcagcagtataccatttggaatgtgtgaagccacctcttgaggaggtgccagaggacgagtggcagtgtgaagtctgtgtagcacacaaggtgcctggtgtgactgactgtgttgctgaaatccaaaaaaataaaccatatattcgacatgaacctattggatatgatagaagtcggaggaaatactggttcttgaaccgaagactcataatagaagaagatacagaaaatgaaaatgaaaagaaaatttggtattacagcacaaaggtccaacttgcagaattaattgactgtctagacaaagattattgggaagcagaactctgcaaaattctagaagaaatgcgtgaagaaatccaccgacacatggacataactgaagacctgaccaataaggctcggggcagtaacaaatcctttctggcggcagctaatgaagaaattttggaatccataagagccaaaaagggagacattgataatgttaaaagcccagaagaaacagaaaaagacaagaatgagactgagaatgactctaaagatgctgagaaaaacagagaagaatttgaagaccagtcccttgaaaaagacagtgacgacaaaacaccagatgatgaccctgagcaaggaaaatctgaggagccaacagaagttggggataaaggtaactctgtgtcagcaaatcttggcgacaacacaacaaatgcaacttcagaagagactagtccctctgaagggaggagccctgtggggtgtctctcagaaacccccgatagcagcaacatggcagagaagaaggtggcatctgagctcccccaggatgtgccagaagaacctaacaagacatgtgagagcagtaacactagtgctaccactacctccatccagcctaatctggaaaacagtaacagcagcagtgaactaaattcttcccagagtgaatctgctaaggcagctgatgatcctgaaaatggagaaagagaatctcatacacctgtctctattcaggaagagatagtaggtgatttcacatcggagaagtccaccggggagctaagtgaatctcctggagctggaaaaggagcatctggctcaactcgaatcatcaccagattgcggaatccagatagcaaacttagtcagctgaagagccagcaggtggcagccgctgcacatgaagcaaataaattatttaaggagggcaaagaggtactggtagttaactctcaaggagaaatttcacggttgagcaccaaaaaggaagtgatcatgaaaggaaatatcaacaattattttaaattgggtcaagaagggaagtatcgcgtctaccacaatcaatactccaccaattcatttgctttgaataagcaccagcacagagaagaccatgataagagaaggcatcttgcacataagttctgtctgactccagcaggagagttcaaatggaacggttctgtccatgggtccaaagttcttaccatatctactctgagactgactatcacccaattagaaacaacatcccttcatccttccttcatcccaactgggcatcacatagggcaaattggatcaaggcagttcagatgtgtagcaaacccagagaatttgcattggctttagccattttggagtgtgcagttaaaccagttgtgatgctaccaatatggcgagaatctttaggacataccaggttacaccggatgacatcaattgaaagagaagaaaaggagaaagtcaaaaaaaaaaaaaaaaaagagaagaaacaggccggaattccagctgagcgc

SEQ ID NO: 7992 - DNA, 1084 bp, Homo sapiens
  SIMILAR (343)..(414): 351254mologous to Homo sapiens bromodomain PHD finger transcription factor,accession number AB032251,Smith-Waterman Score =49.
ccggaccaccgcggcccggagggccgtcaacaaagtgttgttcgatgaccacgttagcgaggaggaggaggaagaggaggacatggtctccgaggaggaggaggaggaggacggcgacgcccaggagacccaggattctgaggacgacgaggaggatgagatggaagaggacgacgatgactccgattatccggaggagatggaagacgacgacgacgacgccagttactgcacggaaagcagcttcaggagccatagtacctacagcagcactccaggtacccacccagcccagttgctgcagactccttccccacctcctctgccctccccccttgctcactcgtgtgctgtgcatcctgctccgatctccccccaaccccgcctcccccccaaacagaggggaaatgcgagggcacatcaagtggcaaaaaactagatttacaagagggaagaggcgcattgttaaaaataggagattgcattgttgcagtttggaggctacactcgctcgctctctctccccccccccaaccccctttttttcctcttcaaaatttgtgccagtgcagtgtctccaccgggcaggattgaaactttggcaaacacatatccattgcattcatttttctccccttgttttggtgtggttttctggaatgaaagaagcctcttgttttgcaaacctctttgcatttctaatgtggtttctttcggatttttattatatatctgttacttaaaagggaattaaggatttggacagattgtggcacacaaacacacacaaaaacatgtctggtttcacatccctagctgtggttttaaaattgtgttaaggaaacggatcatttgggttagtaggggaaccttatctggtcctgtgtgtttgtttttattcttcgagtgctaatgggcccgtgcaacagttgctgttaaatggctgattaaaaagcaacgcagaaagccaaccaagacccaaccaaatttggttattcattcgattcaaaattgtttttggttaaatcaaaaatgaaagtacaaaactacaggaacgcgcgtcttaactcatttgatccgcttt

SEQ ID NO: 7993 - DNA, 1095 bp, Homo sapiens
  SIMILAR (129)..(920): 341254mologous to Herpesvirus papio NTR,accession number AF200364,Smith-Waterman Score=173.
ttagtcgggagggggcgctgtgcgcaggcgcgaggtgacgccgcggcagggccggaaggagtgcagcggctgccacggagctcgcagctgcggcttctgaggagtaagcggcgcggtagcgaaggccgccgaacctgcctggctagccggcgacttgagtgacgagtgagtgtcggctgcggggcgcgctcgagctcctgggcgggtctgtgaggcgacgcggcctctctgaggggcgcctctgtggagctccgggggtgggggcgggggcgcgggccgtgagggccgccgagctgaggggcgcgggccgaggcccgggcgggatcgggccaaggggctgggctgggcgtctcgagcccggtgcggtggcgaggctggagcgacaaaggcgctgagcggccgggtggccccctctcgccacttcgcgaagtttcgcgggccggcccctcgggtctgctgcgcgagggcaacagcccgggagaccgcgcttccctcccccgggcccgaggccgccgcggaggcggtgtccgtgcacccgagcgcggcctggaggagcggcgggaggcgggccgtgcctgtgaaccccagcccaggcgggcggcgtttttcctcctcttccctcacatctggagcgcgtgttccgcgaaagttggcgactgtcacccggcactcgcgagggcgccgcaagtgcgtcaaacccttctgcggggcgctgggggctggcccggctcgggtgtccgggcgctgggcagcgagcgaggccgctgtccccgcgtcgaggtggttctgctcccggtggaacaggaccagggatccaagactctgggccacttgcaaccaacccggcactgtgggctcctgcgcagcctgagcctccccgacgagtgccgtcccctgctcctcggcgccggatcccattgaccgcccaagggctgaggagtgcaggcgcacagcacgggactggcaggcggctccaccctcttgatcagggctggctttgccatagattttagccatggataaactgagcgtgaggtagttctgcagcctgtacaggaagcgtggctggggaggcctcaggaaactgacagtcat

SEQ ID NO: 7994 - DNA, 639 bp, Homo sapiens
  SIMILAR (155)..(3): 961254mologous to Homo sapiens HTRM clone 693452 protein sequence,accession number AAY73347,Smith-Waterman Score=257.
tttttttttttcctttttccactggtttctggtgatagctcctgccattttttaatggcatcagaaaaggcctttcgggtgattgcatagtgtcctttgagctcgtgcagggcccacttgatgtcctgactactgagcactttgaagtcggccatgaggaggtcaccagcttggatgaagcagtgctggtcaagaggagtcaatttagaatagtcaaaaaagtcttattttaggcaactttgtctcatcttggctggccagcagaccgcctactgggatttataatgattccgtcttctctctttggataatctgggttttccagaagaaaattacaaagtcttgtccccgatggcagtgaaagttgttcaagtgaattacctcttcattgttgtttccctcttccattttcaaatgcagacatgcacatacgggactgctaatatctaaacatggtgaccatcgtgtttcaaaagagtcgccactcaactcgccggctagccaggcgggttcggcgaccttcgctaccacgccgcttactcctccaaagctgcagctacgagctccgtggcagccgctgcactccttccggccctgccccggcgtcacctcgcgcaagcgtacagcgcgcgctcgtgc

SEQ ID NO: 7995 - DNA, 2256 bp, Homo sapiens
  SIMILAR (1323)..(1478): 731254mologous to Homo sapiens HTRM clone 693452 protein sequence,accession number AAY73347,Smith-Waterman Score=187.
agacgtgccggaccggaattgccgggtcgacgatttcgtaggtgacgccgcggcaggctcggaaggagtgcattggctgccacggagctcgcatctgcggcttctgaggagtaagcggcgcggtagcgaaggccgtcgaacctgcctggctagccggcgacgttgagtgacgactcttttgaaacagatggtcaccatgtttagatattagcagtcccatatatgcatgtctgcatttgaaaatggaagagggaaacaacaatgaagaggtaattcacttgaacaactttcactgccatcggggacaagagtggatcaatctccgagatgggcccatcaccatatctgactcctcagatgaggaaaggattccaatgctggtcaccccagctcctcagcagcatgaagaagaggacctggatgatgatgtcatcctgacagaaacaaataaacctcagagatcacgacccaatctcatcaaaccagctgcccagtggcaagatctgaaaaggttgggagaagaaaggcctaaaaagtctagagcagcatttgaatcagataagagcagctatttttcagtgtgtaacaacccattgtttgattctggggcacaggatgattctgaggatgactacggtgaatttctggatcttgggcctcctggaatctctgaattcactaagccaagtggccaaacagaaagagaacccaagcctggaccgagtcataaccaagcagcaaatgacattgtcaaccccagatcagagcagaaagtcatcatcttggaagaaggtagccttctttacacagaaagcgatcctttggaaactcagaaccagtcatccgaagactcagagacagagctgttatcaaatctaggagagtcagctgctctagcagatgatcaggccatcgaagaagactgctggttagatcatccttacttccagtctctgaaccaacagccccgtgaaataacaaaccaggtcgttcctcaggaacggcagcctgaagcagaactgggccgcttgttgtttcagcatgaattcccagggcccgcttttccaaggccggaaccccagcaaggagagtttgaagaccagcagttagcaagtgatgatgaagagccaggtccagcctttccaatgcaagaatctcaagagcccaatttggaaaacatttgggggcaagaagctgcagaggtagatcaagagctcgttgaactactagtgaaagaaacgttgcctaaaatagacttttttgactattctaaattgacccctcttgaccagcgctgcttcatccaagctgctgacctcctcatggccgacttcaaagtgctcagtagtcaggacatcaagtgggccctgcacgagctcaaaggacactatgcaatcacccgaaaggccttgtctgatgccattaaaaaaatggcaggagctgtcaccagaaaccagtggaaaaaggaagaagagaaaacaaatgaaccagtattcttacattgatttcaagtttgaacaaggtgacataaaaatagaaaagaggatgttctttcttgaaaataagcgacgacattgtaggtcctatgaccgacgtgctctccttccagctgtgcaacaagagcaggagttctatgagcagaaaatcaaagagatggcagagcatgaagactttttgcttgccctacagatgaatgaagaacagtatcaaaaggatggccagctgattgagtgtcgctgctgctatggggaatttccattcgaggagctgacgcagggcgcaaatgctcacttgttctgcaaagagtgtctcatcagatatgcccaagaggcagtctttggatctggaaagttggagctcagctgcatggaaggcagctgcacgtgttcgttcccaaccagtgagctggagaaggtgctcccccagaccatcctgtataagtactatgagcgaaaagccgaggaggaggttgcggcagcctacgccgacgagcttgtcaggtgcccgtcctgtagctttccggctctgttggacagtgatgtgaagaggttcagctgtcctaatcctcactgccgaaagggctgctgcagcccctcaggtttctcccctcgaaactcgcagaggcaactgctgaccccccggcaggtggcagagcccacacccacctgcatttcagagccaaggaagtctagagtcagcgtgggctccgagaacccggcagcgacctggggcctcagatgtcgccgacctccctga

SEQ ID NO: 7996 - DNA, 369 bp, Homo sapiens
agtaaagttgttctttttaaagtgtatttcctgtgctggttttctttgcttcctattaaaagactagattataataaataggctgcatgttatcagtggcattgtcgtaccttatgggtctataaaccctcatccttccctatactttgctcatcataagatttgaagtagtataaataaaacttgattagcttgtaatttagtattctgaaaggtatttttaaaaatttctatttaatgcagttagagtaacttgtaagctattaggaattacttattcttaccttaattttcttttcttttcaggaatttagtggttatgttcaacaagtaaaatatgccatgaccagaataaaagctggcatgccg

SEQ ID NO: 7997 - DNA, 440 bp, Homo sapiens
  SIMILAR (84)..(440): 921254mologous to Homo sapiens homeobox prox 1,accession number AF100755,Smith-Waterman Score=608.
  misc_feature (1)...(440): n = a,t,c or g
tagtcttgcggtantgcagggacgacccacgcgttcgtctctcccggtcgaggcccgttggaccacattttttatcgccgaccatgttccgacgcaagttgaggggtcttgactaccacaaccccgccgccttcaactgcaaagatgaaacagaatttagaaacttcatcgtttggcttgaagacccgaaaatcaggcactacgagattgaagacagagggaatttaagaaacatccacagcagcgactggcccaagttctttgaaaagtatctcagagatgttaactgtcctttcaagattcaagatcgacaagaagctattgactggcttcttggtttatctgttagacttgaatatggagataatgctgaaaaatacaaggattttagacctgataattcaaaaactgctgacaatggcactaaaaatgcagaaccg

SEQ ID NO: 7998 - DNA, 1257 bp, Homo sapiens; identical to SEQ ID NO: 303
  SIMILAR (430)..(1254): 991254mologous to Oryctolagus cuniculus elongation factor 1 alpha,accession number U09823,Smith-Waterman Score=1427.

SEQ ID NO: 7999 - DNA, 375 bp, Homo sapiens
  SIMILAR (157)..(333): 1001254mologous to Homo sapiens homeobox prox 1,accession number AF100755,Smith-Waterman Score=302.
cgaagtctgaaaaaatttaaaattggaaattattggcatttccagtaagggaaactcaacctgtaatcattttggctcagttaaatttggtaaatagcagtagtcattttaccttgagttgcagttgtacaaattatatttttgcctgtttttatagctgaaaaatacaaggatttagtacctgataattcaaaaactgctgacaatgcaactaaaaatgcagaaccattgatcaatttggatgtaaataatcctgattttaaggctggtgtgatggctttggctaacctgcttcagattcagcgtcatgatgattacctggtaatgcttaagggcaattcggattttggttcaggagcgcctgacacaggatgc

SEQ ID NO: 8000 - DNA, 1114 bp, Homo sapiens
  SIMILAR (185)..(541): 571254mologous to Gallus gallus CLE7,accession number U46756,Smith-Waterman Score=318.
  misc_feature (1)...(1114): n = a,t,c or g
gcggccaccgttttaaccacgattggcgaagcgccgtcatttcggagcgactcagcgcctgcccgccctctcgccgcgtcgccggtgcctgcgcctcccgctccacctcgcttcttctctcccggccgaggcccgggggaccagagcgagaagcggtggaccatgttccgacgcaagttgacactctctcgactaccacaaccccgccggcttcaactgcaaagatgaaacagaatttagaaacttcatcgtttggcttgaagaccagaaaatcaggcactacaagattgaagacagaggtgaatttaagaaacatccacagcagcgactggcccaaggttctttgaaaagtatttcaagagatgttaaacctgtcctttcaagattcaagatcgacaagaaagctatttgactggcttctttggttttagctgttagacttgaatatggagataatgctgaaaaatacaaggatttagtacctgataattcaaaaactgcttgacaattgcaactaaaaattgcagaaccattgatcaattttggatgtaaataatccctgattttaaggctggtgttgttggctttggctaaacctggcttcagattcagcgtcatggatggattacctgggnaaatgcttaaggcaaattcgggattttgggttcaggagcgccttgaccaccagggatgccagtttgcttaagggcaaatcaaacaaaagaggggcttacctgttgcttttagacaaacatattcttggttttgacacaggagatgcagttcttaatgaagctgctcaaattctgcgattgctgcacatagaggagctcagagagctacagacaaaaatcaacgaagccatagtagctgttcaggcaattattgctgatccaaagacagaccacagactgggaaaaagtttggaagatgaacacttgaggacttcagcttctcacctactttagtacagttgggaaccatacacttctggcatgtttggaaatcaaaatgtcacattctcgggggaggaagcccagaaaattgggtatgttctagagatttaccaccattgcttattgcttttttctttaataaagtttaggaaagtaga

SEQ ID NO: 8001 - DNA, 1429 bp, Homo sapiens
  SIMILAR (1340)..(1429): 771254mologous to Homo sapiens Human secreted protein, SEQ ID NO: 4409,accession number AAG00328,Smith-Waterman Score=128.
  misc_feature (1)...(1429): n = a,t,c or g
tttttttttttttttttaaccgataactttttttattgcaagcagatctaattaaataacaaagtccaagaaacacctgcctttaaggcactctccctaacaaactgagttatattccttgtaaaatataatagagaaataaaaatctatggggaaagggtcactctaaagatactttttatttaaatattttatgatgatacatatacaaatataatcttccaaaaaacaaatgtaaaactaagtgcaaatccactttttcaggaacaaagaaaatcatttagaaaatgtgattatgctaaaagaggcaggttaggtttcccaaggctgctcaaggtggaagcttaagaccaacttttggtttgagtacacaagtgatatttaccattttcatatacttagtgatatgcctgttgccatacctgggcaaaataaaactgatagtaagtcctataataataaaagaaacaacaattacctaagtaaacaattcctagatgatggaagagtaaccctcccatttaagcctacagaccttagatgtctaaaaaaatatgtgtcctgatctgtacacagttagtgggagcacacctatataaaatccctttgcatgacaccattcaacaatattttttaaaatcctacaaaaattttaaagtttcacttccctagcaaaatatcttcagtcaagaaattagtcctttgaaaaattnatgaaaattgttgtgggaaatatttatacaaattattactgataatgcacatatattttgaaacattgtttcctagaagcaataaaatataacctatttaggagataacccaaatgatttgtaaaaaaattaacttgtagaaaagggaaggatgttgtgtaaaatcaagtcaattatttgaggtatgttataatattgagtacttatgtactaagtcacacccagccagtcaataactgagaaatcagaataaaataataatttcaaagaattacataaatacagggccttttgagatttttggcaattgtaaacaaaaacgaatggtttttacaattcagtgtaattctacgaatatttatttggcacccatgttaggcactgaggctacacagcagtgaaataggcctagttgttcctcaactagagaacatagttggttaatgtagctgcactgaattgtagctgtttagaagataatataccctgaggctttttaaagtatactattactataagaagtaaaattattttatacttataaattttgttttggattattcaactgaatttggagtgttcagaattttcatggcggttgagacaaggaagaggtataatgctatttttttttccttttctttttttttttgagacggaatctcactctgttgcccagactggagtgcaatggtgcgatctcggctcactgcaac

SEQ ID NO: 8002 - DNA, 403 bp, Homo sapiens
  misc_feature (1)...(403): n = a,t,c or g
gcccacagccagagccatgcaagcgcagttctcttcggacagagccactgtctcaagactctgcccttcttcaagagaagagcccagaagaagagagaatgactgctaggccctttatggctggattcagnnnnnnnnnnnnnnnnnnnnnnnnnnnnnnnnnnnnnnnnnnnnnnnaagtttcctgaggcctccccaggtgtgcttcctgtacagcctgtggaatgttaccaaagacgttggaagaggtggctatggacatcacctgggagaagtggaagcaaatggacactgttcagaagtccatatacagaaacatgttggaaaaatatagaaacctggttttgctagagaaaccctatgaatatcatgactgggaaaactttcagttactgttcagacc

SEQ ID NO: 8003 - DNA, 2631 bp, Homo sapiens
  SIMILAR (1785)..(2207): 561254mologous to Homo sapiens b34I8.1 (Kruppel related Zinc Finger protein 184),accession number AL021918,Smith-Waterman Score= 436.
cggggcatgctgcttcccttcaccttccaccatgattgtaagtttcctgaggcctccccaggtgtgcttctgtacagcctgtggaatgttaccaaagacgttggaagaggtggctatgggacatcacctgggagaagtggaagcaaatggacactgttcagaagtccatatacagaaacatacttggaaaaatatagaaacctggttttgctagatgggaagcttgcagctggggccaagacatcaagagtagagcagcaggacatttcaaaagaagattaatctcaaagattagagatggaagaacttgcaaagagaaagtctgtaccggaagaaatctggaaatctagaggccagtttaagaatcagcagctaaacaaggagaataatctagggcaagagatagctacctgcacaaaaattcctaccagaaaaagagacatagaatctaatgaatttgtgaaaaattttactgtaagatcaatacttgttgcagaacagatagatcctatggaagagaattgtcataaatatggtacatgttgaaagatgctcaaacaaaactcagatttaattatacaaagaaagtatgatggaaaaaaaaaaaccttgtaaatatagtgaatgtgggagaaccttcagaggccacatcactcttgttcagcatcaaataactcattgtggagagagaccctgtaaatgtactgagtgtagaaagggatttaatcagagttcccacttaagaaataatcagagaaaaactctttcaggagaaaagccctacaaatgcagtgagtgtgggaaggccttcagttattgcttagttcttaatcaacaccagagaattcacagtggagagaaaccttatgagggtactgaatgtggcaagacattcattcagtcgtacataccttactcagcatcaaagaattcacacactggtgagaagccctatacatgtcttgaatgtggaaggctttttagtcagaacacacatcttactctacatcagagaatccatactggagagaaaccttatgaatgcaatgaatgtggtaggtcctttagtcagactgcacatcttactcaacatcaaagaatgtatacaggagaaaaactctatgaatgtaatgaatgtgagaaagccttccatgatcactcagctcttattcaacatcatattgtccatactgcagagaaaccctatgatatcatgactgggaaaactttcagttactgttcagacctcattcaacatcagagaatgcacactggagagaaaccatacaaatgcaatgaatgtgggaatgcctttagtgattgttcatcccttattcagcatcaaagaactcacactggagaagagccttatgaatgtaagcaatgtggaaaagcctttagcagaagcacataccttactcaacatcagagaagtcacgcaggagagaaacagtataaatgcaatgaatgtgagaaaactttcagcctgagttcattccttacacagcatatgagggttcagactggagaaaaaccctacaaatataatgaatatggaaaagcttttagtgactgctcaggacattttcagagaactcacactggagagaagccctgtgaatgtaatgactgtgggaaacctttcagtttctgttcagccctaattcaacataagagaattcataccagaaagaagccctgactgtaccttcataccagtaaatgcactgactgtggaaaagccttcagtgattggttagcacttgttcaacatcagataactcaacactggagaaaaaccgtataaatgtactgaatgtggaaaagccttcagttggagtacagacctcaaaaatcaccagaaaactcatactagtgaaaaatcctataaatgtaatgaatgtagaaaggcctttagttactgctctggtcttattcaatgtcaggtcattcatactatagaaaaaccttatgaatacggtaaatgtggcaaagcctttaggcagaggacagaccttaaaaaacatcagaaaatgcataccgaagagaaaccctatgaatgtaatgaatgtgggaaagcctttagccagagcacatatcttacaaaacaccaaaaaattcatagtgaagagaaatcaaatatacatactgagtgtggggaaaccattagacaaaactcttctttttacaacaataaaacctcacactggagagttctctgaatgccttaagaatttggttaatatggagacccttcccagggaaacagaaggaggatcgtgaaaaccgttgactacttgaatgatcacatggtttagtggagagagcatgattctgggttttaaaagtcatggatctcaatctcagctcctattactaactagatcttttactttggggtaagtcacttcatatctttaggccttaatttcctcatctgaaaactggaaggcctgacttgacttgttgagcttaagatcctcaattattatatttactaggaattcaagtttctatagatgtggttcagaattgtgacttatttattgtacatcaggtgtgattcacaagtgagcttgtagtagttattaaggagtcaataaagatatgatataaaaaaaaaaaaaaaaa

SEQ ID NO: 8004 - DNA, 314 bp, Homo sapiens
  SIMILAR (2)..(112): 1001254mologous to Homo sapiens Human peptidase, HPEP-17 protein sequence,accession number AAY90300,Smith-Waterman Score= 226.
ccgtgaagagaaagaatggcctcctcacacacagccttggtatccagaaggttgcttcaaagatggtcaacattatgaagagggatcagtaattaaagaaaactgcaactcctgatggacagcacagaattacagccaattttggggaatgactttagaagatggttttaaatttcgccttggcactttgccacctagtcccatgctcctgagcatgaatgaaatgacagtaagtgttccttctgattcacgtatgtgcatgtatttgtaaaagtgtgtttgtgtgtgcattaaaagcaattataaatcactaa

SEQ ID NO: 8005 - DNA, 1002 bp, Homo sapiens
  SIMILAR (1)..(999): 1001254mologous to Homo sapiens tubulointerstitial nephritis antigen isoform TIN2,accession number AF195117,Smith-Waterman Score =1861.
atgtggaccggatataagttttccatcttctcttatcttactacagaaatctggatggagaagcagtatttatctcaaagagaagttgacctagaggcttatttcactaggaatcacaccgttttgcaaggtactcgattcaaaagagccattttccaagggcaatactgtagaaattttggctgttgtgaagacagagatgatggctgtgttactgagttctatgcggcgaatgcgttgtgctactgtgataaattctgtgacagagaaaattctgattgctgtcctgactacaagtccttttgccgtgaagagaaagaatggcctcctcacacacagccttggtatccagaaggatggacagcacagatttacagccaattttggggaatgactttagaagatggttttaaatttcgccttggcactttgccacctagtcccatgctcctgagcatgaatgaaatgacactggtatcccacgcatgctacccacttttcaaagaccaaaatgctaccaacaatggatgtgccatggcaagcaggtctgatgggcgaggaaaacgggatgccacgaagccatgtcccaacaacgtagaaaaatctaacaggatctatcaatgttctcctccatacagagtctcttccaacgaaactgagataatgaaagaaatcatgcaaaatggaccagttcaagccataatgcaagtccgtgaagatttcttccattataagacagggatatacagacatgttaccagcacaaataaagaatcagaaaaatatcgaaagcttcagacacatgcagtcaaactcactggatggggcacacgtagaggagcacaagggcagaaagaaaaattttggattgctgccaatttctggggaaagtcatggggagagaatggctatttcaggattcttcgaggagtaaatgagtccgacattgaaaagttggttatcgcagcttggggccaactgacgagttctgatgaaccataa

SEQ ID NO: 8006 - DNA, 1664 bp, Homo sapiens
  SIMILAR (111)..(554): 741254mologous to Homo sapiens tubulointerstitial nephritis antigen,accession number AB022277,Smith-Waterman Score=649.
gtacactgctcggaatttccgggacgacctccgcgtccgcggacgcgtgggcggaaagtggaagctatacctgtcttccagagaatgtggaccggatataagatcttaatcttctcttatcttactacagaaatctggatggagaagcagtatttatctcaaagagaagtggacctagaggcttatttcactagaaatcacacgtttttgcaaggtactcatttcaaaaagagccattttccaaagggcaatactgtagaaattttggctgttgtgaagacagagatgatggctgtgtcactgagttctatgcggcgaatgcgttgtgctactgtgataaattctgtgacagagaaaattctgattgctgtcctgactacaagtccttttgccgtgaagagaaagaatggcctcctcacacacagccttggtatccagaaggttgcttcaaagatggtcaacattatgaagagggatcagtaattaaagaaaactgcaactcctgcacatgctcaggacagcaatggaaatgttcccagcatgtatgccttgtttcgtccagaaattaattgaacaggtcaataaaggagactatggatggacagcacagaattacagccaattttggggaatgactttagaagatggttttaaatttcgccttggcactttgccacctagtctcatgctcctgagcatgaatgaaatgacagcttctttacctgcaacaactgatcttccagagttttttgttgcttcttataaatggcctggatggactcatggcccattggatcaaaaaaattgtgctgcatcctgggcattttccactgcaagtgtggctgctgaccgaatagcaattcagtctaagggtcgatacacggccaatctatcccctcagaatttgatctcttgctgtgccaagaaccgtcatggatgcaatagtggaagcatcgatagggcttggtggtacctgagaaaacgtggactggtatcccacgcatgctacccacttttcaaagaccaaaatgctaccaacaatggatgtgccatggcaagcaggtctgatgggcgaggaaaacggcatgccacgaagccatgtcccaacaacgtagaaaaatctaacaggatctatcaatgttctcctccatacagagtctcttccaacgaaactgagataatgaaagaaatcatgcaaaatggaccagttcaagccataatgcaagtccatgaagatttcttccattataagacagggatatacagacatgttaccagcacaaataaagaatcagaaaaatatcgaaagcttcagacacatgcagtcaaactcactggatggggcacactgagaggagcacaagggcagaaagaaaaattttggattgctgccaattcctggggaaagtcatggggagagaatggctatttcaggattcttcgaggagtaaatgagtccgacattgaaaagttgattatcgcagcttggggccaactgacgagttctgatgaaccataacatatcattaaatttccataaggtcatgcctttaagtaaccccctaaattgaagtttagcaatatgacattcttggtgacagtggaatctttgtctcttcaccgtgttaacataatctatctattttcttattttcccctctgga

SEQ ID NO: 8007 - DNA, 411 bp, Homo sapiens
  misc_feature (1)...(411): n = a,t,c or g
nnnnnnnnnnnnnnnnnnnnnnnnnnnnnnnnnnnnnnnnnnnnnnnnnnnnnnnnnnnnnnnnnnnnnnnnnnnnnnnnnnnnnnnnnnnnnnnnnnnnnnnnnnnnnnnnnnnnnnnnnnnnnnnnnnnnnnnnnnnnnnnnnnnnnnnnnnnnnnnnnnnnnnnnnnnnnnnnnnnnnnnnnnnnnnnnnnnnnnnnnnnnnnnnnnnnnnnnnnnnnnnnnnnnnnnnnnnnnnnnnnnnnnnnnnnnnnnnnnnnnnnnnnnnnnnnnnnnnnnnnnnnnnnnnnnnnnnnnnnnnnnnnnnnnnnnnnntgcagctttattcctgggatggaagatcgattcaacatacgcaaaacaataaatgtgattcatcacataaacagaactaaaaacaaaaaccacatt

SEQ ID NO: 8008 - DNA, 390 bp, Homo sapiens
  misc_feature (1)...(390): n = a,t,c or g
ctgacatactcagtgatccacatgtgcatccacacaatgagatattctacagcaggtcaaagcagcctacatgcagcgatatgaatgaatccgtgcaatatgtgatggactaacgaggagagcgtgtcaagaaccaagaaatgtgatgagttgaattctgtccatctgagnnnnnnnnnnnnnnnnnnnnnnnnnnnnnnnnnnnnnnnnnnnnnnnnnnnnnnnnnnnnnnnnnnnnnnnnnnnnnnnnnnnnnnnnnnnnnnnnnnnnnnnnnnnnnnnnnnnnnnnnnnnnnnnnnnnnnnnnnnnnnnngaatgcacattcttttcatcagtacatggaacattctccaagacagatcatataataggtcacaaaacaagtctgct

SEQ ID NO: 8009 - DNA, 895 bp, Homo sapiens; identical to SEQ ID NO: 5605
  SIMILAR (52)..(360): 1001254mologous to Oryctolagus cuniculus elongation factor 1 alpha,accession number U09823,Smith-Waterman Score=543.
  misc_feature (1)...(895): n = a,t,c or g

SEQ ID NO: 8010 - DNA, 1156 bp, Homo sapiens
  SIMILAR (326)..(1153): 931254mologous to Homo sapiens XIAP associated factor-1 (ZAP- 1),accession number X99699,Smith-Waterman Score=1408.
gcgacagcaggggctggccatgctgtaaaggggcttcttgttaggttccagcctcaagaatcaaggggaactcctgagcgcgagaattctgaagatctcctccctccctgaagctgtgggctgggccatcggaaaactttcagttttgtttccttgcctgcaagaaacgaaactcaaccgaaagcctgcagagagcaaaacatggaaggagacttttcggtgtgcaggaactgttaaagacatgtagtctctgccaacttcaccctccatgaggcttactgcctgcggttcctggtcctgtgtccggagtgtgaggagcctgtccccaaggaaaccatggaggagcactgcaagcttgagcaccagcaggttagggtgtacgatgtgtcagcagatcatgcacaagtcctcgctggagtttcataaggccaatgagtgccaagagcgccctgtcgagtgtaagttctgcaaactggacatgcagctcagcaagctggagctccacgagtcctactgtggcagccggacagagctctgccaaggctgtggccagttcatcatgcaccgcatgctcgcacagcgcagagatgtctgtcggagtgaacaggcccagctcgggaaaggggaaagaatttcagctcctgaaagggaaatctactgtcattattgcaaccaaatgattccagaaaataagtatttccaccatatgggtaaatgttgtccagactcagagtttaagaaacactttcctgttggaaatccagaaattcttccttcatctcttccaagtcaagctgctgaaaatcaaacttccacgatggagaaagatgttcgtccaaagacaagaagtataaacagatttcctcttcattctgaaagttcatcaaagaaagcaccaagaagcaaaaacaaaaccttggatccacttttgatgtcagagcccaagcccaggaccagctcccctagaggagataaagcagcctatgacattctgaggagatgttctcagtgtggcatcctgcttcccctgccgatcctaaatcaacatcaggagaaatgccggtggttagcttcatcaaaaaggaaaacaagtgagaaatttcagctagatttggaaaaggaaaggtactacaaattcaaaagatttcacttttaa

SEQ ID NO: 8011 - DNA, 976 bp, Homo sapiens
  SIMILAR (139)..(306): 981254mologous to Homo sapiens XIAP associated factor-1 (ZAP- 1),accession number X99699,Smith-Waterman Score=313.
  misc_feature (1)...(976): n = a,t,c or g
tttcgtgcatccccagagcctccctggacgctgtttgcaaggtcctcaccgcctggaagtccaggagccatttttagggaacagcattcaagctcaacatgaaacgaaactcaaccgaaagcctgcagagagcagaacatggaaggagacttctcggtgtgcaggaactgtaaaagacatacagtctctgccaacttcaccctccatgaggcttactgcctgcggttcctggtcctgtgtccggagtgtgaggagcctgtccccaaggaaaccatggaggagcactgcaagcttgagcaccagcaggcttatggatctggcataggcaagaggttctggtttcaggaaagactggctgttctcttgagatctgtaaagagaggatgtgaaaaaggaaggtcctggaaggcagtcagatggagccctgtttcccgcctttccatgtccattcctcctggggcccctgatctgtctctctggagatactcaagctcaggcagccggtgccaacataaaactgggcttatgaacaattcttgaacactgggcggggtgctagagagacactgaggtagccacatcggatccctgccctctgggagttcacagacccaaacccgggaacactgtgagccaaagtggatgtggggcaggccctgggtgctgggtggacccacatctnnnnnnnnnnnnnnnnnnnnnnnnnnnnnnnnngntgngtgnacnangnntnnnnagagcatgcanaagttctctctggagttttataaagaaagagccccatgtgatttctcctttacagccaaatagaccaaccggatattaggataggaaggggaaacgggaggccaataatatagaattccacctgaccactctttcacccattaagcttggggagcggtggataactatccccccgcataacacaggttctcttgtccccatatactggatanaaaggttttccatggcg

SEQ ID NO: 8012 - DNA, 408 bp, Homo sapiens
  SIMILAR (1)..(204): 761254mologous to Homo sapiens golgin 67,accession number AF163441,Smith-Waterman Score=276.
agcggctttatggaccacctggaggagaaggcagacctgagtgagctggtggagaaagaagaacttggattcttccagtactacagagagagatgccatcagaaagtttatcaccctataacaaagccagggggcagtgccaaagatgcagcaccgggaggaggacaccatcaggctggccctggacagggaggagatgaaggcatcaggatgatgttttgtgtctcacctaatcgggccacctttgttgtgagcgtggtgcctctagtgtcaatcattgatgtaatttatggacgatatctacggaaactgaccaaagtcacccaggattcgctggcacaagccactcaggaggaacgtattggaaatgttaagaactgttcgagcttttgggaaagccccccctga

SEQ ID NO: 8013 - DNA, 472 bp, Homo sapiens
ttttttagaaaagcatgcaaattgatttaaaagtttaacatgacataggagcccttggaaatgaagacccaaacaaacaaggaaacttgtgcatttttatgcttagggttgatgagtggacaacttgtggaaggatatgactggacaaaggtctgatctaacggtaacaactgggggaaattggtaaaccctgtttgttcagactcttctctgtggccctgtgtcttcagagataaagatgtttctttcctccaggtacagggaaggcatctctcaaatgagggtcttaagaccagtgtcagctttacggcttttctccgtcctcagcttggaatgaggaacatctttcatttcacaagaggttcaggaactaccagtgtgaaaagaggctacgttcaagctgctggagggccagttccacctaggcgcagtcaagaagggcgcctggctttccggcttcacgtccctggaa

SEQ ID NO: 8014 - DNA, 1140 bp, Homo sapiens
  SIMILAR (10)..(801): 721254mologous to Homo sapiens mono ATP-binding cassette protein,accession number AB013380,Smith-Waterman Score=877.
atggggcgcggggccggcgctgctctggggcgttggagccgcgcgccgctggaggagctgctgccggggcgggggtctgggcggctcggggggccacgcgggcctcggacggctcccggggctgtgggcttgggcccggcagctgcaggggaggaggcctggcggcgcgggcgggcggcgccttcccgggacgaccagcggctacgacccatggcgcccggactctcggaggccgggaagctcctggggctggagtaccctgagcgccagaggctggcagctgcggttggatttctccgatgtccgatcatcgatgccatctataccaaccccactgtggactacagcgacaacctgacccgcctctgccttggcctcagtggcgtgtttctatgtggtgctgccgccaatgccattcgtgtctacctcatgcaaacttcacgtcagcgcgttgtgaagaggctgagaacttcgttattctcctccattctggggcaggaggttgctttctttgacaaggctggcacaggggaattgattaaccgcctctcatcggacactgcactcctggggcgctcagtgactgaaaacctctcagatgggctcagggccggggcccgggcttctgtaggcatcaggatgatgttttgtgtctcacctaatcgggccacctttgttgtgagtgtggtgcgtctagtgtcaatcattgatgtaatttatggacgatatctacggaaactgaccaaagtcacccaggattcgctggcacaagccactcaggaggaacggttcaacactgtggttggagaaaagggtgttctcctctcaggtgggcagaaacagcggattgcaattgcccgtgctctgctgaagaatcccaaaattcttctcctagatgaagcaaccagtgcgctggatgctgaaaatgagtaccttgttcaagaagctctagatccactgatggatggaagaacagcgttagttattgcccatcatctctccaccattaagaatgctaatatggttgctgttcttgatcaaggaaaaattactgaatatggaaaacatgaagagctgctttcaaaaccaaatgggatatacagaaaactaatgaacaagcaaagttttatttcagcctaa

SEQ ID NO: 8015 - DNA, 451 bp, Homo sapiens
  SIMILAR (97)..(450): 921254mologous to Homo sapiens unnamed protein product,accession number AK001676,Smith-Waterman Score=558.
ggggatcgaccatttcgtgtttaagatccgcgcgcaggccaggctgcaactttttggacagatccctcgctgtcctagtcgctgctccttggagtcatgttcccagccgccccttctccgcggaccccgggtaccgggccccgaaggggcccgctggccggactcgggcccggctccacgccccggacggctagcaggatgggtctgcccctggggtctgcagtcagctccccagtgctcttctcgccgggcggccggcgtagctcgctaatctcgcggggaacaccaacacgaatgttaccacaccactccataactgagtctgtgaactatgatgcgaaaacgataggatcttctcttcctgttaaagtcatggaagccctaacattggctgaagtcgatgaccagctgaccattaacataaatgaaggtggatgggcttgtctggtgt

SEQ ID NO: 8016 - DNA, 1966 bp, Homo sapiens
  SIMILAR (319)..(1143): 991254mologous to Homo sapiens mono ATP-binding cassette protein,accession number AB013380,Smith-Waterman Score=1345.
gaggaaggggctggccagaacggttccatagttggctcccagtttttcttggtgaggaagagttgatcagactaagaagtcatcttctctgattcagatatgatcactcacttccttagtcaacctgcttgttctcacctggaaccatttggttcttcccttgagtcagagatcgaggagcaaaagggaggaaactgctagagactgagatcaacgcatactctgacaacagcttatttggcaaggaagcctcctggactcagcaccgcagcccctttgctgaagcaacctgaacattgagagtgcttgtgttttctagctgcggttggatttctcacgatgtccagggttatctccatgtctgcccctttcttcctggggaagatcattgatgtcatctataccaaccccactgtggactacagcgacaacctgacccgcctctgcctagggctcagtgccgtgtttctgtgtggtgctgccgccaatgccattcgtgtctacctcatgcaaacttcaggtcagcgcattgtgaataggctgagaacttcattattctcctccattctgaggcaggaggttgctttctttgacaagactcgcacaggagaattgattaaccgcctctcatcagacactgcactcctggggcgctcagtgactgaaaacctctcagatgggctcagggccggggcccaggcttccgtaggcatcagtatgatgttttttgtctcacctaatctggccacctttgttttgagcgtggtgcctccagtgtcaatcattgctgtaatttatgggcgatatctacggaaactgaccaaagtcactcaggattccctggcacaagccactcagctagctgaggaacgtattggaaatgtaagaactgttcgagcttttgggaaagaaatgactgaaatcgagaaatatgccagcaaagtggaccatgtaatgcagttagcaaggaaagaggcattcgcccgggctggtttctttggagcaactgggctctccggaaacctgatcgtgctttctgtcctgtacaaaggagggctgctgatgggcagtgcccacatgaccgtgggtgaactctcttccttcctaatgtatgctttctgggttggaataagcattggaggaaaacaggaatgcatccccagtcaacttgggacaaatgatttcctggtttttgtttcccttcttgtctttgaaaatcaagatggaaaggtcagaagaggctacgcagtggttgagggaaagcttggaatgaggaacatctttcatttcacaagaggttcaggaactaccagtgtgaaaagaggctacgttcaagctgctggagggccagttccacctaggcgcagtcaagaagggcgcctggctttccggcttcacgtgtttaagttccgcgcgcaggccaggctgcaacctgacggccagatccctcgctgtcctagtcgctgctccttggagtcatgttcccagccgccccttctccgcggaccccggactacgattgaccacaggtatttgaaactgcagataaaagggggaaatactgtatatgcaaaattcagtcctgtttacagagttgatcaggtttatgaagtttcccgtgaaaccccaaaactggcacctcatgttattgggtttaataatacagtaaaatcaagtcctacctccatttctggatcctatgtagcatcccagaggctaaaagatttaggtcatgctcaaatggtggttgatgagctcttttcctctcactctgatttggattctgattctgaactagacagggcagttacccaaatcagtgtagacctgatggatgactacccagcatctgacccacggtggggctgagtctgtccctgaggaaactcgaggggaactctggggtccccagataccagggaactgtctcaaacatgtttctctccctaattatcctacttcttag

SEQ ID NO: 8017 - DNA, 498 bp, Homo sapiens
  SIMILAR (216)..(1): 1001254mologous to Mus musculus putative,accession number AK011993,Smith-Waterman Score=378.
aggagtgtcatattcactggggagggtttgaatatagggctgccagaaggagttagggctggctcgctcacacagcaaatgaaaggccagtgcgatgtttcccatggcttgaaggattcggtcttgagaatataagggccccaacactgaatttttagcagattcaacagtcattagcaattttcgtggaacccataaaaacaattcttctgcctttttgctttttccgtattttctcaaccagagtccggatctgcacatactcttcccactcttttcctgggccaggcgccggactgctgcatttctgcagcagctcactggtcaggttcaagatttcctttggtgacacagttgctgtagcaccagtgccagatttctgagtttttactcgactcttcttacccatttttctgactgcccgcttcccctagcgcagcgggaacgacgtactcaggcccggaccccgccgtccgcctcaacacgaaatcgtcgaat

SEQ ID NO: 8018 - DNA, 981 bp, Homo sapiens
  SIMILAR (795)..(229): 341254mologous to Thermus thermophilus competence factor ComEA,accession number AF319938,Smith-Waterman Score=175.
ttacagagggaggagccagccacagggcccatcccgtcggtcccgcccctcggggcgaaaaggcattctggagcaaccgaacctgctaacggaacttgggcgcgtaggcggggcccgggtcgagattcgtccaatcaaagctctggcgggggcgaacgcagccagttgcgacatcgtggttggcggcggctgagccggccgctcttgcccccgggagctgccagcccactggctggggaggaccccgaacggaacgccggctgggtggcggggcggggccgcgcccatgcgtccgaagcgtgggccaatgaacggcggcggctgcggcccgggggcggggtccggggcgggaggagaagcgttgggccgcggtcgcggggccgtctcaggctgccgtcccgcccctcccgtccggccgccgccgccgccaccgccgccaccgcctgggggttggttgaggcggacggcggggtccgggccggagtacgtcgttcccgctgcgctaggggaagcgggcaggtgagtgctggcggcggtctctgcgcccgcgcggcccgcggggggaaactcgcgccgcgtctccgagctctgcgaggccgtccctcgccctggccagcgcccctcggccgaagtccggcccgcgcccccgccagggtccccgccggccgctgtggccccggggcttgaaggggcaggtgtgcgctcgggggccagggcgaggagggcccggcggggtcggagggcgccggtcggcctctgcccgggcgcccagggtgcccggggaccagcccccgcctcctcccgcgccgtccagttaggaagacggacgtaggaaataggtcgtctttcttcccacgcgcccctggccgtgctccacacgcgcagtgccctactcaattcctgatcatataataaatgcccaaatgacatgattgtgatggggacgatcatattggagaacttccataggacacaggacat

SEQ ID NO: 8019 - DNA, 1071 bp, Homo sapiens
  SIMILAR (114)..(434): 591254mologous to Mus musculus putative,accession number AK011993,Smith-Waterman Score=271.
tttcgtgccgccgccaccgccgccaccgcctgggggttggttgaggcggacggcggggtccgggccggagtacgtcgttcccgctgcgctaggggaagcgggcagtcagaaaaatgggtaagaagagtcgagtaaaaactcagaaatctggcactggtgctacagcaactgtgtcaccaaaggaaatcttgaacctgaccagtgagctgctgcagaaatgcagcagtccggcgcctggcccaggaaaagagtgggaaagagtatgtgcagatccggacctctggttgagaaaatacggaaaaagcaaaaaggtctgtccgttacttttgatggaaaaagagaagattactttcctgatctaatgaaatgggcctctgaaaatggggcttctgtcgagggtttttgaaatggctaacttcaaagaagagggcttttggtttgagagcaacacgagatatcaaggcagaagaattgtttttatgggttccacgaaaattgctaatgactgttgaatctgctaaaaattcagtgttggggcccttatattctcaagaccgaatccttcaagccatgggaaacatcgcactggcctttcatttgctgtgtgagcgagccagccctaactcaatctggcagcccgatattcaaaccctccccagtgaatatgacactcctctctactttgaagaagatgaagttcggtatcttcagtccacacaagctatacatgatgtcttcagccagtataaaaacacagctcgacagtacgcctacttctataaagtcatccaggtgagcagctgtttgcaatttaagtatatatttcacagagtggggaggaaagaggaattgagtccataaatattccatttgatgtcttattaaggatacttaaacattttactttttaaattgaaaatataaaatacatttcatcgtttgtttttacagaaatatcaatgaaatgcggttacatatatatatctgatttcatcagtgcccagtgttaatacaagcagcagttgttcctgagttattgaaatcaccaagtttttttgtaaacaaaagatc

SEQ ID NO: 8020 - DNA, 1302 bp, Homo sapiens
  SIMILAR (655)..(1260): 821254mologous to Oryctolagus cuniculus elongation factor 1 alpha,accession number U09823,Smith-Waterman Score=824.
atgccttcaattaagttgcagagttctggtggagagatatttgaagttgatgtggaaattgtcaaacaatctgtgactatcaagaccatgttggaagatttgggaatgaatgatgaaggagatcatgacccagttcctctaccaaatgttaatgcagcaatattaaaaaaggtcattcagtggtgcacccaccatgaggatgactcacctcctcccaaagtttatgaaaacaaagaaaagcgaacagacgatatccctgtttgggaccaagaatttctgaaagttgaccaaggaacactttttgaactcattctggctgcaaactacttagacatcaaaggtttgcttgatgttacatgcaagactgttgccaatatgaaatttgagaccagtaagtactacgtgagtatcattgatgccccaggacacagagacttcatcaaaaacatgattacagggacatctcaggctgactgtgctgtcctgattgttgctgctggtgttggtgaatttgaagctggtatctccaagaatggacagacccatgagcatgcccttctggcttacacactaggtgtgaaacaactaattgttggtgttaacaaaatggattccactgagcaaccctacagccagaagacatatgaggaaatcgttaaagaagtcaacacttacattatgaaaattggctgcaaccttgacacagcagcatttgtgcttatttctgtcaatgttacaactgaagtaaagtctgttgaaatacaccatgaagctttgagtgaagctcttcctggggacaatgtgggcttcaatgtcaagaacgtgtctgtcaaggatgttcgtcatggcaacaatgctggtgacagcaaaaacgacccaccaatggaagcagctggcttcactgctcaggtgattatcctgaaccatccaggccaaataagtgctggctatgcccttgtactggattgtcacacggctcacactgcatgcaagtttgctgagctgaaggaaaagattgatcgctgttctggtaaaaagctggaagacggccctaaattcttgaagtctggtgatgctgccatcatttatatggttcctggcaagcccatgtgtgtagagagcttctcagactatccacctctgggtcactttgctgttggtcatatgagacagacagttgccatgggtatcatcaaagcagaggacaggaaggctgctggagttggcaaggtcactaagtctgcccagaaagctccaaagcctagtgaatattatcccttgtacctgccaccccagtcttaa

SEQ ID NO: 8021 - DNA, 483 bp, Homo sapiens
  SIMILAR (265)..(483): 671254mologous to Mus musculus Plenty of SH3s; POSH,accession number AF030131,Smith-Waterman Score=269.
  misc_feature (1)...(483): n = a,t,c or g
nggaatgnaaatgacgccctaatagaggccggtagaccggccgaccacgcgtccggcggcgcttggaggaaaggaagccggttggagggcgcatcgcacccctgctgcgcggaggagggggctgagctgaactcagcagaagttacatgcacaagcaggcaaaaattctgacgttctcaagagaccagctctgcccccgtggctcaactgaccctaccatgtggacgctgctcctccaggtgggaactggagttttgaaataaaatggatgatttgacgttacttgatcttctggagtgccctgtgtgctttgagaagctcgatgtcacagccaaagtcctcccttgccagcacaccttctgcaaaccatgtctacagagggttttcaaggcccacaaagagctgcggtgccccgaatgcaggacgcctgtgttttccaacattgaggcgctgccggccaacctgctgctcgtgcgccttctg

SEQ ID NO: 8022 - DNA, 588 bp, Homo sapiens
  SIMILAR (400)..(588): 931254mologous to Mus musculus putative,accession number AK003778,Smith-Waterman Score=289.
tcaatgtatagttcctcggcgcgcctctgaccttttcccggagctcttcaatcccagaagctatagcacaacggctgaatcgccaggacccccggggaggcgtggcttcaggaccggaagaagctcctgttgccaagggaacggtgcctgccaaggcgcctgctcttcgactgatgcacagactgctgcagaggctgccgggtttcccaacttctagagacggctttgctcattaccaggcatccttcccatgtaggcatcgagaagaaggctgagggaccctcgcaccagatttccatcccggagaccgatacgagtgcgtccattcttgttgccagctcctgcgcccttcggactaacctcaaaaaccagctggtttgtaaatatttgaatcacattatgggattgctagacagactttcagtcttgcttggcctgaagaagaaggaggttcatgttttgtgccttgggctagataatagtggcaaaacgacgatcattaacaaacttaaaccttcaaatgctcaatctcaaaatatccttccaacaataggattcagcatagagaaattcacatcatccagtttg

SEQ ID NO: 8023 - DNA, 383 bp, Homo sapiens
  SIMILAR (37)..(381): 741254mologous to Homo sapiens HDCKB03P,accession number AF068291,Smith-Waterman Score=442.
acggcgaaggcggcgctttatcctctggttggcaaaggaggcggcgcggggggtcctgtcctcgccatgaggccaaaccaggcgccggtgtccggaagggtgtacattcaccgagactacagccgagtcacacgctgccagttccagaccaggttccctgcgcagctggacaaccggatagctgggcatccgtttgaaaaaacagttctaactctaaataacctttatgccgaagcagaaaaactaggtggccaggcatatctcgaaggttgctgggcttgtttaacaccatataccatcttcctatgcatggaaactaattatgagaaggttctgaagaaagatttccaatacattcctcagctgactgagagtatctatgc

SEQ ID NO: 8024 - DNA, 445 bp, Homo sapiens
  SIMILAR (157)..(444): 981254mologous to Homo sapiens muscle specific ring finger protein (MURF-1),accession number AJ291713,Smith-Waterman Score= 526.
aaggaagccaacaggatccgacccggtgttttgtgacaaaggcaagacccccaggtctacttagagcaaagttagtagaggaggcagctaggcgtggctctcattccttcccacagaatggattataagtcgagcctgatccaggatgggaatcccatggagaacttggagaagcagctgatctgccctatctgcctggagatgtttaccaagccagtggtcatcttgccgtgccagcacaacctgtgccggaagtgtgccaatgacatcttccaggctgcaaatccctactggaccagccggggcagctcagtgtccatgtctggaggccagttccgctgccccacctgccgccacgaggtgatcatggatcgtcacggagtgtacggcctgcagaggaacctgctggtggagaacatcatcgacatctacaaacaggagtgct

SEQ ID NO: 8025 - DNA, 1401 bp, Homo sapiens
  SIMILAR (1294)..(1401): 691254mologous to Homo sapiens PRO1847,accession number AF119855,Smith-Waterman Score=149.
atagcattgaagaaaataccgcacatcagaggaaagcttattttcctgcatggtgtcttttcaaagcatagcaatatttgaagcaggttttctagggattgtgtgaatgagggtgagctggctgaggcatcgctcaagactggggggtggtgtgtaagaagtcacgtggagccacaagaggcacctcctatagctcagctaaagggcttccctttctgcgacccagcttttgggtgaagggtgatttctactagacacatctgtgcttcagtcatagatgttaatagaggaagcagttttcctgctgcagattcctgaatagagttgctggaaagagtctacttctgggactcaggggaagttggaaggccagttctgttgtaggaaaggctgaggcaacggggaaagacctgacacgctaagttacatacagctctgacatagtactcccatgatggcttccagtggacacatgtgctgatagaattcctaaacctctggaatttccctgctggcgacttctatggccgttgactgtacagggtaacctgaatgccagatgctaatgggcgtgaatgagaacttagagcattgccagcatggaggaaactgtgaggcaccagatccctggtgcttctgcagggccattttctggaaaacccctgttaggaaggttggatttggcgtgacttgcttgagccaagagtcctggggagagattttgaagttttaatttaacggtatatcccagaggcctaacagtgactcaactcgtctaagttctgccaagtccagatgtcccactttagagtctctcctgtgaaagggtttgggtctgcagctgtggtagtatgtcaaaactgcccagtaagcccagcccctcacccatctgatagatattcctttaatgcacccagacttcatgtttggataaatggattaatggttgaaatttgtttctctctcttttgtgttttccccagttaatagatggtcactgtttcccacaatgttttatactttcagctttttgtaacttaactataattacttaattttatttttttaaagcttgttgtggtctaatgagaagtatttttcagtgcataatgtttttctgagcttctgtaaatgccatcccaatgtggtttggttttgttgaacagaaaccaaaataaatttccaaaatgttaaagcaatggatttaatacatttatttatttatttgttttattttgtttttgagacggagtcttgctctgtcgccaggctggggtgcagtggtatggtcttggctcgctgcaacctccgcctcccgggttcgggcgattctcctgcctcagcctcccgggtggctgggactgcgggtgcgtgccaccacgcccggctaatttttgcgtt

SEQ ID NO: 8026 - DNA, 406 bp, Homo sapiens
  SIMILAR (149)..(406): 981254mologous to Homo sapiens Amino acid sequence for the ANTS1 human antigen,accession number AAY28285,Smith-Waterman Score= 435.
acagagcggcccggtcgccggcatggtttctccgtcctgctgcagccggcgggaggcagccagtccaggcgcccgctagcttcggcggcgacccagacggggaaagcggaaggaatgtcgcgtgcaagcaggcagctggtgtggaagaatggcggtgagccattcagtgaaggagcggaccatctctgagaacagcctgatcatcctactgcagggcctccagggccgggtaaccactgtggacctgcgggatgagagcgtggcccacggacgcatagacaatgtcgatgctttcatgaacatccgcctggccaaagtcacctacacggaccgttgggggcatcaggtcaagctggatgacctctttgtgacaggccgcaatgtccgctacgtccacatcccagag

SEQ ID NO: 8027 - DNA, 392 bp, Homo sapiens
  SIMILAR (350)..(391): 781254mologous to Homo sapiens EF1a-like protein,accession number AF267861,Smith-Waterman Score=60.
  misc_feature (1)...(392): n = a,t,c or g
aaatttgagaccagcaagtactatgtnactatcattgatgccccaggacacagagactttatcaaaaacatgattacagggacatctcaggctgactgtgctgtcctgattgttgctgctggtgttggtgaatttnaagctggtatctccaagaatgggcagaccagaagagatatgaggaaattnttaaggaagtcagcacttacattaagaaaattggctacaaccccgacacagtagcatttntgccaatttctggttggaatggtgacaacatgctggagccaagtgctaacatgccttggttcaaggggtggaaagtnacccgtaaggntgggcaatgccagtgggaaccacggtgcntnaggctcttgactgcatcctaccaccaa

SEQ ID NO: 8028 - DNA, 1212 bp, Homo sapiens
  SIMILAR (68)..(487): 971254mologous to Xenopus laevis 42Sp48,accession number X56699,Smith-Waterman Score=711.
  misc_feature (1)...(1212): n = a,t,c or g
ggggctttttcgcaacgggtttgccgccagaacacaggtgtcgtgaaacctacccctaaaagccaaaatgggaaaggaaaagactcatatcaacattgtcgtcattggacacgtagattcgggcaagtccaccactactggccatctgatctataaatgcggtggcatcgacaaaagaaccattgaaaaatttgagaaggaggctgctgagatgggaaagggctccttcaagtatgcctgggtcttggataaactgaaagctgagcgtgaacgtggtatcaccattgatatctccttgtggaaatttgagaccagcaagtactatgtgactatcattgatgccccaggacacagagactttatcaaaaacatgattacagggacatctcaggctgactgtgctgtcctgattgttgctgctggtgttggtgaatttgaagctggtatctccaagaatgggcagacccgagagcatgcccttctggcttagccagaagagatatgaggaaattgttaaggaagtcagcacttacattaagaaaattggctacacccccgacacagtagcatttgtgccaatttctggttggaatggtgacaacatgctggagccaagtgctaacatgccttggttcaagggatggaaagtcacccgtaaggatggcaatgccagtggaatccattttgttaacaccgacaattagttgtttcacacccagtgtgtaagccagaagggcatgctctcgggtctgcccattcttggagataccagcttcaaattcaccaacaccagcagcaacaatcaggacagcacagtcagcctgagatgtccctgtaatcatgtttttgataaagtctctgtgtcctggggcatcaatgatagtcacatagtacttgctggtctcaaatttccacaaggagatatcaatggtgataccacgttcacgctcagctttcagtttatccaagacccaggcatacttgaaggagccctttcccatctcagcagcctccttctcaaatttttcaatggttcttttgtcgatgccaccgcatttatagatcagatggccagtagtggtggacttgcccgaatctacgtgtccaatgacgacaatgttgatatgantcttttcctttcccattttggcttttaagggtagttttcacaacacctgtgttctggcggcaaaacccttgcnaaaaaaaaaa

SEQ ID NO: 8029 - DNA, 406 bp, Homo sapiens
  misc_feature (1)...(406): n = a,t,c or g
cggacgcgtggggaaattttgcacaactttaacaagtagcagaactaattgttcactgatggctttaaagatgaaataattctgtgaatacatgaaactgtgagggactcttcgtggttgtctaggtttatttatatgcatactcattaataaaagtttttttttgttnnnnnnnnnnnnnnnnnnnnnnnnnnnnnnntgaaaagaagnnnnnnnnnnnnnnnnnnnnngggggnnnnnnnnnnnnnnnnnnnnnnnnaacgcggcgcccaacagcccgagggatgcttgaggaaaccaatccagcagattcaaagccaggcaccattcgtggggacttctgcattcaggttggccggaccttcttttattcccccgttttttttaaaaattcttttttttattt

SEQ ID NO: 8030 - DNA, 681 bp, Homo sapiens
  SIMILAR (1)..(186): 771254mologous to Homo sapiens unnamed protein product,accession number AX088212,Smith-Waterman Score=252.
atgcctgagcctcccacccactccatgggctcctgtgcggcccgagcctccccgacgagcaccaccccctgctccacggcgcccagtcccatcgaccacccaagggctgaggaatgcgagcgcacggcgcaggactggcaggcagcttcacctgcagccccggtgcgggatccactaggtcttgccatctctaagctggacctggtgacctttttggagggaaagaaagagccctggactgtgaagagtgaggagaccatagctgcacagccagaggtaggtgggaagctctcagacttagtcgccagagggacagctttgggcgcgagctccacacgtggcctgcagggtggacctagtggcttcctggtcacaccatcaggtgaccagatgtgggctgagctgtggccagtacttgtggccgctggccacacgtttgggttgatcagagattcaaagcttaggaaggaagagggaattttgacatatcccttggctcagtaccaacaagtgtggttcttcttccatcataagttctgctggcaagggagatggagacatattgtggagctctatgccaatgtgacattactgtttgctttggcctggacctcaaaaggcattgtgacatattgctgggcccagcaacatggtgacatgagtctcctgtatggaccatga

SEQ ID NO: 8031 - DNA, 697 bp, Homo sapiens
  SIMILAR (500)..(631): 351254mologous to Rattus norvegicus elongation factor-1 alpha,accession number L10339,Smith-Waterman Score=61.
gcaagggttttgccgccagaacacaggtgttgtgaaaactacccttaaaagccaaaatgggaaaggaaaagactcatatcaacattgtcgtcattggacacgtagattcgggcaagtccaccactactggccatctgatctataaatgcggtggcatcgacaaaagaaccattgaaaaatttgagaaggaggctgctgagatgggaaagggctccttcaagtatgcctgggtcttggataaactgaaagctgagcgtgaacgtggtatcaccattgatatctccttgtggaaatttgagaccagcaagtactatgtgactatcattgatgccccaggacacagagactttatcaaaaacatgattacagggacatcttcaggctgactgtgctgtcctgattgttgctgctggtgttggtgaatttgaagctggtatctccaagaatgggcagacccgagagcatgcccttctggcttacacactgggtgtgaaacaacttaattgtcggtgttaacaaaatggattccactggcattgccatccttacgggtgactttccatcccttgaaccaaggcatgttagcacttggctccagcatgttgtcaccattccaaccagaaattggcacaaatgctactgtgtcggggttgtagccaattttcttaatgtaagtgctgacttccttaacaatttc

SEQ ID NO: 8032 - DNA, 523 bp, Homo sapiens
cccgggtcgacccacgcgtccgatggtttccggcatttggctgggcctttgtctctcgctcccaccagagcttggaatccgtctctgctcttctgcattctccacctcgggagcccctggggactctgtgacggcctctgttgccctgtgatctgcaggtccggagagacgcacagctaagatgtcaggacatcctggaagctgggaaagggtcttgccatctctaagctggacctggtgacctttttggagggaaagaaagagccctggactgtgaagagtgaggagaccatagctgcacagccagtccagatgtataatctcatccctgaacatttctgatggtgtgattatgacatgtgactttatctggcaacagagtgagttgttgctcccgcctgagcccagcccccagaaaggattgtgacatatcgttggacccagaattgaggtgcagttttgacacacttctgtctagcagctgagtattgtgatcttcagaactggcccagcctacaaatag

SEQ ID NO: 8033 - DNA, 375 bp, Homo sapiens
  SIMILAR (1)..(345): 411254mologous to Homo sapiens Protein encoded by the endogenetic fragment of HERV-W,accession number AAB07702,Smith- Waterman Score=226.
cattgcagccaaggactgctccccaccccgcttctccgtgtctctacccttctctttaaacttgcctcctttactatgggcaaccttccaccctccatttctccttcttctcccttagcctgtgttctcaagagcttaaaacctcttcacctcttgcctgacctaaaatctaagcatcttattttcttctccaacaccgcttggccccaatacaaactcgacaatggttctaaatggccagaaaatgacactttcgatttctccatcccacgagacctagatactttttgtcgaaaaaagggcaaatggtctgaggtgccttacgtccaggcatttttcacactttgttccctcctgtcgtacatgacacatacc

SEQ ID NO: 8034 - DNA, 3085 bp, Homo sapiens
  SIMILAR (213)..(2579): 951254mologous to Homo sapiens elongation factor 2,accession number X51466,Smith-Waterman Score=3874.
atggttaattttacggtggatcagatccgcgccatcatggacaagaaggccaacatccgcaacatgtctgtcatcgcccacgtggaccatggcaagtccacgctgacagactccctggtgtgcaaggcgggcatcatcgcctcggcccgggccggggagacacgcttcactgatacccggaaggacgagcagggagcgttgcatccccatcaaggtcaacgccatctcccctcttttacgagcttctcggagaatgacttgaacttcatccagcagagcaaggacggtgccggcttcctcatcaacctcattgactcccccggggcacgtcgacttctcctcggaaggtgactgctgccctccgagtcaccatgggcgcattggtggtggtggactgcgtgtcaggcgtgtgcgtgcagacggagacagtgctgcggcaggccattgccgagcgcatcaagcctgtgctgatgatgaacaagatggaccgcgccctgctggagctgcagctggagcccgaggagctctaccagactttccagcgcatcgtggagaacgtgaacgtcatcatttccacctacggcgagggcgagagcggccccatgggcaacatcatgatcgatcctgtcctcggtaccgtgggctttgggtctggcctccacgggtgggccttcaccctgaagcagtttgccgagatgtatgtggccaagttcgccgccaagggggagggccagttggggcctgccgagcgggccaagaaagtagaggacatgatgaagaagctgtggggtgacaggtactttgacccagccaacggcaagttcagcaagccagccaccagccccgaagggaagaagctgccacgcaccttctgccagctgatcctggaccccatcttcaaggtgtttgatgcgatcatgaatttcaagaaagaggagacagcaaaactgatagagaaactggacatcaaactggacagcgaggacaaggacaaagaaggcaaacccctgctgaaggctgtgatgcgccgctggctgcctgccggagacgccttgttgcagatgatcaccatccacctgccctcccctgtgacggcccagaagtaccgctgcgagctcctgtacgaggggcccccggacgacgaggctgccatgggcattaaaagctgtgaccccaaaggccctcttatgatgtatatttccaaaatggtgccaacctccgacaaaggtcggttctacgcctttggacgagtcttctcggggctggtctccactggcctgaaggtcaggatcatggggcccaactatacccctgggaagaaggaggacctctacctgaagccaatccagagaacaatcttgatgatgggccgctacgtggagcccatcgaggatgtgccttgtgggaacattgtgggcctcgtgggcgtggaccagttcctggtgaagacgggcaccatcaccaccttcgagcacgcgcacaacatgcgggtgatgaagttcagcgtcagccctgttgtcagagtggccgtggaggccaagaacccggctgacctgcccaagctggtggaggggctgaagcggctggccaagtccgaccccatggtgcagtgcatcatcgaggagtcgggagagcatatcatcgcgggcgccggcgagctgcacctggagatctgcctgaaggacctggaggaggaccacgcctgcatccccatcaagaaatctgacccggtcgtctcgtaccgcgagacggtcagtgaagagtcgaacgtgctctgcctctccaagtcccccaacaagcacaaccggctgtacatgaaggcgcggcccttccccgacggcctggccgaggacatcgataaaggcgaggtgtccgcccgtcaggagctcaagcagcgggcgcgctacctggccgagaagtacgagtgggacgtggctgaggcccgcaagatctggtgctttgggcccgacggcaccggccccaacatcctcaccgacatcaccaagggtgtgcagtacctcaacgagatcaaggacagtgtggtggccggcttccagtgggccaccaaggagggcgcactgtgtgaggagaacatgcggggtgtgcgcttcgacgtccacgacgtcaccctgcacgccgacgccatccaccgcggagggggccagatcatccccacagcacggcgctgcctctatgccagtgtgctgaccgcccagccacgcctcatggagcccatctaccttgtggagatccagtgtccagagcaggtggtcggtggcatctacggggttttgaacaggaagcggggccacgtgttcgaggagtcccaggtggccggcacccccatgtttgtggtcaaggcctatctgcccgtcaacgagtcctttggcttcaccgctgacctgaggtccaacacgggcggccaggcgttcccccagtgtgtgtttgaccactggcagatcctgcccggagaccccttcgacaacagcagccgccccagccaggtggtggcggagacccgcaagcgcaagggcctgaaagaaggcatccctgccctggacaacttcctggacaaattgtaggcggcccttcctgcagcgcctgccgccccggggactcgcagcacccacagcaccacgtcctcgaattctcagacgacacctggagactgtcccgacacagcgacgctcccctgagaggtttctggggcccgctgcgtgccatcactcaaccataacacttgatgccgtttctttcaatatttatttccagagtccggaggcagcagacacgccctcttagtagggacttaatgggccggtcggggagggggaggcgggatgggacacccaacactttttccatttcttcagagggaaactcagatgtccaaactaattttaacaaacgcattaagaggtttatttgggtacatggcccgcagtggcttttgccccagaaaggggaaaggaacacgcgggtagatgatttctagcaggcaggaagtcctgtgcggtgtcaccatgagcacctccagctgtactagtgccattggaataataaatttgataaggtggtgaaaaaa

SEQ ID NO: 8035 - DNA, 1511 bp, Homo sapiens
  misc_feature (1)...(1511): n = a,t,c or g
tttttaccatttttaaaaaattatctttatttaggtttctgattcagcacatgtatcaaagactaatcaacataaaggagtaaataagacattaattgaaagtcttacatctctctaaactctgaccaagaatgtcaagattgccactattaccagaactccaacctaagtcaagttgtagacaaggctatcatggaacaacatacagtgtgcacaggatatggcagagggcaaaagggcatgctaggcgcttgggcttctcctcttttccttgttggacatctttctgttgggacagtccactttcggctttccggggctaaggttccaaatcaaggtccaaagaagggcttcaggggtcaacctggaccaggatactcttctgggggggaatggcatttctttaaactgttgtggcctggcaactttgttttttgccaggatgaagttcagaccgagatgtacaatacaatctagatgacggtgcagactaagtcaagaacttaaagttgtgcagtaacccgagttaaggcatgaatgcagacaacaccaacatgcacacacacagcacccatgctatcaagacacagggattttttcagttgcctcatgggaggcaacctgggcttggcagttaatcagaactgcctgagcattccagaaaatgccccccacggactttatgctaacagctgtgtgtatgttttaatcaaaaaanattaaagaagaaaaaaaaaccctaaaaaacaaagaaaaaaacaaacaaaaaatcaccaaaaacctagaaaccccttaatctcttacaatggctcttgagcatggaactccatgtagcagcatcaatggctggctctttaacaatttggaaataaaaggttgttttactatgtatttctttggtagtcatcactacaaagttttcagtgttggttacctataagacaagtactagacagaagatcaagttacacagaaatatttcttctgtactgataagatacaaatattgagctctcaaagcacaagttactatgctttttcttgccttattgggcattctctaaaagcaaggctttgtgcaggaaaagttcatgtctaccctaacaaagggtgaataacatgttcctattttccctacaagtgaacaattaacaaaaattcacattatcaattatttctggttgaattctgttagaagccaattacaaagggacagtagcacttggtgtcaaagccactttctggtcacacattcattccatggttgctagtcagtatctcaggagctcagaatttaaaactcctttcagtcaacgaaggagtaagttcaattaaaggcttccactatctgccaaatttctagaattctgtctagagtgctagcatgcttgatgagagaaagcagttcagagcccaaagaggtgtcaggtgtgtgcgtgcagacggagacagtgctgcggcaggccattgccgagcgcatcaggccttcgtccaaatagggtagtcagttc

SEQ ID NO: 8036 - DNA, 969 bp, Homo sapiens
  SIMILAR (499)..(930): 291254mologous to Cyprinus carpio hyosophorin,accession number AF077819,Smith-Waterman Score=195.
atgaatgtgaatttggcagaagaatcaaagggcaaagaaacagtaggtgatgaaattaaaggaggcggaattcagatggtaatgcttgccagccagccactcacctcctactgtgctgcccggttcataacaggccatggacagaaattaaaatctgagttaaaaaaaaccctgcaagtcattatgctaaatattcagaaagtgagaatacccactagggatggctataatgaaaaagacatactaagcactggcaaaaatgtagagaaactggaactctcaaacattgctggatatccatcaaatattgagaagaaagaatatcaggagcaaagtgttctaagttgctgttcagaacgtaaagatgcgaaccccaaatcagtggtttgttcattcttcatgcaagagcaatgcactaaaggagagaagcggtttcttatccctggcaccctcagtgttgacagacacttacgctatttcggtatcctgcctactgtgagtaacgctgcggtggtcaaggaagtgcccactgtgagcaatgctgcggtggtcacggaagcgcccactgggagtaacgctgcggtggtcacggaagcgcccactgggagtaatgctgcaagggtcatggaagtacctactgggagtaacgctgcggtggtcacggaggtgcccactgggagtaacgctgcggtggtcacggaagcgcctactgggagtaacgctgcggtggtcaaggaagcacctactgggagtaacgctgcaagggtcatggaagtgcctactgggagtaacgctgcggtggtcaaggaagcacctactgggagtaacgctgcaagggtcatggaagtgcctactgggagtaacgctgcggtggtcaaggaagtgcctactgggagtaacgctgcggtggtcaaggaagtgcctactggagtaacgctgcggtggtcaaggaagcgcccacgggagtaa

SEQ ID NO: 8037 - DNA, 1625 bp, Homo sapiens
  SIMILAR (1465)..(1620): 981254mologous to Homo sapiens Human calcium binding protein hCBP,accession number AAY94247,Smith-Waterman Score=247.
gatgtcgcttataaatataaaatgcttcaaaattaggtttatcaaatcactttgattgcagaatatcactggaatccaactgtggtctctataaaatttgcagtcctcagacaaaatacatcattataccattctaaacctggtatcctttgatacttgaattttcaaatagaaattgtggctgaagaaactttcagaaatgagtgacagtccaaccaaaagacaagtccatgaatcttctcacgtaaatatttgtagtggtatcagatcattaacattatctttttaaaaataaaaaccaactccatcttttggtccacaaattggatgaaacattctgtgaaatgggctagtggtttaacctttcaagttctgcttctgggttttatactgctggccatttcctgccgcccctttggacaacctcaggttcccagcagcttaggaatcacctcttcattaaaggcttgaaccctgagacagacaggctgaaatggagtttggaaaatctcagttgcgcccgcggcccccttctgcagccaggacttcaacttgggtgccaggagaagggaggctgcaagggctggggtccagcccctgctcgggcggccgagggctccgaggcgttttcagctcctccaacctcccggctagaggaactgtcgggggccagccacggcggtgccttggtttcacctggctacatagagttttttacgccgcccgcctgacctgaggagtgagctccgccagctccgttggcaaggctgggttcctccgcgggtggggctctcctccgacgccaagccgcccaaacctcccgagcgcaggtgccctctggccgggaagtacttcaccatttactagccttcatctcaaccacaacagtcccgccctgcctctaccggggatgagggaaggcgtaacctccgccggggaccaggccgacctacctaaaccgatcactacatgggaggagtcggacgccggccgtcccaccacccagccaggagcccattgattggtcgcactccccactggttcacgcctcagagactcggcgcacttaccgctggcaccgcagtggcgcccgagcgcgccgcctcccgattgactgctagcgctctcggcttgtctcgcgcactgtagctgagccaatggagttactcgtagtcgagaggccggcatcactggagtggtggcgcagctgtttcctccggatatccatcaaatattgagaagaaagaatatcaggagcaaagtgttctaagttgctgctcagaacgtaaagatgcgaaccccaaatcagtggtttgttcattcttcatgcaagagcaatgcactaaaggagagaagcaagctgtggtgatcagtgactttggtgaaagctaagaaggttcaaacaaatttgcaaatgatatacaacttctaagcattccatattggaagaagagatttctacacatgaaaaaaatgcctttgtttagtaaatcacacaaaaatccagcagaaattgtgaaaatcctgaaagacaattcggccattttggaaaagcaagacaaaaagacagacaaggcttcagaagaagtgtctaaatcactgcaagcaatgaaagaaatctgtgt

SEQ ID NO: 8038 - DNA, 475 bp, Homo sapiens
  SIMILAR (474)..(385): 761254mologous to Homo sapiens Human secreted protein, SEQ ID NO: 7867,accession number AAG03786,Smith-Waterman Score=122.
gcgtcgacgggtgtatgtttggtagtaaaagtataaagacggccaggcgcggtggctctcccaaagtgctgtgattacaggcgtgacgactgtgcccggccgagtattatttttaaaactaaattatgctaggtacactcttaacaaggcaaggatttccattcacaaaaggaagcgtaaattatgcaggctaaatgaagcactgtcatacccaaaatattagatacaatattttcttatgatttaacttttacaaagggcctctttgtcagaagttgctgaagttcccggttcagcctattaattgctgcatattctttgaaaacaaaattgttgatgattcagatgtatgtgtgactgtgcgaagaaaccccgtccatagtaaaaaaatgcaaaattagctgggaatggtggcacatacctgtaatcccagctactcgggaggctgaggcaggagaattgcttgaaccccgga

SEQ ID NO: 8039 - DNA, 329 bp, Homo sapiens
  misc_feature (1)...(329): n = a,t,c or g
gcggcggcggcgaggaggggaatttccttgtgcctccattcccgggaggggggagcggcgttggaggccaccgtttcnnnnnnnnnnnnnnnnnnnnnnnnnnnnnnnnnnnnnnnnnnnnnnnnnnnnnnnnnnnnnnnnnnnnnnnnnnnnnnnnnnnnnnnnnnnnnnnnnnnnnnnnnnnnnnnnnnnnnnnnnnnttatatcctgtgttgtgacctcatggtttaagtgggaataaagatgagtataagcagtgatgaggtcaacttcttggtatatagatacttgcaagagtcaggattttctcattcagcatttacctttgg

SEQ ID NO: 8040 - DNA, 461 bp, Homo sapiens
  SIMILAR (142)..(441): 941254mologous to Homo sapiens Human secreted protein, SEQ ID NO: 5076,accession number AAG00995,Smith-Waterman Score=475.
cggcacgagggcggaaggagaagatgtgccgccgctgccaacgtcgagcggcgacggcatgggaaaaagatcttgaagaagctctggaagcaggaggttgtgatcttgaaacgttgagaaatataattcagggaagaccggctgcctgctgatctgagggccaaagtttggaagattgctctgaatgttgcaggaaaaggtgatagtttggcatcatgggatggtattttagacttgccagaacagaacactattcacaaagattgccctgccagtttattggaccagctttcagtgccagaggagaaggcagcagaattacttttggatattgaatctgtaattaccttttattggaaatcacgtaacattaaatatagcacatcccttagctggatacatctactgaaaccattggtgcatcttcaactgccacgcagcgatttatacaactgctttta

SEQ ID NO: 8041 - DNA, 897 bp, Homo sapiens
  SIMILAR (819)..(589): 751254mologous to Homo sapiens Unknown (protein for MGC:10993),accession number BC004404,Smith-Waterman Score=305.
cccctttttcccaaaaagactgcccaggcacaggttgcccaacagaagcttctcatagaactccactccaccacaggcataggctgcaagagagggaagccgtgcggcggtccagccaggactccacggcatgagtgagagaatcctgggagaaggcgtaggccacaaagcctgccactgctgccaccaagctgaaggcagcccgtaaattcatggggcctgcatggagccccagggtgtacttggcacccacgcccagtgcccaggtccctgccaggcaagctggggccagcagggcgtgcacggcagtggtactgctttccaggtacaccacttccctggccaaggcgaacttctgggcttcacgggacaaggtcagggaagctctcagccgggcgcctgctgggctccgccagtccactgtatgcccatgtatgaccacgggatggttagtgttgatcactaggtctcccaagaaactggcagggatgcccaccacagccccagcagggagtcttgggaaaccctgcactcacaggcctggaaaggtgaaggtggtgaaagggccttgttagcaatggccctgaaaggaacaccctatgtccctgtagcaccctcttggaagaaggctctgcagctgtggagggaagcggagcctggggtgccctgaggccagtactggtagagccattggaccacgggatccgggaagaggtggtacgagattggaactccaaacaggcctgcacaggaacccaccaagaggcctgtcctgtgtctctgcacaaatgctgcggtccgccacaggggacctgccatgagtgtagtcactgcggacaatcgggtcgcatcaggccggagaagggtccctcccgctcgtccgtgcgcgcacctccg

SEQ ID NO: 8042 - DNA, 1841 bp, Homo sapiens
  SIMILAR (79)..(402): 551254mologous to Oryctolagus cuniculus elongation factor 1 alpha,accession number U09823,Smith-Waterman Score=210.
  misc_feature (1)...(1841): n = a,t,c or g
gcttttttttttttttcgcaacgggtttgccgccagaacacaggatgacgtgaaaaactaacccctaaaagccaaaatgggaaaggaaaagactcatattcaacattgtcgtcattggacacagtagattcgggcaagtccaccactacttggccatctgatctataaatgccggtggcatcagacaaaagaaccattgaaaaatttgagaaggaggctgctgagatgggaaagggctccttcaagtatgcctgggtcttggataaactgaaagctgagcgttgaacgtggtatcaccattggatatctccttgtgggaaatttgagacccagcaagtactatgttgactaatcattgattgccccagggacaccaggagacttttattcaaaaacatgatttacaggggacatctcaaggcttgacntggtttggggggccccctttttgggggggttntcccctgattgttgctgcctggtggtgggtgaattttgaagcctggtatctcccaagaatggggcagacccgangaagcatgcccttttgggcttacacactggggtgtggaaacaaactaaattgttcggtgttaacaaaaattggatttccacttgaggccaccctacagcccagaagaagatattgaaggaaattgttaagggaaagtcagcacttacattaaggaaaattggctacaaccccgacacaagtagcattttgtgcccaatttctggttgggaatggtgacaacatgcctggagccaagtgcctaacatgccttggtttcaaggggatggaaaagtcacccgtaaggatggcaatgccagtggaaccacgctgcttgaggctctggactgcatcctaccaccaactcgtccaactgacaagcccttgggcctgcctctccaggatgtctacaaaattggtggtattggtactgttcctgttggccgagtggagactggtgttctcaaacccggtatggtggtcacctttggtccagtcaacgttacaacggaagtaaaatctgtcgaaatgcaccatgaagctttgggtgaagctcttcctggggacaatgtgggcttcaatgtcaagaatgtgtctgtcaaggatgttcgtcgtggcaacgttgctggtgacagcaaaaatgacccaccaatggaagcagctggcttccctgctcaggtgattatcctgaaccatccaggccaaataagcgccggctatgcccctgtattggattgccacacggctcacattgcatgcaagtttgctgagctgaaggaaaagattgatcgccgttctggtaaaaagctggaagatggccctaaattcttgaagtctggtgatgctgccattgttgatatggttcctggcaagcccatgtgtgttgagagcttctcagactatccacctttgggctgctttgctgttcgtgatatgagacagacagttgcggtgggtgtcatcaaagcagtggacaagaaggctgctggagctggcaaggtcaccaagtctgcccagaaagctcagaaggctaaatgaatattatccctaatacctgccacccaactcttaatcagtggtggaagaacggtctcagaactgtttgtttcaattggccatttaagtttagtagtaaaagactggttaatgataacaatgcatcgtaaaaccttcagaaggaaaggagaatgttttgtggaccactttggttttcttttttgcgtgtggcagttttaagttattagtttttaaaatcagtactttttaatggaaacaacttgaccaaaaatttgtcacagaattttgagacccattaaaaaagttaaatgag

SEQ ID NO: 8043 - DNA, 494 bp, Homo sapiens
  SIMILAR (139)..(492): 761254mologous to Mus musculus purine nucleotide binding protein,accession number U44731,Smith-Waterman Score=453.
ctgtaaatccggctggactttcagttactaagaacagaccgtttctcgaggatccaggcgcatgaggacaaagcaaggggtgagagaactcttcacgctgcagtgcccacaccaggttatccagaatctgaatccatcatgatggcccccatttgtctaggggaaaaccatgaagagcagctgacagtgaattcaaaggcattagagattcttgacttgatttctcagcccgcggtgggggtggccattgtagggctataccgcacaggaaaatcctatctcatgaatcgtcttgcaggaaagcgcaatggcttccctctgggctccacggtgcagactgaaactaagggcatctggatgtggggtgtgccccaactatttaagccaaaccacaccctgggccttttggacaccgaaggcctgggcgatgtagaaaagagtaaccctaagaatgactcgtggatcttttgcctggctgtgcttctaagcagcag

SEQ ID NO: 8044 - DNA, 407 bp, Homo sapiens
  misc_feature (1)...(407): n = a,t,c or g
ctgaccttggtcatttgtatgtacgggagaggaagtggatcaaagaaagtgggaagaagaacagaagtagcaatgttatgcttggcagtcatctacacacaaatgtagttttgtgaatgaagaaaacctcacattacttagcataagtgaagacactgggcagccaggnnnnnnnnnnnnnnnnnnnnggggggggccgttttaaaggatccttgggggggccaaagtttacgggggcttgcaaggtattatttttttccttatagggggccgttttaaaacctacttgggaatttttggaaaggaccttttttttgggggggggacatattgggccaacttccttccggaattttaaggctttagggaaaatataaaattttaaggggtatagggggtaaaccaag

SEQ ID NO: 8045 - DNA, 434 bp, Homo sapiens
  misc_feature (1)...(434): n = a,t,c or g
ctcagatcaagatacggaagagcccagcactccacgatgctccatcatgcccctttgcagaaaatactgcctcctccagtaaacactattctgatgtcacnnnnnnnnnnnnnnnnnnnnnnnnnnnnnnnnnnnnnnnnnnnctgaacaatatgaactgtcctgtgtgatttcttgtatttcattatgggtggtgtgctattgtatcaacagggtatttgggtggttttcagatttgtgatattaacaataaaggaattataaatattgtagtacnnnnnnnnnnnnnnggggcggccgttttaaaggatccttgggggggccaaagtttacgcgggcaggcaaggaatagttttttccttatgggagccgaataataaccaacttggggatttttggaagggacctttattttgggggtgaacatatatgan

SEQ ID NO: 8046 - DNA, 422 bp, Homo sapiens; identical to SEQ ID NO: 4984
  SIMILAR (1)..(174): 1001254mologous to Mus musculus putative,accession number AK002405,Smith-Waterman Score=298.
  misc_feature (1)...(422): n = a,t,c or g

SEQ ID NO: 8047 - DNA, 443 bp, Homo sapiens
  misc_feature (1)...(443): n = a,t,c or g
agaagttgaaacactatatttatcttgtcagtttttatatttaaagaaagaatacattgtaaaaatgtcaggaaaagtatgatcatctaatgaaagccagttacacctcagaaaatatgattccaaaaaaattaaaactactagttttttttcagtgtggaggatttctcattactctacaacattgtttatattttttctattcaataaaaagccctaaaacnnnnnnnnnnnnnngggggggccgttttaaagaacccttgggggggccaaattttacgggggcttgcaaggtaatagctttttccttatagggagccgtattaaaacctacctgggaattttggaaaagaacctttccttgggggggggaacatattgggccaacctccctccaaaatttaaaggctttagggaaaatataaatttttaaggggtatagg

SEQ ID NO: 8048 - DNA, 400 bp, Homo sapiens; identical to SEQ ID NO: 715
  misc_feature (1)...(400): n = a,t,c or g

SEQ ID NO: 8049 - DNA, 930 bp, Homo sapiens
  SIMILAR (49)..(435): 841254mologous to Homo sapiens acid ceramidase,accession number U70063,Smith-Waterman Score=575.
  misc_feature (1)...(930): n = a,t,c or g
gtggcttcgggatagggggcagacgaccccgnggnggggagagcgaggccgggccagaacagttatgatttattcctcctggctgccgccgcccggggggcgggcgggcattacgcgccgccgtgcacagaggactgcagaaaatcaacctatcctccttcaggaccaacgaacagaggtgcaggtccatggtacaccataaatcttgacttaccaccctacaaaagatggcatgaattgatgcttgacgaggcaccaatgctaaaggttatagtgaattctctgaagaatatgataaatacattcgtgccaagtggaaaagttatgcaggtggtggatgaaaaattgcctggcctacttggcaactttcctggcccttttgaagaggaaatgaagggtattgccgctgttactgaaatacctttaggtaaagttcacttagaagctttaaaaaaaaaaagtaattaaattcttttacaagtttccattgaggtgtgatatacatacagcacaggtgctgtatgtcttagatatacagcacaggtgctgtatgtcttagatatacatacagcacaggtgcacaggtcttagatatacagctcaagtgaagcttcagaaaatgcatgcatgcatgtagccattgactcagatcaagatacggaagagcccagcactccacgatgctccatcatgcccctttgcagaaaatactgcctcctccagtaaacactattctgatgtcactatagattagttttgcctcttcgtgaactttgtataaatagaactgaacaatatgaactgtcctgtgtgatttcttgtatttcattatgggtggtgtgctattgtatcaacagggtatttgggtggttttcagatttgtgatattaacaataaaggaattataaatattgtagtacaaaaaaaaaa

SEQ ID NO: 8050 - DNA, 550 bp, Homo sapiens
  SIMILAR (1)..(213): 1001254mologous to Homo sapiens 23 kD highly basic protein,accession number X56932,Smith-Waterman Score=363.
  misc_feature (1)...(550): n = a,t,c or g
agaaagtttgcctatctggggcgcctggctcacgaggttggctggaagtaccaggcagtgacagccaccctggaggagaagaggaaagagaaagccaagatccactaccggaagaagaaacagctcatgaggctacggaaacaggccgagaagaacgtggagaagaaaattgacaaatacacagaggtcctcaagacccacggactcctggtctgagcccaataaagactgttaattcctcnnnnnnnnnnnnnnngggggggccgttttaaaggatccttgggggggcccaagtttaacgggggcttgcaaggtaaaatttttttccttaaagggggccttataaaaacctacttggggattttttgaaaaggaaccttttttttgggggggggaaatattgggacaacctccctccagaatttaaaggctttagggaaaataaaaaattttaaagggtaaagggggtaaaacaactcgcatatgcttgggggttggaaagttttgcttccggggtttgatttttgaaaatttttttccccggggctgg

SEQ ID NO: 8051 - DNA, 2388 bp, Homo sapiens
  SIMILAR (58)..(102): 751254mologous to Homo sapiens acid ceramidase,accession number U70063,Smith-Waterman Score=47.
  misc_feature (1)...(2388): n = a,t,c or g
ctctttttgcctctgctggagcccggcgagaggcgtggtttgttatatcgaagccgacccggaggagctgtcgccttaatcctcctggctgccgccgtcagcttgtgccgttctcgcagcacgcgccgccgtggacagaggactgcagaaaatcaacctatcctccttcaagaccaacgtacagaggtgcagttccatgggacaccatacagtgcttgacttaccacccgtacaaaagatggcatgaattgatgcttgacaaggcaccagtgctnaaaaggttatagtgaattctctgaagaatatgataaatacattccgtgccaaagtggaaaaattatgcaggtggtggatgaaaaattggccgggcctacttggcaactttccttggcccttttgaagaggaaatgaagggtattggccgctgtttactcgatatacctttaggagagattatttcattcaatattttttaatgaatttatttaccatttgtacttcaatagtagcagaagacaaaaaaggtcatctaatacatgggagaaacactggattttggagtattttcttgtgtggaacataaataatgatacctgggtcataactgagcaactaaaacctttaacagtgaatttggatttccaaagaaacaacaaaactgtcttcaaggcttcaagctttgctggctatgtgggcatgttaacaaggattcaaaccaggactgttcagtcttacactgaatgaacgtttcagtataaatggtggttatctgggtattctagaatggattctgggaaagaaagatgccatgtggatagggttcctcactagaacagttctggaaaatagcacaagttatgaagaagccaagaatttattgaccaagaccaagatattggccccagcctactttatcctgggaggcaaccagtctggggaaggttgtgtgattacacgagacagaaaggaatcattggatgtatatgaactcgatgctaagcagggtagatggtatgtggtacaaacaaattatgaccgttggaaacatcccttcttccttgatgatcgcagaacgcctgcaaagatgtgtctgaaccgcaccagccaagagaatatctcatttgaaaccatgtatgatgtcctgtcaacaaaacctgtcctcaacaagctgaccgtatacacaaccttgatagatgttaccaaaggtcaattcgaaacttacctgcgggactgccctgacccttgtataggttggtgagcacacgtctggcctacagaatgcggcctctgagacatgaagacaccatctccatgtgaccgaacactgcagctgtctgaccttccaaagactaagactcgcggcaggttctctttgagtcaatagcttgtcttcgtccatctgttgacaaatgacagatctttttttttttccccctatcagttgatttttcttatttacagataacttctttaggggaagtaaaacagtcatctagaattcactgagttttgtttcactttgacatttggggatctggtgggcagtcgaaccatggtgaactccacctccgtggaataaatggagattcagcgtgggtgttgaatccagcacgtctgtgtgagtaacgggacagtaaacactccacattcttcagtttttcacttctacctacatatttgtatgtttttctgtataacagccttttccttctggttctaactgctgttaaaattaatatatcattatctttgctgttattgacagcgatattattttattacatatcattagagggatgagacagacattcacctgtatatttcttttaatgggcacaaaattggtgcctttgcctctaaatagcactttttcggggtcaagaagtaatcagtatgcaaagcaatcttttatacaataattgaagtgttccctttttcataattactctacttcccagtaaccctaaggaagttgctaacttaaaaaactgcatcccacgttctgttaatttagtaaataaacaagtcaaagacttgtggaaaataggaagtgaacccatattttaaattctcataagtagcattgatgtaataaacaggtttttagtttgttcttcagattgatagggagttttaaagaaattttagtagttactaaaattatgttactgtatttttcagaaatcaaactgcttatgaaaagtactaatagaacttgttaacctttctaaccttcacgattaactgtgaaatgtacgtcatttgtgcaagaccgtttgtccacttcattttgtataatcacagttgtgttcctgacactcaataaacagtcactggaaagagtgccagtcagcagtcatgcacgctgataaaaaaaaaaaaaaaaaa

SEQ ID NO: 8052 - protein, 140 aa, Homo sapiens
  DOMAIN (87)..(99): Globins profile domain identified by eMATRIX, accession number BL01033B, p-value=7.000e-14, raw score of 13.81
  DOMAIN (14)..(140): Globin domain identified by PFam, accession name globin, E- value=1.3e-37, PFam score of 135.6
LFWSPQTQREPTMVLSPADKTNVKAAWGKVGAHAGEYGAEALERHFDLSHGSAQVKGHGKKVADALTNAVAHVDDMPNALSALSDLHAHKLRVDPVNFKLSHCLLVTLAAHLPAEFTPAVHASLDKFLASVSTVLTSKYR

SEQ ID NO: 8053 - protein, 102 aa, Homo sapiens
  misc_feature (1)...(102): Xaa = X or * as defined in Table 2
FCDCHHFILMFKSPHIWPVGIFSSWLLCFFWACLHHSLSIALLSCTKRYSGLILYFLCSSFEITVSSKSSVSFXRRMVFRNQVLGSRCACCCXGVAAPRPFP

SEQ ID NO: 8054 - protein, 223 aa, Homo sapiens
ARACKIPNTASDRPIIVALQRKRSSPKMTQSAAGTCPTSCMIKIDSHKCGDDRELFAQAPVDQFPGTAVESVTDSSRYFVIRIEDGNGRRAFIGIGFGDRGDAFDFNVALQDHFKWVKQQCEFAKQAQNPDQGPKLDLGFKEGQTIKLNIANMKKKEGAAGNPRVRPASTGGLSLLPPPPGGKTSTLIPPPGEPVGCGGIPRPASSCSQFRSTSSQTQPGTGW

SEQ ID NO: 8055 - protein, 110 aa, Homo sapiens
  misc_feature (1)...(110): Xaa = X or * as defined in Table 2
ACPFNKSAEDLLNLRQGLTAGQLPFLPWWNIVLDSPSLTSIPATSFSTSLATARARSASEVPIWKTTLFCSLSQVRKTTRSSGATKSTVLSTSLTTLLHXIILRSISSSQ

SEQ ID NO: 8056 - protein, 218 aa, Homo sapiens
  DOMAIN (96)..(126): Renal dipeptidase proteins domain identified by eMATRIX, accession number BL00869B, p-value=9.382e-10, raw score of 15.55
LPPLPACPALHNMQPSGLEGPGTFGRWPLLSLLLLLLLLQPVTCAYTTPGPPRALTTLGAPRAHTMPGTYAPSTTLSSPSTQGLQEQARALMRDFPLVDGHNDLPLVLRQVYQKGLQDVNLRNFSYGQTSLDRLRDGLVGAQLHTCTSTITHAYATTYTDTCPQPCSCSEEVLSTVDFVAPDDRVVFRTCEREQNRVVFQMPLVNTYKVNSHSVPTNS

SEQ ID NO: 8057 - protein, 149 aa, Homo sapiens
  DOMAIN (111)..(121): Ogre family domain identified by eMATRIX, accession number PF00876E, p-value=1.947e-10, raw score of 7.99
GQEEMAAGETHLYAKVSNKLKSRSSPSLLEPLLAMGFPVHTALKVLAATGRKTAEEALAWLHDHCNDPSLDDPIPQEYALFLCPTGPLLEKLQEFWRESKRQCAKNRAHEVFPHVTLCDFFTCEDQKVECLYEALKRAGDRLLGSFPTA

SEQ ID NO: 8058 - protein, 135 aa, Homo sapiens
  DOMAIN (33)..(55): Globins profile domain identified by eMATRIX, accession number BL01033A, p-value=7.000e-13, raw score of 16.94
  DOMAIN (9)..(135): Globin domain identified by PFam, accession name globin, E- value=3.2e-23, PFam score of 85.4
QTQREPTMVLAPADKNNVKAGWGKGGAHAGEHGAEALDRKILYFPTTKNYFPHFYLSHGSAQGKGHGKKEDDALTNAVGHGDHMPNALCALSDLHAHKLGVDPDNCKLLIHCLLVTLCAHLPAEFTPAVHATLDK

SEQ ID NO: 8059 - protein, 118 aa, Homo sapiens
  DOMAIN (81)..(103): Nuclear transition protein 2 proteins domain identified by eMATRIX, accession number BL00970A, p-value=8.500e-09, raw score of 10.12
GLFERKIDIIKILNIFSLFLINSKNTNKCVLRYMYRNCCNIIILNNLKQTELPKVGYNERKGGLFILWNIFQELKRMRIHTHTHTHTHTHTHTHTHSLGIPNPEIQMLQSPKLSDPPT

SEQ ID NO: 8060 - protein, 175 aa, Homo sapiens
  DOMAIN (58)..(97): DEAD-box subfamily ATP-dependent helicases proteins domain identified by eMATRIX, accession number BL00039A, p-value=1.783e- 16, raw score of 18.44
  DOMAIN (68)..(125): DEAD/DEAH box helicase domain identified by PFam, accession name DEAD, E-value=1.4e-13, PFam score of 45.8
  misc_feature (1)...(175): Xaa = X or * as defined in Table 2
DNELLDYEDDEVETAAGGSMSEAPAKKDVKGSYFSIHSSGFRDFLLKPELLRAIVDCGFEHPSEVQHECIPQAILGMDFLCQAKSGMGKTAVFVLATLQQLEPVTGQVSVLVMCHTRELAFQTRXKTRPFWNVTVCPSGEDTRVGVKETLLPPPLTAPTPWLPSFASPPLLNPHF

SEQ ID NO: 8061 - protein, 76 aa, Homo sapiens
RNSDVRPLVMAENDVDNELLDYEDDEVETAAGGDGAEAPAKKDVKGSYVSIHSSGFRDFLLKPELLRAIVDCGFEH

SEQ ID NO: 8062 - protein, 459 aa, Homo sapiens
  DOMAIN (369)..(415): DEAD-box subfamily ATP-dependent helicases proteins domain identified by eMATRIX, accession number BL00039D, p-value=5.000e- 26, raw score of 21.67
  DOMAIN (90)..(287): DEAD/DEAH box helicase domain identified by PFam, accession name DEAD, E-value=4.9e-32, PFam score of 104.2
  misc_feature (1)...(459): Xaa = X or * as defined in Table 2
LFTPCFHLFCENPSRSPFPSSPAGPVMAENDVDNELLDYERXMRWETAAGGDGAEAPAKKDVNGLLCLPSHSSGFRDFLLKPELLRAIVDCGFEHPSEVQHECIPQAILGNGMSCARAKSGSGERQAVFVLATLQQLEPVTGQGVCAGXCCHTRELAFQISKEYERFSKYMPNVKVAVFFGGLSIKKDEEVLKKNCPHIVVGTPGRILALARNKSLNLKHIKHFILDECDKMLEQLDMRRDVQEIFRMTPHEKQVMMFSATLSKEIRPVCRKFMQDPMEIFVDDETKLTLHGLQQYYVKLKDNEKNRKLFDLLDVLEFNQVVIFVKSVQRCIALAQLLVEQNFPAIAIHRGMPQEERLSRYQQFKDFQRRILVATNLFGRGMDIERVNIAFNYDMPEDSDTYLHRVARAGRFGTKGLAITFVSDENDAKILNDVQDRFEVNISELPDEIDISSYIEQTR

SEQ ID NO: 8063 - protein, 33 aa, Homo sapiens
  DOMAIN (10)..(29): Transmembrane 4 family proteins domain identified by eMATRIX, accession number BL00421A, p-value=1.220e-13, raw score of 11.79
  DOMAIN (13)..(30): Transmembrane 4 family domain identified by PFam, accession name transmembrane4, E-value=0.00023, PFam score of 16.9
YHWMGMSNLKLLKYVLFLFNLLFWVRASLLSTG

SEQ ID NO: 8064 - protein, 68 aa, Homo sapiens
RKTTSPGAFYLGGKGGYPGRVRGAVKKPPGEFWGGPQLRGGDPGGTPPSGIKGSRGKKRFFGASGGNP

SEQ ID NO: 8065 - protein, 158 aa, Homo sapiens
  misc_feature (1)...(158): Xaa = X or * as defined in Table 2
IVSPEVRWAPGVAMEESGYESVLCVKPDVHVYRIPPRATNRGYRAAEWQLDQPSWSGRLRITAKGQMAYIKLEDRTSGELFAQAPVDQFPGTAVESVTDSSRYFVIRIEDGNGRRAFIXIGFGDRGDAFDFNVALQDHFKWVKQQCEFAKQAQNPDQG

SEQ ID NO: 8066 - protein, 67 aa, Homo sapiens
RVEVHFKSCDCQKAEEGGCSQKNFTRGPLSDTCIGILKGSHICRYSECGKIFPDPRYFCVSRNIHTR

SEQ ID NO: 8067 - protein, 74 aa, Homo sapiens
  misc_feature (1)...(74): Xaa = X or * as defined in Table 2
GFLGKVLQSPATTVVRTLNDRSSIVMGEPISQSSSNSQXFFFFKENSRILFCLGXCAVEQHFSSIFHCVDFYII

SEQ ID NO: 8068 - protein, 889 aa, Homo sapiens
DSPCEPAGGGRERQRRVGLQDGGSVVVTAAAGEQASPGGQRDGRVGVCAGEVRGNGASGRRGLSGSCHPFSRLNLWSHGEFGPLRSRRRRHRHYCLYRLLRVRSADEVSEEAAARAVETAATMSDTRRQVEGLYPETKTGNGTTEAPGTSPPLTWRSSRGCRCWFGQSPTDHYSWESKINPNTAYQKQQDTLIVWSEAENYDLALSFQEKAGCDEIWEKICQVQGKDPSVEVTQDLIDESEEERFEEMPETSHLIDLPTCELNKLEEIADLVTSVLSSPIRREKLALALENEGYIKKLLQLFQACENLENTEGLHHLYEIIRGILFLNKATLFEVMFSDECIMDVVGCLEYDPALAQPKRHREFLTKTAKFKEVIPITDSELRQKIHQTYRVQYIQDIILPTPSVFEENFLSTLTSFIFFNKVEIVSMLQEDEKPLSEVFAQLTEEATDDDKRRELGMDDLQVRSAATDIFSYLVEFSPSMVREFVMQEAQQSDDDILLINVVIEQMICDTDPELGGAVQLMGLLRTLIDPENMLATTNNTFTQERYGESLNKLLLPPLYSLQETRLLKTDIWPTDSGMLTALSVPLPHSGPWLQDWLCPTAASHRVVWDGCPPPAEGKGPQAKFLGTSHTGAIQQHDDVRNRSPLPPSGLSRRRRGRGDRENLPPNCDPAPRGGAERGGSRAERGGSLAEVLPPQSGTPPRESAEHSGLGSACRSGAPARTARASLLEEEEKGRESRVTRWRICSSYRGGGRASEPWGAKRRESGCMRGVRSADEVSEEAAARAVETAATMSDTRRRVKVYTLNEDRQWDDRGTGHVSSTYVEELKGMSLLVRAESDGKCLRVNSVEGELENTHLVSNMELIDYWWGEILTLLGDEGDSSDLCCDSVV

SEQ ID NO: 8069 - protein, 44 aa, Homo sapiens
VVFVVLIELATMSKCNIKPMGKSEPLFFFFESESCSVAQTGVEW

SEQ ID NO: 8070 - protein, 85 aa, Homo sapiens
PRQEAKMGKKLDLSKLTDEEAQHVLEVVQRDFDLRRKEEERLEALKGKIKKESSKRELLSDTAHLNETHCARLLEPLTLVWERQK

SEQ ID NO: 8071 - protein, 114 aa, Homo sapiens
LRVSTLLFKLASFTMGNLPPSISPSSPLACVLKSLKPLHLLPDLKSKHLIFFSNTAWPQYKLDNGFKWPENDTFDFSIPRDLDTFCRKKGKWSEVPYVQAFFTLCSLLSYMTHT

SEQ ID NO: 8072 - protein, 56 aa, Homo sapiens
SRWPGPFPQSGEVSAAPEMSKLSFRARALDASKPLPVFRCEDLPDLHEYASINRAR

SEQ ID NO: 8073 - protein, 112 aa, Homo sapiens
FLQLQERQWFLTQEDSLRNMWNDIELLTNDDTGSGYLSVGSRKEHGTALYQVDLLVKISSEKASLNPKIQACSLSDGFIIVADQSVILLDSICRSLQLHLVFDTEVDVVGLW

SEQ ID NO: 8074 - protein, 61 aa, Homo sapiens
FLQLQERQWFLTQEDSLRNMWNDIELLTNDDTGSGYLSVGSRKETSLHFLQASNFYPSAKK

SEQ ID NO: 8075 - protein, 143 aa, Homo sapiens
ESLRMKLSLTKVVNGCRLGKIKNLGKTGDHTMDIPGCLLYTKTGSAPHLTHHTLHNIHGVPAMAQLTLSSLAEHHEVLTEYKEGVGKFIGMPESLLYCSLHDPVSPCPAGYVTNKSVSVWSVARRVEMTVSKFMAIQKALQPD

SEQ ID NO: 8076 - protein, 102 aa, Homo sapiens
  DOMAIN (26)..(37): TYPE II EGF-LIKE SIGNATURE domain identified by eMATRIX, accession number PR00010C, p-value=2.667e-11, raw score of 11.16
  DOMAIN (10)..(87): EGF-like domain identified by PFam, accession name EGF, E- value=5.5e-11, PFam score of 49.9
  misc_feature (1)...(102): Xaa = X or * as defined in Table 2
XLFCVDIDECSIMNGGCETFCTNSEGSYECSCQPGFALMPDQRSCTDIDECEDNPNICDGGQCTNIPGEYRCLCYDGFMASEDMKTCVDVNECDLNPNICLX

SEQ ID NO: 8077 - protein, 117 aa, Homo sapiens
NTKHPNLAIVLPVEQAALLHNCVKTVDEVFPNEKDLTDRPLRDPDVKYFTGGSSFVLEEFGHARYTVVTSDSVVEAQPLPTGTSAQKAELIALTRALLLAKEKKVSIYTNSKYASRA

SEQ ID NO: 8078 - protein, 28 aa, Homo sapiens
KIGCSAYGVAILLFLYFFNKLAFTLWKK

SEQ ID NO: 8079 - protein, 121 aa, Homo sapiens
  DOMAIN (49)..(90): Ferritin iron-binding regions proteins domain identified by eMATRIX, accession number BL00540A, p-value=2.356e-18, raw score of 15.06
  DOMAIN (57)..(121): Ferritins domain identified by PFam, accession name ferritin, E-value=7.8e-25, PFam score of 86.8
SLPASDRPPISSPLATSGTIFSAISCFWDLPAPFLWLAPSCQPTMSSQIRQNYSTDVEAAVNSLVNLYLQASYTYLSLQDIKKPAEDEWGKTPDAMKAAMALEKKLNQALLDLHALGSART

SEQ ID NO: 8080 - protein, 253 aa, Homo sapiens
  DOMAIN (173)..(228): Ferritin iron-binding regions proteins domain identified by eMATRIX, accession number BL00540B, p-value=1.000e-40, raw score of 18.82
  DOMAIN (92)..(250): Ferritins domain identified by PFam, accession name ferritin, E-value=1.5e-92, PFam score of 313.8
  misc_feature (1)...(253): Xaa = X or * as defined in Table 2
EICPSRPKNSARRGGPAGLSLASTVFGRNRSGDWASSLRPPSDFLLRLQPPGPSYRPSPASGTCQHRFLWLAPSCQPTMSSQIRQNYSTDVEAAVNSLVNLYLQASYTYLSLGFYFDRDDVALEGVSHFFRELAEEKREGYXRLLKMQNQRGGRALFQDIKKPAEDEWGKTPDAMKAAMALEKKLNQALLDLHALGSARTDPHLCDFLETHFLDEEVKLIKKMGDHLTNLHRLGGPEAGLGEYLFERLTLKHD

SEQ ID NO: 8081 - protein, 130 aa, Homo sapiens
DKKLKKDSFTATSLCKTSLLIITNQGKKSGSREHRNTAKGNIAKCFPSFIRQTSCNATTGCICTQFREMPTLLFSYPQFSFFLSFFFSFFETESLLPRLECSGAISAHCNLDLLGSTDPPTLAPQITCTT

SEQ ID NO: 8082 - protein, 94 aa, Homo sapiens
GMAAVGNLLGRVRQSTVKVTGPALHRLHTSFWRADSNRASLTRVHRQAYARLYPELLEKQDGCTIHIRYREPRRMLAMPIDLDTLSPEERRARL

SEQ ID NO: 8083 - protein, 70 aa, Homo sapiens
TFICSRLRQSTVKATGPALRRLHTSSWRADSSRASLTRVHRQAYARLYPVLLVKQDGSTIHIRYREPRRM

SEQ ID NO: 8084 - protein, 66 aa, Homo sapiens
QPAGPSLTRCATAQALCTTLPPCCLVKQDGSTIHIRYREPRQQCWRMPIDLDTLSPEERRARLRKR

SEQ ID NO: 8085 - protein, 122 aa, Homo sapiens
  DOMAIN (62)..(114): Ubiquitin domain proteins domain identified by eMATRIX, accession number BL00299, p-value=2.250e-25, raw score of 28.84
GGALGRAGSPPSVDPASGVAVSEAARSPLGSGFTSREGVKTENNDHINLKVAGQDGSVVQFKIKRHTPLSKLMKAYCERQGLSMRQIRFRFDGQPINETDTPAQLEMEDEDTIDVFQQQTGG

SEQ ID NO: 8086 - protein, 716 aa, Homo sapiens
  DOMAIN (654)..(706): Ubiquitin domain proteins domain identified by eMATRIX, accession number BL00299, p-value=4.420e-18, raw score of 28.84
  DOMAIN (401)..(608): Reverse transcriptase domain identified by PFam, accession name rvt, E-value=2.2e-11, PFam score of 51.2
MVKGSIQQEELTILNRYASNTGAPRFIKQVLSDLQRDLDSHTLIMGDFNTPLSTLDRSTRQKVNKDTQELNSALHQVDLIGIYRTLHPKSTEYTFFSAPHHSYSKIDHILGSKALLSKCKRTEIITNYLSDHSAIKLELRIKKLTQNRSTTWKMNNLLLNDYWVHNEMKAEIKMFFETNENKDTTYQNLWDAFKAVCRGKFIALNAHKRKQERSKIDTLTSQLKELEKQEQTHSKASRRQEITKIRAELKEIETQKTLQKINESRSWFFERINKIDRPLARLIKKKKREKNPIDAIKNDKGDITTDPTEIQTTIREYYKHLYANKLENLEEMDKFLDTYTLPRLNQEEVESLNRPITGSEIVAIINSLPTKKSPGPDGFTTESYQRYKEELVPFLLKLSQSIEKEGILPNSFYEASIILIPKPGRDTTKKENFRPISLMNIDAKILNKILANQIQQHIRKLIHHDQVGFIPGMQGWFNICKSINVIQHRNRAKDKNHMIISIDAEKAFDEIQQCFMLKTLNKLEPSNHTALAGVGVHQEDSIAALAYDLDENHNFSQALAAPQDSHIIQSCRKNQLSAPFSAAGSAVHAAPMHSCMASSPYRVRTRHLFCEAAAEETPVFTMANEKPTEEVKTENNNHINLKVAGQDGSVVQFKIKRQTPLSKLMKAYCEPRGLSMKQIRFRFGGQPISGTDKPAQLEMEDEDTIDVFQQPTGGVY

SEQ ID NO: 8087 - protein, 128 aa, Homo sapiens
  DOMAIN (5)..(37): Ribosomal protein S19e proteins domain identified by eMATRIX, accession number BL00628A, p-value=5.304e-29, raw score of 21.53
  DOMAIN (4)..(128): Ribosomal protein S19e domain identified by PFam, accession name Ribosomal_S19e, E-value=1.1e-26, PFam score of 102.0
CLGVTVKDVNQQEFVRALAAFLKKSGKLKVPEWLDTVKLLAKHKELAPYDENWFYSREFVRNLASTARHLYLRGGRWGLAPLTKIYGGDVQRKRAFIAPAIFSRGSKSVARRVLQALEGLKMVEKDQD

SEQ ID NO: 8088 - protein, 122 aa, Homo sapiens
  DOMAIN (40)..(92): Ubiquitin domain proteins domain identified by eMATRIX, accession number BL00299, p-value=6.657e-12, raw score of 28.84
  misc_feature (1)...(122): Xaa = X or * as defined in Table 2
GDSGGSPWPDEKPKEGVKTENNDHINLKVAGQDGSVVQFKIKRHTPLSKLMKAYCERQGLSMRQIRFRIXPGNPIHETDTPAPVGKWKDERYQLMVFQQARPGGVYLKKGTCFFYSKNSVSF

SEQ ID NO: 8089 - protein, 51 aa, Homo sapiens
SGICSCTDLTMTTVEEDSDTVTVKTVNSVTLTQDTEGNLILHCPQNGRRTC

SEQ ID NO: 8090 - protein, 74 aa, Homo sapiens
EPKSQPDQHGETPSLLKIQKLAGRGGTCLYSQLLRRLRQENHLNPGGRGCSEPRSHHCTLAWATVRLPLKKKKK

SEQ ID NO: 8091 - protein, 133 aa, Homo sapiens
QTPDLLPEALEAQVLPAKRLRSSEEPTEKEPPGQLQVKAQPQARMTVPKQVRSRDISREEWKGSETYSPNTAYGVDFLVPVMGYICRICHKFYHSNSGAQLSHCKSLGHFENLQKYKAAKNPSPTTRPVSRRC

SEQ ID NO: 8092 - protein, 25 aa, Homo sapiens
MNIYLYACLLYVSVYRARGSTRKFE

SEQ ID NO: 8093 - protein, 110 aa, Homo sapiens
APRPVSWEVSRGSPDPRPTLACFQVRSRDISREEWKGSETYSPNTAYGVDFLVPVMGYICRICHKFYHSNSGAQLSHCKSLGHFENLQKYKAAKNPSPTTRPVSRRCAIN

SEQ ID NO: 8094 - protein, 40 aa, Homo sapiens
IISSRGAYHNQDLPKNSQAWWLVPAVPAAWEAEVGGSLEA

SEQ ID NO: 8095 - protein, 69 aa, Homo sapiens
YWLSKSLLLLLLLLFLRQSLAVTQDRVQWHDLGSLQPLLPGFKQFSCLSLPSRWDYRCPPHSRLIFVLL

SEQ ID NO: 8096 - protein, 97 aa, Homo sapiens
PGLIQEPSGSMDTAVIVAIRGLATIFLASFANLGLVFRQRYCRPRDLLQRYNSKPIVDLIGAMETQTEPSEIELDDVGITNPHIDAPLENEKRDQIC

SEQ ID NO: 8097 - protein, 795 aa, Homo sapiens
  DOMAIN (588)..(643): kw TRANSCRIPTASE REVERSE II ORF2 domain identified by eMATRIX, accession number DM01354Q, p-value=1.000e-40, raw score of 9.23
  DOMAIN (541)..(794): Reverse transcriptase domain identified by PFam, accession name rvt, E-value=1.2e-57, PFam score of 204.9
SMHQQLCQELQRDNVDLFVQSSLSAKERHLAAVASALWRHFFSFLKSQRMSQVVPFSQLADAAADFTLLAMDMPSTAPSDFQPQPVISIIQLFGWDDIICPQVVARYLSHVLQNSTLCEALSHSGYVSFQALTVRSWIRCVLQMYIKNLSGPDDLLIDKNLEEAVEKEYMKQLVKLTRLLFNLSEVKSIFSKAQVEYLSISEDPKKALVRFFEAVGVTYGNVQTLSDKSAMVTKSLEYLGEVLKYIKPYLGKKVFSAGLQLTYGMMGILVKSWAQIFATSKAQKLLFRIIDCLLLPHAVLQQEKELPAPMLSAIQKSLPLYLQGMCIVCCQSQNPNAYLNQLLGNVIEQYIGRFLPASPYVSDLGQHPVLLALRNTATIPPISSLKKCIVQVIRKSYLEYKGSSPPPRLASILAFILQLFKETNTDIYEVELLLPGILKCLVLVSEPQEIQTTIGEYYKELYTNKLKNLEEMDKFLDTYILPRLNQEEVEHLNRPITGIEIEAVINSLPTKKSLGPDRFTTDFYQSYKEELETFLVKLFQSIEKEGILPNSFYEASIILILKPGRDTTTKKNFRSISLMNINAKILNKILANRSQQHIKKLIHHDQVGFIPGMQGWFNICKSINIIHHINRTNDKNHMIISIDAEKAFNKIQQYFMLTTLNKLGIDGTCLKIIRAVYDRPTANIVLNGQKLETFPLKTGIRQGYPLSSLLFNIVLEVLARTVRQEKAIKRIQLGKEEVKLSLFADDMIVYLGNPIVSVQNLLKLISHFSKVSGYKISVQKSQAFLYTNNRQRDKS

SEQ ID NO: 8098 - protein, 314 aa, Homo sapiens
  misc_feature (1)...(314): Xaa = X or * as defined in Table 2
PHLILQVTKAMCPFESGRESFLVVSICIYFKPDSSASFSFPDPYSVQCXPQLEPPPHCSTSIYFPKPTLPHIPFPPPLLTKHPKEDLELAGWTSSGCFYFSLPSTKLGENWSLHPQSHVYRSGDLDVGSFXLLSQKLHRNPSICSLKGPPPREGLGNDPVSTNTAPYPRNLPXDLQRTIFSSPSIFYPGPPGAPSGESXNPXELEGILEVFXLELCPTEVHXHQPGLVFPPPSGLFSSFPPPQKILTHRFLLVQASKPTPLPLRLCPLWSPSHPYPSSLAPSSSLEFGPGSPQKTLEXPPLPKKQTDRHAPGPE

SEQ ID NO: 8099 - protein, 443 aa, Homo sapiens
  DOMAIN (119)..(164): kw TRANSCRIPTASE REVERSE II ORF2 domain identified by eMATRIX, accession number DM01354N, p-value=1.000e-40, raw score of 13.17
  DOMAIN (203)..(442): Reverse transcriptase domain identified by PFam, accession name rvt, E-value=4.4e-58, PFam score of 206.4
MNRGSTKDFGGSGNALYDIAMIDAEIWDYVKRPNLRLIGVPDSHGENGTKLENTLQDIIQENFPNLARSWFFEKINKIDRPLARLIKKKREKNQIDTIKNDKGDITTDPTEIQTTIREYYKHLYTNKLENLEEMDKFLDTYTLPRLNKEEVESLNRPITGSEIEAIINSLPTKKSPGPDRFTDEFYQRYKEELVPFLLKLFQSIEKEGILPNSFYEASIILIQKPGRDTTKKENFRPRSLMNIDAKILNKILANQIQQHIKKLIHHDQVGFIPGMQGWFNIRKSINVIQHINRTKDKNHMIISIDAEKAFDKIQQPFMLKTLNKLGIDGMYLKIIRAIYDKPTANIILNGQKLEAFPLKAGTRQGCPLSPLLFNIVLKVLARTIRQEKEIKGIQLGKEEVKLSLFADDMIVYPENPNVSTQNLLKLISNFSKVSGYKINVQKS

SEQ ID NO: 8100 - protein, 192 aa, Homo sapiens
  DOMAIN (71)..(86): G-PROTEIN BETA WD-40 REPEAT SIGNATURE domain identified by eMATRIX, accession number PR00320C, p-value=9.400e-09, raw score of 13.01
  DOMAIN (4)..(84): WD domain, G-beta repeat domain identified by PFam, accession name WD40, E-value=2.4e-14, PFam score of 61.1
ASAHRLLQHYQLHSAAVNGLSFHPSGNYLITASSDSTLKILDLMEGRLLYTLHGHQGPATTVAFSRTGEYFASGGSDEQVMVWKSNFDIVDHGEVTKVPRPPATLASSMGNLPEVDFPVPPGRGRSVESVQSQPQEPVSVPQTLTSTLEHIVGQLDVLTQTVSILEQRLTLTEDKLKQCLENQQLIMQRATP

SEQ ID NO: 8101 - protein, 246 aa, Homo sapiens
  DOMAIN (84)..(102): BETA G-PROTEIN (TRANSDUCIN) SIGNATURE domain identified by eMATRIX, accession number PR00319D, p-value=5.235e-10, raw score of 11.64
  DOMAIN (64)..(187): WD domain, G-beta repeat domain identified by PFam, accession name WD40, E-value=1.6e-22, PFam score of 88.3
PLTRAAGIRHEDSQSVGNSSPEIPVLPEPAYQLGPLCQVLPRRAGSSCLPVMTRTVKLWDKSSRECVHSYCEHGGFVTYVDFHPSGTCIAAAGMDNTVKVWDVRTHRLLQHYQLHSAAVNGLSFHPSGNYLITASSDSTLKILDLMEGRLLYTLHGHQGPATTVAFSRTGEYFASGGSDEQVMVWKRNFDIGDHGEVTKVPRPPGTLASSMGNLTVSILEQRLTLTEDKLKQCLENQQLIMQRATP

SEQ ID NO: 8102 - protein, 249 aa, Homo sapiens
  DOMAIN (4)..(22): BETA G-PROTEIN (TRANSDUCIN) SIGNATURE domain identified by eMATRIX, accession number PR00319D, p-value=8.986e-09, raw score of 11.64
  DOMAIN (54)..(221): WD domain, G-beta repeat domain identified by PFam, accession name WD40, E-value=0.0018, PFam score of 25.0
LSTPIGTCIAAAGMDNTVKVWDVRTHRLLQHYQWLLELKPTWGFGLWRQLEPFVLRWLTLLVHSAAVNGLSFHPSGNYLITASSDSTLKILDLMEGRLLYTLHGHQRHIQCAGLVGLFSLGQHIQRGWLLALVCPRGFALPGALVYMSMCTALCQACPSSHLKGLTPGGWLVDQETRVVALVPVPYLRLWKVLGPATTVAFSRTGEYFASGGSDEQVMVWKSNFDIVDHGEVTKVPRPPATLASSMGNL

SEQ ID NO: 8103 - protein, 83 aa, Homo sapiens
  DOMAIN (24)..(38): 1 kw CHROMO BROMODOMAIN SHADOW GLOBAL domain identified by eMATRIX, accession number DM00547B, p-value=3.045e-17, raw score of 11.28
  DOMAIN (17)..(78): SNF2 and others N-terminal domain identified by PFam, accession name SNF2_N, E-value=5.4e-20, PFam score of 76.2
LFISKFKYSIYYFVQMLWENGINGILADEMGLGKTVQCIATIALMIQRGVPGPFLVCGPLSTLPNWMAEFKRFTPDVRHASLC

SEQ ID NO: 8104 - protein, 50 aa, Homo sapiens
IFKICNLKYLFITGETLEIPDTVMGLTLLAAGTSIPDTIASVLVARKGKN

SEQ ID NO: 8105 - protein, 112 aa, Homo sapiens
IQGQSSHPSCPMSSQANKPGAAHTPDPCKVQTTAETRRIALRSKKSAASSEVTGLKADPTTSCKPGIQETTFPPLPSCVLSSHSPISSSDHSGCSTWVGEQGSHRPEGTTLN

SEQ ID NO: 8106 - protein, 122 aa, Homo sapiens
  misc_feature (1)...(122): Xaa = X or * as defined in Table 2
SSGASVAPTSWTSNRFPPXSWVPSSFXRTHGPRPSGPPRERKPRAPGQEPTKGTPRESVCLNDLPCPGLLGICRPILQTSPCHGHHGILSVVNVLKGDKPKSPRSLGLPVFHNHHFRDLSVL

SEQ ID NO: 8107 - protein, 209 aa, Homo sapiens
  DOMAIN (60)..(73): BTB (also known as BR-C/Ttk) domain proteins domain identified by eMATRIX, accession number PF00651, p-value=9.571e-10, raw score of 15.00
  DOMAIN (31)..(144): BTB/POZ domain identified by PFam, accession name BTB, E- value=6e-27, PFam score of 103.0
FHMLFQSNEAHVMEFPSEKKNNFLVSEDHGQKILSVLQNFREQNVFYDFKIIMKDEIIPCHRCVLAACSDFFRAMFEVNMKERDDGSVTITNLSSKAVKAFLDYAYTGKTKITDDNVEMFFQLSSFLQVSFLSKACSDFLIKSINLVNCLQLLSISDSYGSTSLFDHALHFVQHHFSLLFKSSDFLEMNFGVLQKCLESDELNVPEEEK

SEQ ID NO: 8108 - protein, 30 aa, Homo sapiens
TCMFISAQFAIAKSWNHPKCPSINEWIKKL

SEQ ID NO: 8109 - protein, 390 aa, Homo sapiens
  DOMAIN (139)..(190): Aromatic amino acids permeases proteins domain identified by eMATRIX, accession number BL00594F, p-value=8.583e-10, raw score of 18.48
MEHVYNIFSSNIKKEVVGRKMYCDKKHHTTKRNCPNKLRQNSGKWSKDYNIQVKADSRKRQLENFTTFLTCLCPSKLAVLKCQKPTFPAFCPTADTAFCTLAAVAFCRRGFLPPRLSAPPPPPPLLFAPPPPWLFARRGFLPPAVTAFCPPAAATFSSPRLFAAAAVAAAFCARGFLPLLPPPFAPAAAAFCPRRRGFLLPRLFAPVAAAFCHRDFLPSPPRIFVPAAAALRAGAAGSAASSTGVLARAAPRGAPGPCGLHRAALPAEAMGEKKDGGGGGDAAATEGGTGAAASRALQQCGQLQKLIVIFIGSLCGLCTKCAVSSDLTQQEIQTLENSVEIKPASPRFSAVLMPNKLSPLHAKIGLKPICYPSYTSSIKVQKCDFEYARV

SEQ ID NO: 8110 - protein, 374 aa, Homo sapiens
MNTRKKEGKKEKERERERKKGEREEGKEEERMEFIDYSSFTCHGGAYLRLFYVSASVLFRLAGFLPHRRHSFLHPRRRGFLPPRLSAAAAFCPPAATAAAFCPTAAVAFCPPRLFTRHGVLPAAAFCPPLSRLFAPPPQRLFPRRGFLPPPLLPPLFAPAAFCRCCRRLLPPPQRLFVPAAAAFCYRDFLPRSPPLFATATFCPRRRGFLSPPAAALRAGAAGSAASSTGVLARAAPRGAPGPCGLHRAALPAEAMGEKKDGGGGGDAAATEGGTGAAASRALQQCGQLQKLIVIFIGSLCGLCTKCAVSSDLTQQEIQTLEGRDDPEKAQVAAGTKSDIVPPVHTPWLCHHAEDRFKGLASLPAKLKEHKLRN

SEQ ID NO: 8111 - protein, 130 aa, Homo sapiens
  DOMAIN (16)..(130): Nucleoside diphosphate kinases domain identified by PFam, accession name NDK, E-value=6.5e-53, PFam score of 189.2
SRRPDPPGCRTMANLERTFIDVKPDGGHRSLVGEIINRFEQKGFRLLAMNFLRAFEKHLKHHYIDLNDRPCFPGLVKYMNSRSVAAMVWEGLNALKTGPGMLVETTPSHSMPGSIRGDFCIQVGTNIIHG

SEQ ID NO: 8112 - protein, 83 aa, Homo sapiens
  DOMAIN (25)..(64): PROTEIN ZINC FINGER ZINC-FINGER METAL-BINDING NU domain identified by eMATRIX, accession number PD01066, p-value=7.000e-36, raw score of 19.43
  DOMAIN (23)..(70): KRAB box domain identified by PFam, accession name KRAB, E- value=7.1e-21, PFam score of 82.8
PEDTGKSIAKMPGPPESLDMGPLTFRDVAIEFSLEEWQCLDTAQQDLYRKVMLENYRNLVFLGENNFNTKSLIYPKVFISLFS

SEQ ID NO: 8113 - protein, 105 aa, Homo sapiens
RLHCSVSSAPRGPASGPVTCRYWESTAKTPGHPGSLEMDNLRYGVYPVKGASGYPGAERNLLEYSYFEKTEFRSCCPGWSAMARSQLTSTSASRVQAILLPQPPE

SEQ ID NO: 8114 - protein, 193 aa, Homo sapiens
MAILGRAQWLMLVIPALWEAEARSLSGEDGFRDVAGFVRFFVFGCRWNSGSRLHCSVSSAPRGPASGPVTCRYWESTAKTPGHPGSLEMDDLRYGVYPVKGASGYPGAERNLLEYSYFEKVWGLVRFTLELFHTNEEEREYSKVTEEVTEHVYLPAKEKAAKEGEVHPYPSAHPPYYFEEKDPPDLSFPEDTG

SEQ ID NO: 8115 - protein, 140 aa, Homo sapiens
  DOMAIN (56)..(95): PROTEIN ZINC FINGER ZINC-FINGER METAL-BINDING NU domain identified by eMATRIX, accession number PD01066, p-value=8.250e-35, raw score of 19.43
  DOMAIN (54)..(117): KRAB box domain identified by PFam, accession name KRAB, E- value=4.9e-43, PFam score of 156.4
PAGIGRSTAKTPGTPGSLEMENLKSGVYPLKEASGCPGADRNLLVYSFYEKGPLTFRDVAIEFSLEEWQCLDTAQQDLYRKVMLENYRNLVFLAGIAGSKPDLITCLEQGKEPWNMKRHAMVAKPPVICSHFPQDLWAEQ

SEQ ID NO: 8116 - protein, 45 aa, Homo sapiens
ARFMLFIFNKAGIAVSKPDLVTCLEQGKDPWNMKGHSTVVKPPGR

SEQ ID NO: 8117 - protein, 13 aa, Homo sapiens
MLKLSVRNRETFL

SEQ ID NO: 8118 - protein, 63 aa, Homo sapiens
  DOMAIN (17)..(30): NONHISTONE CHROMOSOMAL PROTEIN HMG17 FAMILY SIGNATURE domain identified by eMATRIX, accession number PR00925B, p-value=3.089e- 10, raw score of 3.73
DPFQKMAPKVKKEAPGPPKAEAKAKALKAKKVVLKGVHGHKKKKIRMSPTFQRPKTLRLWMPP

SEQ ID NO: 8119 - protein, 67 aa, Homo sapiens
NPSILVTEARECLYAQAVTKHKPHTILLLNFLFRAPPRLECNGMISAHCNLHLPGSNDSAPASHIKL

SEQ ID NO: 8120 - protein, 218 aa, Homo sapiens
  DOMAIN (173)..(215): Osteopontin proteins domain identified by eMATRIX, accession number BL00884C, p-value=1.000e-40, raw score of 22.45
  DOMAIN (42)..(218): Osteopontin domain identified by PFam, accession name Osteopontin, E-value=1.7e-68, PFam score of 241.0
LPGRPTRAPTRPAEHSIVGTRLVSCQLQPSQPNADQGKLTTMRIAVICFCLLGITCAIPVKQADSGSSEEKQLYNKYPDAVATWLNPDPSQKQNLLAPQTLPSKSNESHDHMDDMDDEDDDDHVDSQDSIDSNDSDDVDDTDDSHQSDESHHSDESDELVTDFPTDLPATEVFTPVVPTVDTYDGRGDSVVYGLRSKSKKFRRPDIQYPDATDEDITS

SEQ ID NO: 8121 - protein, 203 aa, Homo sapiens
  DOMAIN (90)..(134): Osteopontin proteins domain identified by eMATRIX, accession number BL00884B, p-value=1.000e-40, raw score of 12.47
  DOMAIN (40)..(203): Osteopontin domain identified by PFam, accession name Osteopontin, E-value=3.4e-55, PFam score of 196.8
PRVRPRVREEAEHSIVGTRLVSGQLQPSQPNADQGKLTTMRIAVICFCLLGITCAIPVKQADSGSSEEKQLYNKYPDAVATWLNPDPSQKQNLLAPQNAVSSEETNDFKQETLPSKSNESHDHMDDMDDEDDDDHVDSQDSIDSNDSDDVDDTDDSHQSDESHHSDESDELVTDFPTDLPATEVFTPVVPTVDTYDGRGDSVG

SEQ ID NO: 8122 - protein, 353 aa, Homo sapiens
  DOMAIN (184)..(226): Osteopontin proteins domain identified by eMATRIX, accession number BL00884C, p-value=8.031e-33, raw score of 22.45
  DOMAIN (44)..(353): Osteopontin domain identified by PFam, accession name Osteopontin, E-value=2.8e-138, PFam score of 472.8
  misc_feature (1)...(353): Xaa = X or * as defined in Table 2
TDCRVDPRVRPRVRVEHSIVGTRLVSCQLQPSQPNADQGKLTTMRIAVICFCLLGITCAIPVKQAESGSSEEKQLYNKYPDAVATWLNPDPSQKQNLLAPQTLPSKSNESHDHMDDMDDEDDDDHVGTARDSIGLGTTLDGCRMDTGWIFHQFXWSLHHFWMESGWNWSLDFSPRDLAQATEVFQFQFVPTVDTYDGRGDSVVYGLRSKSKKFRRPDIQYPDATDEDITSHMESEELNGAYKAIPVGPDPDAPSDWDSRGKDSYETSQLDDQSAETHSHKQSRLYKRKANDESNEHSDVIDSQELSKVSREFHSHEFHSHEDMLVVDPKSKEEDKHLKFRISHELDSASSEVN

SEQ ID NO: 8123 - protein, 374 aa, Homo sapiens
  DOMAIN (203)..(245): Osteopontin proteins domain identified by eMATRIX, accession number BL00884C, p-value=1.000e-40, raw score of 22.45
  DOMAIN (54)..(374): Osteopontin domain identified by PFam, accession name Osteopontin, E-value=6.7e-172, PFam score of 584.5
  misc_feature (1)...(374): Xaa = X or * as defined in Table 2
LETPIDSPRNRPGNPGATHASGRRQSTASSGPDSVSGQLQPSQPNADQGKLTTMRIAVICFCLLGITCAIPVKQADSGSSEEKQLYNKYPDAVATWLKPXPIFRRQNLLGPTEWLCPLKETNDFKQGGPFPSXGPTERPWTTWDDMGXWKVDGWTMWDSQDSIDSNDSDDVDDTDDSHQSDESHHSDESDELVTGFSTDLPATEVFTPVVPTVDTYDGRGDSVVYGLRSKSKKFRRPDIQYPDATDEHITSHMESEELNGAYKAIPVAQDLNAPSDWDSRGKDSYETSQLDDQSAETHSHKQSRLYKRKANDESNEHSDVIDSQELSKVSREFHSHEFHSHEDMLVVDPKSKEEDKHLKFRISHELDSASSEVN

SEQ ID NO: 8124 - protein, 162 aa, Homo sapiens
WYVQPAAQEGSQCWHLEGPRPCMGAPKSMGRCHCSRQHRPTVCYHSLALCNKQVNKVIRRLHCCLNLLSLTKHLFMLKSLLHVFFCEFFCVICSFIYLYGFCLEENVNFNLVKCIKFYLHSLWISFFLSSPEIDLPYYMIILKILQFFSSTFIVSFHFVFVL

SEQ ID NO: 8125 - protein, 366 aa, Homo sapiens
  DOMAIN (202)..(220): CYTOCHROME B-245 HEAVY CHAIN SIGNATURE domain identified by eMATRIX, accession number PR00466E, p-value=1.000e-21, raw score of 6.82
  DOMAIN (1)..(365): Ferric reductase like transmembrane com domain identified by PFam, accession name Ferric_reduct, E-value=1.1e-35, PFam score of 132.0
MGFHHVGQAGLELLISSDPPALASQGAGITGSWKWILAPVILYICERILRFYRSQQKVVITKVKNMHFPLAVIRVIFYRTTELNFYVVTLKEELGNWAQWVVVMHPSKVLELQMNKRGFSMEVGQYIFVNCPSISLLEWHPFTLTSAPEEDFFSIHIRAAGDWTENLIRAFEQQYSPIPRIEVDGPFGTASEDVFQYEVAVLVGAGIGVTPFASILKSIWYKFQCADHNLKTKKIYFYWICRETGAFSWFNNLLTSLEQEMEELGKVGFLNYRLFLTGWDSNIVGHAALNFDKATDIVTGLKQKTSFGRPMWDNEFSTIATSHPKSVVGVFLCGPRTLAKSLRKCCHRYSSLDPRKVQFYFNKENF

SEQ ID NO: 8126 - protein, 90 aa, Homo sapiens
FYKVTFMWKSKVKSLGDNFVLGSVVPCFLFFFFFFLRWSLALLPRLECSGAISAHCILCLPGSSNSPASASQVVGITGTCHHAWLIFLYF

SEQ ID NO: 8127 - protein, 71 aa, Homo sapiens
DSFMPLSQLYLIYFFSRPSLALLPRVECSGVISAHCNLRLPGSSNSPASASQVAGITGTCHHAWLMFCIFS

SEQ ID NO: 8128 - protein, 365 aa, Homo sapiens
  misc_feature (1)...(365): Xaa = X or * as defined in Table 2
AWRRRRSGTSGKATWWCSGLRRASPTPSRRVQSWATAVMWKPSPSSSPASWEPALPREPHRAVSEQRQXGRXPCKPELTAPLCLEPVHRPEGPMGTYSRCCLSPLHRPPGPVGTFPVSPEPVHRPQDPWHIPGVPEPVHRPQDPWHIPGVPEPVHRPQDPWHIPGVPEPVHRPQDPWHIPGVPEPVHAPTGPVALASVGASSRDGLLPAHAAACTLHETAGQTRTSRLSPSXGLGLPFCSRRSRQPWTPALGHSKTSGEWRGGARPGPCGCXCCMLSPTQQPLPGGHPQRARASPRAGEGXTSRAYLAVHAAATLWKLPLPEDPPPLLDARISAHRPLCPSGRHRKVSLFLTLSFSISCEARKIG

SEQ ID NO: 8129 - protein, 296 aa, Homo sapiens
LKSPSRRSWEPQRLTWHATMEKSPKSEVVITTVPLVSEIQMMAATGGTELSCYRCIIPFGVGAFIAGIVVTALGICGRFRENLEYKMKKGNEGQFWGTSVRHRTPSASVVLEKSGKKQSQCHGIHAMIKRYPQSIPDYTAWASSRIWEEMDDTEGVLERLPWQQTPDLKPDMQSDFLPVRVCQYQSWLLFAHNSKTEGLLGKFGHPSCGIVQRFFGEKKETWELYEQECNGETVVYWEVKYPFPMSNRDVSFPQAAVYCREVELVSQQAQITLSLILAAAFAKDIASCMVFGELRV

SEQ ID NO: 8130 - protein, 236 aa, Homo sapiens
  DOMAIN (32)..(236): START domain identified by PFam, accession name START, E- value=2.4e-45, PFam score of 164.1
FVAHTKGVRGLPSMRRSPDCGRMELAAGSFSEEQFWEACAELQQPALAGADWQLLVETSGISIYRLLDKKTGLYEYKVFGVLEDCSPTLLADIYMDSDYRKQWDQYVKELYEQECNGETVVYWEVKYPFPMSNRDYVYLRQRRDLDMEGRKIHVILARSTSMPQLGERSGVIRVKQYKQSLAIESDGKKGSKVFMYYFDNPGGQIPSWLINWAAKNGVPNFLKDMARACQNYLKKT

SEQ ID NO: 8131 - protein, 376 aa, Homo sapiens
  DOMAIN (335)..(353): RNase H domain identified by eMATRIX, accession number PF00075J, p-value=2.125e-14, raw score of 15.78
  DOMAIN (139)..(351): Reverse transcriptase domain identified by PFam, accession name rvt, E-value=1.3e-22, PFam score of 88.6
MHEIWCRDSDQETSLGRSIPCPAALCSVRKIHVQPQVLRPTSPRNISPISNLRLKSDAASSPWKPPGPSRTPSFGLLCVFLSYPPTLTTSIGHLYSFPGNRSHAHYHPTKPNHPYPTQRQYPIPPHALKGLKPVITDLLQHRLLKPINSPYNSPILPVQKPDKSYRLVQDLRLTNQIVLPIHPVVPNLYTLLSSIPSSTTHYSVLHLKDAFFTIPLHPSSQPLFAVTWTDPDTQQSQQLTWAVLPQGFRDSPHYFSQALSHDLLSFHPSASHLIQYIDDLLLCSPSFESSQQDTLLLLQHLFSKGYQSDDRPAFTSQITQAVSQALGIQWNLHIPYHPQSSGKVEWTNGLLKLLLLLLTANIDDTSYLQIPHKGLQ

SEQ ID NO: 8132 - protein, 286 aa, Homo sapiens
RLHPGEINSHVAHTKPVVVFHTDAHEIWCCDSDRGTSLGRSIPCPPVLCSVRNIYLQPQILRPTSPRNISLILNQTKETRFICGPKTPAPVTDWDGSLPLVFNHCRDASLIVHPRFKGVRARRDACLGPSPLAASPAFLGKGQAAPRQAELGPNASSASAPPPYNLFIASPPHTWSGLQFRSVTSPPPPAQQFTLKKVAGAKGIVKHALKRLKPVITRLLQHGLLKPINSPYNSPILPVLKPDKPYKLVQDLRLINQIVLPIHPVMPKHTDGYQNVGPNITQCVIH

SEQ ID NO: 8133 - protein, 304 aa, Homo sapiens
  misc_feature (1)...(304): Xaa = X or * as defined in Table 2
MTDNILELAQNMDKYTKYEMTTTSILSQPSSSQREQDGQGFQELTVTSEMFRKGKGSFCSHPHPEKFLRTFNEIETYLIGNFQDLELESSDDLPRGCTNEKARKTYDPKKLPLPYTVRPCWILASKLHIXESYGXRQXAXXCHQXTPWPRPVWWSLHTEAHEIWCRDSDQGTSLGRSIPCPPVLCSXERSTYDLRPQTDQPSKHLTNLKSASTPPPYNPFITSPPHTRSGLQFRSTSSPPAPAQQFTLKKVAEAKGIVKVNAPFSLSDLSQISVRLGSFIKYEKSSPVHGSFGSNPETLYSPRP

SEQ ID NO: 8134 - protein, 68 aa, Homo sapiens
LSQWKHALKRLKPVITCLLQHGFLKPINSPYNSLILPVLKPDKPYKLVQDLRLINQIVLPIHPMVSQA

SEQ ID NO: 8135 - protein, 500 aa, Homo sapiens
  DOMAIN (442)..(465): POTASSIUM CHANNEL SIGNATURE domain identified by eMATRIX, accession number PR00169G, p-value=8.657e-11, raw score of 9.39
  DOMAIN (269)..(493): Ion transport protein domain identified by PFam, accession name ion_trans, E-value=7.6e-07, PFam score of -41.0
MRTREVSITGADFTALLVDIIGNSTSYLTEIFKSTSILSVNQSNESDCIFICVMTGKSGRNLSDFWEIEEKYPIINYTFTSGLSGVLALLLTQSLFGGLFTRTRMKFGAVTRIGGPPLGNQSPSSCSLLHEKDPPTTSGPQTDQPKKHLTNFKSGTEEAMNTTSLLAPAAEIMATPGSPSQASPTSGAFTHGTQTPSPTKATAPRYPQTGAQSRRPRRFRRPPAGAAPKAAAPRHPHPRGTAPPPRRISPESIRPHPPPPLDRGPRPPVTPFLIVLGCLILAVLTTFKEYETVSGDWLLLLETFAIFIFGAEFALRIWAAGCCCRYKGWRGRLKFARKPLCMLDIFVLIASVPVVAVGNQGNVLATSLRSLRFLQILRMLRMDRRGGTWKLLGSAICAHSKELITAWYIGFLTLILSSFLVYLVEKDVPEVDAQGEEMKEEFETYADALWWGLITLATIGYGDKTPKTWEGRLIAATFSLIGVSFFALPAGILGSGLALK

SEQ ID NO: 8136 - protein, 157 aa, Homo sapiens
  misc_feature (1)...(157): Xaa = X or * as defined in Table 2
LVARTERLSVSQGFLPWCTGRIRSHVGLENECKVLLSGSSSQKMGKPEGRWFSPGVGPPPCLAAPALLRLPWKSPPHPTGGWPASVPVPVGVLFCQRAPLDDQLLVCWPARVLEKRYWQPPLSXLCPSCAHHMNGYGSGAYVWVLTELTVDFAGFWA

SEQ ID NO: 8137 - protein, 274 aa, Homo sapiens
  misc_feature (1)...(274): Xaa = X or * as defined in Table 2
MWNAVTLWQQRESCIEEESEIGTLETKETHFIRGPKTLAPVTDWEGSLPLVFNQCRDASLIIHPRFKGFRPRRDACLGPSPLAASPAFLGKGQAAPRQAELGPNSSSASAPPPYNPFITSPPHTWSGLQFHSMTSPPPPAQQFPLKKVAGAKGIVKRLKTDTARLPWKPPDHHRRRASGNSHSGRVQPPCPAAFVGSCXVSQAFPGARCKLSVDLPFWDLEDRVFMCVRVKRPPNRLCVSNMAVYFTWVQLLQAIWAYTCKSQGMRWLGLGSEA

SEQ ID NO: 8138 - protein, 201 aa, Homo sapiens
  misc_feature (1)...(201): Xaa = X or * as defined in Table 2
MTLIKSPIVIWTIRSRLKWSQMEMRNLLGTGAKRQRRHVLSVDPKLRRWSRTGKAAFPWCLIIAGRPALVLHPXQQVLLSWGRGKIXLTSPSRCTIIEKSCNSWPPLXDKPQPHLQHTRTSKRLNRSGQAFLQNLLPQELATSTRNPDHQAKECLQPRIPPKPCPICAGPHWKLDCSTHLAATPRAPGTLAQGSLTDSFSA

SEQ ID NO: 8139 - protein, 179 aa, Homo sapiens
  misc_feature (1)...(179): Xaa = X or * as defined in Table 2
RRCCCRHTRSPCLALLLEIVSLFSFAVPQSPDSSPLVFTYFARTHPDPPSLLPLPAQLWQRTMWTMKLLDYERXMRWETAAGGDGAEAPAKKDVKGSYVSLSHSSGFLDFLLLLXVLPSIVHCAFEHSTHFRHECISQAILGKDALFPALLDIFLTGVFFLTIFSPVLRVLLRCLFCLS

SEQ ID NO: 8140 - protein, 537 aa, Homo sapiens
  DOMAIN (450)..(468): RNase H domain identified by eMATRIX, accession number PF00075J, p-value=5.125e-14, raw score of 15.78
  DOMAIN (355)..(509): Integrase core domain identified by PFam, accession name rve, E-value=5.1e-41, PFam score of 145.9
MGLVHLQRQSYWTVQRSSINHFLGCNPHTGKDKTLYMRWTKSFRKVEDPPTTSGPQTDQPKKHLTKFKSETKETRFIHGPKTPAPVMDWEGSLPLVFNHCRDASLIIHSHFKGVRPRRDACLGPSPLAASPAFLGKRQHALKRLKPVITHLLQHGLLKPKNSPYNSPILPVLKPDKPYKFVQDLCLINQIVLPIHPMLYSLFVESPTITIVSGPDFNPASHIIPDTTPDPHDCISLIHLMLSPFPHISFFPISHPDHTWFIDGSSTRPNRHSPAKAGYAIISSTSIVEATTLPPSTTSQQAKLVALTQALTLAKGLRVNILLILNMPFIFGTTMQSYGLKEGLFRSPPFPTHQARGFAPAQDWQIDFTHMPRVRKLKYLLVWVDAFTGWVEAFPTGSEKATAVISSLLSDIIPRFGLPASTQSDNGPAFTSQITQAVSQALGIQWNLHIIYRPQSSGKVERTNGLLKTHLTKLSLQLKKDWTVLLTLALLRIRACPRDATGYSPFELLYGHTFLLGPNLIPDTSPLGNYLPVLQQAR

SEQ ID NO: 8141 - protein, 386 aa, Homo sapiens
  DOMAIN (338)..(349): RNase H domain identified by eMATRIX, accession number PF00075F, p-value=5.500e-12, raw score of 12.87
  DOMAIN (283)..(386): RNase H domain identified by PFam, accession name rnaseH, E- value=6.1e-07, PFam score of 24.7
  misc_feature (1)...(386): Xaa = X or * as defined in Table 2
MADSRIKRTWMRMKFGAVTRIGGTSLGRSIPCPPALCSVKKIHLRPRVLRPTSPRNISPILNTARFKRIKACYYSPATAWPFKAYKLPLQFPHFTWSXNQTRLTAXFSXKHTCSPXLSSPANLPNPNPFYKTTTPFLPRHGXXGQILTQELGPRPIAFLSKQLDLTVLTQPSCLHAAAAAALILLKALKITKYAQLTLYSSHNFQNLFSSSYLMHILSAPWLLQLYSLFVESPTITIVPGTDFNPASHIILDTTPDPHDCISLIHLTFTPFPRISFFPVPHPNHIWFIDGSSTRPKCHSPAKAGYAIVSSTSIIEATALPPSTTSQQAELVALTQALTLAKGLCVNIYTDSKYAFHIVHHHARSFLTKQGSSIINPSLIKTLLNAA

SEQ ID NO: 8142 - protein, 74 aa, Homo sapiens
  DOMAIN (42)..(59): Zinc finger, CCHC class domain identified by PFam, accession name zf-CCHC, E-value=1.4e-05, PFam score of 31.9
  misc_feature (1)...(74): Xaa = X or * as defined in Table 2
SFYHLPSSHWVLLTVSFRDXPSPTCPAIYSXKGGWSQRHSQGACYKCQKSGHWAKECPQPRIPPKLRPICVGPH

SEQ ID NO: 8143 - protein, 167 aa, Homo sapiens
  misc_feature (1)...(167): Xaa = X or * as defined in Table 2
HTDGVLVWMSFLFVSFPSNSQDPQLQLCWSLLEVHSRSCLPGYQQWRLSWKCRNHSSSASLTLRAVDWSCSYSAILEPRWYCLLYFIQSIILKKHRGRRWIFLMEQRTGGQRIDLPRGGPPIXVTAPNLMHVRVKRPPNRLCVSNKAVYFTSKSGPLSQDVVTVVIH

SEQ ID NO: 8144 - protein, 94 aa, Homo sapiens
LFSGNFIPKSFFSLISPTVGSHAAPNPTRSSPEKHRPLSLHTTPQKFRCPNTSPLFCFVFLCPSAGMLTFHVKRGCDFTSCASLNPEGTPPVEM

SEQ ID NO: 8145 - protein, 140 aa, Homo sapiens
  DOMAIN (85)..(102): Zinc finger, CCHC class domain identified by PFam, accession name zf-CCHC, E-value=0.00073, PFam score of 26.3
WVLGLADFKNEAADPRETKETHFIRGPKTPAPVTDWEGSLPLVFNHCRDASDYSPTFQRCQTMQGRLPWSFTLSGKSRFSRGGARACYKCQKSDHQAKECLQPRIPPKPCPSVRDPTGNRTVQLTWQALPEPLEFWPKAL

SEQ ID NO: 8146 - protein, 75 aa, Homo sapiens
  misc_feature (1)...(75): Xaa = X or * as defined in Table 2
LFTHVSKELATSARNLTTRPRTAGSPGFLLSHVPSVWDPTANRTVQLTWQPLPEPLESGPRLSDXLLPRSSRLSG

SEQ ID NO: 8147 - protein, 1709 aa, Homo sapiens
  DOMAIN (797)..(842): kw TRANSCRIPTASE REVERSE II ORF2 domain identified by eMATRIX, accession number DM01354N, p-value=1.000e-40, raw score of 13.17
  DOMAIN (391)..(621): AP endonuclease family 1 domain identified by PFam, accession name AP_endonucleas1, E-value=7e-83, PFam score of 288.8
MLFWAFDKIQQPFMLKTLNKLGIDGTYLKIIRAVYDKPTANIILNGQKLEAFPLKTGTRQGCPLSPLLFNIVLEVLARAIRQEKEIKGIQLGKEEVKLSLFADDMIVYLENPIISTQNLHKLISNFSKVSGYKNNVQKLQAFLYTNNRQTESQIMSELPFTIASKRIKYLGIQLTRDVKDLFKENYKPLLKEIKEDTNKWKNIPCSWIRRINIVKMAILPKRTPLLSLPSTLYEELWRLRSYFPLCPQLYNMEQNTTDWVIYKEQCIWLTALETGESKSTAPAFGKGYPMAEYIIWGRLTPHMAGYSSETKLPEERSGSNICCSPISAVLQPLLLIPRQTGSGVDLQQTPTDLQLRVLTVRRKTNKQKGHPHQNPICTSPSSKTKGSNSHITILTLNVNGLNAPIKRHRLANWIKSQDPSVCCIQETHLTCRDTHRIKIKGWREIYQANGKQKKAGVAILVSDKTDFKPTKIKRDKEGHYMMVKGSIQQEELTTLNIYAPNTGAPRFIKQVLRDLQRDLDSHTLIMGDFNTPLSTLDRSTRQKVNKDIQDLNSALHQVDLIDIYRTLHPKSTEYTFFSALHHIYSKIDHIVGSKALLSKYKTTEIITNCLSDHSAIKLELRIKKLTQNRSTTWKLNNLLLNDYWVHNKMKAEINTLFETNENKDTTYQNLWDTFKAVCRGKFIALNAHKRKQERSKIDTLTSQLKELEKQEQTHSKASRRQEITKIRAKLKEIETQKILQKINESRSWFFEKINKIDRPLARPIKKKREKNQIDAIKNDKGDITTDPTEIQTTIREYYKHLYANKLENLEEMDKFLNTYTLPRLNQEEVESLNKPITGSEIEAIINSLPIKKSPGPDGFIAKFHQRYKEELEASIILIPKPGRDTTKKENFRPIPLMNIDAKILNKILANRIQQHIKKLIHHDQVGFIPGMQGSFNICKSINVIQDINRTNDKNHMIISIDAEKAFDKIQQPFILKTLNKLGIDGTYLKIIRAIYDKPTANIILNGQKLEAFPLKTGTRQGCPLSPLLFNIVLEVLARAIRQEKEIKGIQLGQEEVKLSLFADDMIVYRENPIVSTQNLHKLISNFSKVSGYKINVQKSQAFLYTNNRQTESQIMSELPFTIASKRIKYLGIQLTRDVKDLFKENYKPLLKEIKEDTNKWKNIPCSWVGRINIVKMAILPKVIYRFNAIPIKLPMTFFTELEKTTLKFIWNQKRARIAKSILSQRNKAGGITLPDFKLYYKATVTKTAWYWYQNRDIDQWNRTEPSEIMPHIYNHLIFDKPDKNKKWGNDSLFNKWCWENWLAICRRKLKLDPFLTPYTKINSRWIKDLNVRPKTIKTLEENLGNTIQDIGMGKDFMSTTPKAMATKAKIDKWDLIKLKSFCTAKETTITVNRQPTEWEKIFTIYPSDKGLISRIYKELKQIYKKRTNNPINKWVKDMNRHFSKEDIYTAKRHMKKCSSSLAIREMQIKTTLRYHLIPVRMAIIKKSGNNRPSSNVFSVKLSEIQSLALIETRCLMNADEQGVPLIQEMLESWASICKVPKYPNAEAVRPEEQTPHLHPGEINSHVAHTKLVWWSLHTDTHEIWCRDSDRGTSLGRSIPCPPALCSVRKIHLRPQVLRPTSPRNISPISNPHTRTSKRLNRSGQAFLQNLLPQELATSARNLTTRPRNACSPGFLLSRVPSVRDPTGNWTVQLTWQPLSEPLELWPKAL

SEQ ID NO: 8148 - protein, 239 aa, Homo sapiens
  DOMAIN (195)..(207): RNase H domain identified by eMATRIX, accession number PF00075C, p-value=7.848e-10, raw score of 11.58
  DOMAIN (93)..(226): Reverse transcriptase domain identified by PFam, accession name rvt, E-value=5.5e-06, PFam score of 15.3
TRMKFDAMTQLGDLPWEINPLSSCSLLREKDPPTTSGPQTDQPKEHLTNFKSTTNHAPLTIPLKPNHSYPAECQYPVPQHALKGLKSIITRLLQHGLLKPINCPYNSPILPVLKPDKAYRLLQDLRLINQIVLSIHPVLPKPNTLLSSIPPSTTHYSVLDLKHAFFTIPLHLSSQPLFAFTWTDPDTHQAQQITWAVLPQGFTDSPHYFNQAQISSSSVTYLGIILMKTHVLSLLIVSG

SEQ ID NO: 8149 - protein, 88 aa, Homo sapiens
GYEIWCRDSDRGPSLGRSIPRPPALCSVRKIHLRPQVLRRTRPRNISPISNLVSGLFLLSSPTSLTIPQPLSSFNLDDTLQSLPSLNF

SEQ ID NO: 8150 - protein, 152 aa, Homo sapiens
  misc_feature (1)...(152): Xaa = X or * as defined in Table 2
AGGGCSPKGRPEAKSGQRDWELVAGGPPGISRREGTCCSRFPSRLSQPFRSAQQLQLAASLPANLSNFCQGSEMPTTSRPALDVKGGTSPAKEDARPEKSTLGQYSTLLVIDNQVSSKTRXPDESANQYYASDTFIILSRTYNRYILVHLSK

SEQ ID NO: 8151 - protein, 168 aa, Homo sapiens
  misc_feature (1)...(168): Xaa = X or * as defined in Table 2
RQKRHVLSVDPKLRRWSRTGKAAFPWCLIIAGRPALVLHPXQQVLLSWGRGKIXLTSPSRCTIIEKSCNSWPPLXDKPQPHLQHTRTSKRLNRSGQAFLQNLLPQELATSTRNPDHQAKECLQPRIPPKPCPICAGPHWKLDCSTHLAATPRAPGTLAQGSLTDSFSA

SEQ ID NO: 8152 - protein, 147 aa, Homo sapiens
  misc_feature (1)...(147): Xaa = X or * as defined in Table 2
KQKRSTYNLRSSDPPAQETSHQFQIRDKGDTFYLWTQNSGAAHGLGRQPSLDVXSLQGHLSDYSPMFPRCQTMQGRLPXSFTLSGKSRFSGEGASTPQPLLHPXWQVPLFWGRGKYPSTPSSPLVASPAFLGKGQKPPRPSRMPSFG

SEQ ID NO: 8153 - protein, 218 aa, Homo sapiens
  misc_feature (1)...(218): Xaa = X or * as defined in Table 2
MGATHPFELLTKMTSQGSDISGDLPWEINPLSSCSLLHEKDPPTTSGPQTDQPKKHLTNFKSETKETHFIRGPKTPVLVTDWEGRLPLVFNHSRDASLIIHPRFRGVRPRRDACLGPSPLAASPAFLEEGQVPQPLLSMSLTPSLLFWRRGKKPSTPSSPLAASPAFLEEGQVPQPHISGALDPLFLHPNLLXLCTPTPFPLFWKTVRKYSSNNQKGE

SEQ ID NO: 8154 - protein, 41 aa, Homo sapiens
  DOMAIN (4)..(41): Integrase core domain identified by PFam, accession name rve, E-value=0.00084, PFam score of 17.2
  misc_feature (1)...(41): Xaa = X or * as defined in Table 2
LSQWRSDNGPAFISQITQAVSQAPGIQXNLYIPYHPQSSGK

SEQ ID NO: 8155 - protein, 139 aa, Homo sapiens
  misc_feature (1)...(139): Xaa = X or * as defined in Table 2
FPKGGPPIXVIAPNFMRVRVKRPPNRLCVSNKAVYFTWVQVGALCRLGAPAPCIPAAPVPVHGSEGPRYNSSRCLAELKPXALAASMWYLSLKALGIESGRVSITAILINISSARKASCVPLGSRILESLMLSTVRALR

SEQ ID NO: 8156 - protein, 95 aa, Homo sapiens
  misc_feature (1)...(95): Xaa = X or * as defined in Table 2
RQVLLFWGRGKYPSTPSPSPLAASPTFLGQGQELVTSARNLTTRPRNACGPGFLLSHVPSVRDPTGNRTVQLTWQPLPEPLESGPRLSDXLLLRL

SEQ ID NO: 8157 - protein, 293 aa, Homo sapiens
  DOMAIN (238)..(255): Zinc finger, CCHC class domain identified by PFam, accession name zf-CCHC, E-value=0.0001, PFam score of 29.1
MASSAQLLGSSQETYNHSKRQRGGEMSHMAGARRKRERGEMLHTFKQPDLMRWSSVCRKNKEKVGNSRKRRNVRYCFSRKFNGTSKVFESWQVVVVGEINSHVAHTKPVRWSLHTDAHEIWCRDSDRRTSLGRSIPCPPVLCSMRKIHLQAQVLRPTSPRNISPILNRRKRRHVLSVDPKLRHRSWTREGSLPLVFNLCRDASLIIHPGFRGVRPRRDTCLGPSPLAASPTFLGEGARACYKCQKSGHQAKECLQPRIPPKLCPIWRDPAGNRTVQLTWQPLPKPLELWPKVL

SEQ ID NO: 8158 - protein, 183 aa, Homo sapiens
  misc_feature (1)...(183): Xaa = X or * as defined in Table 2
CGKVWNFLETFSMALTKMLIMIWTMKFRLRSSQMEMRNLLGTGISLETWCPASXPLXPXLKGDKIQLRPWLQRVQGQSIGSFQEVLGPWVLRNQELRFGNLCLYFAGCMEKPVCPGRSLLQGQGFPWYVPVAVVGAKVHDVNLHMLSFPSKWKLHTCMKFGAVTWIRGPPLGDQSPVLLLFAP

SEQ ID NO: 8159 - protein, 87 aa, Homo sapiens
RQVPLFWGRGKYPNPFSPCLYPFPAFPGTGSLLQVPEIYLTTRPRNACSPGFLLSRVPSLRDPTGNRTVQLTWQTLPEPLELWPKAF

SEQ ID NO: 8160 - protein, 50 aa, Homo sapiens
  misc_feature (1)...(50): Xaa = X or * as defined in Table 2
LVYLKVTGRMEPSWKTLCRILSRRTSPIXQGRPTFRFRKYREHHKDTPRD

SEQ ID NO: 8161 - protein, 142 aa, Homo sapiens
  DOMAIN (3)..(142): Cell division protein domain identified by PFam, accession name GTP_CDC, E-value=1.7e-45, PFam score of 164.6
  misc_feature (1)...(142): Xaa = X or * as defined in Table 2
AWVEQSKVLIKEGGIQLLLTIVDTPGFGDAVDNSNCWQPVIKYFDSKSQDYLNAESQVNRCQMPGNRVHCCLYFIAPSGHGPLHNXRLPPSGRIGXYMFVTTWHCLLLRLKPLDIEFTKHLHEKVNIIPLIAKADTLMPEEC

SEQ ID NO: 8162 - protein, 48 aa, Homo sapiens
  misc_feature (1)...(48): Xaa = X or * as defined in Table 2
FPTTKSLGXDSFTSEFCQTFKAELIPILSRLFQKLEQYVTLPYPFYEA

SEQ ID NO: 8163 - protein, 371 aa, Homo sapiens
  misc_feature (1)...(371): Xaa = X or * as defined in Table 2
VRRQRSDRERSDARMVRFCNLYMXRKNPFILHXLFRXTLRQTKPDSSAVXMCQNLMTHSKSTEWKITKQIFDGDGKTYQNVQQFIDEGNYTSGDNHTLRDPHYVEDKGHKYLVFEANTGTENGYQDSAHLHPGEINSHVAHTKPVWWSLHMDAHEIWCRDSDRGTSLGRSIPRPPALCSVRKIHLQPQVLRPTSPRNISPISNPGFCRFRNHHQTGFSPAGANQRGPLAATLSGPGGEGQSAVARLTGEKKNHPGAQYANRLSPRVGRFINAAGTTGFPTGKRAVSATQLMDFADFGTTTKQDFRLLGQTSVDRLLQLSQGQAVKGNQLLPVSLVKRKTTLAPNTQTASPRALADSLMQLARQVSRLESGQ

SEQ ID NO: 8164 - protein, 326 aa, Homo sapiens
  DOMAIN (247)..(258): RNase H domain identified by eMATRIX, accession number PF00075B, p-value=2.385e-09, raw score of 12.56
  DOMAIN (180)..(323): Reverse transcriptase domain identified by PFam, accession name rvt, E-value=0.0002, PFam score of -6.9
APCDPYSCPPENNPPFSFTYPNPIKQPHPYLPSLTFFSDSAHLHPGEINSFIAHTKPVWWSLHTDTHEIWCCDSDRGTTLGRSIPCPPVLCSKRKIHLRPWSSDRPAQETSHQFQIHLLCVLLLYSPTLTLKYISTPSLATDHAPLTISLKPNHPYPAQCQYPIPQHALKGLKPAITRLLQHGLLKPINSPYNSPILPVLEPEKIYRLVQDLRLINQIVLPIHPVVPNPYTLLSSIPPSTIHYSVLDLKRAFFTIPLYPSSQPLFAFTWTDPDTLQAQQITWAVLPQSFTDSPHYFSQAQISSLSVTYLSIILIKTHTLSLLIMSD

SEQ ID NO: 8165 - protein, 80 aa, Homo sapiens
  misc_feature (1)...(80): Xaa = X or * as defined in Table 2
AEQWPSVKILRQELATSARNLATRPRNARSPGFLLSCVPSVWDPTGNQTVQLTWQPLPEPLESGPRLSDXPLPRCSRLSS

SEQ ID NO: 8166 - protein, 281 aa, Homo sapiens
  DOMAIN (202)..(213): RNase H domain identified by eMATRIX, accession number PF00075B, p-value=1.519e-09, raw score of 12.56
  DOMAIN (135)..(268): Reverse transcriptase domain identified by PFam, accession name rvt, E-value=2.9e-05, PFam score of 5.1
TVLLLTQSLFGGLFIWTRMKFGAVTRIGGPPLGDQSPVLLLFALERQRRHVLSMDPKLRCWSRTGKAAFPWCLIIAEMPDYSPTFQRCQTTQGRLPWSFTLSSKSRFSGEGATQRQYPIPQQALKGLMPAITRLLQHGLLKPINSPYHSPILPVLKPDKPYKLVQDLRLINQIVLPIHPMVPNPYTLLSSIPASTTHYSVLDLKQAFFTIPLHPSSQPLFAFTWTDPDTHQAQQITWAVLPQAFTDSPHYFSQAQISSSSVTYLGIILIKTHVLSLLFVFD

SEQ ID NO: 8167 - protein, 134 aa, Homo sapiens
  misc_feature (1)...(134): Xaa = X or * as defined in Table 2
DKTQPHLLHTGTSKCLNCSGQAFLQNLLLQELATSARNLATRPGNSCSPGFLLSHVPSVPDPTGNRTVQLTWQPLPEPLELWPKVLSRVMDYIXMVYXSTIPQNSAIVLTDLLLGVYIPSESKHARPKVVLWAH

SEQ ID NO: 8168 - protein, 878 aa, Homo sapiens
  DOMAIN (415)..(426): RNase H domain identified by eMATRIX, accession number PF00075B, p-value=9.182e-13, raw score of 12.56
  DOMAIN (348)..(536): Reverse transcriptase domain identified by PFam, accession name rvt, E-value=6.1e-36, PFam score of 132.8
PQVLRPTSPRNISPISNPGETKETRFIRGPKTPAPVTDWEGSLPLVFNHCRDASLIIHPRFKGVRPRRDACLGPSPLAASPDFLRKGQVPLNPFSPCLYPFSAFLGQGQEPLNPFSFTLSGKSRFPGAGAKGDVSGSQDNCGERVSRQTREQRSLHHRQDSAHLHPGEINSHVAHTKPVWWSLHTDVHEIWCRDSDWGGDLPWEINPLSSCVLCSVRKIHLRPQVLRPTSPRNISPILNWWLKTDAARLPRKPPRPSLMPASRNFHSGGLQPHLIVALLPNPKPPSCLPLVSPHLNPQVWDISNPSLATDHMPITIPLKPNHPYPAQCQYRIPQHTLKGLKPVITPLLQHCLLKPINSPYNSPILPVQKPDKSYRLVQDLRLINQIVLPIHPVVPKPYTLLSSIPSSITHYSVLDLKDAFFTIPLHPSSQPLFAFTWTDPDTHQSQQLTWAVLPQGFRDSPLYFSQALSHDLLSFHPSASHLIQYIHDLLLCSPSFESSQQDTLLLLQHLFSKGYQVSPSKAQISSPSVTYLGIILHKNTRSLPADRVQLISQTPTPSTKQQLLSFLGMVGYFRLWIPGFAFLTKPLYKLTKGNLADPIDPKSFPHSSFHSLKTALETAPTLALPDSSQPFSLHTAEVQGCAVGILTQGPGWHPVAFLSKQLDLTVLGWPSCLRAAAAAALILLEALKITNYAQRTLYIAHNFQNLFSASFLRHILSAPQLLQLYSLFVESPTITNVPGPDFNPASHIIPDTTPDPHDCISLIHLTFTPFPHISFFPVSHPDHTWFIDGSSTRPNRHTPAKAGYAIVQANSPPLRTSHILSIVEMYPQGNNFSVFHLLFYYSSGIIQAPSLPYTSSSGICHRLGLANQRYSTCPESGN

SEQ ID NO: 8169 - protein, 253 aa, Homo sapiens
  DOMAIN (131)..(147): DNA NUCLEOTIDYLEXOTRANSFERASE (TDT) SIGNATURE domain identified by eMATRIX, accession number PR00871C, p-value=6.170e- 16, raw score of 14.08
HPLPSASLGLPSVSLGVSLCVRSALLEAVVPMLPKRRRARVGSPSGDAASSTPPSTRFPGVAIYLVEPRMGRSRRAFLTGLARSKGFRVLDACSSEATHVVMEETSAEEAVSWQERRMAAAPPGCTPPALLDISWLTESLGAGQPVPVECRHRLEVAGPRKGPLSPAWMPAYACQRPTPLTHHNTVLFGPSLQEALEILAEAAGFEGSEGRLLTFCRAASVLKALPSPVTTLSQLQGLPHFGEHSSRVVQELL

SEQ ID NO: 8170 - protein, 323 aa, Homo sapiens
  DOMAIN (47)..(90): Serine hydroxymethyltransferase pyridoxal-phosphate attachmen domain identified by eMATRIX, accession number BL00096E, p-value= 1.000e-40, raw score of 17.77
  DOMAIN (1)..(253): Serine hydroxymethyltransferase domain identified by PFam, accession name SHMT, E-value=1e-195, PFam score of 653.0
MVNPDTGYINYDQLEENARLFHPKLIIAGTSCYSRNLEYARLRKIADENGAYLMADMAHISGLVAAGVVPSPFEHCHVVTTTTHKTLRGCRAGMIFYRKGVKSVDPKTGKEILYNLESLINSAVFPGLQGGPHNHAIAGVAVALKQAMTLEFKVYQHQVVANCRALSEALTELGYKIVTGGSDNHLILVDLRSKGTDGGRAEKVLEACSIACNKNTCPGDRSALRPSGLRLGTPALTSRGLLEKDFQKVAHFIHRGIELTLQIQSDTGVRATLKEFKERLAGDKYQAAVQALREERGNAHVHSLYTLPPHYLVIQWHAKGELN

SEQ ID NO: 8171 - protein, 724 aa, Homo sapiens
  DOMAIN (47)..(90): Serine hydroxymethyltransferase pyridoxal-phosphate attachmen domain identified by eMATRIX, accession number BL00096E, p-value= 1.000e-40, raw score of 17.77
  DOMAIN (1)..(100): Serine hydroxymethyltransferase domain identified by PFam, accession name SHMT, E-value=3.7e-76, PFam score of 255.6
MVNPDTGYINYDQLEENARLFHPKLIIAGTSCYSRNLEYARLRKIADENGAYLMADMAHISGLVAAGVVPSPFEHCHVVTTTTHKTLRGCRAGMIFYRKGGMAPLGTATLLQALFSLLFLSKSRDVPGTGADPGVMYVKRRPRGTDSGCGVLEPRRFLPSGMAFTKEEEYEEEPYNEPALPEEYSVPLFPFASQGANPWSKLSGAKFSRDFILISEFSEQVGPQPLLTIPNDTKVFGTFDLNYFSLRIMSVDYQASFVGHPPGSAYPKLNFVEDSKVVLGDSKEGAFAYVHHLTLYDLEARGFVRPFCMAYISADQHKIMQQFQELSAEFSRASECLKTGNRKAFAGELEKKLKDLDYTRTVLHTETEIQKKANDKGFYSSQAIEKANELASVEKSIIEHQDLLKQIRSYPHRKLKGHDLCPGEMEHIQDQASQASTTSNPDESADTDLYTCRPAYTPKLIKAKSTKCFDKKLKTLEELCDTEYFTQTLAQLSHIEHMFRGDLCYLLTSQIDRALLKQQHITNFLFEDFVEVDDRMVEKQESIPSKPSQDRPPSSSLEECPIPKVLISVGSYKSSVESVLIKMEQELGDEEYKEVEVTELSSFDPQENLDYLDMDMKGSISSGESIEGLGTEKSTSVLSKSDSQASLTVPLSPQVVRSKAALLQPHPNPTHRLRSSSMEYKPDPPHRFSEPWPNLEPEANLSSPAVKDSVTKELQTARPSREQT

SEQ ID NO: 8172 - protein, 318 aa, Homo sapiens
  DOMAIN (53)..(96): Serine hydroxymethyltransferase pyridoxal-phosphate attachmen domain identified by eMATRIX, accession number BL00096E, p-value= 1.000e-40, raw score of 17.77
  DOMAIN (7)..(266): Serine hydroxymethyltransferase domain identified by PFam, accession name SHMT, E-value=1.3e-175, PFam score of 586.2
DIIPLVMVNPDTGYINYDQLEENARLFHPKLIIAGTSCYSRNLEYARLRKIADENGAYLMADMAHISGLVAAGVVPSPFEHCHVVTTTTHKTLRGCRAGMIFYRKGVKSVGSPRLGKEILYNLESLINSAVFPGLQGGPHNHAIAGVAVALKQAMTLEFKVYQHQVVANCRALSEALTELGYKIVTGGSDNHLILVDLRSKGTDGGRAEKVLEACSIACNKNTCPGDRSALRPSGLRLGTPALTSRGLLEKDFQKVAHFIHRGIELTLQIQSDTGVRATLKEFKERLAGDKYQAAVQALREEVESFASLFPLPGLPDF

SEQ ID NO: 8173 - protein, 132 aa, Homo sapiens
  misc_feature (1)...(132): Xaa = X or * as defined in Table 2
LPLFIMNMTVELVWPDTTSNLPRNSEILSSPTRPNQLFVCLFLGSPSLPRLEYKWYSQSSLXPQNPGLKXSSPSASYVAKTTDMCHHAWLIFLFLQTEGLNYIAQVGVQTPGFKQSSCLTLPKCXDYRHEPP

SEQ ID NO: 8174 - protein, 68 aa, Homo sapiens
  DOMAIN (1)..(38): Actin domain identified by PFam, accession name actin, E- value=3.8e-22, PFam score of 74.0
IWHHSFYNELRVAPEEHPTLLTEAPLNPKANREKMTQVSMLPQHTTLWGLGKLLLEGGYAAQQREGRS

SEQ ID NO: 8175 - protein, 149 aa, Homo sapiens
  DOMAIN (43)..(98): Actins proteins domain identified by eMATRIX, accession number BL00406D, p-value=1.000e-40, raw score of 12.58
  DOMAIN (1)..(149): Actin domain identified by PFam, accession name actin, E- value=2e-103, PFam score of 340.7
MATAAWSSSLEKSYELPDGQVITIGNERFRCPETLFQPSFIGMESAGIHETTYNSIMKCDIDIRKDLYANNVLSGGTTMYPGIADRMQKEITALAPSTMKIKIIAPPERKYSVWIGGSILASLSTFQQMWISKQEYDEAGPSIVHRKCF

SEQ ID NO: 8176 - protein, 38 aa, Homo sapiens
FPKKINNFYFTFLQDPTGIFSLDKTIGLGTYGRIYLVS

SEQ ID NO: 8177 - protein, 43 aa, Homo sapiens
MGWVGTATSPHPVAWRTRRPSSLRSLPSVRALVVRTERRVPCG

SEQ ID NO: 8178 - protein, 105 aa, Homo sapiens
RQAILTAAPRRAAARAAVRSRHGGARALSPGMEQRRRRRTTWSLLQPRPRRRWAARRPRGRRAQVARRTARRICPCGRPPPVRAPAADPWARRAWSTSRSPAGTE

SEQ ID NO: 8179 - protein, 117 aa, Homo sapiens
PLRPPAAPRSRGIRAPGASALPPTPSLWLRASASSHHRVGTRCGPYPAHTCTTWSLLQPRPRRRWAARRPRGRRAQVARRTARRICPCGRPPPVRAPAADPWARRAWSTSRSPAGTE

SEQ ID NO: 8180 - protein, 68 aa, Homo sapiens
SPQDPQRQNQPESSQPTLRDGTAALGPASRSAGSWCSRVLKSLRSLRIKSVGNRIGPWKLRNVDTSGP

SEQ ID NO: 8181 - protein, 46 aa, Homo sapiens
NPEIPVCTTWSLLQPRPRRRWAARRPRGRRAQVERRTARRICPCGR

SEQ ID NO: 8182 - protein, 75 aa, Homo sapiens
FSSSIGSLRRQRRGMKTPFGKAAAGQRSRTGAGHGSVSVTMIKRKAAHKKHRSRPPSQPRGNIVGCIIQHGWKDG

SEQ ID NO: 8183 - protein, 566 aa, Homo sapiens
  DOMAIN (154)..(195): kw TRANSCRIPTASE REVERSE II ORF2 domain identified by eMATRIX, accession number DM01354I, p-value=5.814e-37, raw score of 15.55
  DOMAIN (1)..(140): AP endonuclease family 1 domain identified by PFam, accession name AP_endonucleas1, E-value=1.1e-06, PFam score of -15.0
MVNGPIQQDELTILNIYAPNTGAPRFIKQILSDLQRDLDSHTIKIGEFNTPLSTLDRSMRQKVNKDIQEVNSALHQADLIDIYRTLHPKSTEYTFFSGLHHTYSKIDHIVGSKALFSKCKRTEITRNCLSDHSAIKLELRIKKLTQNHSTTWKLNNLLLNDYWVHKEMKAEIKMFFETNENKGTTYQNLQDTFKAKKKEETAAQQRLVGVRCGRGAAATATAAATRKAEDAGAKSKGRRHGSLRRQRRGVRFVHLRPAIRDGGESAPPGRVVLEAGRGEWGNASYFTEPQILARLSWGGRLLQALSQGMKTPFGKAAAGQRSRTGAGHGSVSVTMIKRKAAHKKHRSRPTSQPRGNIVGCRIQHGWKDGDEPLTQWKGTVLDQVPVNPSLYLIKYDGFDCVYGLELHRDERVSSLEVLPNRVASSRISDTHLAEIMVGKAVEHIFETEEGSKNEWRGMVLAQAPVMNTWFYITYEKDPVLYMYQLLDDYKDGDLRILQDSNDSPLAEREPGEVIDSLVGKQVEYAKDDGSKRTGMVIHQVEAKPSVYFIKFDDDFHIYVYDLVKTS

SEQ ID NO: 8184 - protein, 103 aa, Homo sapiens
  misc_feature (1)...(103): Xaa = X or * as defined in Table 2
LKIPMQFLHSGFWFSFFVFFGFXKFGFGPQGGRQGGNKTKGEKLPPGSSSLPGPNPQENREKKGPPKTLKKFGNLSSSGGKTRGPRGEKNSDPKGTPGQNPGN

SEQ ID NO: 8185 - protein, 178 aa, Homo sapiens
WESDVGEGLRPPPPPPPPGRRRTQEPRARDAATVIFACPAALLETLIAYGSSSPSFCKHRAARPLIFLLHRLTAEATARCPICALEARNPGRWGICASWPGMKTPFGKAAAGQRSRTGAGHGSVSVTMIKRKAAHKKHRSRPTSQPRGNIVGCIIQHGWKDGDEPLTQWKGTVLDQLL

SEQ ID NO: 8186 - protein, 40 aa, Homo sapiens
RMERKGRWNKKRKEEERRKTKGRQLFRIEGVKSVFFGPDF

SEQ ID NO: 8187 - protein, 1218 aa, Homo sapiens
  DOMAIN (56)..(111): kw TRANSCRIPTASE REVERSE II ORF2 domain identified by eMATRIX, accession number DM01354Q, p-value=1.000e-40, raw score of 9.23
  DOMAIN (1)..(284): Reverse transcriptase domain identified by PFam, accession name rvt, E-value=8.2e-52, PFam score of 185.6
MDKFLDTYTLPRLNQEEVESLNRPITGAEIVAIINSLPTKKSPGPDGFTAKFYQSKILANQIQQHIKKLTHQDQVDFIPGMQGWFNIRKSINVIQHINRSKDKNHMIISIDAEKAFDKIQQHFMLKTLNKLRIDGTYLKIIRAIYDKPTANIILNGQKLEAFPLKTGTRQGCSLSPLLFNIVLEVLARAIRQEKEIKGIQLGKEEVKLSLFADDMIVYLENPIVSAQNLLKLISNFSKVSGYKINVQKSQAFLYTNNRQTESQIMSELPFTIASKRIKYLGIQLTRDVKDLFKENYKPLLKEIKEDTNKWKNIPCSWVGRINIVKMAILPKIIYRFNAIPIKLPMTFFTELEKTTLKFIWNQKRARIAKAILSQKNKAGGITLPDFKLYYKATVTKTAWYWYQNRDIDQWNRTEPSEITLHIYNFLIFDKPEKNEQWGKDSLFNKWCWENWLAICRKLKLDPFLTPYTKINSRWIKDLNVRPKTIKTLEENLGITIQDIGMGKDFMSKTPKAMATKAKIDKWDLIKLKNFCTAKETTIRVNRQPTKWEKIFTTYSSDKGLISRIYNELQQIYKKKTNNPIKKWAKDMNRHFSKEDIYAAKKHMKKCSPSLAIREMQIKTTMRYHVTPVRMATIKKSGNNSWRSCLQPWAAHSTTYRHPGTMEKKTSSGDTPTVFPSTLGRKKSTSAQLTELTALTLELSKGKVRNAPSKLDLSPFEMLYGWPFLTNDFLLDQETSELGKHVNSLARFQQELTQVAEAQPQEVGPPLFNPGYLVLPKQGGPYTILLSMPSAVKVTGIDSWIHHAQVKAWKTERAIPGSPAECLGYQCEEIRDLKLKIKRDKKMSKGYSSYSVPVIHSVIQSSSLCTTGTQKSRIEVWEPLPRFPKMYGYAWIPRQKFAAGAGPSWRTSVKAVQKGNVGSKPHHRDPTGALPSGAVRRGPPSSRPQNGRSTGSLHRVPGKARPQHQPVKAARREAVPYKATGVELPKTMGTHLLHQCDLDLPATFSLSLHIKYLKHRHSYSPHLHLLFTVMGPHARQMIRISGIDVDTRNLYKLNLKVKWLEVLDQEEPEYSRTTSRKKQGFPNSDEEDVLWMEKQLSCFCDKYQKWIPTRQLKGQLSYVKEADLIPDVMPPQALFHDDDEMEGNGAIDAGMEYVYNIDTLLRWSDGEEEGEGGEEGRGGGRGGEGGGKREEGEGKKEEEQGGWGGGQEVEEEGGGGGGN

SEQ ID NO: 8188 - protein, 696 aa, Homo sapiens
  DOMAIN (122)..(169): kw TRANSCRIPTASE REVERSE II ORF2 domain identified by eMATRIX, accession number DM01354V, p-value=1.000e-40, raw score of 12.97
  misc_feature (1)...(696): Xaa = X or * as defined in Table 2
TKPKTKTTLLSQXMQKKPLTKFNNPSCXKLSINIVLEVLARAIRQKKEIKGIQLGKEEVKLSLFADDMIVYLENPIVSAQNLLKLISNFSKVSGYKINVQKSQAFLYTKNRQTESQIMSELPFTIASKRIKYLGIQLTRDVKDLFKENYKPLLKEIKEDTNKWKNIPCSWVGRINIVKMAILPKVIYRFNAIPIKLPMTFFTELEKTTLKFIWNQKRARIAKSILSQKNKVGGITLPDFKLYYKATVTKTAWYWYQNRVIDQWNRKEPSEITPHTYNYLIFDKPEKNKQWGKDSLFNKWCWENWLAICRKLKLDPFLTPYTKINSRWIKDLNVRPKTIKTLEENLGITIQDIGMGKDFMSKTPKAMATKAKIDKWDLIKLKSFCTAKETTIRVNRQPTTWEKIFTTYSSDKGLISRIYNELKQIYKKKTNNPIKKWVKDMNRHFSKEDIYAAKKHMKKCSSSLAIREMQIKTTMRYYLTPVRMAIIKKSGNNRQTGSGVDLKQTPTDLKLRDLTVRRKMNKQKEIASTSTKRTSTPNPTCRSVGPKDCSSLGAMEQSWTENDFDKLTEKKALEENQEEMDKFLDTYTLPRLNQEEVESLNRPITGSEIEAIIDSIPTKKYPGPDGFTAKFYERIKVFCTESLAKWIKWTHTKTFIMEFHTIGNAKILQASSFTEVKTKTKTLEHKRLESIMALTSQ

SEQ ID NO: 8189 - protein, 621 aa, Homo sapiens
  DOMAIN (121)..(168): kw TRANSCRIPTASE REVERSE II ORF2 domain identified by eMATRIX, accession number DM01354V, p-value=1.000e-40, raw score of 12.97
  DOMAIN (1)..(137): Reverse transcriptase domain identified by PFam, accession name rvt, E-value=0.093, PFam score of -44.6
  misc_feature (1)...(621): Xaa = X or * as defined in Table 2
TEPKTKTTXLSQXMQKRPLTKFNNTSCXKLSINIVLEVLARAIRQEKEIKGIQLGKEEVKVSLFADDMIVYLENPTVSAQNLLKLIGNFSKVSGYKINVQKSQAFLYTNNRQTERQIMSELPFTIASKRIKYLGIQLTRDVKDLFKENNKPLLKEVKEDTNEWKNIPCSWVGRINIVKMAILPKVIYRFNAIPIKLPMTFFTELEKTTLKFIWNQKRACIAKSIFSQKNKAGGITLPDFKLYYKATVTKTAWYWYQNRDIAQWNRTEPSEIMLHIYNYLIFDKPEKNKQWGKDSLFNKWCWENWLAICRKVKLDPFLTPYTKMNSRWIKDLNVRPKTIKTLEENLGITIQDIGVGKDFMSKTPKAMATKAKIDKWDLIKLKSFCTAKETTIRVNRQPTTWEKIFATYSSDKGLISRIYNELKQIYKKKTNNPIKKWAKDVNRHFSKEDIYAAKKHMKKCSSSLAIREMQIKTTMRYHLTPVRMAIIKKSGNNRKIQGGIWCDRILXRXTTCRVAKEIQSLXRRIWKRLQRTLSIPVLDAVXPPMFXASVIDTMTIXCFEARDTCFTLTLESFWDMHRCLAASKGIGLLLCXPLIWHMSLMGVKSPPFVFSCLWTSAVRPTT

SEQ ID NO: 8190 - protein, 928 aa, Homo sapiens
  DOMAIN (8)..(53): kw TRANSCRIPTASE REVERSE II ORF2 domain identified by eMATRIX, accession number DM01354N, p-value=1.000e-40, raw score of 13.17
  DOMAIN (23)..(261): Reverse transcriptase domain identified by PFam, accession name rvt, E-value=6.7e-36, PFam score of 132.7
MQTTIREYYKQLYANKLENLEEMDKFLDTYTLPRLNQEEVESLNRPITGSEIVAIINSLPTKKSPAPDGFTTKFYQRTEDKNHMIISIDAEKTFDKIQQLMLKTLNKLGIDGMYLKIIRAIYDKPTANIILNGQILEAFSLKTGTRQGCPLSPLLFNIVLEVLARAIRQEKEIKGVQLGKEEVKLSLFADDMITYLENPIVSAQNLLKLISNFSKVSGYKINVQKSQAFLYTNNRETENQIMSELPFTIASKRIQYLGIQLTRDVKDLFKENYKPLLNEIKEDTNKWNNIPCSWIGRINIMKMAILPKVIYRFNDIPIKLPLTFFTELEKTILKFIWKQKRARIAKSILSKKNKAGGIMVPDFKLYYKTTVTKTAWYWYQNRDINQWNRTEPSEIMPHICNYLIFDKPDKNKKWGKDSLFNKWCWENWLATCRKLKLDPFFTPYTKINSRWIKDLNVTSKTIKTLEENLGNTIEDIGMGKDFMFKTPKAMATKAKIDKWDLIKLKSFCTAKETTIRVNRQPTEWEKIFATYSSDKGLISRIYNELKQIYKKKTKNPIKKWAKDMNRHFSKEDIYAAKGHVKKCSSSMAIREMQIKPTMRYHLTPVRMAIIKKSGNHRCWRGCGEMGTFLHCWWDCKLVQPLWKSVWRFLKDLELEIPFDPAIPLLSIYPKDYKSCCYKDTCTRSPGRQYLLELQAQWYCFCVNSPAECIFLLSLETWKHLDSRIFATLRSRDPLMSPHHQGLEPETELCGISAEQLLRHAETQELYIPWPRYPQQGGSHSSLQALESPSSPDEEGSPKLSTAALPECVQIASLNETPSIPPHWVNNEIKAQIKKFFETNESKDTMCQNLQDAAKAVLRGKFIPLNAHIKKLERSEVNNLTLQQKELENQEQTNSKASRRQEITKIRAELKEMGTHKPLQKSMNVGAVF

SEQ ID NO: 8191 - protein, 1000 aa, Homo sapiens
  DOMAIN (297)..(343): kw TRANSCRIPTASE REVERSE II ORF2 domain identified by eMATRIX, accession number DM01354O, p-value=1.000e-40, raw score of 8.73
  DOMAIN (330)..(605): Reverse transcriptase domain identified by PFam, accession name rvt, E-value=5.3e-86, PFam score of 299.1
MGKKQSRKTGNSKKQSASPPPKECSSSPATEQSWTENDFDELREEDFRRSNYSELQEEIQTKGKEVENFEKNSDECITGITNTEKCLKELTELKAKARELHEERRSLKSRCDQLEERVSVMEDKMNEMKREGKFREKRIKRNKQSLQEIWDYVKRPNLRLISVPESDRENGTKLENTLQDIIQENFPNLARQANIQIQEIQRTPQRYSSRRATPRHIIVRFSKVEMKEKMLRAAREKEIQTNIREYYKHRYANKLENLEEMDKFLNIYTLRRLNQEEVESLNRPIRGSEIVAIINSLPTKKSPGPDGFTAEYYQRYKEELVPFLLKLFQSIEKEGILPNSFYEASIILIPKPGRDTTKKENFRTISLMNIDAKILNKILANRIQQHIKKLIHHDQVGFIPGMQGWFNIRKSINVIQHINRTKDKNHVIISIDAEKAFDKIQQLFLLKTLNKLGIDGTYLKIKRAIYDKPTANIILNGQKLEAFPLKTGTRQGCPLSPLLFNIVLEVLARAIRQEKEIKGIQLGKEEVKLSLFADDMIVYLENPIVSAQNLLKLISNFSKVSGYKINVQKSQAFLYTNNRQTETQIMSELPFTIASKRIKYLGIQLTRDVKDLFKENYKPLLKEIKEDTKKWKNIPCSWVGRINIMKMAILHKVIYRFNAIPIKLPMTFFTELEKTTLKFTWNQKRARIAKSILSQKNKAGGIMLPDFKLYYKATVTKTAWYWYQNRDIDQWNRTEPSEITPHIYNYLIFDKPEKNKQWGKDSLFNKWCWENWLAIWRKLKLDPFFTPYTKINSRWIKDLNVRPKTIKTLEENLGITIQDIGMGKDFMSKTPKAIATKAKIDKLDLIKLKSFCTAKETTIRVNRQPTEWEKIFATYSSDKGLISRIYNELKQIDKKKTNNPIKKWAKDMNRHFSKEDIYAAKKHMKKCSPSLAIREMQIKNTMRYHLTPLRMAIIKKSGNNRWELNNENTRTQEGEHHTLGTVVGWGEGGGIAVGDIPNAK

SEQ ID NO: 8192 - protein, 1015 aa, Homo sapiens
  DOMAIN (134)..(181): kw TRANSCRIPTASE REVERSE II ORF2 domain identified by eMATRIX, accession number DM01354V, p-value=1.000e-40, raw score of 12.97
  DOMAIN (475)..(671): Reverse transcriptase domain identified by PFam, accession name rvt, E-value=1.7e-05, PFam score of 8.4
MEYYAAIKKDEFLSFAETWMKLETIILSKLSQGQKTKHRMFSLIVLEVLARAIRQEKEIKGIQLGKQEVKLSLFADDMIVYRENPIVSAQNLLKLISNFSKLSGYKINVQKSQAFLYTNNRQTESQIMSELPFTIASKIIKYLGIQLTREVKDLFRENYKPLLNEIKEDTNKWKNIPCSWVGRINIMKMAILPKVIYRFSAIPIKLPMTFFTELEKTTLKFIWNQKRARIAKSILSQKNKAGGIMLPDFKLYYKATVTKTAWYWYQNRNIDQWNITEPSEIIPHIYNYLIFDKPEKNKQWGKDSLFNKWCWENWLAIRRKLKLDPFLIPYTKINSRWIKDLNGRPKTIKTVEENLGITIQDIGTGKDFMYKTPKAMATKAKIDKWDLIKLKSFYTAKETTIRANRQPTKWEKIFATYSSDKGLISRIYNQLKQIYKKKTNNPIKKWAKDMNRHFSKEDIYAAKKHMKKCSLSLAIREMQIKTTMRYHLTPVRMAIIKKSGNNRCWRGCGEIVTLLHCWWDCKLVQPLWKSVWRFLRDLELEIPFDPAIPFLGIYPKDYKSCCYKDTCTLLEVLARAIRQEKEIKGIQLGKQEVKLSLFADDMIVYRENPIVSAQNLLKLISNFSKLSGYKINVQKSQAFLYTNNRQTESQIMSELPFTIASKIIKYLGIQLTRDVKDLFKENYKPLLNEIKEDTNKWKNIPCSWVGRINIMKMAILPKVICRFSAIRIKLPMTFFKKLEETTLKFIWNQKRAHIAKSILSQKNKAGGIMLPDFKLYYKATVTKTAWYWYQNRNIDQWNITEPSEIMPHIYNHLIFDKPDKNKQWGKDSLFNKWCWENWLAICRKLKLHPFLTPYTKINSRWIKELNVRPKTIKSLEENLGNTIQDIGMGKDFMSKTPKAMATKAKIDKWDLIKLKSFCTAKETTIRVNRQPTKWEKLFTTYSSDKGLISRIYNQLKQIYKKKNKQPHQKVGEGHEQTLLKRRHLCSQKTHEKMLIITGHQRNANQNHNEIPSHAS

SEQ ID NO: 8193 - protein, 912 aa, Homo sapiens
  DOMAIN (57)..(100): kw TRANSCRIPTASE REVERSE II ORF2 domain identified by eMATRIX, accession number DM01354T, p-value=1.000e-40, raw score of 9.48
  DOMAIN (1)..(179): Reverse transcriptase domain identified by PFam, accession name rvt, E-value=7.2e-09, PFam score of 42.9
MIISIDAEKAFGKVQQPFMLQTLNKLGIDGSYLKIIRAVYDKPTANITLNGQKLEAFPLKTGTRRGCPLSPLLFNIVLEVLARAIRQEKEIKGIQLGKEEVKLSLFADDMIVYLENPIVSAQNLLKLISNFSKVSGYKINVQKSQAFLYTNNRQTESQIMSELPFTIASKRIKYLGIHLTRDMKDLFKENYKPLLNEIKEDTNKWKNIPCSWVGRINIVKMAILPRFNAIPIKLPMTFFTELEKTTLNFIWNQKRARIAKSILSQKNKAGGITLPAFKLYYKATVTKTAWYWYQNRDIDQGNRTEPSEITLRIYNYLIFDKPEKNKQWGKDSLFNKWCWENWLAICRKLKLDPFLTPYTTINSRWIKDLNVRPKTIKTLEEKLGITIQDIVMGKDFMSKTPKAMATKAKIDKWDLIKLKSFCTAKETTIRVNRQPTKWEKIFETYSSDKGLISRIYNELKQIYKKKTNNPIKKWAKAMNRHFSKEDIYTAKRHMKKCSPSLAIGEMQIKTTMRYHLTPVRMAIIKKSGNNRSAMIQMFVFPQDSYVEILTINVVVVGVLPSQLQRTLKDSSKEALETPSPPSFPSSPFCFPRKLHTDFSFGPKAKAFMHKRLNQEEVESLNRPITGSEIVVIINSLPTKKSPGPDGFTAEFYQRYKEELRIKYLGIQLTRDVKDLFKENYKPLLNEIKEDTNKWKNIPCSWVGRINIVKMAILPKNWKKTTLKFIRNQKRARTTKSILSQKNKAGGITLPDFKLYYKATVTKTAWYLYQYRDIDQWDRTEPSEITPHIYNYLIFDKPEKNKQWGKDSLFNKWCWENWLAICRKLKLDPFLTPYTKINSRWIKDLNIRPKTIKTLEENLGITIQDIGTGKDFMSKTPKAMATKAKIDKWDLIKLKSFCTAKETTIRVNGQPTK

SEQ ID NO: 8194 - protein, 985 aa, Homo sapiens
  DOMAIN (381)..(422): kw TRANSCRIPTASE REVERSE II ORF2 domain identified by eMATRIX, accession number DM01354I, p-value=1.000e-40, raw score of 15.55
  DOMAIN (627)..(902): Reverse transcriptase domain identified by PFam, accession name rvt, E-value=1.1e-87, PFam score of 304.8
MGKKQNRKTGNSKTQSASPPPKERSSSPATEQSWMENDFDELREEGFRRSNYSELREDIQTKGKEVENFEKNLEECITRIINTEKCLKELMELKTKARELREECRSLRSRCDQLEERVSAMEDEMNEMKPNLRLIGVPESDAENGTKLENTLQDIIQENFPNLARQANVQIQEIQRTPQRYSSRRATPRHIIVRFTKVEMKEKMLRAAREKDFKPTKIKRDKEGHYIMVKGSIQQEELTILNIYAPNTGAPRFIKQVLSDLQRDLDSHTLIMGDFNTPLSTLDRSTRQKVNKDTQELNSALHQADLIDIYRTLHPKSTEYTFFSAPHHTYSKIEHIVGSKALLSKCKRKEIITNYLSDHSAIKLELRIKNLTQSHSTTWKLNNLLLNDYWVHNEMKAEIKMFFETNENKDTTYQNLWDAFKAVCRGKFIALNAYKRKQERSKIDTLTSQLKELEKQEQTHSKAGRRQEITKIRAELKEIETQKTLQKINESRSWFFERINKIDRPLARLIKKKREKNQIDTIKNDKGDITTDPTEIQTTIREYYKHLYANKLQNLEEMDTFLDTYTLPRLNQEEVESVNKPITGSEIVAIINSLPTKKSPGPDGFTAEFYQRYKEELVPFLLKLFQSIEKEGILPNSFYEASIILIPKPGRDTTKKENFRPISLMNIDAKILNKILANRIQQHIKKLIHHDQVGFIPGMQGWFNIRKSINVIQHINRAKDKNHMIISIDAEKAFDKIQQPFMLKTLNKLGIDGTYFRIIRAIYDKPTANIILNGQKLEAFPLKTGTRQGCPLSPLLFNIVLEVLARAVRQEKEIKGIQLGKEEVKLSLFADDMIVYLENPIVSAQNLLKLISNFSKVSGYKINVQKSQAFLYTNNRQTESQIMSELPFTIASKRIKYLGIQLTRDVKDLFKENYKPLLKEIKEDTNKWKNIPCSWVGRINIVKMAILPKHGWGCLVAPHVVPTVLTIQLRSPRYPCTVVNVLAGV

SEQ ID NO: 8195 - protein, 375 aa, Homo sapiens
  misc_feature (1)...(375): Xaa = X or * as defined in Table 2
CTATQSGWLCLHRPCPAWRCTWRTTWFCIRYKGEMVKVSRNYFSKLWLLYRYSCIDDSAFERFLPRVWCLLRRYQMMFGVGLLTRGTGLQGFAACCMSLRPSTDSLASVSECFASPLNCYFRQYCSAFPDTDGYFGSRGPCLDFAPLSGSFEANPPFCEELHGCHGLSLXETAXELTGAPVPSSVFIPEWAGNPQHQRSPAWKQMPLQTPPVDPACLXAXVPQWLPAHLQEGGNALQGRPQHGCALPTEPTLALPSGRRRLTGCRSXVLPTGSPGPPATALVLPHRSYLGGPRTGIRGREQGPKPRASPHLTYSCGEEGAPGVLSLDLLGLGPLGPQRDPGCHXHMKIMVLPGLPSLPVPKSSPQTPSKSHVYRS

SEQ ID NO: 8196 - protein, 1034 aa, Homo sapiens
  DOMAIN (215)..(256): kw TRANSCRIPTASE REVERSE II ORF2 domain identified by eMATRIX, accession number DM01354I, p-value=1.000e-40, raw score of 15.55
  DOMAIN (461)..(736): Reverse transcriptase domain identified by PFam, accession name rvt, E-value=2.1e-85, PFam score of 297.1
MGKKQNRKTGNSKEQSTSPPPKECSSSPAREQSWTENDFDELREEGFRRSNYSELWEDIQTKGKEVENFEKNLEECITRITNTKKCLKELMELKTKARELREECRNLRSRCDQLEERQINETESQQGYPGIELSSAPSGPNTHLQNSPPQINRIYIFSAPHHTYSKTDHILGSKALLSKCKRTEIITNYLSDHSAIKLELRIKNLTQSRSTTWKLNNLLLNDYWVHNEMKAEIKMFFETNENKDTTYQNLWDAFKAVCRGKFIALNAHKRKQERSKIDTLTSQLKELEKQEQTHSKASRRQEITKIRAELKAMETQKTLQKINESRSWFFERINKIDRLLARLIKKKREKNQIDTIKNDKGDITTDPTEIQTTIREYYKHLYANKLENLEEMDKFLDTYTLPRLNQEEVESLNRPITGSEIVAIINSLPTKKSPGPDGFTAEFYQRYKEELVPFLLKLFQSIGKEGILPNSFYEASIILIPKPGRDTTKKESFRPISLMNIDAKILNKILAKRIQQHIKKLIHHDQVGFIPGMQGWFIICKSINVIQHINRAKDKNHMIISIDAEKAFDKIQQPFMLKTLNKLGIDGTYLKIIRAIYDKPTANIILNGQKLEAFPLKTGTRQGCPLSPLLFNIVLEVLARAIRQENEIKGIQLGKQEVKLSLFADDMIVYLENPIVSAQNLLKLISNFSKVSGYKINVQKSQAFLYTNNRQTESQIMSELPFTIASKRIKYLGIQLTRDVKDLFKENYKSLLKEIKEDTNKWKNIPCSWVGRINIVKMAILPKVIYRFNAIPIKLPMPFFTELEKTILKFIWNQKRARIAKSILSQKNKAGGITLPDFKLYYKATVTKTAWYWYQNRDIDQWNRTEPSEITPHIYNYLIFEKPDKNKKWGKDSYLINGPQSTMSAQPWMHGYSAQPRHRFSRRQCTALAQADGQMQQLLLISTDSITAGYGRAPPNACEVWIKVWIPHLTSADIHGEDTPHYLCPGPDSLASKIKKSYLWGNEEERPPDMENGGSQIHRIPATGKGIQAPLEGA

SEQ ID NO: 8197 - protein, 941 aa, Homo sapiens
  DOMAIN (369)..(424): kw TRANSCRIPTASE REVERSE II ORF2 domain identified by eMATRIX, accession number DM01354Q, p-value=1.000e-40, raw score of 9.23
  DOMAIN (334)..(597): Reverse transcriptase domain identified by PFam, accession name rvt, E-value=6.3e-73, PFam score of 255.7
MEYYAAIKNDEFMSFAGTWMKLGTIILSKLPQGQKTKHHMFSLTAPHHTYSKIDHIIGSKALLSKCKRTEIITNYLSDHSAIKLELRIKKLTQNRSTTWKLTNLLLNDYWVHNEMKAEIKMFFETYENKDTTYQNLWDAFKAVCRGKFIALNAHKRKQKRSKIDILTSQLKELEKQEQTHSKANRRQEITKIRAELKEIETQKTLQKINESRSWFFERINKIDRPLARLIKKKREKNQIDAIKNDKGDITTDPTDIKTTIREYYKRLYTNKLENLEEMHKFLDTHTLPRLNQEEVESLNRPITGAEIVAIINSLPTKKSPGLDGFTAKFYQRYKEELHHPDTKAGQRHNQKENFRPIPLMNIDAKILNKILANRIQQHIEKLIHHDQVGFIPGMQGWFNIRKSINVIQHINRTKDKNHMIISIDAEKAFDKIQQPFMLKTLNKLGIDGTYLKIIRAIYDKPTANIILNGQKLEAFPLKTGTRQGCPLSPLLFNIVLEVLARAIRKEKEIKGIQLGKEEVKLSLFADDMIVYLENPIVSAQNLLKLISNFSKVSGYKINVQKSQAFLYTNNRQTESQIMSELPFTIASKRIKYLGIQLTRDVKDLFKENYKPLLKEIKEDTNKWKNIPCSWVGRINIVKMAILPKVIYRFNAIPIKLPMTFFTELEKTTLKFIWNQKRARIAKSILSQKNKAGGITLPDFKLYYKATVTKTAWYWYQNRDIDQWNRTEPSEIMPHIYNYLIFDKPDKNKQWGKDSLVNKWCWENWLAICRKLKLDPFLTPYTKINSRWIKDLNVRPKTIKTLEENLGNTIQDIGMGKDFMSKTPKAMATKDKIGKWDLIKLKSFCTAKETTIRVNRQPTEWEKIFATYSSDKGLISRIYNELKQIYKKKTNNPIKKWAKDMNRHFSKEGIYAAKKHMKKCSPSLAIREMQIKTTMRYHFTPV

SEQ ID NO: 8198 - protein, 421 aa, Homo sapiens
  DOMAIN (121)..(168): kw TRANSCRIPTASE REVERSE II ORF2 domain identified by eMATRIX, accession number DM01354V, p-value=1.000e-40, raw score of 12.97
  misc_feature (1)...(421): Xaa = X or * as defined in Table 2
TEPKTKTTXLSQXMQKRPLIKFSNASCXKLSINIVLDVLARAIRQEKEIKGIELGKEEVKLSLFADDMIVYLENPIVSAQNLLKLISNFNKVSGYKINVQKSQAFLHTNNRQTESQITSELPFTIASKRRKYLGIQLTRDMKDLFKDNYKPLLNEIKEDTNKWKNIPCSWVGRINIMKMAILPKATVTETAWYWYQNRDIDQWNRTEPSEIMPRIYHYLIFEKPDKNKQWGKDSLFNKWCWENWLAICRKLKLDPFLTPYTKINSRWIKDLNVRPKTIKTLEENLGNTIQDIGMGKDFMSKTPKAMATKAKIDKWDLIQLKSFCTAKETTIRVNRQPIEWEKIFANYSSDKGLISRIYNELKQVYKKKTNNPIKKWAKDMNRHFSKEDIYAANRHMKKCSRSLAIREMQIQTTMRYHLTPV

SEQ ID NO: 8199 - protein, 952 aa, Homo sapiens
  DOMAIN (326)..(381): kw TRANSCRIPTASE REVERSE II ORF2 domain identified by eMATRIX, accession number DM01354Q, p-value=1.000e-40, raw score of 9.23
  DOMAIN (281)..(554): Reverse transcriptase domain identified by PFam, accession name rvt, E-value=5.8e-80, PFam score of 279.1
MVKGSIQQEELTILNIYAPAGAPRFIKQVLSDLQRDLDFHTLIMGDFNTPLSTLDRSTRQKVNKDTQELNSALHQADLIDIYRTLHSKSTEYTFFSAPHHTYSKIDHLLGSKAFLSKCKRTEIITNYLSDHSAIKLELRIKNLTQNRSTTWKPNNLLLNDYWVHNEMKAEIKMFFETNENKDTTYQNLWDAFKAVCRGKFIALNAHKRKQERSKIDTLTSQVKELEKQEQTHSKASRRLNQEEVESLNRPITGSEIVAIINSLPTKRVQDQMDSQPNSTREKEGILPNSFYEASIILIPKPGRDTTKKENFRPISLMNIDAKILNKILANQIQQHIKKLIHHDQVGFIPGMQGWFNIHKSVNVIQHINRAKDKNHMIISIDAEKAFDKIQQPYMLKTLNKLGIDGTYFKIIRAIYDKPTANIILNGQKLEAFPLKTGTRQGCSLSPLLFNIVLEVLARAIRQEKEIKGIQLGKEEVKLSLFADYMIVYLENPIVSAQNLLKLISNFSKVSGYKINVQKSQAFLYTNNRQTESQIMSELPFTIASKRIKHLGIQLTSDMKDFFKENCKPLLNEIKEDTNKWKNIPCSWVGRINIVKMAILPKLPMTFFTELEKTTLKFIWNQKRACITKSNLSQKNKAGGITLPDFKLYYKATVTKTAWYWYQNRDIDQWNRTEPSEITPHIYNYLIFDKPEKNKQWGKDSLFNKRFWENWLAIFRKLKLDPFLTPYTKINSRWIKDLHVRPKTIKTLEENLGITIQDTGMGKDFTSKTPKAMATKAKIDKWDLIKLKSFCTAKETTIRVNRQPRKWEKIFATYSSDKWLISRIYNELKQIYKKKTNNPIKKWAKDMNRHFSKEDIYAAKKHMKKCSPSLAIRETQIKTTMRYHLTPGHPILNLKHSELHHAPQSSSWKREGLDLEERVEFGQIKKNAGTLQKRRGCEPRHGDTNIGDIFVRQ

SEQ ID NO: 8200 - protein, 1261 aa, Homo sapiens
  DOMAIN (275)..(320): kw TRANSCRIPTASE REVERSE II ORF2 domain identified by eMATRIX, accession number DM01354N, p-value=1.000e-40, raw score of 13.17
  DOMAIN (332)..(606): Reverse transcriptase domain identified by PFam, accession name rvt, E-value=2e-76, PFam score of 267.3
MVKGSIQQEELTILNIYAPNTGAPRFIKQVLSDLQRDLDSHTLIMGDFNNPLSTLDRSMRQKVNKDTQELNSALHQVDLIDIYRTLHHKSTEYRFFSAPHHTYSKIDHILGSKALLSKCKRTEIITNYLSGHSAIKLELKIKNLTQNRSTTWKLNNLLLNDYWIHNEMKAEIKMFFETNENKDTTYQNLWDAFKAVCRGKFIALNAHKRKQERSKIDTLTSQLKELEKQEQTHSKAGRKKEITKIRAQLKEIETQKTLKKLMNPGAEIQTTIREYYKHLYAKKLENLEEMDKFLDTYTLPRLNQEEVESLNRPITGAEIVAIINSLPTKKSRTRWIHSRILPEEASIILIPKPGRDTTKKENFRPISLMNIDAKILNKILAKRIQQHIKKLIHHDQVGFIPGMQGWFNIHKSINVIQHINRAKDKNHIIISIDAEKAFDKIQQPFMLKTLNKLGIDGTYFKIIRAIYDKPTANIILNGQKLEAFPLKTGTRQGCPLSPLLFNIVLEVLARAIRQEKEIKGIQLGKEEVQLSLFADEMIVYLENPIVSAQNLLKLISNFSKVSGYKINVQKSQAFLYTNNRQTESQIMSELPFTIASKRIKYLGIQLTRDVKDLFKENCKPLLNEIKEDTNKWKNIPCSWVGRINIMKMAILPKVIYRFNAIPTKPPMTFFTELEKTTLKFIWNQKRARIAKSILSQKNKAGGITLPDFKLYYKATVTKTAWYWYQNRDLDQWNRTEPSEITPHIYSYLIFDKPEKNKQWGKDSLFNKWCWENWLPICRKLKLDPFLTPYTKINSRWIKDLNVRPKTIKTLKENLGITIQDIGMGKDFMSKTPKAMATKDKIDKWDLIKLKSFCTAKETTIRVNRQPTKWEKIFATYSSDKGLISRIYNELKQIYKKKTNNPINKWVKDMNRHFSKEDIYAAKKHMKKCSSSLAIREMQIKTTMRYHLTPLRMAIIKKSGNNSASPTARNKTARNQRTKMIAVTAPRNRAPLELELILYRQNRQSKTHILETNNTSAELLVPFEEDYLIEIRTVSDGGDGSSSEEIRIPKMSMIDHILPKSIPEELQNGEGFGYIIMFRPVGSTTWSKEKVSSVESSRFVYRNESIIPLSPFEVKVGVYNNEGEGSLSTVTIVYSGEDDGYVFLWMVEPQLAPRGTSLQSFSASEMEVSWNAIAWNRNTGRVLGYEVLYWTDDSKESMIGKIRVSGNVTTKNITGLKANTIYFASVRAYNTAGTGPSSPPVNVTTKKSRYLITTAYLEVPEI

SEQ ID NO: 8201 - protein, 1092 aa, Homo sapiens
  DOMAIN (110)..(151): kw TRANSCRIPTASE REVERSE II ORF2 domain identified by eMATRIX, accession number DM01354I, p-value=1.000e-40, raw score of 15.55
  DOMAIN (356)..(631): Reverse transcriptase domain identified by PFam, accession name rvt, E-value=3.7e-81, PFam score of 283.0
MGDFNTPLSTLDRSTRQKVNKHTQELNSALHQADLIDIYRTLHPKSTEYTFCSAPHHTYSKIDHIVGSKALLSKCKRSEIITNCLSDHSAIKLELRIKKLTQNRSTTWKLNNLLLNDYWVHNEMKAEIKMFFETNQNKDTTYQNLWDTFKAVCRWKFIALNAHKRKQERSKIDTLTSQLKELEKQEQTHSKASRRQEITKIRAELKEIETQKTLQKINESRSWFFERINKTDRPLARLIKKKRQNNQIYAIKNDKRDITTDPTEIQTTIREYYRYLYTNKLENLEEMDKFLDTYTLPRLNQEEGDSLNRPITGSEIVAITNSLPTKKSPGPDGFTAEFYQRYKEELVPFLLKLFQSIEKEGILPNSFYEASIILIPKPGRHTTEKENFRPISLMNIDAKILNKILANRIQQHIKKLIHHDQVGFIPGMQGWFNIRKSRNVIQHINRTKDKNHMIISIDAEKAFDKIQQRFMLKSLNKLGVDGTYLKIIRAIYDKPTANIILNGQKLEAFPLKTGTREGCPLSPLLFNIVLEVLARAIRQEKEIKGIQLGKEEVKLSLFADDMIVYLENPIVSAQNLLKLISNFSKVSGYKIHVQKSQAFLYTNNRQTESQIMSELPFTIASKRIKYLGIQPTKDVKDLFKENYKPLLKEIKEDTNKWKNIPCSWVGRINIVKMAILPKVIYRFNAIPIKLPMTFFTQLEKTTLKFIWNQKRARIAKSILSQMNKAGGIMLPDFKLYYKATVTKTAWYWYQNRDIDQWNRIEPSEIMPHIYNYLIFDKPEKNKQWGKDSLFNKWCWENWLAIWRKLKLDPFLTPYTKTNSRWIKDLNVRPKTIKTLEENLGITIQDIGMGKDFMSKTPKAIATKAKIDKWDLIKLRSFCTAKETTIRVNRQPTKWEKIFTTYSSDKGLISRIYKELKQIYKKKTNSPIKKWAKDMNRHFSKEDIYAAKRHMKKCSPSLAIREMQIKTTMRYHLTPVRMAITKKSGNNRCWRGCGEIGTLLHCWNPTYKGCEGPLQGERQTTAQGNKRGYKQMEEHSMLMGRKNQYRENGHTAQERVQQLMVLNQANSCFECLEICLGVERKGPCGTSIYVREG

SEQ ID NO: 8202 - protein, 1014 aa, Homo sapiens
  DOMAIN (380)..(421): kw TRANSCRIPTASE REVERSE II ORF2 domain identified by eMATRIX, accession number DM01354I, p-value=1.000e-40, raw score of 15.55
  DOMAIN (626)..(901): Reverse transcriptase domain identified by PFam, accession name rvt, E-value=1.1e-83, PFam score of 291.4
MGKKQSRKTGNSKNQSASPPPKERSSSPAMEQSWMENDFDDLREEGFRQSNYSELKEEVRTHGKEVKNLEKKLDEWLTRITNAEKSLKDLMELKTTARELHDECTSLKRVSVTEDQMNEMKREEKFREKRIKRNEQSLQEIWDYVKRPNLHLIGVPESDRENGTKLENTLQDIIQENFPNLVRQANIQIQEIQRTPQRYSSRRATPRHIIVRFTKVEMKEKMLRAAREKGRVTHKGKPIRLTADLLAETLQARREWGPIFNILKEKNFQPRISYPAKLSFIDRSTRQKVNKDTQELNSALHQADLIDIYRTLHPKSTEYTFFSAPHHTYSKIDHIVGSKALLSKCKRTEIITNCLSDHSAIKLELRIKKLTRNHSTTWKLNNLLLNDYWVHNEMKAEIKMFFETNENKDKTYQNLWDTFKTVCRGKFIALNAHKRKQERSKIDTLTSQLKGLEKQEQTHSKASRRQEITKIRAELKEIETQKTLQKINESRSWFFEKINKIDRPLARLIKNKREENQIDAIKNDKGDITTDPTEIQTAISEYYKHLYANKLENLEEMDKFLDTYTLPRLNQEEVESLNRPITGSEIEAIINSLPTKKSPGPDGFMAEFYQRDKEELVPFLLKLFQSIEKEGILPNSFYEASIMLIPKPGRDTTKKENFRPISLMNIDAKILNKILANRIQQHIKKLIHHDQVGFIPGMQGWFNLRKSLNVIQHINRTNDKNHMIISIDAEKAFDKIQQPFMLKTLNKLGIDGMYLKIIRAIYDRPTANIILNGQKLEAFPLKTGTRQGCPLSPLLFNIVLEVLARAIRQEKEIKGIQLGKEEVKLSLFADDMTVYLENAIVSAPNLLKLIGNFSKVSGYKINVQKSQAFLYTNNRQTESQIMSELPFRIASKRIKYLGIQLTRDVKDLFKQNYKPLLNEIKEDTNKWKNIPCSWVGRINIVKMAILPKGTQRPYAKVRVQLNSGEELHFLGLLDTSTQVTVIPTNPCIKMRRKQIVFSDFGLLLTSVVMAPTTE

SEQ ID NO: 8203 - protein, 1221 aa, Homo sapiens
  DOMAIN (387)..(432): kw TRANSCRIPTASE REVERSE II ORF2 domain identified by eMATRIX, accession number DM01354N, p-value=1.000e-40, raw score of 13.17
  DOMAIN (473)..(746): Reverse transcriptase domain identified by PFam, accession name rvt, E-value=1.8e-87, PFam score of 304.0
EHSSSPATEQRWTENDFDELREEDFRRSNYSELWEDIQTKGKEVENFEKNLEECITRITNTEKCLKELMELKTKARELRKECRSLRSRCNQLEERVSAMEDGMNEMKQEGKFREKRIKRNKQSLQEIWDYVKRPNLRLIGVPESDGENGTKLENTLQDIIQENFPNLARQANIQIQEIQRTRQRYSSRRATPRHIIVRFTKVEMKEKMLRAAREKGRVTHKGKPIRLTADLSAETLQARREQKPSFFETNENKDTTYQNLWDAFKAVCRGKFIALNAHKRKQERSKIDTLTSQLKELEKQEQTHSKASRRQEITKIRAELKEIETQKTIQKINESRSWFFERINKIDRPLARLTKKKREKIQIDAIKNDKGDITTDPTEIQTTIREYYKHLYANKLENLEEMDKFLDTYTLPRLNQEEVESLNRPITGSEIVAIINSLPTKKSPGPDGFTAEFYQRYKEELVPFLLKLFQSTEKEGILPNSFYEASIILIPKPGRDTTEKENFRPISLMNIDAKILNKILPNRIQQHIKNLLHHDQVGFIPGMQGWFNICKLINVIQHINRTKDKNHMIISIDAEKAFDKIQQPFMLKTLNKLGIDGTYLKIIRAIYDKPTANIIWNGQKLEAFPLKTGTRQGCPLSPLLFNIVLEVLARAIRQEKEIKGIQLGKEEVKLSLFADDMIVYLENPIVSAQNLLKLISNFSKVSAYKINVQKSQAFLYTNNRQTESQIRSELPFTIASKRIKYLGIQLTRDVKDLFKENYKPLLNEIKEDTNKWKNIPCSWVGRINIVKMAILPKIIYRFNAIPIKLPMTFFTELEKTTFKFIWNQKRARIAKSILSQKNKAGGITLPDFKLYYKATVTKTAWYWYQNRDIDQWNRTEPSEITPPIYNYLIFDNPEKNKQWGKDSLFNKWCWENWLAICRKLKLDPFLTPYTKINSRWIKDLKVRPKTIKTLEESLGITIQDIGMCKDFMSKTPKAMATKAKIDKWDLIKLKSFCTAKETTIRLGVELHKHPCGHHHYDTTGSDLKPAQHWVSPKAYYNHSQAIANVHSRPCDFTISMWQSQSGLCPSLQDGKVSHALGRLAPLWPREGPEMPSKYQVLESGTPSILLMLYPSVAMLVPKVQDKVTFTFPSTFLKQMEFLHAASTAGEGRGGVASEIQDCFFYLFSASLSDMKLKPGTVDAHWTFGSYEAIIAKNSGKSMVSLPLASTSLIISRNSASDPVTS

SEQ ID NO: 8204 - protein, 1048 aa, Homo sapiens
  DOMAIN (110)..(151): kw TRANSCRIPTASE REVERSE II ORF2 domain identified by eMATRIX, accession number DM01354I, p-value=1.000e-40, raw score of 15.55
  DOMAIN (356)..(534): Reverse transcriptase domain identified by PFam, accession name rvt, E-value=2.1e-22, PFam score of 87.9
MGDFNTPLSTLDRSSRQKVNKDTQELNSTLHHADLIDIYRTLHPKSTEYTFFSAPHHTYSKIDHVVGSKALLSKCKRTEIITNCLSDHSAIKPELRIKKLTQNRSTTWKLNNLLLNDYWVHNKMKAEIKMFFETNENKDTTYQNLWDTFKAVSRGKFIALNAHKRKQKRCKIDTLASQLKEVEKQEQTHSKASRRQEITKIRAELKEIETQKTLQKINESRSWFLERINKIDRPLARLIKKKREKNQIDVIKNDKGDITTDPTEIQTTIREYYKHLYANKLENLEELDKFLDTHTLQRLNQEEVESLNRPITGSEIVAIINSLPTKKSPGPDGSTAEFYQRYKEELLPFLLKLFQSIEKEGILPNSFYEASIILIPKPGRDTAKKENFRPISLMNIDAKILNKILANQIQQHIKKLIYTMIKWASSLGCKAVLEVLARAIRQEKEIKGIQLGKEEVKLSLFADDMIVYLENPIVSAQNLLKLISNFSKVSGYKINVQKSQAFLYTNNRQTESQIMSEIPFTIVSKRIKYLGIQLTRDMKDLFKENYKPLLNEIKEDTNKWKNIPCSWLGRINMVKMAILPKVIYRFNAILIKLAMTFFTESEKTTLKFIWNQKRACIAKSILSQKNKVIGITLPDFKLYYKAIVNKTAWYWYQNRDIDQWNRTEPSEITPHIYNYLIFDKPEKNKQWGKDSLFNKWCWENWLAICRKLKLDPFLTPYTKINSRWIKDFHVRPKTIKTLEENLGITIQDIGMDKDFMSKTPKAMATKAKIDKWDLIKLKSFCRAKETTIRVNRPPTEWEKIFVTYSSDKGLISRIYNELKQIYKKKTNNPIKKWAKDMNRHFSKEYIYAAKRDMKKCSSSLAIREMQIKTTMRYHLTPVRMVIIKKSGNNRCWRGCGEIGTLLHCWWDCKLVHPLWKSVWRFLRDLELEIPFDPAILLLGIYPKDYKSCCYKDTCTHEKAEIQKSKGIRDYGEIGTRTEDMDSQFRPLSVVRAQIIPFEFPWEGIPLGGPFPRHSCSYPVGLALLYHSSSAAGPVRGHLSLQWNSRMTS

SEQ ID NO: 8205 - protein, 951 aa, Homo sapiens
  DOMAIN (284)..(329): kw TRANSCRIPTASE REVERSE II ORF2 domain identified by eMATRIX, accession number DM01354N, p-value=1.000e-40, raw score of 13.17
  DOMAIN (223)..(455): Reverse transcriptase domain identified by PFam, accession name rvt, E-value=1.1e-06, PFam score of 25.4
  misc_feature (1)...(951): Xaa = X or * as defined in Table 2
MVKGSIQQEELTILNIYAPNTGAPRFIKQVLSDLQRDLDSHTLIMGDFNNPLSTLDRSMRQKVNKDTQELNSALHQVDLIDIYRTLHHKSTEYRFFSAPHHTYSKIDHILGSKALLSKCKRTEIITNYLSGHSAIKLELKIKNLTQNRSTTWKLNNLLLNDYWIHNEMKAEIKMFFETNENKDTTYQNLWDAFKAVCRGKFIALNAHKRKQERSKIDTLTSQLKELEKQEQTHSKASRRINKIDRPLARLIKKKREKNQIDAIKNDKGDITNDPTEIQTTIREYYKHLYANKLENLEEMDKFLDTYTLPRLNQEEVESLNRPITGSEIVAIINSLPTKRVQDQMDSQPNSTRVLEVLARAIRQEKEIKGIQLGKQEVQLSLFADEMIVYLENPIVSAQNLLKLISNFSKVSGYKINVQKSQAFLYTNNRQTESQIMSELPFTIASKRIKYLGIQLTRDVKDLFKENCKPLLNEIKEDTNKWKNIPCSWVGRINIMKMAILPKVIYRFNAIPTKPPMTFFTELEKTTLKFIWNQKRARIAKSILSQKNKAGGITLPDFKLYYKATVTKTAWYWYQNRDLDQWNRTEPSEITPHIYSYLIFDKPEKNKQWGKDSLFNKWCWENWLPICRKLKLDPFLTPYTKINSRWIKDLNVRPKTIKTLKENLGITIQDIGMGKDFMSKTPKAMATKDKIDKWDLIKLKSFCTAKETTIRVNRQPTKWEKIFATYSSDKGLISRIYNELKQIYKKKTNNPINKWVKDMNRHFSKEDIYAAKKHMKKCSSSLAIREMQIKTTMRYHLTPLRMAIIKKSGNNSASPTARNKTARNQRTKMIAVTAPRNRAPLELELILYRQNRQSKTHILETNNTSAELLVPFEEDYLIEIRTVSDGGDGSSSEEIRIPKMSTGGEEGMAAVFKNKCRCSWSRVVIAYHSSSGNQMGTNPEQDPGQHAIPLEX

SEQ ID NO: 8206 - protein, 19 aa, Homo sapiens
SWDRVLGRSDELTTLSCTP

SEQ ID NO: 8207 - protein, 1115 aa, Homo sapiens
  DOMAIN (323)..(369): kw TRANSCRIPTASE REVERSE II ORF2 domain identified by eMATRIX, accession number DM01354O, p-value=1.000e-40, raw score of 8.73
MGDFNIPLSTLDRSTRQKVNKDTQELNSALHQADLIDSYRTLHPKSTEYTFFSAPHHTYSKIDHILGSKALLSKCKRTEIITNYLSDHSAIKLELRIKNLTQNCSTTWKLNNLLLNDYWVHNEMKAEIKMFFETNENKDTTYHNLWDAFKAVCRGKFIALNAHKRKQERSKIDTLTSQLKELEKQEQTHSKASRRQEITKIRAELKEIETQKTLQKINESRSWVFERINKIDRPLARLTKKKSEKNQIDAIKNDKGDITTDPTEIQTTIREYYKHLYANKLENLEETDKFLDTYTLPRRNQEEVESLNRPITGAEIVAIINNLPTKKSPGSDGFTAEFYQRYKEELVPFLLKLFQSIEKEGILPNSFYEASIILIPKPGRDTTKKENFRPISLMNIDAKILNKILANQIQQHIKKLIHHDQVGFIPGMQGWFNICKSINVIQHINRTKDKNHMIISIDAEKAFDKIQQPFMLKTLNKLGIDGTYLKIIRAIYDEPTANIILNGQKLEAFPLKTGTRQGCPLSPLLFNIVLEVLARAIRQEREIKGIQLGKEEVKLSLFADDMIVYLENPIVSAQNLLKLISNFGKVSGYKINVQKSQAFLNTNNRQTESQIMSELPFTIASKRIKYLGIQLTRDVKDLFKENYKPLLKEIKEDTNKWKNIPCSWVGRINIMKMAILPKVIYRFNAIPIKLPMTFFTELEKTTLKFIWNQNRACIAKSILSQKNKAGGITLPDLKLYYKATVTKTAWYWYQNRDIDQWNRTEPSEITLHIYNYLIFDKPEKNKQWGKDSLFNKWCWENWLAICRKLKLDPFLTPYTKINSRWIKDLNIRPKTIKTLEENLGITIQDIGMGKDFMSKTPKAMATKAKIDKWDLIKLKSFCTAKETTIRVNRQPTKWGKIFATYSSDKGLISRIYNELKQIYKKKTNNPIKKFAKDMNRHFSKKDIYAAKKHMKKCSPSLAIREMQIKTTMRYHLTPVRMAIIKKSGNNRTGRGLHPGRDWSVTCARSPGDPEPSGIKGGCGSGTPSPSPSKQTVRRPWTQIPEMKPLLLAVSLGLIAALQAHHLLASDEEIQDVSGTWYLKAMTVDREFPEMNLESVTPMTLTTLEGGNLEAKVTML

SEQ ID NO: 8208 - protein, 1143 aa, Homo sapiens
  DOMAIN (110)..(151): kw TRANSCRIPTASE REVERSE II ORF2 domain identified by eMATRIX, accession number DM01354I, p-value=1.000e-40, raw score of 15.55
MGDFNTPLSTLDRSTRQKVNKDTQELNSALHQADLIDIYRTLHPKSTEYTFFSAPHHTYSKIDHILGSKALLSKCKRTEIIANYLSDHSAIKLELRIKNLTQNRSTTWKLNNLLLNDYWVHNEMKAEIKMFFETNENKDTTYQNLWDAFKAVCRGKFIALSAHKRKQERSKIDTLTSQLKELEKQEQTHSKASRRQEITKIRAELKEIETQKTLQKINESRSWFFERINKIDRPLARLIKKKREKNQIDAIKNDKGDITIDPTEIQTTIREYYKHLYANKLENLEEMDKFLDTYTLPRLNQEEVKSLNRPITGAEIVAIINSLAIKKSPGPDGFTAEFYQRYKEELVPFLLKLFQSIEKEGILPNSFYEASIILIPKPGRDTTKKENFRPISLMNIDAKILNKILANRIQQHIKKLIHHDQVGFIPGMQGWFNIHKSINVIQHINRARDKNHMIISIDAEKAFDKIQQPFMLKTLNKLGIDGTYLKIIRAIYDKPTANIILNGQKLEAFPLKTGTRQGCPLSPLLFNIVLEVLARAIRQEKEIKGIQLGKEEVKLSLFADDMIVYLENPIVSAQNLLKLISNFSKVSGYKINVQKSQAFLYTNNRQTESQIMSELPFTIASKRIKYLGIQLTRDVKDLFKENYKPLLKEIKEDTNKWKNMPCSWVGRINIVKMAILPKVIYRFNAIPIKLPMAFFTELEKTTLKFIWNQKRARIAKSILSQKNKAGGITLPNFELYYKATVTKTAWYWYQNRYIDQWNRTEPSEITPHIYNYLIFDKPGKNKQWGKDSLFNKWCWENWLAICRKLQLDPFLTPYTKINSRWIKDLNVRPKTIKTLEEDLGITIQDIGMGKDFMSKTPKAMATKDKIDKWDLIKLKSFCTAKETTIRVNRQPTKWEKIFATYSFDKGLISRIYNELQQIYKKKTNNPIKKWAKDMNRHFSKEDIYAAKKHMKKYSSSLAIREMQIKTTMRYHLTPVRMATIKNSGNNRSLCFYKENLSLCLAILLSVPVQEGGARSFLAPAGGVAGRATSHYGGHMATAERLSVELSGQALKEFQKGPLSPKQFKGHHSQQLRWTHRLNPSYGQSKTPKNTLLKMRGPTTWALGGTDVAASTDNNGNAHFETLQVMDMPRPWCCLLDGALLVSV

SEQ ID NO: 8209 - protein, 1010 aa, Homo sapiens
  DOMAIN (297)..(343): kw TRANSCRIPTASE REVERSE II ORF2 domain identified by eMATRIX, accession number DM01354O, p-value=1.000e-40, raw score of 8.73
MGKKQSRKTGNSKKQSASPPPKECSSSPATEQSWTENDFDELREEDFRRSNYSELQEEIQTKGKEVENFEKNSDECITGITNTEKCLKELTELKAKARELHEERRSLKSRCDQLEERVSVMEDKMNEMKREGKFREKRIKRNKQSLQEIWDYVKRPNLRLISVPESDRENGTKLENTLQDIIQENFPNLARQANIQIQEIQRTPQRYSSRRATPRHIIVRFSKVEMKEKMLRAAREKEIQTNIREYYKHRYANKLENLEEMDKFLNIYTLRRLNQEEVESLNRPIRGSEIVAIINSLPTKKSPGPDGFTAEYYQRYKEELVPFLLKLFQSIEKEGILPNSFYEASIILIPKPGRDTTKKENFRTISLMNIDAKILNKILANRIQQHIKKLIHHDQVGFIPGMQGWFNIRKSINVIQHINRTKDKNHVIISIDAEKAFDKIQQLFLLKTLNKLGIDGTYLKIKRAIYDKPTANIILNGQKLEAFPLKTGTRQGCPLSPLLFNIVLEVLARAIRQEKEIKGIQLGKEEVKLSLFADDMIVYLENPIVSAQNLLKLISNFSKVSGYKINVQKSQAFLYTNNRQTETQIMSELPFTIASKRIKYLGIQLTRDVKDLFKENYKPLLNEIKEDTKKWKNIPCSWVGRINIMKMAILHKVIYRFNAIPIKLPMTFFTELEKTTLKFTWNQKRARIAKSILSQKNKAGGIMLPDFKLYYKATVTKTAWYWYQNRDIDQWNRTEPSEITPHIYNYLIFDKPEKNKQWGKDSLFNKWCWENWLAIWRKLKLDPFFTPYTKINSRWIKDLNVRPKTIKTLEENLGITIQDIGMGKDFMSKTPKAIATKAKIDKLDLIKLKSFCTAKETTIRVNRQPTEWEKIFATYSSDKGLISRIYNELKQIYKKKTNNPIKKWAKDMNRHFSKEDIYAAKKHMKKCSPSLAIREMQIKNTMRYHLTPLRMAIIKKSGNNRASRSARGESLGPSQSFPEHVHCPGPLHTALHRPMTFQIPRDMLEVSSAH

SEQ ID NO: 8210 - protein, 1389 aa, Homo sapiens
  DOMAIN (771)..(816): kw TRANSCRIPTASE REVERSE II ORF2 domain identified by eMATRIX, accession number DM01354N, p-value=1.000e-40, raw score of 13.17
MNSLEQNPRSKWELLHRGTMELWPTMWADEEEQGLKAVLALSAKKFVPGARSKTGLTDCMGVGGGLLLPAFPHIPGKRDSHNPLWNITPENQSPTPTVAMERSSSPATEQSWMENDFDELREEGFRRSNYSELQEEIKTKGKEVKNFEKNLDECITRITNTEKCLKEVMQLKAKARELREECRSLRSRWNQLEERVSVMEDEMNEMKREGKFREKRIKRNEQSLQEIWDYVKRPNLRLIGVPESDGENATRLENTLQDIIQENFPNLARQANIQIQEIQRMPQRYSSRRASPRHIIVRFTKVEMKEKMLRAAREKGRVTHKGKPIRLIADLSAETLQARREWGPIFNILKEKNFQLRISYPAKLSFISEGEIKSSTDKQMLRDFVTTRPALKELLKEALNMERNNRDTHRLKTKGWRKIYQANGKQKKAGVAILVSDKTDFKPTKIRRDKEGHYIMVKGSIQQEELTILNIYAPNTGAPRFIKQVLSDLQRDLDSHTIIMGDFNTPLSTLDRSTRQKVNKDTQELNSALHQADLIDIYRTLHPKSTEYTFFSAPHHTYSKTDHIVGSKALLSKCKRTDIKTNCLSDHSAIKLELRIKKLTQNHSTTWKVNNLLLNDYWVHNEMTAEIKMFFETNENKDTTYQNLWDTFKAVCTGKFIALNAHKRKQERSKIDTLTSQLKELEKQEQTHSKASRRQEISKIRAELKEIETQKTLQKINESRSWFFERINNINRLLERLIKKKREKNQIDTTKNDKGDITTDPTEIQTTIREYYKHLYANKLENLEEMDKFLDTYTLPRLNQEEVESLNRPITGSEIVAIINSLPTKKSPGPDGFTGEFYQRYKEELVPFLLKLFQSMEKEGIPPNSFYEASIILISKPGRDTTKKENFRPISLMNIDAKILNKILTKRIQQHIKKLIHHDQVGFIPGMQGWFNIRKSINVIQHINRTKDKNHMIISIDAEKAFDKIQQHFMLKTLKKLGIDGMYLKIIRATYDKPTANIILNGQKLEAFPLKTGTRQGCPLSPLLFNIVLEVLARAIRQEKEIKGIQLGKEEVKLSLFADDMIVYLENPIISAQNLLKLISNFSKLSGYKINVQKSQAFLYTNNRQTESQIMSELPFTIASKRIKYLGIQLTRDVKDLFKENYKPLLNEIKEDTNKWKNSPCSWVGRINIMKMAILPKLPMTFFTELEKTTLKFIWNQKRACIAKSILSQKNKAGGITLPDFKLHYKATVTKTAWYWYQNRDIDQWNRTEPSEITPHIYNYLIFDKPEKNKQWGKDSLFNKWCWENWLAICRKLKLDPFLTPYTKINSRWIKDLNVRPKTIKTLEENLGITIQDIGMGKDFMSKTPKAMATKAKIDKWDLIKSFCTAKETTIRVNRQPTKWEKIFATYSS

SEQ ID NO: 8211 - protein, 1307 aa, Homo sapiens
  DOMAIN (294)..(335): kw TRANSCRIPTASE REVERSE II ORF2 domain identified by eMATRIX, accession number DM01354I, p-value=1.000e-40, raw score of 15.55
MGKKQNRKTGNSKTQSASPPPKERSSSPATEQSWMENDFDELREEGFRRSNYSELWEDIQTKGKEVENFEKNLEECITRITNTEKCLKELMELKTKARELHEECRSLRSRCDQLEERVSAMEDEMNEMKREGKFREKRIKRNEQSLQEIWDYVKRPNLRLIGVPESDVENGTKLENTLQDIIQENFPNLARQANVQIQEIQRMPQRYSSRRATPRHIIVRFTKVEMKEKMLRAARQKAPHHTYSKIDHIVGSKALLSKCKRTEIITNYLSDHSAIKLELRIKNLTQSRSTTWKLNNLLLNDYWVHNEMKAEIKMFFETNENKDTTYQNLWDTFKAVCRGKFIALNAYKRKQETSKIDTITSQLKELEKQEQTHSKASRRQEITKIRAELKEIETQKTLQKINESRSWFFERINKIDRPLARLIKKKREKNQIDTIKNDKGDITTDPTEIQTTIREYYKHLYANKLENLEEMDTFLDTYTLPRLNQEEVESLNRPITGSEIVAIINSLPTKKSPGPDGFTAEFYQRYKEELVPFLLQLFQSIEKEGILPNSFYEASIILIPKPGRDTTKKENFRPISLMNIDAKILNKILANRIQQHIKKLIHHDQVGFIPGTQGWFNIRKSINVIQHINRAKDKNHMIISIDAEKAFDKIQQPFMLKTLNKLGIDGTYFKIIRAIYDKPTANIILNGQKLEAFPLKTGTRQGCPLSPLLFNIVLEVLARAIRQEKEIKGIQLGKEEVKLSLFADDMIVYLENPIVSAQNLLKLISNFSKVSGYKINVQKSQAFLYTNNRQTESQIMSELPFTIASKRIKYLGIQLTRDVKDLFKENYKPLLKEIKEDTNKWKNIPCSWVGRINIVKMAILPKVIYRFNAIPIKLPMTFFTELEKTTLKFIWNQKRACISKSILSQKNKAGGITLPDFKLYYKATVTKTAWYWYQNRDIDQWNRTEPSEIMPHIYNYLIFDKPEKNKQWGKDSLFNKWCWENWLAICRKLKLDPFLTPYTKINSRWIKDLNVRPKTIKTLEENLGITIQDIGVGKDFMSKTPKAMATKAKIDKWDLIKLKSFCTAKETTIRVNRQPTTWEKIFTTYSSDKGLISRIYNELKQIYKKKTNNPIKKWAKDMNRHFSKEDIYAAKKHMKKCSSSLAIREMQIKTTMRYHLAPVRMAIIKKSGNNSKMVEADGPGNLFTGVLHLETNEKSLKAVFGKYGPILEDNFLDGKAMKVEQVNKPSFQSGGNVEITIFLEKQEPFRKSETGKKFFKLFLLTLANFFKFSDHDDYSGGLGRDHSEHPNGSSYRDAYQSYGTFYGAPPA

SEQ ID NO: 8212 - protein, 960 aa, Homo sapiens
  DOMAIN (154)..(195): kw TRANSCRIPTASE REVERSE II ORF2 domain identified by eMATRIX, accession number DM01354I, p-value=1.000e-40, raw score of 15.55
MVKGSIQQEELTILNIHAPNTGAPRFIKQVLSDLQRDLDSHTLIMGDFNTPLSTLDRSMRQKVNKDTQELNSALHQADLIDIYRTLHPKSTEYTFFSLPHHTYSKIDHIVGSKALLSKCKRTQIITNYLSDHSAIKLELRIKTLTQSRSTTWKLNNLLLNDYWVHNEMKAEIKMFFETNENKDTTYQNLWDAFKAVCRGKFIALNAHKRKQERSKIDTLTSQLKELEKQEQTHSKASRRQEITKIRAELKETETQKTLQKINESRSWFFERINKIDRPLARLIKKKREKNQIDTIKNDKGDITTDPTEIQTTIREYYKHLYANKLENLEEMDTFLDTYTLPRLNQEEVESLNRPITGAEIVAIINSLPTKKSPGPDGFTAEFYQRYKEELHINRAKDKNHMIISIHAEKAFDKIQQPFMLKTLNKLGIDGTYFKIIRAIYDKPTANIILNGQKLEAFPLKTGTRQGCPLSPLLFNIVLEVLARAIRQEKEIKGIQLGKEEVKLSLFADDMIVYLENPIVSAQNLLKLISNFSKVSGYKINVQKSQAFLYTNNRQTESQIMSELPFTIASKRIKYLGIQLTRDVKDLFKENYKPLLKEIKEDTNKWKNIPCSWVGRINIVKMAILPKAIYRFNAIPIKLPMTFFTELEKTTLKFIWNQKRARITKSILSQKNKAGGITLPDFKLYYKATVTKTAWYWYQNRDIDQWNRTEPSEITPHTYNYLIFDKPEKNKQWGKDSLFNKWCWENWLAICRKLKLDPFLTPYTKINSRWIKDLNVRPKTIKTLEENLEITIQDIGVGKDFMSKTPKAMATKAKIDKWDLIKLKSFCTAKETTIRVNRQPTTWEKIFATYSSDKGLISRIYNELKQIYKKKTNNPIKKWARDMNRHFSKEDIYAAKKHMKKCSSSLAIREMQIKTTMRYHLTPVRMAIIKKSGNNRNIRLCSYSGSHSRAWFLPPAGRHIQ

SEQ ID NO: 8213 - protein, 821 aa, Homo sapiens
  DOMAIN (67)..(122): kw TRANSCRIPTASE REVERSE II ORF2 domain identified by eMATRIX, accession number DM01354Q, p-value=1.000e-40, raw score of 9.23
SIAYQRKRVQDQMDSQPNSTREKEGILSNSFYEASIILIPKPGRDTTKKENFRPISLMNIDAKILSKILAKRIQQHIKKLIHHDQVGFIPGMQGWVNIHKSINVIQHINRAKDKNHMIISTDAEKAFDIIQQPFMLKTLNKLGIDGMYFKIIRAIYDKPTANIILNGQKLEAFPLKTGTRQGCPLSPLLFNIVLEVLARAIRQEKEIKGIQLGKEEVKLSLFADDMTVYLENPIVSAQNLLKLISNFSKVSGYKINVQKSQGFLYTNNRQTESQIMSELPFTIASKRIKYLGIQLTRDVKDLFKENYKPLLKEIKEDTKKWKNIPCSWVGRINIVKMAILPKVIYSFNAIPIKLPMPFFTELEKTTLKFIWNQKRARITKSILSQKNKAGGITLPDFKLYYKATVTKTAWYWYQNRDIDQWNRTEPSEITPHIYNYLIFDKPEKNKQWGKDSLFNKWCWENWLAICRKLKLDPFLTPYTKINSRWIKDLNVRPKTIKTLEENLGNTIQDIGMGKDFMSKTPKAMATKAKIDKWDLIKLKSFCTAKETTIRVNRQPTKWEKIFATYSSDKGLISRIYNELKQIYKKKTNNPIKKWVKDMNRHFSKEDIYAAKKHMKKCSSSLAIREMQIKTTMRYHLTPVRVAIIKKSGNNRCWRGCGEIGTLLHCWWDCKLVQPLWKSVWRFLRDLELEIPFDPAIPLLGIYPKDYKSCCYKDTCTRMFIAALFTIAKTWSQPKCPTTIDWIKKMWHIYTMEYYAAIKNDEFMSFVGTWMKLEIIILSKPLQEQKTKHRMFSLIVSSKVIRRLSQKLPLKIVAMCIPVKRN

SEQ ID NO: 8214 - protein, 1227 aa, Homo sapiens
  DOMAIN (260)..(301): kw TRANSCRIPTASE REVERSE II ORF2 domain identified by eMATRIX, accession number DM01354I, p-value=1.000e-40, raw score of 15.55
AKSPANIIMTGSNSHITILTLNINGLNSAIKRHRLASWIKSQDPSVCCIQETHLTCRDTHRLKIKGWRKIYQANGKQKKAGVAILVSDKTDFKPTKIKRDKEGHYIMVKGSIQQEELTILNIYAPNTGAPRFIKQVLSDLQRDLDSHTLIMGDFNTPLSTLDRSMRQKVNKDTQELNSALHQADLIDIYRTLHPKSTEYTFFSAPHHTYSKIDHIVGSKALLSKCKRTEIITNYLSDHSAIKLELRIKNLTQSRSTTWKLNNLLLNDYWVHNEMKAEIKMFFETNENKDTTYQNLWDAFKAVCRGKFIALNAYKRKQERSKIDTLTSQLKELEKQEQTHSKASRRQEITKIRAELKEIETQKTLQKINESRSWFFERINKIDRPLARLIKKKREKNQIDTIKNDKGDITTDPTEIQTTIREYYKHLYANKLENLEEMDTFLDTYTLPRLNQEEVESLNRPITGSEIVAIINSLPTKKSPGPDGFTAEFYQRYKEELVPFLLKLFQSIEKEGILPNSFYEASIILIPKPGRDTTKKENFRPISLMNIDAKILNKILANRIQQHIKKLIHHDQVGFIPGMQGWFNIRKSINVIQHINRAKDKNHMIISIDAEKAFDKIQQPFMLKTLNKLGIDGTYFKIIRAIYDKPTANIILNGQKLEAFPLKTGTRQGCPLSPLLFNIVLEVLARAIRQEKEIKGIQLGKEEVKLSLFADDMIVYLENPIVSAQNLLKLISNFSKVSGYKINVQKSQAFLYTNNRQTESQIMSELPFTIASKRIKYLGIQLTRDVKDLFKENYKPLLKEIKEDTNKWKNIPCSWVGRINIVKMAILPKVIYRFNAIPIKLPMTFFTELEKTTLKFIWNQKRARIAKSILSQKNKAGGITLPDFKLYYKATVTKTAWYWYQNRDIDQWNRTEPSEIMPHIYNYLIFDKPEKNKQWGKDSLFNKWCWENWLAICRKLKLDPFLTPYTKINSRWIKDLNVRPKTIKTLEENLGITIQDIGVGKDFMSKTPKAMATKAKIDKWDLIKLKSFCTAKETTIRVNRQPTTWEKIFATYSSDKGLISRIYNELKQIYKKKTNNPIKKWAKDMNRHFSKEDIYAAKKHMKKCSSSLAIREMQIKTTMRYHLTPVRMAIIKKSGNNRVGDYHSYENDDDNLGATAAQSCTLLFSLIAHLLLQDPYTIPAYMTQVQNSAAGNYWKNTDAAKKLETIILGKLTQEQKTKHRMFSLISGS

SEQ ID NO: 8215 - protein, 112 aa, Homo sapiens
VWQPEAWTPFLDSLSGGCLRPSSWFAAFQRWEGVPLPGVQSVKLSPLSRDPAPPAGTLPCVALEADWFLDMPGGRRGPSRQQLSRSALPSLQTLVGGGWGKGTGLRNRKGRA

SEQ ID NO: 8216 - protein, 202 aa, Homo sapiens
NWLTTINLGLQLQVALEADWFLDMPGGRRGPSRQQLSRSALPSLQTLVGGGCGNGTGLRNRNGSAIGLPVPPITALITPGPVRHCQIPDLPVDGSLLFEFLFFIYLLAALFIQYINIYKTAWGYPYNHPASCTSLNFHLTDYDLAAFITKMLAKRLVWALISQATKAGAASMIHYMDLTSARLGLLTLCGWVLCWTLVNLFR

SEQ ID NO: 8217 - protein, 149 aa, Homo sapiens
  DOMAIN (58)..(103): Cytosolic fatty-acid binding proteins domain identified by eMATRIX, accession number BL00214B, p-value=7.261e-32, raw score of 26.51
EPTGTASRAATMPNFSGNWKIIRSENFQELLKVLGVNVMLRKIAVAAASKPAVEIKQEGDTFYIKTSTTVRTTEINFKVGEEFEEQTVDGRPCKSLVKWESENKMVCEQKLLKGEGPKTSWTRELTNDGELILTMTADDVVCTRVYVRE

SEQ ID NO: 8218 - protein, 125 aa, Homo sapiens
CGLPLEAPRCPTFRTPLPALSRHRRRRLTEAVSTEEKESDRMSAIQNLHSFDPFADAREGDDLLPAGPEDYLHIKIQHRIGGKTLTTGQGIADDHDKKKLVVASKKRSGCDGTVTGPPDYGEVIE

SEQ ID NO: 8219 - protein, 97 aa, Homo sapiens
  misc_feature (1)...(97): Xaa = X or * as defined in Table 2
ASHRVGLLQPFLNLWPSGCSTVLAKMKSVLVATEGAEVLFYWTDQEFEESLRLKFGQSENEEEEVGLLMLXARXPHPHTPPVLSGLNEGKKKSNFIT

SEQ ID NO: 8220 - protein, 121 aa, Homo sapiens
ASHRVGLLQPFLNLWPSGCSTVLAKMKCVLVATEGAEVLFYWTDQEFEESLRLKFGQSENEEEELPALEDQLSTLLAPVIIFSMTMLEKLSDTYTCFSTENGNFLYVLHLFGECLFIAING

SEQ ID NO: 8221 - protein, 374 aa, Homo sapiens
MVLLTLDGDYTHADRNLEWWGLKVLSATPQADKKKLASADNQPETVSLLLAKNALFPCRSVGVSTTELVSAQIHAGPGPEVSLVEPVGAMWTMVLRAVLKQSQVEAPSRALKLPSLECAASLGQLHTPADLTYYCQEKVLFVDFLLQGGIGFKTTGSWLISNKEHHKTFFKAQQALEEEGISAFQFLHYKVQSPVNNKNNKEGIKKGKEHSSSPATEQSWTENDFDELREEGFRRSVITNFSELKEDVRAHCKEAKNFERRLDEWLTRINSKEKTLNDLMELKTMARELCDACTSFSSQFDQVEERVSVIEDQMIEMKQEEKFREKRVKTNEQSLQEIRDYVKRPNLRLIGVPSSTIVEDSVAIPQGSGTRNTI

SEQ ID NO: 8222 - protein, 186 aa, Homo sapiens
MPGNSEAKSYYNAKTVLESCTLLWEQFKKVTKPYWSQGKLLREALESDDTCLWLCSILPDEEQEEKHSFAEVSVSPIGLSLTQPPLLYLLLKPWHNYHLLTQITAKHNRNTAPPATEQSGTENDFDELREEGFRRLVITNFSKLKGEVRTHLKEAKNLEERLDEWLTRINSVQKTLNDQMELKTMA

SEQ ID NO: 8223 - protein, 165 aa, Homo sapiens
MKPPKGPPSLQVPSAPPKKLRTDGRITTPSTHSLHWQLIGWCPFTLRVGLPLLGHQLNCQSSLATPSQTHPETVLHQPSRHPSIQSSGHLILTITSPGTMASAASVVMRQTGSDHFPSLHLSLRECSSSPAMEQSWTENDFDELREEGFRRSVITNFSELKKLKP

SEQ ID NO: 8224 - protein, 176 aa, Homo sapiens
  misc_feature (1)...(176): Xaa = X or * as defined in Table 2
LRSSSPATEQSWTENDFDKLREEGFRXSNYSELQEEIQTKGKEVENFEKNLEECITRITNTEKCLKDLMELKAKARELHEECRSLRSRCDQLEERVSVMEDEMNEMKREGKFREKRIKRNEQSLQEIWDYVKRPNLHLIGVPESDGENGTKLENTLQDIIQENFPNLARQANIQIQ

SEQ ID NO: 8225 - protein, 57 aa, Homo sapiens
  misc_feature (1)...(57): Xaa = X or * as defined in Table 2
FCHLSSTSWGGADGTCREGGPLGGFMGPSHQXESSPVPEAASSFRTFKSSAVSQSPL

SEQ ID NO: 8226 - protein, 586 aa, Homo sapiens
  DOMAIN (295)..(340): kw TRANSCRIPTASE REVERSE II ORF2 domain identified by eMATRIX, accession number DM01354N, p-value=1.000e-40, raw score of 13.17
  misc_feature (1)...(586): Xaa = X or * as defined in Table 2
MDDIPQEARQYRHNQAYAYSIQGDGAEDDDERIVRFHTRVTVDSDTLASDAARLTCRHGLGNQDRSSSPAMEQSWTENDFDELTEVGFRRSVITNFSELKEDVRTHRKEDHSAIKLELRIKKLIQNLTTTWKLNNLLLNDYRVNNEMKAEIKMFFETNENKDTTYQNLCDTFKAVCRGKFIALNAHKRKQERSKIDTLTSQLKELEKQEQTHSKACRRQEITKIQAELKEIETQKTLQKINESRSWFFEKINKIDRPLARLIKKKREKNQIDAIKNDKGYITTNPTEIQTTIREYYKHLYANKLENLEEMDKFLDTYTLPRLNQEEVESLNRPITGFEIEAIINSLPTEKRPVPDGFTAKFYHSSADCTRSMAPAPASGEALRLLPLMGEGEGELTCRDHIAREEAQECSSSPATEQSWMENDFEELGEEGFRRSVITNFSELKEDVQTHFKEAKNLEKRLDEWLTRINSVEKTLNDLMXLKTVAXELRDTYTSFNSRFDQVEERVSVIEDQMNEMEREEKFREKRVXRNEQSLQEIWNYVKRPNLHLIGVSEIDRENGTKLENTLQDIFQENFTYLARQANIQIQ

SEQ ID NO: 8227 - protein, 62 aa, Homo sapiens
GLYYTGCYGISRMPDLSRAPWKDSFYLLPVPMVEPGIPPISGFRGPKGQMGEPLLPGYTGKK

SEQ ID NO: 8228 - protein, 62 aa, Homo sapiens
  DOMAIN (27)..(55): !!!! PROTEIN ALU SUBFAMILY WARNING ENTRY NUCLEAR PHOSPHO domain identified by eMATRIX, accession number PD02454B, p-value= 9.603e-17, raw score of 11.61
KTVSLPGIVPHACNPSTLGGRGGWITRSGVQDQPGQHGETPFILKKKKKKICGRKLIPFSEG

SEQ ID NO: 8229 - protein, 175 aa, Homo sapiens
  DOMAIN (110)..(154): Ribosomal protein L6 proteins 2 domain identified by eMATRIX, accession number BL00700D, p-value=1.000e-40, raw score of 21.51
MKTILSNQTVDIPENVNVTLKGRTVIIKGPRGTLRKDFNHINVELRLLGKKKKRLRVDKWWGNRKELATVRTICSHNGSLVEIRNFLGEKYIRRVQMRPGVACSVPQAQKDELILEGNDTELVSNSAALIQQPTTVKNKDIRKFLDGIYVSEKGTVQQVDESDLRVIQLQKEDAR

SEQ ID NO: 8230 - protein, 236 aa, Homo sapiens
  DOMAIN (39)..(58): Ribosomal protein L6 proteins domain identified by eMATRIX, accession number BL00525A, p-value=6.769e-10, raw score of 11.57
  misc_feature (1)...(236): Xaa = X or * as defined in Table 2
EWSSVRRSLVEKRALRRPHPQCLCFRMKTILSNQTCRPFPENVDITLKGRTVIVKGPREGTLRRDFNHINVELSLLWKEKKRGFRVDKWWGNRKELATGRDXFVSHVQNMIKGCYTGASGYKMKVLWYAHFPIQRLLFQGELGPSLLKSRNFLGGWKNTSRRVSGXGPGCLLVSVSQGPRKDEINPLKGNDIELVSKFQRALIQQATTVKNKGIRKFFGWVSMSLEKGTVQPGLIE

SEQ ID NO: 8231 - protein, 35 aa, Homo sapiens
VGIKMSISSDEVNFLVYRYLQESGFSHSAFTFGIE

SEQ ID NO: 8232 - protein, 57 aa, Homo sapiens
EPSLSQLPQNGDLLAARRREHPACSTGCTSGARVRSRVWRAGQALVPGCAGCAYILH

SEQ ID NO: 8233 - protein, 137 aa, Homo sapiens
QLSHKSDSVVLVSQSRQRTCRRKYPNYGRRNRSWRELSSGNESSSSVRHETSCDQSEGSGSSEEDEWRSDRKSESYSESSSDSSSRYSDWTADAGINLQPPLRTSCRRRITRFCSSSEDEISTENLSPPKRRRKRKK

SEQ ID NO: 8234 - protein, 847 aa, Homo sapiens
  DOMAIN (186)..(197): Trp-Asp (WD) repeat proteins proteins domain identified by eMATRIX, accession number BL00678, p-value=1.600e-10, raw score of 9.67
LSMSEEIILHPVVLSLALGGPLQCISSRAALALVFGPYAVGEGLWEKIVVLSNKHVAPDHLLQICQRIGPMLDKEIPPSISRVTSLLGAGRQSLLRTAKDCRHTVWKGSAFAALHRGRPPEMPVNYGSPPNLVEIHRGKQLTGCSTFSTAFPGTMYQHIKMHRRILGHLSAVYCVAFDRTGHRIFTGSDDCLVKIWSTHNGRLLSTLRGHSAEISDMAVNYENTMIAAGSCDKIIRVWCLRTCAPVAVLQGHTGSITSLQFSPMAKGSQRYMVSTGADGTVCFWQWDLESLKFRFLSGSRDGTARIWRFEQLEWRSILLDMATRISGRIQWFWYHSLDKGHVGVNIQIMVEEIVAGETSCDQSEGSGSSEEDEWRSDRKSESYSESSSDSSSRYSDWTADAGINLQPPLRTSCRRRITRFCSSSEDEISTENLSPPKRRRKRKKENKPKKEIWQDRRQLGIATVVWDVAMVLSTHLEMGAVELLGCPAVKLGAGIGLMGIVAALLGAHVTVIDRKNLRRMTPAELANMEHLYEFHPPVWITDTTLRKSPFVPQMGDEVIYFRQGHEAYIEAVRRNNIYELNPNKEPWRKMDLRLKKEFHILASGKDVGLLTVIQIAGGDQELVKIVGIRYEVGPPTLCCLKLAFIDPATGKLMDKSFSIRYHDMPDVIDFLVLRQFYDEARQRNWQSCDRFRSIIDDAWWFGTVLSQEPYQPQYPDSHFQCYIVRWDNTEIEKLSPWDMEPIPDNVDPPEELGASISVTTDELEKLLYKPQAGEWGQKSRDEECDRIISGIDQLLNLDIAAAFAGPVDLCTYPKYCTVVAYPTDLYTIRMRLVNRFYRLVETCFQNV

SEQ ID NO: 8235 - protein, 84 aa, Homo sapiens
  DOMAIN (14)..(42): !!!! PROTEIN ALU SUBFAMILY WARNING ENTRY NUCLEAR PHOSPHO domain identified by eMATRIX, accession number PD02454B, p-value= 5.213e-26, raw score of 11.61
  misc_feature (1)...(84): Xaa = X or * as defined in Table 2
SQHSGRPRQADHLRSGVRDQPGQHGEILSLLKIQKLAGRAGSRLXSQLLERLRLYHRTPAXVTEXDMASKNKKKPHRIQARKYF

SEQ ID NO: 8236 - protein, 113 aa, Homo sapiens
  DOMAIN (27)..(55): !!!! PROTEIN ALU SUBFAMILY WARNING ENTRY NUCLEAR PHOSPHO domain identified by eMATRIX, accession number PD02454B, p-value= 3.063e-25, raw score of 11.61
  misc_feature (1)...(113): Xaa = X or * as defined in Table 2
LTQELPGAEAHACNPSTLGGQGGQIMRSGARDQPGQHSGTPSLLKIQKLAGRGGTHLXSQLLRRLRQENRLNLGSGGCSELRLRHCTPAWVTDSVSKKNELEKESYLIFSSLT

SEQ ID NO: 8237 - protein, 76 aa, Homo sapiens
  misc_feature (1)...(76): Xaa = X or * as defined in Table 2
WAGRGGSRLXSQHFGRPRRADHERWKNTWELRQLNLGQAPCSRNGMRRYGERRHHPDEPGQPSVEGFLRVLSMCIC

SEQ ID NO: 8238 - protein, 110 aa, Homo sapiens
  DOMAIN (33)..(61): !!!! PROTEIN ALU SUBFAMILY WARNING ENTRY NUCLEAR PHOSPHO domain identified by eMATRIX, accession number PD02454B, p-value= 6.727e-11, raw score of 11.61
  misc_feature (1)...(110): Xaa = X or * as defined in Table 2
GQLYEKLGRRGPGAVAHACNPSTLGGRGGWITRSGDRDHPGXHGETPSLLKIQKKLAGRGGGHLXSQLLGRLRQENGVNPGARGCSELRSCYCTPAWGTERDSVSKKKKK

SEQ ID NO: 8239 - protein, 111 aa, Homo sapiens
  DOMAIN (35)..(63): !!!! PROTEIN ALU SUBFAMILY WARNING ENTRY NUCLEAR PHOSPHO domain identified by eMATRIX, accession number PD02454B, p-value= 5.755e-23, raw score of 11.61
  misc_feature (1)...(111): Xaa = X or * as defined in Table 2
FKLTSSRNVPPTGPGAVAHACNPQHFGRPRQVDHLRSGVXDQPGQHGETPSLLKIQKLAGHGGVHLXSXLLRRLRQENRLNLGGGGCSEPRSHHCTPAWTTGXDSASKKKK

SEQ ID NO: 8240 - protein, 101 aa, Homo sapiens
  DOMAIN (14)..(42): !!!! PROTEIN ALU SUBFAMILY WARNING ENTRY NUCLEAR PHOSPHO domain identified by eMATRIX, accession number PD02454B, p-value= 7.828e-21, raw score of 11.61
SQHFGRPRRADHLRSGVRDWPGQHGEALSLLKIQKLAECGGVCLWSQLLRRLRQGNRLNLGDRGCSEPRSYRCTPAWVTEQDSVSGKRKEKGMKRKKKKKK

SEQ ID NO: 8241 - protein, 97 aa, Homo sapiens
  DOMAIN (13)..(41): !!!! PROTEIN ALU SUBFAMILY WARNING ENTRY NUCLEAR PHOSPHO domain identified by eMATRIX, accession number PD02454B, p-value= 4.429e-19, raw score of 11.61
  misc_feature (1)...(97): Xaa = X or * as defined in Table 2
SQRFGRPGQANCLSSGVXDQPGQYGETLSLLKIQKLGGCGGTCLXSXLLGWLRQENHLNLGDGGCSEPRMCHCTPPWTTEGGSAXKLKKKKKKRKYL

SEQ ID NO: 8242 - protein, 74 aa, Homo sapiens
VNSHPKGATSEHLEPRGPTSKPLGRTGWTLSLRLGYSPSLQKAVTHSLGCLLVRALEKARSSAQLQTNYPSSDN

SEQ ID NO: 8243 - protein, 55 aa, Homo sapiens
HSPTPPTSPRASTMEDVKLEFPSLPQCKEDAEEWTYPMRREMQLPVLQKHGITHI

SEQ ID NO: 8244 - protein, 261 aa, Homo sapiens
SACVSCNPAALLLALRSAGPPSFLPPHPARGSAGCVTLSHPTHQPAGQHHGWTVKLEFPSLPQCKEDAEEWTYPMRREMQEILPGLFLGPYSSAMKKQDPSLLAVSSHGQENEFLPLLTRVQSCHGGFYPHDLNLKLIIFQRLHHHILGLPVLQKHGITHIICIRQNIEANFIKPNFQQLFSAAFVIAYIMETFGMKYRDAFAYVQERRFCINPNAGFVHQLQEYEAIYLAKLTIQMMSPLRDRKVIICSFWYHRQFEENT

SEQ ID NO: 8245 - protein, 308 aa, Homo sapiens
  DOMAIN (135)..(156): Nt-dnaJ domain proteins domain identified by eMATRIX, accession number BL00636B, p-value=9.667e-13, raw score of 15.11
MLRARPRPGSPWRPAREEPTGTGRALVVAGVAAPHQSRAPRLGRRRVRVLLSCTRCLGSARRGPPPGFEDGGVATGSDPAMASDGNAKACALHLPGASTCPVARATGSSATPTLRTTPGRETSYPKNNPNAHGDFLKINRAYEVLKDEDLRKKYDKYGEKGLEDNQGGQYESWNYYRYDFGKDGLVNVGWMDCATQDNLCKSLDITTSTTAYFPPGATLNNKEKNSILFLNSLDAKEIYLEVIHNLPDFELLSANTLEVGRFDCSSAPDICSNLYVFQPSLAVFKGQGTKEYEIHHEYLANSKLPFKT

SEQ ID NO: 8246 - protein, 89 aa, Homo sapiens
  DOMAIN (54)..(74): DNAJ PROTEIN FAMILY SIGNATURE domain identified by eMATRIX, accession number PR00625A, p-value=5.018e-13, raw score of 12.84
IRTCIRKRMGVWLNKDDYIRDLKMIILCCLIVYMAILVGTDHDYYSLLGVSNTASSRDIRQAFKRLASKLHPDKYPNNPYAHGDFLKIK

SEQ ID NO: 8247 - protein, 109 aa, Homo sapiens
  misc_feature (1)...(109): Xaa = X or * as defined in Table 2
NQRRKWRRSRTQLQTLQEALKAEIQGHQKLAAQMKQDPQNADLXKQLYELQAKITALSEKQKRVVEQLRKNLIVKQEQPDKFQIQPLPQSDNKLRTAQQQPLQQLQQQQ

SEQ ID NO: 8248 - protein, 109 aa, Homo sapiens
RMELQTLQEALKVEIQVHQKLVAQMKQDPQNADLKKQLHELQAKITALSEKQKRVVEQLRKNLIVKQEQPDKFQIQPLPQSENKLQTAQQQPLQQLQQQQQYHHHHAQQ

SEQ ID NO: 8249 - protein, 86 aa, Homo sapiens
  misc_feature (1)...(86): Xaa = X or * as defined in Table 2
MAEQSLISGGPKPKSVNSLRWINLXXXXXXXXXXXXXXXSXXXXXXXXXXXXXXXXXXXXXXXXXXXXXXXXXXXXXXXXXSWVDK

SEQ ID NO: 8250 - protein, 108 aa, Homo sapiens
  misc_feature (1)...(108): Xaa = X or * as defined in Table 2
GQILALMPKGGGQGGILTYPNPPLPGXNNFPGLTPPRTGINGLGPPGRVNFGIFKKKGGFPPGARGVXNPGPRGASSPGFPKGRGXSPPPQGPFKPLKRFPDLPIFPR

SEQ ID NO: 8251 - protein, 66 aa, Homo sapiens
KKYLKSWVMEGGACSEPSLHHCTPAWVTERDSVSKKIKNKMGLTNYLIKSDNTISQGGRGGYSHAR

SEQ ID NO: 8252 - protein, 110 aa, Homo sapiens
QQQQQGVVGTEQKDPYASCLCWEAPLPQGPTQVSQERHWFPLSLLTCFSALRRGAWSPSPRRTHPQEQCGLWGRPPLEEPPHPLSERTRRPPVTPAEAEPCLPTPKHSVY

SEQ ID NO: 8253 - protein, 111 aa, Homo sapiens
GLQIIQSLCLVAFWKKRVFGGQAGWLAESWLMLGWLVFPLILASQMYVPGKLHDVEHVLIDVGTGYYVEKVSESMLDAPLNREGKFRGSSIAQHGQRESPFSPLFTSDLVE

SEQ ID NO: 8254 - protein, 158 aa, Homo sapiens
  DOMAIN (103)..(123): AROMATIC-L-AMINO-ACID DECARBOXYLASE SIGNATURE domain identified by eMATRIX, accession number PR00800A, p-value=9.565e- 09, raw score of 15.23
LPNMAQSINITELNLPQLEMLKNQLDQEVEFLSTSIAQLKVVQTKYVEAKDCLNVLNKSNEGKELLVPTDGVLCMSPGKLHDVEHVLIDVGTGYYVKKTAEDAKDFFKRKIDFLTKQMEKIQPALQEKHAMKQAVMEMMSQKIQQLTALGEAQATAKA

SEQ ID NO: 8255 - protein, 79 aa, Homo sapiens
NLRQRKQGSSSYSLRRAHGQFSRKFVGQFLLLLFFRHSLAVAQPTSFSGTISAHCSLHFLGSSDSPASASQAAGTTAPA

SEQ ID NO: 8256 - protein, 110 aa, Homo sapiens
  DOMAIN (44)..(84): Cell division protein domain identified by PFam, accession name GTP_CDC, E-value=3.4e-18, PFam score of 67.9
SPWYLWRTYLCREAVDSEVTCRKNVSFPLHMLLIFPIKFVSFLEKIERTVQIEASTVEIEERGVKLRLTVVDTPGYGDAINCRDWYAPPCPGICICLLNILHKFIDSVNE

SEQ ID NO: 8257 - protein, 389 aa, Homo sapiens
  DOMAIN (57)..(69): ABC transporters family proteins domain identified by eMATRIX, accession number BL00211A, p-value=3.118e-10, raw score of 12.23
  DOMAIN (49)..(347): Cell division protein domain identified by PFam, accession name GTP_CDC, E-value=1.3e-140, PFam score of 480.5
  misc_feature (1)...(389): Xaa = X or * as defined in Table 2
SVDLVIHPLWPPEVLGLQQQPTQFINPETPGYVGFANLPNQVHRKSVKKGFEFTLMVVGESGLGKSTLSXNSLFLTDLYPERVIPGAAVXFFSRKNXKELVQIEASTVEILRARGSSLRLASGXDTPGYGXPLFNCRDCFXGQFISYYLMRQFXGGYLHDESGLNRRHIIDNRVHCCFHFISPFGHGLQPLDVAFMKAIHNKVNIVPVIAKADTLTLKERERLKKRILDEIEEHNIKIYHLPDAESDEDEDFKEQTRLLKASIPFSVVGSNQLIEAKGKKVRGRLYPWGVVEVENPEHNDFLKLRTMLITHMQDLQEVTQDLHYENFRSERLKRGGRKVENEDMNKDQILLEKEAELRRMQEMIARMQAQMQMQMQGGDGDGGALGHHV

SEQ ID NO: 8258 - protein, 75 aa, Homo sapiens
PSKRDFADGINVFWFFGVFFETESHSVTQARVQRCKHSSLHPRVPSPRPSSHVSCPVAGTIGTRHYVQLILKNFL

SEQ ID NO: 8259 - protein, 88 aa, Homo sapiens
PINMSCERKGLSELRSELYFLIARFLEDGPCQQAAQVLIREVAEKELLPRRTDWTGKEHPRTYQNLVKYYRHLAPDHLLQICHRLRPL

SEQ ID NO: 8260 - protein, 49 aa, Homo sapiens
CLKEKAQGSPFALPFCHVRMQQKGIIFEADGKPSPDTESAGTLILDFPA

SEQ ID NO: 8261 - protein, 108 aa, Homo sapiens
  misc_feature (1)...(108): Xaa = X or * as defined in Table 2
ADPMSPSSKSPNMEAVLWIPDTNIVLXSLKVYPSSXTIKSWLGTCGSRLXCQHFGRPRRVDHEVKRLRPSXPTWRTPSLLRTTKISRAWWHTSVVPATREAEAGESLE

SEQ ID NO: 8262 - protein, 80 aa, Homo sapiens
MNRDRTSRNRCVCDVFRNAVKGQTVLGRQLFIGRVRVPVRPGEGFLPWGFLPVSPWCPSWGLSTHALWWAEAVPGRALVH

SEQ ID NO: 8263 - protein, 197 aa, Homo sapiens
  misc_feature (1)...(197): Xaa = X or * as defined in Table 2
RTRGRTRGLLPSGAFEPEAAGSATAPRGCKNPGAKGGLLAAMAGRQDIFHAIVKADERFHGEGYREGYEKGSILGVKEGRQHGTLHGAKIGTEIGRYQRFAFAWKCLLHIAPLRRTAXTXRSXHAWIGRIQIFPYDDPTYDKLHEDLDKIRGKFKQVRALCVSSCXEHLIAPFPGGAAHSRGRCGNGLGLRAPRNCP

SEQ ID NO: 8264 - protein, 102 aa, Homo sapiens
VGGPGQFLAISLTHLIGEAPSPACLAHSTQQGLPGEALHFHVTFELQLQSPCPHGGLRQVPQGPLQGPPGLLSLPGPPPHCLGPHPAPGWWVGGPALGSACA

SEQ ID NO: 8265 - protein, 35 aa, Homo sapiens
SLWILPFLFVFFSFETRSRSVVQAGVQWCNHSLLR

SEQ ID NO: 8266 - protein, 130 aa, Homo sapiens
  DOMAIN (15)..(53): Dehydrogenase E1 component domain identified by eMATRIX, accession number PF00676B, p-value=7.900e-25, raw score of 24.71
  DOMAIN (1)..(130): Dehydrogenase E1 component domain identified by PFam, accession name E1_dehydrog, E-value=4.2e-11, PFam score of 14.4
KGGSMHMYAKNFYGGNGIVGAQGQIFEAYNMAALWKLPCIFICENNRYGMGTSVERAAPSTDYYKRGDFIPGLRVDGMDILCVREATRFAAAYCRSGKGPILMELQTYRYHGHSMSDPGVSYRTREEIQE

SEQ ID NO: 8267 - protein, 27 aa, Homo sapiens
LLPGPDISKLYNMAALWKLPCIFICEN

SEQ ID NO: 8268 - protein, 262 aa, Homo sapiens
  DOMAIN (118)..(156): Dehydrogenase E1 component domain identified by eMATRIX, accession number PF00676B, p-value=2.800e-39, raw score of 24.71
  DOMAIN (8)..(262): Dehydrogenase E1 component domain identified by PFam, accession name E1_dehydrog, E-value=9.6e-56, PFam score of 198.6
KQISCINRKLFVVSVTCVMVRKLAVWAWRPASTPQTISSQPTGLTALLSPGAFPSEKFSQSLQDEKEVVLKGKEDRCTCMPRTSTGAMASWERRCPWAAGIALACKYNGKDEVCLTLYGDGAANQGQIFEAYNMAALWKLPCIFICENNRYGMGTSVERAAASTDYYKRGDFIPGLRVDGMDILCVREATYIGRAYCRSGKGPILMELQTYRYHGHSMSDPGVSYRTREEIQEVRSKSDPIMLLKDRMVNSNLASVEELKGI

SEQ ID NO: 8269 - protein, 168 aa, Homo sapiens
ELSTPLCWDSKLIGYGSAAQHLPYLTSLLPMKLLQYCLADAWVAEIGLAFNILEMVVFAFATITPLMFTGYGLLFLSLVITPVIRAKLSKLVRETEQGALFSAEACVNSLTMLTASGIFNSLYPATLNFMKGVPFLLGAGLMLIPAVLIEMLEQADPHLEFQQVPQSP

SEQ ID NO: 8270 - protein, 485 aa, Homo sapiens
MEGSASPPEKPRARPAAAVLCRGPVEPLVFLANFALVLQGPLTTQYLWHRFSADLGYNGTRQRGGCSNRSADPTMQEVETLTSHWTLYMNVGGFLVGLFSSTLLGAWSDSVGRRPLLVLASLGLLLQALVSVFVVQLQLHVGYFVLGRILCALLGDFGGLLAASFASVADVSSSRSRTFRMALLEASIGVAGMLASLLGGHWLRAQGYANPFWLALALLIAMTLYAAFCFGETLKEPKSTRLFTFRHHRSIVQLYVAPAPEKSRKHLALYSLAIFVVITVHFGAQDILTLYELSTPLCWDSKLIGYGSAAQHLPYLTSLLALKLLQYCLADAWVAEIGLAFNILGMVVFAFATITPLMFTGSIYRFQGYESDAIGHHYSASYASEPSCDEGLIIFLIQGVRIREGYGLLFLSLVITPVIRAKLSKLVRETEQGALFSAVACVNSLAMLTASGIFNSLYPATLNFMKGFPFLLGAGLLLIPAVLIG

SEQ ID NO: 8271 - protein, 110 aa, Homo sapiens
QVAKPRQGQSPFLLDYCLPTLTIKEVLPGSNLSPTWGMDRSSAAFPLDAPLPSPIFLMSVCFSTGYGLLFLSLVITPVIRAKLSKLVRETEQGECQNPPVCGSSCPGIRR

SEQ ID NO: 8272 - protein, 199 aa, Homo sapiens
  DOMAIN (84)..(198): Cell division protein domain identified by PFam, accession name GTP_CDC, E-value=6.9e-22, PFam score of 81.0
  misc_feature (1)...(199): Xaa = X or * as defined in Table 2
AGSSVSLGFCPAAAAHKPRGGALRLPVFRRRAQQGPDYALAGVARQPAGTCRRRCNRSHCRAEDPQWPTPAAAPAAHSPHMSLGESGLGKLILINSLFLTDLYSPEYPGPSQRIKKPVQVYILVFLIDDKLEXYXYTQSTCCNFHYASQSWQPAINYIDSKFEDYLNAESRVNRCQMPGNRVQGCLYFIAPSGHGPLHN

SEQ ID NO: 8273 - protein, 75 aa, Homo sapiens
  misc_feature (1)...(75): Xaa = X or * as defined in Table 2
RHCSSGMEIPPTNYPASRADLVAQNYINYQHGTPHRVFEVHNAYRVIMQDMSGXGHLVSPSSRFFLHSFATSLFE

SEQ ID NO: 8274 - protein, 53 aa, Homo sapiens
MEETPCRELEEEEEWGSGSEDASKKDGAVESISVPDMVDKNLTCPEEEDTVKV

SEQ ID NO: 8275 - protein, 57 aa, Homo sapiens
  misc_feature (1)...(57): Xaa = X or * as defined in Table 2
VPNLQVGDEKQDSPNGEHWHGQEDSTAEPAEVKAMMSVAVVXKNLTTPPPLLGRSSV

SEQ ID NO: 8276 - protein, 66 aa, Homo sapiens
PTWPVGTWHESAPTQMPLPSLSSECCVPPGMACSWTGLNRSTRRKQERQVPPLWRWPSARRCLRWP

SEQ ID NO: 8277 - protein, 416 aa, Homo sapiens
  DOMAIN (199)..(219): EOSINOPHIL MAJOR BASIC PROTEIN SIGNATURE domain identified by eMATRIX, accession number PR00770F, p-value=1.250e-26, raw score of 13.79
  DOMAIN (153)..(416): Lectin C-type domain identified by PFam, accession name lectin_c, E-value=0.021, PFam score of -0.0
SFNIRGPHSLCFPNHHLPHATYRDKAKMKLPLLLALLFGAVSALHLRSETSTFETPLGAKTLPEDEETPEQEMEETPCRELEEEEEWGSGSEDASKKDGAVESISVPDMVDKNLTCPEEEDTVKVVGIPGCQTCRYLLVRSLQTFSQAWFTCRRCYRGNLVSIHNFNINYRIQCSVSALNQGQVWIGGRITGSGRCRRFQWVDGSRWNFAYWAAHQPWSRGGHCVALCTRENDAPHLESLETQADLGQDLDSSKEQERDLALTEEVIQAEGEEVKASACQDNFEDEEAMESDPAALDKDFQCPREEDIVEVQGSPRCKTCRYLLVRTPKTFAEAQNVCSRCYGGNLVSIHDFNFNYRIQCCTSTVNQAQVWIGGNLRGWFLWKRFCWTDGSHWNFAYWSPGQPGNGQGSCVALCTK

SEQ ID NO: 8278 - protein, 653 aa, Homo sapiens
  DOMAIN (238)..(291): ATP P2X receptors proteins domain identified by eMATRIX, accession number BL01212A, p-value=4.825e-31, raw score of 34.89
  DOMAIN (238)..(332): ATP P2X receptor domain identified by PFam, accession name P2X_receptor, E-value=5.7e-52, PFam score of 186.1
PGVGLSVIQLWHYLFIGTLNSLLTNMAGGDMARVSTYTNAFAFTQFGVLCAPWNGLLMDRLKQKYQKEARKTVPPLLPRRQRRRGHRAVRLKLRGGRVLHAEKTPAPARLRAGPTGLRTRRESVALPEASAAAGCSFAGDRRLGASMAPTLQQAYRRRWWMACTAVLENLFFSAVLLGWGSLLIILKNEGFYSSTCPGKSEKEDRDGKREGLIHVVPLWLKAVGRRQYSPPTFNRAPLPARWVFLHEKAYQVRDTAIESSVVTKVKGSGLYANRVMDVSDYVTPPQGTSVFVIITKMIVTENHMQGFCPESEEKYRCVSDSQCGPERLPGGGSETSTFETPLGAKTLPEDEETPEQEMEETPCRELEEEEEWGSGSEDASKKDGAVESISVPDMVDKNLTCPEEEDTVKVVGIPGCQTCRYLLVRSLQTFSQAWFTCRRCYRGNLVSIHNFNINYRIQCSVSALNQGQVWIGGRITGSGRCRRFQWVDGSRWNFAYWAAHQPWSRGGHCVALCTRGSSTLAVALCSTVPSLALTSLLCLGFALCASVPILPLQYLTFILQVISRSFLYGSNAAFLTLAFPSEHFGKLFGLVMALSAVVSLLQFPIFTLIKGSLQNDPFYVNVMFMLAILLTFFHPFLVYRECRTWKESPSAIA

SEQ ID NO: 8279 - protein, 435 aa, Homo sapiens
  DOMAIN (160)..(184): EOSINOPHIL MAJOR BASIC PROTEIN SIGNATURE domain identified by eMATRIX, accession number PR00770A, p-value=1.231e-24, raw score of 13.71
  misc_feature (1)...(435): Xaa = X or * as defined in Table 2
ACALGMAPQRKRRKQLSMKTGSYSQRSSFQRRKRPQGQGRSRNSAPSGATLSLGALAWHLEWLSVIQLWHYLFIGTLNSLLTNMAGGDMARVSTYTNAFAFTQFGVLSAPWNGLLMDRLKQKYQKEARKTGSFNIRGPHSLYFPNHHLPHATYRDKAKMKLPLLLALLFGAVSALHLRSETSTFETPLGAKTLPEDEETPEQEMEETPCRELGGRGREWGLWEVEDASQERWGLFESILQCPDMGGTKTFTCSXGKEGHQLKVGWGIPGGCPRPARYLPGXESLSRRFSSKLWFYFARSCYRGQTWVFHSTTFQYXLSESKCSVSALNQGQVWIGGRITGSGRCRRFQWVDGSRWNFAYWGAHQPWSRGGHCVALCTRGGYWARAHCLQKNFPFICFPLSWSQPAVQVVPSPGQLPPLLCLPSLPPPPCNNNGFY

SEQ ID NO: 8280 - protein, 115 aa, Homo sapiens
MAPEQDPKPKVQEGERVLCFHGPLLYEAKSVKVAIKDKQGKYFIHYRGWNKNWDEWLPESRVLKYLDTNLQKQRELQKANQKTKNNKQKTPGNGDGGSTRETPQPPRKKRARVDP

SEQ ID NO: 8281 - protein, 138 aa, Homo sapiens
MAPKQDPKPKFQEGERVLCFHGPLLYEAKCVKVAIKDKQVKYFIHYSGWNKKSAVRPRRSEKSLKTHEDIVALFPVPEGAPSVHHPLLTSSWDEWVPESRVLKYVDTNLQKQRELQKANQEQYAEGKMRGAAPGKRHL

SEQ ID NO: 8282 - protein, 30 aa, Homo sapiens
TVRIGAMLAYTPLDEKSLALLLNYLHDFLK

SEQ ID NO: 8283 - protein, 381 aa, Homo sapiens
  misc_feature (1)...(381): Xaa = X or * as defined in Table 2
GAVVGGGGRRRRRRITYKCLPKLDPKPKFQEGERVLCFHGPLLYEAKCVKVAIKDKQVKYFIHYRGWNKNWDEWVPESRVLKYVDTNLQKQRELQKANQEQYAEGKMRGAAPGKKTSGLQQKNVEVKTKKNKQKTPGNGDGGSTSETPQPPRKKRARVDPTVENEETFMNRVEVKVKIPEELKPWLVDDWDLITRQKQLFYLPAKKNVDSILEDYANYKKSRVGNTDNKEYAVLNEVVAGDXKNTFNVMLGTQLLYKFERPQYAEILADHPDAPMSPGVWSAQHLLEIIWYRIGAMLAYTPLDEKSLALLLNYLHDFLKYLAKNSATLFSASDYEVAPPEYHRKAVWKSTLTHLCLDLRKHIFVLSLSPWYKPMCFEDVSV

SEQ ID NO: 8284 - protein, 556 aa, Homo sapiens
  misc_feature (1)...(556): Xaa = X or * as defined in Table 2
SSGARWRFRAGSMGLFCQRKHSSSHPVLQKPSVFGNDSDDDDETSVSESLQREAAKKQAMKQTKLEIQKALAEDATVYEYDSIYDEMQKKKEENNPKLLLGKDRKPKYIHNLLKAVEIRKKEQEKRMEKKIQREREMEKGEFDDKEAFVTSAYKKKLQERAEEEEREKRAAALEACLDVTKQKDLSGFYRHLLNQAVGEEEVPKCSFREARSGIKEEKSRGFSNEVSSKKQNTTREMHSFKLMXKXRENPDADSYFDAKSSPDDKXKKLELTAEGKRSXRPLRMTSSTTGVKTTLGHLVKKEGTVPGTTRKDHERREDMRKGKISTSRSNPETKRTITLTVITGKKGILIGTERPVIEIPIGRGMNRKINQGRGTKEKEVTEYGKGRKIGRNIPKENKKEIDNKMIRTDPVRKERRKRKAKQRKRAYESKGGKVLKLLINTEIEKNERXVFSASERNQDQKGKQPKFQGQRINFLTNLDFIQNGETWQRTKERNQEKPSNSESSLGAKHRLTEEGQEKGKEQERPPEAVSKFAKRNNEETVMSARDRYLARQMASG

SEQ ID NO: 8285 - protein, 330 aa, Homo sapiens
  DOMAIN (247)..(283): APOLIPOPROTEIN PLASMA LIPID TRANSPORT H domain identified by eMATRIX, accession number PD01733C, p-value=9.719e-29, raw score of 16.89
  DOMAIN (14)..(312): Apolipoprotein A1/A4/E family domain identified by PFam, accession name Apolipoprotein, E-value=0.00012, PFam score of -7.7
  misc_feature (1)...(330): Xaa = X or * as defined in Table 2
WWNSEVPHGPFRMKAAVLTLAPVLFSDGXARRRHFWQGGXSPPRAAWDRVKDLATRVPWTVLKEQRTETYVSQFEGLRLGENSXTLKLLDNWDSVDLPPFSKLREHSFGPCXPRDFLGINLGKRETRGALRQGRLRQRIFGRRLKGPRLQPXLGDDFPRKKLARKEIGALTRQKGWSRLRARTSKKGARPESLHELARRSLSPLGEAVSRPRARPMWDALRTHLAPYSDEMSQRLGARLGALRENGGARMGQYHAQATEHLSTLSEKAKPALEDLRQGLLPVLESFKVSFLSALEEYTKKLNTQLRRPPPPPYPVLRINVSKVGKKKKKK

SEQ ID NO: 8286 - protein, 149 aa, Homo sapiens
  DOMAIN (33)..(55): Globins profile domain identified by eMATRIX, accession number BL01033A, p-value=3.250e-20, raw score of 16.94
  DOMAIN (9)..(149): Globin domain identified by PFam, accession name globin, E- value=2.1e-53, PFam score of 190.7
QTQREPTMVLSPADKTNVKAAWGKVGAHAGEYGAEALERMFLSFPTTKTYFPHFDLSHGSAQVKGHGKKVADALTNAVAHVDDMPNALSALSDLHAHKLRVDPVNFKLLSHCLLVTLAAHLPAEFTPAVHASLDKFLASVSTVLTSKYR

SEQ ID NO: 8287 - protein, 219 aa, Homo sapiens
  DOMAIN (39)..(61): Globins profile domain identified by eMATRIX, accession number BL01033A, p-value=3.250e-20, raw score of 16.94
  DOMAIN (29)..(64): Globin domain identified by PFam, accession name globin, E- value=2.4e-05, PFam score of 23.1
  misc_feature (1)...(219): Xaa = X or * as defined in Table 2
NSARATDSERTHHGARLLPDKTNVKAAWGKVGAHAGEYGAEALERMFLSFPTTKTYFPHFDLSHGSAQGXRAHGKKVADALTNAVAHVDDMPQTALSALSGPATAHKLRVDPVQLSSSXSHLPCWWTLGRPTSPSEFNPWRLHAFPGTKFPGLLVEAPLLEPSKLPLKLGSLRVGHAFFAPLGLPPRALLPFPGTRNPVGLLNKILNWGGKKKKKKKIF

SEQ ID NO: 8288 - protein, 216 aa, Homo sapiens
  misc_feature (1)...(216): Xaa = X or * as defined in Table 2
KIFLSDCLACDSCMTAEKGVQLSQQNAKDFFRVLNLNKKCDTSKHKVLVVSVCPQSLPYFAAKFNLSVTDASRRLCGFLKSLGVHYVFDTTIAADFSHRWRMLKWQRPSPDSRRTCGXGPAAADGRHLRXHPCAASGVQCKRAGAVPGVAGGDQLPQGPRGAAYHVPEPGAWHTQPGHQVVKSGQGLPAALGARAKSLSVEGGAALSGVLKTLKKT

SEQ ID NO: 8289 - protein, 124 aa, Homo sapiens
CPQEVWFHSFCHCTSAFMKDLYFLCLVRFGDLKEDKVTRHDGASSDGHLAHIFRHAAKELFNEDVEEVTYRALRNKDFQEVTLEKNGEVVLRFAAAYGFRNIQNMILKLKKGSSIHFVRSRCLE

SEQ ID NO: 8290 - protein, 521 aa, Homo sapiens
  misc_feature (1)...(521): Xaa = X or * as defined in Table 2
TPLGRRRRRKTHDKRKPGQGPGPPGAECSKKTKADDQENVSADAPSPAQENGEKGEFHKLADAKIFLSDCLACDSCMTAEEGVQLSQQNAKDFFRVLNLNKKCDTSKHKVLVVSVCPQSLPYFCWLNFNLSVTDASRRLCGFLKSLGVHYVFDTTIAADFSILESQKEFVRRYRQHSEGGNAPCPMLTSACPGLWVRYAGAGCWGRPITGHTFLAPPKSPQQVMGSLVKDYFARQQNLSPEKIFPRSLVAPCYDKKLEALQGKPFPLALHGSRGRLTCVLTSGEICFKLMEQGDLSVRDAAVDTLFGDLKKDKVTRHDGASSNGHLAHIFRHAAKELFNERDVEEVTYRTLRNQRFPQKVTLEEEPKRWVXTFVLEPYAFRNIPETXSLKPLKKGKVPPFHFVEGSSPCAGGCLNGKRPKPKIQDGHGDKAPAAGRMEGIYSLDIPVRRPESSAHVQELYQEWLEGINSPKARKVLHTTYQSQERGTHSLGHSSWLKFRPGPSSCSWGQSQEPLSRGRGLP

SEQ ID NO: 8291 - protein, 55 aa, Homo sapiens
  misc_feature (1)...(55): Xaa = X or * as defined in Table 2
IMKLITILFLXCRLLLSLTQESQSAEIDLLDNDLFLAEEAGLYRYIMQIQTNPRI

SEQ ID NO: 8292 - protein, 152 aa, Homo sapiens
  DOMAIN (36)..(58): Globins profile domain identified by eMATRIX, accession number BL01033A, p-value=3.250e-20, raw score of 16.94
  DOMAIN (12)..(152): Globin domain identified by PFam, accession name globin, E- value=4.1e-56, PFam score of 199.9
RPRRPQREPTMVLSPADKTNVKAAWGKVGAHAGEYGAEALERMFLSFPTTKTYFPHFDLSHGSSQVKGHGKKVADALTNAVGHVDDMPNALSALSDLHAHKLRVDPVNFKLLSHCLLVTLAAHLPAEFTPAVHAFLDKFLASVSTVLTSKYR

SEQ ID NO: 8293 - protein, 144 aa, Homo sapiens
  DOMAIN (33)..(55): Globins profile domain identified by eMATRIX, accession number BL01033A, p-value=3.250e-20, raw score of 16.94
  DOMAIN (9)..(107): Globin domain identified by PFam, accession name globin, E- value=3.6e-36, PFam score of 130.6
QTQREPTMVLSPADKTNVKAAWGKVGAHAGEYGAEALERMFLSFPTTKTYFPHFDLSHGSAQVKGHGKKVADALTNAVEHVDDMPNALSALSDLHAHKLRVDPVNFQAPKATGLLVDPGPAHFPGRVSPLRLQGFLGTKFLGFC

SEQ ID NO: 8294 - protein, 125 aa, Homo sapiens
  DOMAIN (39)..(61): Globins profile domain identified by eMATRIX, accession number BL01033A, p-value=3.250e-20, raw score of 16.94
  DOMAIN (29)..(64): Globin domain identified by PFam, accession name globin, E- value=2.4e-05, PFam score of 23.1
  misc_feature (1)...(125): Xaa = X or * as defined in Table 2
NSARATDSERTHHGARLLPDKTNVKAAWGKVGAHAGEYGAEALERMFLSFPTTKTYFPHFDLSHGSAQVKGPTAKKVAERADQTPWRNVDDMPKRRCPPXSDLHAHKLRVDPVQLSSSXSHLPCW

SEQ ID NO: 8295 - protein, 149 aa, Homo sapiens; identical to SEQ ID NO: 8286
  DOMAIN (33)..(55): Globins profile domain identified by eMATRIX, accession number BL01033A, p-value=3.250e-20, raw score of 16.94
  DOMAIN (9)..(149): Globin domain identified by PFam, accession name globin, E- value=4.6e-57, PFam score of 203.0

SEQ ID NO: 8296 - protein, 200 aa, Homo sapiens
  DOMAIN (36)..(58): Globins profile domain identified by eMATRIX, accession number BL01033A, p-value=3.250e-20, raw score of 16.94
  DOMAIN (26)..(115): Globin domain identified by PFam, accession name globin, E- value=2.4e-09, PFam score of 37.1
  misc_feature (1)...(200): Xaa = X or * as defined in Table 2
NSTDSERTHHGARLLPDKTNVKAAWGKVGAHAGEYGAEALERMFLSFPTTKTYFPHFDLSHGSAQVKGHGQKVADALTNAVAHVDDMPNALSALSDLHAHKLRVGPGSTFKLLKPLALLGXTLGRPPSPAEFQPLGGCKASLGTKFLGFLVEAPLLEPSKLPLKLGSLRLAMLSLPLWAFPPAPPPLSCTRTPVVFEIKS

SEQ ID NO: 8297 - protein, 177 aa, Homo sapiens
  misc_feature (1)...(177): Xaa = X or * as defined in Table 2
AFGTRELQCCVFLASMLGVPPIPTVQGFQWTLRGTDVETSPFGAPRATSHGVGQMKSCQIPQPLKIRMVKQNNIIPGETQILLRFTGWESKVNAKKQPPVGIKCEPMDQGNEQTGGHETDGHRIGSVVVSAATQECLIXNTTRNVWTQXTKSNLTRCGPNEELPDPTALEDKDGQTK

SEQ ID NO: 8298 - protein, 144 aa, Homo sapiens
STLIGSSSHVEWEDAVHIIPQNESDDEEEEEKGPVSPRNLQESEEEEVPQESWDEGHRWDQVKKEDQEATGPRLSRELLDEKEPEVLQDSLDRCYSTPSVYLGLTDSCQPYRSAFYVLEQQRIGLAVDMDEIEKCQEVEEDQDP

SEQ ID NO: 8299 - protein, 43 aa, Homo sapiens
MHKRNFHRAGRSQAVQDNWKELNNIYPVSPARLQALLPPAAPC

SEQ ID NO: 8300 - protein, 94 aa, Homo sapiens
  misc_feature (1)...(94): Xaa = X or * as defined in Table 2
RQTRWCPVVRLSHYRTLGGCCHLRRGRGVAXVRGPQSGTISSVENTPPWRRVSCFPAPNITCKDSSGNETHFTGNEVGFFKPISCRNVNGYSYK

SEQ ID NO: 8301 - protein, 31 aa, Homo sapiens
LMEVEEPEVLQDSLDICYSTPSMYFELPDNC

SEQ ID NO: 8302 - protein, 40 aa, Homo sapiens
  misc_feature (1)...(40): Xaa = X or * as defined in Table 2
DLLCPQMGXGWKLTALSLQCSLQDGIERSRAKASQCCLSI

SEQ ID NO: 8303 - protein, 16 aa, Homo sapiens
VTSLHLVFQMGVIFPQ

SEQ ID NO: 8304 - protein, 892 aa, Homo sapiens
SAVGSDHIFHNIPDSTSSATNVSMVVSAGPWSSEKAEMNILEINEKLRPQLAENKQQFRNLKERCFLTQLAGFLANRQKKYKYEECKDLIKFMLRNERQFKEEKLAEQLKQAEELRQYKVLVHSQERELTQLREKLREGRDASRSLNEHLQALLTPDEPDKSQGQDLQEQLAEGCRLAQQLVQKLSPENDEDEDEDVQVEEDEKVLESSAPREVQKAEESKVPEDSLEECAITCSNSHGPCDSNQPHKNIKITFEEDKVNSTVVVDRKSSHDECQDALNILPVPGPTSSATNVSMVVSAGPLSSEKAEMNILEINEKLRPQLAEKKQQFRSLKEKCFVTQLAGFLAKQQNKYKYEECKDLIKSMLRNELQFKEEKLAEQLKQAEELRQYKVLVHSQERELTQLREKLREGRDASRSLNEHLQALLTPDEPDKSQGQDLQEQLAEGCRLAQHLVQKLSPENDEDEDEDVQVEEDEKVLESSSPREMQKAEESKVPEDSLEECAITCSNSHGPCDSNQPHKNIKITFEEDKVNSSLVVDRESSHDECQDALNILPVPGPTSSATNVSMVVSAGPLSSEKAEMNILEINEKLRPQLAEKKQQFRSLKEKCFVTQVACFLAKQQNKYKYEECKDLIKSMLRNELQFKEEKLAEQLKQAEELRQYKVLVHSQERELTQLREKLREGRDASRSLNEHLQALLTPDEPDKSQGQDLQEQLAEGCRLAQHLVQKLSPENDNDDDEDVQVEVAEKVQKSSSPREMQKAEEKEVPEDSLEECAITCSNSHGPYDSNQPHRKTKITFEEDKVDSTLIGSSSHVEWEDAVHIIPENESDDEEEEEKGPVSPRNLQESEEEEVPQESWDEGYSTLSIPPERHRWDQVKKEDQEATGPRLSRELLA

SEQ ID NO: 8305 - protein, 987 aa, Homo sapiens
MLRNERQFKEEKLAEQLKQAEELRQYKVLVHAQERELTQLREKLREGRDASRSLNEHLQALLTPDEPDKSQGQDLQEQLAEGCRLAQHLVQKLSPENDNDDDEDVQVEVAEKVQKSSAPREMQKAEEKEVPEDSLEECAITCSNSHGPYDSNQPHRKTKITFEEDKVDSTLIGSSSHVEWEDAVHIIPENESDDEEEEEKGPVSPRNLQESEEEEVPQESWDEGYSTLSIPPEMLASYKSYSSTFHSLEEQQVCMAVDIGSEYSIVKVIKLQFMAQSQAMPVPTWTDCHDIELKAGHRWDQVKKEDHEATGPRLSRELLDEKGPEVLQDSLDRCYSTPSGCLELTDSCQPYRSAFYVLEQQRVGLAVNMDEIEKYQEVEEDQDPSCPRLSRELLDEKEPEVLQDSLGRCYSTPSGYLELPDLGQPYSSAVYSLEEQYLGLALDVDRIKKDQEEEEDQGPPCPRLSRELLEVVEPEVLQDSLDRCYSTPSSCLEQPDSCQPYGSSFYALEEKHVGFSLDVGEIEKKGKGKKRRGRRSKKERRRGRKEGEEDQNPPCPRLSRELLDEKGPEVLQDSLDRCYSTPSGCLELTDSCQPYRSAFYILEQQRVGLAVDMDEIEKYQEVEEDQDPSCPRLSGELLDEKEPEVLQESLDRCYSTPSGCLELTDSCQPYRSAFYILEQQRVGLAVDMDEIEKYQEVEEDQDPSCPRLSRELLDEKEPEVLQDSLGRCYSTPSGYLELPDLGQPYSSAVYSLEEQYLGLALDVDRIKKDQEEEEDQGPPCPRLSRELLEVVEPEVLQDSLDRCYSTPSSCLEQPDSCQPYGSSFYALEEKHVGFSLDVGENRSQEPLAGDSMSPRTLPVQNMSNAMFLQKTLNLSFIGVFEPKHIPVTFCDYHLAPTLVLVFGAVPGSWCLCLGHQEPGTARHQLEGRTHETSSVPCILRARPAGRLSKALEDRRDWSVAFGAAAELPLPSSDPVFRTGAPPEQGSW

SEQ ID NO: 8306 - protein, 341 aa, Homo sapiens
MVKQNNIIPGETQILVRFTGWESKVNAKKQPPVGIKCEPMDQEYEECKDLIKSMLRNERQFKEEKLAEQLKQAEELSMVVSAGPWSSEKAEMNILEINEKLRPQLAENKQQFGNLKERCFVTQLAGFLANQQKKYNYEECKDLIKFMLRNERQFKEEKLAEQLKQAEELRQYKVLVHSQERELTQLREKLREGRDASRSLNEHLQALLTLDEPDKSQGQDLQEQLAEGCRLAQHLVQKLSPENDEDEDEDVQVEEAEKVQKSSAPREVQKTEESKVPEDSLEECAITCSNSHGPCDSNQPHKNIKITFEEDEVNSTLVVDRESSHDECQDALNILPACMTE

SEQ ID NO: 8307 - protein, 740 aa, Homo sapiens
  misc_feature (1)...(740): Xaa = X or * as defined in Table 2
MSQSVQDNLKELNNIYPDHSSSPAMEQSRMENDFDELTEVGFRKLVITNFSELKEDVRTHRKEAKNLEKRLDEWPTRMNSVEKTLNDLMELKTMARELRDACTSFSSQFDQVQETPLKIRMVKQNNIISAESQILVRFTSWESNVNAKKQLPVGIKCEPMDQECIPGSRACTLLVRFSNGGPPMDPGSERKDLLQLGGELARTSRAVQEAGLGLSTGLWLAESRAKAALEKQALLQAQLEEQLRDKKDLAQQQMQSDLDKADLSARVTELGLAVKRLQKQNPEKDQVNTDLTEKLEALVQMLPLESQLPIPTSGTLTPPGYSLVWSPLCVGPGLGSRSGSPPIDCVTWGKTDSTMQAHEDAQREVQRLRSAKELLRRLSGMLMEVEEPEVLQDSLDRCYSTPSMYFELPDSFQHYRSVFYSFEEQHISFALDVDEXVSYFDGNKSPPGLPDGSHIPTPRTAGQARLLLHARRRIPQERTTTPKVSQLASWVSLGRQYLHPAGSLRWLXTTLPPTSSSMFPLCPQYPSEDSREAGIKKDQEEEEDQGPPCPRLSRELLEAVEPEVLQDSLDRCYSTPSSCLEQPDSCLPYGSSFYALEEKHVGFSLDVGGYLELTDSCQPYRSAFYILEQQRVGWALDMDEIEKYQEVEEDQDPSCPRLSRELLDEKEPEVLQDSLDRCYSTPSGYLELPDLGQPYRSAVYSLEEQYLGLALDVDEXVPYYEDEETEAQRSEDTGAGSHSW

SEQ ID NO: 8308 - protein, 422 aa, Homo sapiens
RTRVSFNLHVPIGPPCGNDISQLSNGHLEQEYDLYMEDSVDPYHLHRKKLKSTKKWKKTKTHHAPGNFEQLWMLNSVLTPGDAREVQKAEESKVPEDSLEECAITCSNSHGPCDSNQPHKNIKITFEEDEVNSTLVVDRESSHDEWQDALNILPEIEKYQEVEEDQDPSCPREVQKAEESKVPEDSLEECAITCSNSHGPCDSNQPHKNIKITFEGYRARIRIMGALGGPRITDGIAQCMEMAQQDEGPACGNDVSRVSKGHLEQEYHPYLEDQVEAYHLHSKVLTVHVKSQAKVPSMGPDPSFSEAPKLSRELLDEKGPEVLQDSLDRCYSTPSGCLELTDSCQPYRSAFYVLEQQHVGLAVDMDDPRQYLGLALDVDSEYLTVKVISLHVVFQIGVIFLFQVPLTDPRDVIAAGRTYGRI

SEQ ID NO: 8309 - protein, 35 aa, Homo sapiens
MGPLTLSSSSLHTETFLCPILTQGHQSCQCENRRL

SEQ ID NO: 8310 - protein, 411 aa, Homo sapiens
  DOMAIN (360)..(387): Profilin proteins domain identified by eMATRIX, accession number BL00414D, p-value=5.909e-10, raw score of 15.59
  DOMAIN (304)..(387): Profilins domain identified by PFam, accession name profilin, E-value=2.7e-10, PFam score of 41.6
MLQIPKQQQNEKYQVPQFDQSTIKNIESAKGLDVWDSWPLQNADGTVAEYNGYHVVFALAGSPKDADDTSIYMFYQKVGDNSIDSWKNAGRVFKDSDKFDANDPILKDQTQEWSGSATFTSDGKIRLFYTDYSGKHYGKQSLTTAQIHFPLISILSYATWGLSLLECIPGSPVCTLLVRFSNVGTRWSLEVRGRDFADFGTTIKQDFRLLGQTSVDRLLQLSQGQAVKGNQLLPVSLVKRKTTLAPNTQTASPRALADSLMQLARQVSRLESGHCLEQPDSCQPYGSSFYALEEKHVGFSLDVGGKTFLNITPAEVGVLVGKDWSSFVMNGLTLGGQKYTVVLDSLLQDGELTTDLCMKSIGGAPTFNVIVTMTAKTLGLLMGKEGICFQSIFTSHHSEFTVRERDWVALP

SEQ ID NO: 8311 - protein, 18 aa, Homo sapiens
  misc_feature (1)...(18): Xaa = X or * as defined in Table 2
MSPPQNKGPFPKSPGWFX

SEQ ID NO: 8312 - protein, 727 aa, Homo sapiens
  DOMAIN (524)..(537): OCTOPAMINE RECEPTOR SIGNATURE domain identified by eMATRIX, accession number PR00664E, p-value=6.959e-09, raw score of 5.28
SAVGSDHIFDNIPDSTSSATNVSMVVSAGPLSSEKAEMNILEINEKLHPQLAEKKQQFRNLKEKCFVTQLACFLANQQNKYKNEECKDLIKSMLRNERQFKEEKLAEQLKQAEELRQYKVLVHSQERELTQLREKLREGRDASCSLNQHLQALLTPDEPDKSQGQDLQEQLAEGCRLAQHLVQKLSPENDNDDDEDVQVEVAEKVQKSSAPREMPKAEEKEVPEDSLEECAITCSNSHGPYDSNQPHRKTKITFEEDKVDSTLIGSSSHVEWEDAVHIIPENESDDEEEEEKGPVSPRNLQESEEEEVPQESWDEGYSTLSIPPEMLASYKSYSGTFHSLEEQQVCMAVDIGGEYSIVKVIKLQFMAQSQAMPVPTWTDCHDIELKAGHRWDQVKKEDQEATGPRLSRELLDEKGPEVLQDSLDRCYSTPSGYLELTDSCQPYRSAFYILEQQRVGWALDMDGYRRTCPRSCSVPPPPGMPQNTRQRVSSPAPTRVGLRAAAAGEESSAGNSGPGGARPPTAPTRPRARATKLATAAPRPSCAPAGPGFTARPAWRGALTSETLGGLRVTSHSQGSRQPRRRASAQLLAPQIARPAFPKAPRSLRSSGSLATLTYASQYRRCLNRHPAPRLRLRLQPTGSSGSRWACQDNPRRRRGGALKGPGGLFCTTGSSRLGAAQAEERSNPGEGPSAAGTGKSLSPLRLSFKAPALDPPNRWFPRPLEQPLPG

SEQ ID NO: 8313 - protein, 539 aa, Homo sapiens
  misc_feature (1)...(539): Xaa = X or * as defined in Table 2
FPLAYSLLFPPCSRLSRELLEVVEPEVLQDSLDRCYSTPSSCLEQPDSCQPYGSSFYALEEKHVGFSLDVGEIEKKGKGKKRRGRRSTKKRRRRGRKEGEEDQNPPCPRLSRELLDEKGPEVLQDSLDRCYSTPSGYLELTDSCQPYRSAFYILEQQRVGWALDMDEIEKYQEVEEDQDPSCPRXLXAITDAXFCVDTWRCQVQGKQECVQFHVFNEGXITPTDIAVGFHCSRCLGFHFFLPLSFTHLLXVDHTSKAVWQLHGILSKFMENYXAHSFHDHCSLCVPRALTQSVLXPLHQCVTRPIRXAHFLLSLSLPLPVFLFHSFLPGPGLSQHKGNNSLPHXWICPFSFXTVPYVSHEIXLGLCGFXFPLAYSLLFPTCSRLSRELLDEKEPEVLQDSLDRCYSTPSGYLELPDLGQPYSSAVYSLEEQYLGLALDVDRIKKDQEEEEDQGPPCPRLSRELLEVVEPEVLQDSLDRCYSTPSSCLEQPDSCQPYGSSFYALEEKHVGFSLDVGEIEKKGKGKKRRGRRSKKKKKGRP

SEQ ID NO: 8314 - protein, 1577 aa, Homo sapiens
  misc_feature (1)...(1577): Xaa = X or * as defined in Table 2
HQELPDPTGPCGGRLLSLTIHGVTIRYHALLWARGPIMSKSQVLGEWEPVQGGKSSENDKWTMSDPGAEAPTCSRAASGVDKEQQGRWQGLWNSHIKPLKIRMVKQNNIIPGETQILLRFTGWESKVNAKKQLPVGIKCEPMDQENEQTGGHETDGHRIVSVLIHFPLISILSYATWGLSLLECIPGSPVCTLLVRFSNVGTRWSLEVRGSPCGFGSNKVCGVMTPEIKMVCVCEGKAGKAVGSGGVEGTKEVSTGNAEGPVRHEAVDGGVHLAFALLQGLLWSLLLGPPGLAGWGGGELDAVPDSTSSATNVSMVVSAGPWSSEKAEMNILEINEKLRPQLAENKQQFRNLKERCFLTQLAGFLANRQKKYKYEECKDLIKFMLRNERQFKEEKLAEQLKQAEELRQYKVLVHSQERELTQLREKLREGRDASRSLNEHLQALLTPDEPDKSQGQDLQEQLAEGCRLAQHLVQKLSPENDEDEDEDVQVEEDEKVLESSAPREVQKAEESKVPEDSLEECAITCSNSHGPCDSIQPHKNIKITFEEDKVNSSLVVDRESSHDGCQDALNILPVPGPTSSATNVSMVVSAGPLSSEKAEMNILEINEKLCPQLAEKKQQFRSLKEKCFVTQVACFLAKQQNKYKYEECKDLIKSMLRNERQFKEEKLAEQLKQAEELRQYKVLVHSQERELTQLREKLREGRDASRSLNEHLQALLTPDEPDKSQGQDLQEQLAEGCRLAQHLVQKLSPENDNDDDEDVQVEVAEKVQKSSAPREMQKAEEKEVPEDSLEECAITYSNSHGSYDSNQPHRKTKITFEEDKVDSTLIGSSSHVEWEDAVHIIPENESDDEEEEEKGPVSPRNLQESEEEEVPQESWDEGYSTLSIPPEMLASYQSYSSTFHSLEEQQVCMAVDIGSEYSIVKVIKLQFMAQASVTLVYLSVKDVTQVSLNLFPFSVSSKFACFSSSVRHVPGHRWDQVKKEDQEATGPSRELLDEKGPEVLQDSQDRCYSTPSGCLELTDSCQPYRSAFYILEQQRVGLAIDMDEIEKYQEVEEDQDPSCPRLSRELLDEKEPEVLQDSLDRCYSTPSGYLELPDLGQPYSSAVYSLEEQYLGLALDVDRIKKDQEEEEDEDQDPPCPRLSRELLEVVEPEVLQDSLDRCYSTPSSCLEQPDSCQPYGSSFYALEEKHVGFSLDVGEIEKKGKGKKRRGRRSMKKRRRRGRKEGEEDQNPPCPRLSRELLDEKGPEVLQDSLDRCYSTPSGCLELTDSCQPYRSAFYVLEQQRVGFAFDMDEIEKYQEVEEDQDPSCPRLSRELLGEKEPEVLQDSLDRCYSIPSGYLELPDLGQPYSSAVYSLEEQYLGLALDVDRIKKDEEEEEDQDPPCPRLSRELLEVVEPEVLQDSLDRCYSTPSSCLEQPDSCQPYGSSFYALEEKHVGFSLDVGEIEKKGKGKKRRGRRSKKERRGGRKEGEEEENPPCPRLSRELLDEKGPEVLQDSLDRXYSTPSGWLELTDSCQPYRSAFYVLEQQHVGLALDVDSEYLTVKVISLHLVLQIGVIFLFQVPLTDPRDVIAAGRTYGRI

SEQ ID NO: 8315 - protein, 1078 aa, Homo sapiens
  misc_feature (1)...(1078): Xaa = X or * as defined in Table 2
MDKPRPGKTTFVIMVSPLPAPYTSPFTHMVTCPAHPRAFLALTHSWDPQVRPAVLNPLPRHGSSFVVKQPVAKQQPLRCLIYIEVALSVMSPTAPSSSRSPWKRPGLRPGFEQPGGSREAERLVGSRDGSSRSLHSLHPVREPVPSLLSRIRGAAELPLPSSDPAFGTGAPPGQGSWQYKVLVHAQERELTQLREKLREGRDASRSLNEHLQALLTPDEPDKSQGQDLQEQLAEGCRLAQHLVQKLSPENDNDDDEDVSQVEVAEKVQKSSAPREMQKAEEKEVPEDSLEECAITCSNSHGPYDSNQPHKKTKITFEEDKVDSTLIGSSSHVEWEDAVHIIPENESDDEEEEEKGPVSPRNLQESEEEEVPQESWDEGYSTLSIPPEMLASYKSYSSTFHSLEEQQVCMAVDIGRHRWDQVKKEDQEATGHRLSRELLDEKGPEVLQDSLDRWYSTPSGCPXLTDYCQPYRSAFLHYWSQQRIGLAVDMDEIEKYQEVEEDQDPSCPRLSRELLDEKEPEVLQDSLDRCYSTPSGYLELPDLGQPYSSAVYSLEEQYLGLALDVDRTKKDQEEEEDQGPPCPRLSRELLEVVEPEVLQDSLDRCYSTPSSCLEQPDSCQPYGSSFYALEEKHVGFSLDVGEIEKKGKGKKRRGRRSKKKRRRGRKEGEEDQNPPCPRLSRELLAEKEPEVLQDSLDRWYSTPSVYLGLTDPCQPYRSAFYVLEQQRVGLAVDMDEIEKYQEVEEDQDPSCPRLSRELLAEKEPEVLQDSLDRWYSTPSVYLGLTDPCQPYRSAFYVLEQQRVGLAVDMDEIEKYQEVEEDQDPSCPRLSRELLDEKEPEVLQDSLGRCYSTPSGYLELPDLGQPYSSAVYSLEEQYLGLALDVDRIKKDQEEEEQDQGPPCPRLSRELLEVVEPEVLQDSLDRCYSTPSSCLEQPDSCQPYGSSFYALEEKHVGFSLDVGEIEKKGKGKKRRGRRSTKKRRRRGRKEGEEDQNPPCPRLSGVLMEVEEPEILQDSLDRYYSTPSMYFELPDSFQHXRSVFYSFEEQHISFALDMDNRFFTLTVTSLHLVFQMGVIFPQ

SEQ ID NO: 8316 - protein, 16 aa, Homo sapiens
  misc_feature (1)...(16): Xaa = X or * as defined in Table 2
DPLGFLXQKRNQQEDD

SEQ ID NO: 8317 - protein, 345 aa, Homo sapiens
  misc_feature (1)...(345): Xaa = X or * as defined in Table 2
RMKKEHVLHCQFSAWYPFFRGVTIKSVILPLPQNVKDYLLDDGTLVVSGRDDPPTHSQPDSDDEAEEIQWSDDENTATLTAPEFPXSLPLKVQGSYQIPLGGQVSFPKVXFGSAPRDAYWIAMNSSLKCKTLSDIFLLFKSSDFITRDFTQPFIHCTDDSPDPCIEYELVLEKWCEMIPGGEFRCFVKENKLIGISQRDYTQYYDHISKQKEEIRRCIQDFFKKHIPVQILXMKDLVFDIYRDSRGKVWLIDFNPFGEVTDSLLFTWEELISENNFKRRFLVKVDAQEQDSPSFSVAQTSEVTVQPQPLICSYRLPKDFVDLSTGEDAHKLIDFLKLKRNQPEGR

SEQ ID NO: 8318 - protein, 208 aa, Homo sapiens
  DOMAIN (54)..(67): Borrelia lipoprotein domain identified by eMATRIX, accession number PF00921C, p-value=7.857e-09, raw score of 10.37
  DOMAIN (11)..(201): Translationally controlled tumor protein domain identified by PFam, accession name TCTP, E-value=1.8e-09, PFam score of 31.9
  misc_feature (1)...(208): Xaa = X or * as defined in Table 2
RRRRLPSVAIMIILPGPSSSHDEMFSDIYKIRGDRGRGLCLEGGRGRWVSRTEGTIDDSLIGGNASAESPRGAKGTERHKXSTGVDIVMNHHLPGNKFSQKEASKKVHQRITMKSIKGKPXKNRRPRKSKTFLXQGAAEQIKHILANFKKLQFYFIGENMNPRWAWVLLLDYXRDGVPPYMIFFKDGLEMEKMLTNVAIILDLSPCHP

SEQ ID NO: 8319 - protein, 173 aa, Homo sapiens
  misc_feature (1)...(173): Xaa = X or * as defined in Table 2
MKNRSRNKGNVEWQAEGIRSKRSVGKQRPSKAKIPSGDKNGVSLTHNEVINNDNPLESNDEKEGQEATCSRPQIVPEFQQXXLFRPEXWRRASGNLQLIPKKRVSAXGTRGSPSKKGERVRRDAQQTATWXTRSPASGCFQICEGNKQDEACDVRGLQHCERHSLAGPREYMP

SEQ ID NO: 8320 - protein, 60 aa, Homo sapiens
  misc_feature (1)...(60): Xaa = X or * as defined in Table 2
NLKGPLRRPVSGIIIHVISLPLYQKCSKNEKKIPWRQMEMCXNVPSANNPPLGLLKNIVF

SEQ ID NO: 8321 - protein, 55 aa, Homo sapiens
SCEQIAVQVNNGDAGREMPCPLPCDEEIISSEDSEGSTDVDEPLEVFISAPRSEP

SEQ ID NO: 8322 - protein, 82 aa, Homo sapiens
YYSDLVPLSYIESSKGHLLLSAVIGQDHDFSESSEEEAPAEASSGALRSKHGEKGFSSSDFSDLSNGEELQETCSSSLRRGS

SEQ ID NO: 8323 - protein, 882 aa, Homo sapiens
  DOMAIN (740)..(761): HIGH MOBILITY GROUP (HMG1/HMG2) PROTEIN SIGNATURE domain identified by eMATRIX, accession number PR00886B, p-value=7.632e- 23, raw score of 9.88
  DOMAIN (598)..(679): SAND domain identified by PFam, accession name SAND, E-value= 1.2e-54, PFam score of 195.0
GGKMAGGGGDLSTRRLNECISPVANEMNHLPAHSHDLQRMFTEDQGVDDRLLYDIVFKHFKRNKVEISNAIKKTFPFLEGLRDRDLITNKMFEDSQDSCRNLVPVQRVVYNVLSELEKTFNLPVLEALFSDVNMQEYPDLIHIYKGFENVIHDKLPLQESEEEEREERSGLQLSLEQGTGENSFRSLTWPPSGSPSHAGTTPPENGLSEHPCETEQINAKRKDTTSDKDDSLGSQQTNEQCAQKAEPTESCEQIAVQVNNGDAGREMPCPLPCDEESPEAELHNHGIQINSCSVRLVDIKKEKPFSNSKVECQAQARTHHNQASDIIVISSEDSEGSTDVDEPLEVFISAPRSEPVINNDNPLESNDEKEGQEATCSRPQIVPEPMDFRKLSTFRESFKKRVIGQDHDFSESSEEEAPAEASSGALRSKHGEKAPMTSRSTSTWRIPSRKRRFSSSDFSDLSNGEELQETCSSSLRRGSGSQPQEPENKKCSCVMCFPKGVPRSQEARTESSQASDMMDTMDVENNSTLEKHSGKRRKKRRHRSKVNGLQRGRKKDRPRKHLTLNNKVQKKRWQQRGRKANTRPLKRRRKRGPRIPKDENINFKQSELPVTCGEVKGTLYKERFKQGTSKKCIQSEDKKWFTPREFEIEGDRGASKNWKLSIRCGGYTLKVLMENKFLPEPPSTRKKRILESHNNTLVDPCEEHKKKNPDASVKFSEFLKKCSETWKTIFAKEKGKFEDMAKADKAHYEREMKTYIPPKGEKKKKFKDPNAPKRPPLAFFLFCSEYRPKIKGEHPGLSIDDVVKKLAGMWNNTAAADKQFYEKKAAKLKEKYKKDIAAYRAKGKPNSAKKRVVKAEKSKKKKEEEEDEEDEQEEENEEDDDK

SEQ ID NO: 8324 - protein, 499 aa, Homo sapiens
  DOMAIN (175)..(210): Prion protein domain identified by eMATRIX, accession number BL00291A, p-value=2.552e-09, raw score of 4.49
  misc_feature (1)...(499): Xaa = X or * as defined in Table 2
GGKMAGGGGDLSTRRLNECISPVANEMNHLPAHSHDLQRMFTEDQGVDDRLLYDIVFKHFQRNKVEISNAIKKTFPFLEGLRDRDLITNKMFEDSQDSCRNLVPVQRVVYNVLSELEKTFNLPVLEALFSDVNMQEYPDFKFHIYKGFENVIHDKLPSPRKVEEEEKGRRGLGLPTKSLNKGTGENSFRKPDFGPPSGFPHPPCLGTTPPENMGLSEHPCETEQINAKRKDTTSDKDDSLGSQQTNEQCAQKAEPTESCEQIAVQVNMGDAGREMPCPLPCDEESPRGKSLHNHWNPKFNSLVLCELVDIKKEKPFSNSKVECQAQARTHHNQASDIIVISSEDSEGSTDVDEPLEVFISAPRSEPVINNDNPLESNDEKEGQEATCSRPQIVPEPLIFRKLFTFRESFRKRVIGQKTHDFSESQXGGGAPQEASSGGTEEARHGEKAPIDFXEVHLTWEEYPSRKETFPAVSDFSDPEXMGERAFQETCSSSLRRGLG

SEQ ID NO: 8325 - protein, 90 aa, Homo sapiens
  DOMAIN (20)..(33): VERTEBRATE METALLOTHIONEIN SIGNATURE domain identified by eMATRIX, accession number PR00860A, p-value=3.842e-15, raw score of 5.46
  DOMAIN (16)..(90): Metallothionein domain identified by PFam, accession name metalthio, E-value=7.5e-16, PFam score of 66.1
  misc_feature (1)...(90): Xaa = X or * as defined in Table 2
FFASLLESPVSPRLAMDPNCSCAAGVSCTCAGSCKCKECKCTSCKKSECEAISMVWGCGXGCCSCCPAAASKCAQGCVCKGASEKCSCCD

SEQ ID NO: 8326 - protein, 128 aa, Homo sapiens
  DOMAIN (95)..(108): VERTEBRATE METALLOTHIONEIN SIGNATURE domain identified by eMATRIX, accession number PR00860A, p-value=9.000e-17, raw score of 5.46
  DOMAIN (91)..(128): Metallothionein domain identified by PFam, accession name metalthio, E-value=0.012, PFam score of 20.8
PSCTRLLRRRQNQRSLKTNISPRKRATVLKLPSQMLGLVPGVDGRSPRGGRGGLGWRSCFLSDGEWILRTGSVGSGLVGSRGSAGGPRLEMDPNCSCTTGGSCTCAGSCKCKECKCTSCKKSCCSCCP

SEQ ID NO: 8327 - protein, 149 aa, Homo sapiens
  DOMAIN (99)..(145): Vertebrate metallothioneins proteins domain identified by eMATRIX, accession number BL00203, p-value=4.115e-16, raw score of 13.94
  DOMAIN (84)..(146): Metallothionein domain identified by PFam, accession name metalthio, E-value=0.014, PFam score of 20.1
  misc_feature (1)...(149): Xaa = X or * as defined in Table 2
IRPLPPRFKTESRSLPGPCLQPGTFLWSRNRRVLGFPSMNGEDMGLLFLCSEWERSSEGWLCTEKGEVDTQLNPTAVPSCISLTAHCVFLFLVGGSCTCAGSCKCKECKCTSCKKSECGCHPPGIWGCGXGAWFSQHEWRGHGASLPLL

SEQ ID NO: 8328 - protein, 132 aa, Homo sapiens
MGPRWYKKKKSRFVTCLSVYIWEKGCPWHQFAAAALSLTPLCKHNPWGTLANNPRGGREQAALSCRRVHLHSFALAGNQRRVQGGHPAGAGSSWGVHLQARGRDWDFSQGEEAKKHVGQVEGVVDPNSRPLL

SEQ ID NO: 8329 - protein, 149 aa, Homo sapiens; identical to SEQ ID NO: 8286
  DOMAIN (33)..(55): Globins profile domain identified by eMATRIX, accession number BL01033A, p-value=3.250e-20, raw score of 16.94
  DOMAIN (9)..(149): Globin domain identified by PFam, accession name globin, E- value=4.6e-57, PFam score of 203.0

SEQ ID NO: 8330 - protein, 155 aa, Homo sapiens
  DOMAIN (39)..(61): Globins profile domain identified by eMATRIX, accession number BL01033A, p-value=3.250e-20, raw score of 16.94
  DOMAIN (29)..(64): Globin domain identified by PFam, accession name globin, E- value=2.4e-05, PFam score of 23.1
  misc_feature (1)...(155): Xaa = X or * as defined in Table 2
NSARATDSERTHHGACLLPDKTNVKAAWGKVGAHAGEYGAEALERMFLSFPTTKTYFPHFDLSHGSAQGXRAHGKKVADALTKRRGATWDDMPQTALSALSDLHAHKLRVGPGSTFKLLSQLPCLGEPWAAHLPAEFQPLAVARLPWNKVSWGFC

SEQ ID NO: 8331 - protein, 159 aa, Homo sapiens
  misc_feature (1)...(159): Xaa = X or * as defined in Table 2
GISPFYIFGQDMGLEKNPTSFPSKMCFHCPLESLPSYVGCWKTGNMSCVVCTVNWFLRSVIYFWIFTNILSHFEVLALKRLLAPGGGGNMPPRVLXCCRRTTGHQRVWPSRPPEQTDQTARRPPSWRPTLCSPLPLPPPPRSGREKGNRARFLKGPRIG

SEQ ID NO: 8332 - protein, 162 aa, Homo sapiens
  DOMAIN (40)..(62): Globins profile domain identified by eMATRIX, accession number BL01033A, p-value=3.250e-20, raw score of 16.94
  DOMAIN (34)..(68): Globin domain identified by PFam, accession name globin, E- value=2.7e-07, PFam score of 29.9
  misc_feature (1)...(162): Xaa = X or * as defined in Table 2
PTLLVPTDSERTHPWLLSPADKTNVKAAWGKVGAHAGEYGAEALERMFLSFPTTKTYFPHFDLSHGSAQVXGPRARKVADALTNAVAQRGTDIAQRACPPLSDLHAHKLRVGPGSTFKLLKATCHCLGEPWAAHLPAEFQPLAVARLPWGQSFLGFLLKQRC

SEQ ID NO: 8333 - protein, 358 aa, Homo sapiens
  DOMAIN (292)..(310): Immunoglobulins and major histocompatibility complex proteins domain identified by eMATRIX, accession number BL00290B, p-value= 2.800e-18, raw score of 13.17
  DOMAIN (156)..(200): Class II histocompatibility antigen, beta domain identified by PFam, accession name MHC_II_beta, E-value=5.4e-29, PFam score of 109.7
MLSGVGGFVLGLLFLGAGLFIYFRNQKAEESFVSALSIDLSGGGNMALLSMVCLKFPGGSCMAALTVTLMVLSSPLALAGDTRPPVRLRKTEDEPLGCVLSGLRVGPDSVFPGGRFCNRIVLVPPARFLEQVKHECHFFNGTERVRFLDRYFYHQEEYVRFDSDVGEYRAVTELGRPDAEYWNSQKDLLEQKRAAVDTYCRHNYGVGESFTVQRRVYPEVTVYPAKTQPLQHHNLLVCSVNGFYPGSIEVRWFRNGQEEKTGVVSTGLIQNGDWTFQTLVMLETVPRSGEVYTCQVEHPSLTSPLTVEWRARSESAQSKMLSGVGGFVLGLLFLGAGLFIYFRNQKGHSGLQPTGFLS

SEQ ID NO: 8334 - protein, 271 aa, Homo sapiens
  DOMAIN (101)..(151): Class II histocompatibility antigen beta domain proteins. domain identified by eMATRIX, accession number PF00969C, p-value= 1.000e-40, raw score of 27.72
  DOMAIN (65)..(110): Class II histocompatibility antigen, beta domain identified by PFam, accession name MHC_II_beta, E-value=1.5e-25, PFam score of 98.3
  misc_feature (1)...(271): Xaa = X or * as defined in Table 2
LFSSMVCLKLPGGSSLAALTVTLMVLSSRLAFAGDTRPRFLELRKSECHFFNGTERVRYLDRYFHNQEEFLRFDSDVGEYRAVTELGRPVAESWNSQKDLLEQKRAAVDNYCRHNYGVGESFTVQRRVHPQVTVYPAKTQPLQHHNLLVCSVSGFYPGSIEVRWFRNGQEEKAGVVSTGLIHNGDWTFHTLVMLETVPRSEEVYTCQVEAPRAXQAPLTVEWRARSESAQSKMLSGVGGFVLGLLFLGAGLFIYFRNQKGHSGLQPTGFLS

SEQ ID NO: 8335 - protein, 288 aa, Homo sapiens
  DOMAIN (73)..(109): Class II histocompatibility antigen beta domain proteins. domain identified by eMATRIX, accession number PF00969B, p-value= 1.000e-40, raw score of 9.97
  DOMAIN (77)..(122): Class II histocompatibility antigen, beta domain identified by PFam, accession name MHC_II_beta, E-value=6.4e-26, PFam score of 99.5
  misc_feature (1)...(288): Xaa = X or * as defined in Table 2
DLPASLAPGPVLFSSMVCLKLPGGSCMTALTVTLMVLSSPLALAGDTRPRFLWQPKRECHFFNGTERVRFLDRYFYNQEESVRFDSDVGEYRAVTELGRPDAEYWNSQKDFLEDRRAAVDTYCRHNYGVGESFTVQRRVQPKVTVYPSKTQPLQHHNLLVFCSVSGFYPGSIEVRWFLNGQEEKAGMVSTGLIQNEDGPFQTLVMLETSFFGVERVNTSQVEHPKCARPLTVEXRARSESAQSKMLSEVGGFVLGLLLPLGPGLFIYFRNQKGHSGLQPTGFPELKCR

SEQ ID NO: 8336 - protein, 199 aa, Homo sapiens
  DOMAIN (27)..(40): ALPHA HAEMOGLOBIN SIGNATURE domain identified by eMATRIX, accession number PR00612A, p-value=9.591e-12, raw score of 8.64
  misc_feature (1)...(199): Xaa = X or * as defined in Table 2
EFHRLRENPPWCLSPADKTNVKAPAWGKVGAHAGEYGSEALERMVLFPPPTPKPYFPHFDLSHGSAQVXGPRARKVADALTNAVAQRGTDIAQRAVPPLSDLHAHKLRVGPGSTFKLLKATCHCLGEPWAAHLPAEFQPLAVATSSLGTKFPGFLVEAPLLTFQITFKGWKLWLAIVFLPFGLPPSPSSPFLHPYPRGL

SEQ ID NO: 8337 - protein, 207 aa, Homo sapiens
  DOMAIN (55)..(90): Ribosomal protein L3 proteins domain identified by eMATRIX, accession number BL00474C, p-value=6.571e-34, raw score of 21.74
  DOMAIN (1)..(153): Ribosomal protein L3 domain identified by PFam, accession name Ribosomal_L3, E-value=2.7e-80, PFam score of 280.2
CKFIRVMAHTRLRLLPLRRKKAHLMEIQVNEGTVAEKLDWARERLEQQVPVNQVFGQDEMIDVIGVTKGKGYKGVTSRWHTKKLPRKTHRGLRKVACKDGKLIKNNASTDYDLSDKSINPLGGFVHYGEVTNDFVMLKGCVVGTKKRVLTLRKSLLVQTKRRALEKIDLKFIDTTSKFGHGRFQTMEEKKAFMGPLKKDRIAKEEGA

SEQ ID NO: 8338 - protein, 417 aa, Homo sapiens
  DOMAIN (242)..(277): Ribosomal protein L3 proteins domain identified by eMATRIX, accession number BL00474C, p-value=5.829e-23, raw score of 21.74
  DOMAIN (98)..(377): Ribosomal protein L3 domain identified by PFam, accession name Ribosomal_L3, E-value=4e-131, PFam score of 449.0
MASKLRLSDMTGEKGLNLAPIKIILNSLFEDGSSIGLQGAQGAVDKPCGLEQPVVVPTKCDCYTASPKCSSGHCGKVKSLPKDDPSKPVCLTGFLGYKAGMTHIVQEVDRPGSKVNKKEVVEAVTIVETLPMMVVGIVGYVETPQGLRTFKTVFAEHISDECKRRFYKNWHKSKKKAFTKYRKKWQDENGKKQLEKDFSSMKKYCQKKAHLMEIQVNGDTMAKKLDWARERFEQQLPVNHVFGQDEMIDIIRMTKGKGYKGVTSHWHAKKLPRKTHQGPRKVSCIGAWHLVHVAFSVARTWQKGYCHHTEINKKIHKIGQGYLIKDDKLIKNNASTDYDLSDKSINPLGVFGHYGEVTNDFVMLKGCVTKQRALQKTDLKFTDTTSKFGHGRLQTMEEKKASMGRLKKDQIAKEERA

SEQ ID NO: 8339 - protein, 301 aa, Homo sapiens
  DOMAIN (175)..(210): Ribosomal protein L3 proteins domain identified by eMATRIX, accession number BL00474C, p-value=5.829e-23, raw score of 21.74
  DOMAIN (31)..(301): Ribosomal protein L3 domain identified by PFam, accession name Ribosomal_L3, E-value=3.4e-131, PFam score of 449.3
KCSSGHCGKVKSLPKDDPSKPVCLTGFLGYKAGMTHIVQEVDRPGSKVNKKEVVEAVTIVETLPMMVVGIVGYVETPQGLRTFKTVFAEHISDECKRRFYKNWHKSKKKAFTKYRKKWQDENGKKQLEKDFSSMKKYCQKKAHLMEIQVNGDTMAKKLDWARERFEQQLPVNHVFGQDEMIDIIRMTKGKGYKGVTSHWHAKKLPRKTHQGPRKVSCIGAWHLVHVAFSVARTWQKGYCHHTEINKKIHKIGQGYLIKDDKLIKNNASTDYDLSDKSINPLGVFGHYGEVTNDFVMLKGCV

SEQ ID NO: 8340 - protein, 377 aa, Homo sapiens
  DOMAIN (208)..(243): Ribosomal protein L3 proteins domain identified by eMATRIX, accession number BL00474C, p-value=3.314e-26, raw score of 21.74
  DOMAIN (50)..(322): Ribosomal protein L3 domain identified by PFam, accession name Ribosomal_L3, E-value=2e-144, PFam score of 493.2
MSHRKFSTPRHGSLGFLPWKRSSRHCGKVKSFPKDDPSKPVHLTAFLGYKAGMTHIVREVDRPGSKVNKKEVVEAVTIVERPPVGIVGCVETPQGFRTCKTVFAEHISDECKRRFYKNWHKSKKKAFTKYCKKWQDEDGKKQLEKDFSSMKKYCQVICVIAHTQMQLLPLCQKKAHLMEIQVNGGTVAEKLDWAGERLKHQVPVNQVFGQDEMIDVIRVTKGKGYKRVTSRWHTKKLPRKTHQGLCKVACIGAWHPARVGFSVGYLIKDGKLIKNNASTDYDLSDKSINPLGGFVHYGEVTNDFVMLKGCVVGTKKWVLTLRKSLLVQTKQRALEKIDLKFIDTPSKFGHGHFQTMEEKKAFMGPLKKDRIAKEEGA

SEQ ID NO: 8341 - protein, 442 aa, Homo sapiens
  DOMAIN (270)..(307): Ribosomal protein L3 proteins domain identified by eMATRIX, accession number BL00474D, p-value=1.931e-29, raw score of 29.47
  DOMAIN (60)..(384): Ribosomal protein L3 domain identified by PFam, accession name Ribosomal_L3, E-value=5.6e-106, PFam score of 365.5
  misc_feature (1)...(442): Xaa = X or * as defined in Table 2
WALPAGFDGVMSHRKFSAPRHGSLGFLPRKRSSRHRGKVKSFPKDDPSKPVHLTAFLGYKAGMTHIVREVDRPGSKVNKKEVVEAVTIVETPPMVFVGIVGYVETPRGLRTFKTVFAEHMSDECKRRFYKNWHKSKKKAFTKYCKKWQDEDGKKQLEKDFSSMKKYCQVIRVIAHTQMRLLPLRQKKAHLMEIQVNGGTCARESWDWGPREGLKQQVPVKPSVLGRDEMIELHRGXPKGQKAYKGGHPVVWHTQESCPRKDHHPRACAKVACIGAFHPARVAFSVARAGQKGYHPRTEINKKIYKIGQGYLIKGGKLIKNNASTDYDLSDKSINPLGGFVHYGEVTNDFVMLKGCVVGTKKRVLTLRKSLLVQTKAAGLWRRITLKFIDTTSKFGHGRFQTMEEKKAFMGPLKKDRIAKEERSLMPGTDFAVGGVSIKVIFH

SEQ ID NO: 8342 - protein, 97 aa, Homo sapiens
  DOMAIN (26)..(54): !!!! PROTEIN ALU SUBFAMILY WARNING ENTRY NUCLEAR PHOSPHO domain identified by eMATRIX, accession number PD02454B, p-value= 8.050e-20, raw score of 11.61
  misc_feature (1)...(97): Xaa = X or * as defined in Table 2
DSSGQVQWLKPIIPVLGNLRQADHLRSGVQDQHVQHGETPSLLKIQKKLARHGGACLXSQLLGRLRQETHXNSGSRGCSEPRLRHCTLAXATEGDSI

SEQ ID NO: 8343 - protein, 149 aa, Homo sapiens; identical to SEQ ID NO: 8286
  DOMAIN (33)..(55): Globins profile domain identified by eMATRIX, accession number BL01033A, p-value=3.250e-20, raw score of 16.94
  DOMAIN (9)..(149): Globin domain identified by PFam, accession name globin, E- value=4.6e-57, PFam score of 203.0

SEQ ID NO: 8344 - protein, 157 aa, Homo sapiens
  DOMAIN (39)..(61): Globins profile domain identified by eMATRIX, accession number BL01033A, p-value=3.250e-20, raw score of 16.94
  DOMAIN (29)..(64): Globin domain identified by PFam, accession name globin, E- value=2.4e-05, PFam score of 23.1
  misc_feature (1)...(157): Xaa = X or * as defined in Table 2
NSARATDSERTHHGARLLPDKTNVKAAWGKVGAHAGEYGAEALERMFLSFPTTKTYFPHFDLSHGFCPRLKGPRQRRWPDALTKAVAHVDGHAQTALSGPEATLHGAQSFGVDPVQLSSSLSHCLLGXPWAAHLPRPSSTPGGWNAFPGTKFPWVSC

SEQ ID NO: 8345 - protein, 205 aa, Homo sapiens
  misc_feature (1)...(205): Xaa = X or * as defined in Table 2
RLFHSNQTVDHSQKNVDITLKGRPSNRVRAPKGTLRRDFNPHQMXNSALLGKEQQRGFRVDKWWGYQKGNWPTRSGLFGSHVQDMIKGWLPLGLPVTKMRSVYAHFPHPTLLSRENGVSLLKSRNFLGEKYIPQGFRMKTRVLLCQYLKAQKRXNXSLEGNDIGLVSNFSRLLIPASPTRLKTKGIRKFLDGIFCLLEKGLFRQA

SEQ ID NO: 8346 - protein, 86 aa, Homo sapiens
  misc_feature (1)...(86): Xaa = X or * as defined in Table 2
MSEGPSVRSEEAICLYYEELGGGARQTHVRRPLSECSPGDWSHSGVAEGPXCIQFLHITSHGAKEALSTWLGLLTSGPATTAAVLP

SEQ ID NO: 8347 - protein, 494 aa, Homo sapiens
  DOMAIN (56)..(396): Hemopexin domain identified by PFam, accession name hemopexin, E-value=0.029, PFam score of 21.0
  misc_feature (1)...(494): Xaa = X or * as defined in Table 2
GYLGAPVALGLWALCWSLAIATPLPPTSAHGNVAEGETKPDPDVTERCSDGWSFDATTLDDNGTMLFFKGEFVWKSHKWGPGVXSSERWEGFSPSPCGMLAFPFKVHNSVLSXSKGGDKVLGYXPSLKKKGRKGLPKVCSKIDFPGIPHSPLDAAVECHRGECQAEGVLFFQGDREWFWDFATGNHGRERSWPAVWGTCSSALRWAGPLTYWLSRGNQFLRFRPCQGEEVPPRYPRDVREYFMPCPGKGHGTQEWGLGHGNSNHHGPXIYAACSPHLSLCLALTSDNHGANFCLSVGTHYWRLDTSRDGWHSLAPLLIKWPQGPSAVDAAFSWEEKLYLVQGHPGYYVFLTKGGYTLSXGGYPKRLGEREVGDPSWGFILDSVDAAFICPGVFLRLHYSWAGRRLWVGWVPXKSGSPKPTWTELSFGPHEKVDGALCMEKSPFGPKFMFPPNGPGLYLIHGPNFTLYSVVEKLNAAKALPQPQNVTQSPGACTH

SEQ ID NO: 8348 - protein, 1143 aa, Homo sapiens
  DOMAIN (1113)..(1135): Kringle domain proteins domain identified by eMATRIX, accession number BL00021C, p-value=1.857e-19, raw score of 22.21
  DOMAIN (100)..(1015): Kringle domain identified by PFam, accession name kringle, E- value=0, PFam score of 1372.0
MLPHERGLETTPRGECIPVRIDTKLFEMLVPQCHKEIALEHKFIYSFLVTLNTKPPGYSHSHPEALLDPEVGDPNGTNAQLIKCFLLPLCPSFPLCPEECMHCSGENYDGKISKTMSGLECQAWDSQSPHAHGYIPSKFPNKNLKKNYCRNPDRELRPWCFTTDPNKRWELCDIPRCTTPPPSSGPTYQCLKGTGENYRGNVAVTVSGHTCQHWSAQTPHTHNRTPENFPCKNLDENYCRNPDGKRAPWCHTTNSQVRWEYCKIPSCDSSPVSTEQLAPTAPPELTPVVQDCYHGDGQSYRGTSSTTTTGKKCQSWSSMTPHRHQKTPENYPNAGLTMNYCRNPDADKGPWCFTTDPSVRWEYCNLKKCSGTEASVVAPPPVVLLPDVETPSEEDCMFGNGKGYRGKRATTVTGTPCQDWAAQEPHRHSIFTPETNPRAGLEKNATECGGASTELCSTSLCAFTMLMDYEGQGEPLDDYVNTQGASLFSVTKKQLGAGSIEECAAKCEEDEEFTCRAFQYHSKEQQCVIMAENRKSSIIIRMRDVVLFEKKVYLSECKTGNGKNYRGTMSKTKNGITCQKWSSTSPHRPRFSPATHPSEGLEENYCRNPDNDPQGPWCYTTDPEQRYDYCDIPECEEECMHCSGENYDGKISKTMSGLECQAWDSQSPHAHGYIPSKFPNKNLKKNYCRNPDRELRPWCFTTDPNKRWELCDIPRCTTPPPSSGPTYQCLKGTGENYRGNVAVTVSGHTCQHWSAQTPHTHNRTPENFPCKNLDENYCRNPDGKRAPWCHTTNSQVRWEYCKIPSCDSSPVSTEQLAPTAPPELTPVVQDCYHGDGQSYRGTSSTTTTGKKCQSWSSMTPHRHQKTPENYPNAGLTMNYCRNPDADKGPWCFTTDPSVRWEYCNLKKCSGTEASVVAPPPVVLLPDVETPSEEDCMFGNGKGYRGKRATTVTGTPCQDWAAQEPHRHSIFTPETNPRAGLEKNYCRNPDGDVGGPWCYTTNPRKLYDYCDVPQCAAPSFDCGKPQVEPKKCPGRVVGGCVAHPHSWPWQVSLRTRSPRPSSYKVILGAHQEVNLEPHVQEIEVSRLFLEPTRKDIALLKLSSPAVITDKVIPACLPSPNYVVADRTECFITGWGETQEHFYFN

SEQ ID NO: 8349 - protein, 879 aa, Homo sapiens
  DOMAIN (649)..(667): Kringle domain proteins domain identified by eMATRIX, accession number BL00021B, p-value=1.621e-21, raw score of 13.33
  DOMAIN (131)..(634): Kringle domain identified by PFam, accession name kringle, E- value=3.4e-65, PFam score of 230.0
  misc_feature (1)...(879): Xaa = X or * as defined in Table 2
VNNVLGLGHTFWALLASPKMEHKEVVLLLLLFLKSGQGEPLDDYVNTQGASLFSVTKKQLGAGSIEECAAKCEEGEEFTCRAFQYHSKEQQCVIMAENRKSSIIIRMRDVVLFLKKKVYSLQSAKTGNGKNYRGTMSKTKNGITCQKWSSTSPRRPRFSPATHPSEGLEENYCRNPDNDPQGPWCYTTDPEKRYDYCDILECEEECMHCSGENYDGKISKTMSWDWECQGLGTFQEPHTVHGYFPSQIFPNKNLKEGITVRNPDRGLRPWVFSPPDPNKRWGTFCDIPRCTTPPPSSGPTYQCLRRGTGENFRGNVAVXPCSGKTVQHWECTGPLHTHNRTPENFPWQNLGWKTTCRNPDGKKGPLGCHYNQQAKLRVGSYCXGYRSCDSSPVSTEQLAPTAPPELTPVVQGLATHGXWDRAYRGNIPPTHPPTGKESVKSWSILXHPHRHPEDPQKTTPNAGLTMELLSGIPDGRLKAPWCFYHRTPAFRWEYCNLKKCSGTEASVVAPPPVVLLPDVXTPSEEDCMFGNGKGYRGKRATTVTGTPCQDWAAQEPHRHSIFTPETNPRAGLEKNYCRNPDGDVCGPWCYTTNPRKLYDYCDVPQCAAPSFDCGKPQVEPKKCPGRVVGGCVAHPHSWPWQVQSLEQGFGLHFCGGTLISPEWVLTAAHCLEKSPRPSSYKVILGAHQEVNLEPHVQEIESVSRLFLEPTRKDICLAKAKAVLPFIHLTKLIPACLAIPQIFVVRLTGTECFITGLWGETQGTFGSWAFLREAQLPCXFENKVCKSALXSFPENGKKSQSHPKLLCLGHFGPEGHLNKLPPRVNSGRAPLVCPPKRDQNTILQGSPPPWGVLACARPPITPGVLCSVFPRFVYLGLKGS

SEQ ID NO: 8350 - protein, 142 aa, Homo sapiens
  DOMAIN (4)..(55): Fetuin family proteins domain identified by eMATRIX, accession number BL01254C, p-value=1.000e-40, raw score of 13.84
  DOMAIN (29)..(72): Cystatin domain identified by PFam, accession name cystatin, E-value=4e-09, PFam score of 35.7
EFQFSVVYAKCDSSPDSAEDVRKVCQDCPLLAPLNDTRVVHAAKAALAAFNAQNNGSNFQLEEISRAQLVPVTSQPQPEGANEAVPTPVVDPDAPPSPPLGAPGLPPAGSPPDSHVLLAAPPGHQLHRAHYDLRHTFMGVVS

SEQ ID NO: 8351 - protein, 456 aa, Homo sapiens
  DOMAIN (88)..(139): Fetuin family proteins domain identified by eMATRIX, accession number BL01254C, p-value=1.000e-40, raw score of 13.84
  DOMAIN (285)..(454): Beta/Gamma crystallin domain identified by PFam, accession name crystall, E-value=1.8e-94, PFam score of 327.3
MKSLVLLLCLAQLWGCHSAPHGPGLIYRQPNCDDPETEEAALVAIDYINQNLPWGYKHTLNQIDEVKVWPQAVEGDCDFQLLKLDGKFSVVYAKCDSSPDSAEDVRKVCQDCPLLAPLNDTRVVHAAKAALAAFNAQNNGSNFQLEEISRAQLVVKTEILLTGEPHVDGEPGDLRFRIKVVKHPIFERRGDDLYTNVTISLVESLVGFEMDITHLDGHKVHISRDKITRPGAKLWKKGEGLPNFDNNNIKGSLIITFDVDFPKEQLTEEAREGIKQLLKQGSVQKITFYEDKNFQGRRYDCDCDCADFHTYLSRCNSIKVEGGTWAVYERPNFAGYMYILPQGEYPEYQRWMGLNDRLSSCRAVHLPSGGQYKIQIFEKGDFSGQMYETTEDCPSIMEQFHMREIHSCKVLEGVWIFYELPNYRGRQYLLDKKEYRKPIDWGAASPAVQSFRRIVE

SEQ ID NO: 8352 - protein, 416 aa, Homo sapiens
  DOMAIN (64)..(101): Fetuin family proteins domain identified by eMATRIX, accession number BL01254A, p-value=1.000e-39, raw score of 14.53
  DOMAIN (55)..(171): Cystatin domain identified by PFam, accession name cystatin, E-value=4.4e-09, PFam score of 35.5
  misc_feature (1)...(416): Xaa = X or * as defined in Table 2
PPTRPPTRPAPGLVPKPSTTCTPACQGLSGAAMKSLVLLLCLAQLWGCHSAPHGPGLIYRQPNCDDPETEEAALVAIDYINQNLPWGYKHTLNQIDEVKVWPQQPSGRAVLRFEIRTPWGTTLPCCWDPTLVGQDASLEGSLKEHAVEGDCDFQLLKLDGKFSVVYAKCDSSQDSAEDVRKVCQHCPLLAPLNDTRVVHAAKSCPGPPFNAQNNGFQFFSLEEISRAQLVPLPPSTYVEFTVSGTDLLFAXKKATEAAKCNLSGQKSNMGFCKATLSEKLGSGQRLQLTCTVFQTQPVTSQPNPEGANEAVPTPVVDPDAPPSPPLGAPGLLPSWLTPKTTMVLLAAPPGHQLHRAHYDLCHTFMGVVSLGSPFRRKCSHPRKNTRTVVEAXWLGAAAGATGFLPLFRGGIRHFKV

SEQ ID NO: 8353 - protein, 110 aa, Homo sapiens
  DOMAIN (42)..(70): !!!! PROTEIN ALU SUBFAMILY WARNING ENTRY NUCLEAR PHOSPHO domain identified by eMATRIX, accession number PD02454B, p-value= 1.776e-21, raw score of 11.61
  misc_feature (1)...(110): Xaa = X or * as defined in Table 2
NLSRNKEVLLFGKNIPWVGWARWLVPGNPNTLGGQGRADHLKLGVQDQPGQHGEIPSLLKIQKLTRHGGVCLXSQNHLNPGGGGCSELRSHHCTCTPAWAMEXDSIPKNK

SEQ ID NO: 8354 - protein, 418 aa, Homo sapiens
  DOMAIN (90)..(122): GTP-binding elongation factors proteins domain identified by eMATRIX, accession number BL00301B, p-value=5.500e-31, raw score of 20.09
  DOMAIN (5)..(373): Elongation factor Tu family domain identified by PFam, accession name GTP_EFTU, E-value=5.6e-138, PFam score of 467.7
MGKEKTHINIVVIGHVDSGKSTTTGHLIYKCGGIDKRTIEKFEKEAAEMGKGSFKYAWVLDKLKAERERGITIDISLWKFETSKYYVTIIDAPGHRDFIKNMITGTSQADCAVLIVAAGVGEFEAGISKNGQTREHALLAYTLVAFVPISGWNGDNMLEPSANMPWFKGWKVTRKDGNASGTTLLEALDCILPPTHPTDKPLRLPLQDVYKIGGIGTVPVGRVETGVLKPGMVVTFAPVNVTTEVKSVEMHHEALSEALPGDNVGFNVKNVSVKDVRRGNVAGDSKNDPPMEAAGFTAQVIILNHPGQISTGYAPVLDCHTAHIACKFAELKEKIDRRSGKKLEDGPKFLKSGDAAIVDMVPGKPMCVESFSDYPPLGRFAVRDMRQTVAVGVIKAVDKKAAGAGKVTKSAQKAQKAK

SEQ ID NO: 8355 - protein, 307 aa, Homo sapiens
  DOMAIN (12)..(44): GTP-binding elongation factors proteins domain identified by eMATRIX, accession number BL00301B, p-value=5.500e-31, raw score of 20.09
  DOMAIN (1)..(251): Elongation factor Tu family domain identified by PFam, accession name GTP_EFTU, E-value=2.2e-67, PFam score of 229.8
KFETSKYYVSIIDAPGHRDFIKNMITGTSQADCAVLIVAAGVGEFEAGISKNGQTHEHALLAYTLGVKQLIVGVNKMDSTEQPYSQKTYEEIVKEVNTYIMKIGCNLDTAAFVLISVNVTTEVKSVEIHHEALSEALPGDNVGFNVKNVSVKDVRHGNNAGDSKNDPPMEAAGFTAQVIILNHPGQISAGYALVLDCHTAHTACKFAELKEKIDRCSGKKLEDGPKFLKSGDAAIIYMVPGKPMCVESFSDYPPLGHFAVGHMRQTVAMGIIKAEDRKAAGVGKVTKSAQKAPKPSEYYPLYLPPQS

SEQ ID NO: 8356 - protein, 168 aa, Homo sapiens
  DOMAIN (9)..(21): GTP-binding elongation factors proteins domain identified by eMATRIX, accession number BL00301A, p-value=3.842e-13, raw score of 12.41
  DOMAIN (5)..(164): Elongation factor Tu family domain identified by PFam, accession name GTP_EFTU, E-value=1.8e-65, PFam score of 223.3
MGKEKTHINIVVIGHVDSGKSTTTGHLIYKCGGIDKRTIEKFEKEAAEMGKGSFKYAWVLDKLKAERERGITIDISLWKFETSKYYVTIIDAPGHRDFIKNMIILNHPGQISAGYAPVLDCHTAHIACKFAELKEKIDRRSGKKLEDGPKFLKSGDAAIVDMVPGKPI

SEQ ID NO: 8357 - protein, 470 aa, Homo sapiens
  DOMAIN (123)..(135): GTP-BINDING ELONGATION FACTOR SIGNATURE domain identified by eMATRIX, accession number PR00315D, p-value=3.880e-10, raw score of 10.84
  DOMAIN (118)..(425): Elongation factor Tu family domain identified by PFam, accession name GTP_EFTU, E-value=1.2e-63, PFam score of 217.2
MTSPNELNKAPWTNCGETGWIKDLNGKPKTIKILEDNLVNTILDIGTGKDFMTKTPKAIATKAKIDKWNLIKFKSFCTAKETINSINRQPTEWEKIFTNYAFDKGFDLLTPVMTTVSIKNVITGTSQVDCAVLIVAAGVGEFEAGISKNGQTSEHALLAYTLDVKQLIVGVNKMDSTEPPCSQKRYEEIVKEVSTYIKKIGYNPNTVAFVPISGWNDDNMLEATANVPSFKGWKVTCKDGNASGTTLLEALDYILPPSGPTDKPLRLPLQDVHKIGGIGTVLGGQVKTGVLKPGMVVSFAAVDVTTEINFIPGNNEGFNIKNVSVKDVRCGNIAGDSKNGPPMKAAGITAQVIILNHPGQISAGYTPVLDCHMAHTACKFAVLKEKIDHRSGKKLEDGSKFLKSGDAAIIDMVPGNLMCIESFSDYPPLGHFGVCDMRQTVAVGVIKAVDQKAAGAGKVTKSAQKAQKAK

SEQ ID NO: 8358 - protein, 462 aa, Homo sapiens
  DOMAIN (113)..(145): GTP-binding elongation factors proteins domain identified by eMATRIX, accession number BL00301B, p-value=7.158e-27, raw score of 20.09
  DOMAIN (28)..(417): Elongation factor Tu family domain identified by PFam, accession name GTP_EFTU, E-value=7.9e-128, PFam score of 433.5
MDIKKGITDISASLRVESGWEARTRKEKTHINTVIIGHVDSGKSTTTGHLIYKCGGVDKRTIEKFEKEAAEMGKCSFKYAWVLDKLKAEREHGITIDISLWKFETSKYYVTIIDAPGHRDLIKNMITGTSQADCAVLIVAAGFGEFEAGISKNGQTREHALLAYTLGVKQLIVGVNKMDSTEPPYSHKRYEEIVKEVSTYIKKIGHNTDTVAFVPVSGWNGDNTLEPSANMPWFKGWKVTRKDGNASGTTLLEALDCILPPTRPTDKPLCLPLQDVYKIGGIVNVATEVKSVEMHHEALSEVLPGDNVGFNVKNVSVKDVRRGNVAGDSKKDPPMEAAGFTAQVIILNHPGQISAGYAPVLDCHTAHIACKFAELKEKTDRHSGKKLEDGPKFLKSGDAAIVDMVPGKPVYVESFSDYPPLGRFAVHDIRQTVAVGVIKAVDKKAAGAGKVTKSAQKAQKAK

SEQ ID NO: 8359 - protein, 481 aa, Homo sapiens
  DOMAIN (439)..(453): GTP-binding elongation factors proteins domain identified by eMATRIX, accession number BL00301C, p-value=8.200e-15, raw score of 11.73
  DOMAIN (8)..(286): Elongation factor Tu family domain identified by PFam, accession name GTP_EFTU, E-value=7.8e-46, PFam score of 157.1
  misc_feature (1)...(481): Xaa = X or * as defined in Table 2
KPKWERKRLIFNIVVIGHVDSGKSTTTGHLIYKCGGIDKRTIEKFEKEAAEMGKDSFKFAWVLDKLKAERERGITIDISLWKFETSKYYVTIIDAPGHRDFIKNMITGDISRLDCAVLDLFASGVGEFXSLVSPKNGQTREHALLAYTLGVEQLIVGVNKMDSTEPPYSQKRYEEMWLREVSTFIKKIWLQPPTQXHFVPISWFGIGDNMLEPSANMPWFKGWKVTRKDGNASGTTLLEALDCILPPTRPTDKPLRLPLQGVHKLGGIGTVSSAPMETGFSNPGMVVTFAPSPRXQRKVKSCRKCTHEALKXSSFLGTNVGLQLSGIVSCQGMFRPWQTVAGXPAKNDPTQWESSWASLVRGDYPXPIPGQNKAPGYAPCIGIGAHGLTFACKFAELKEKIDRRSGKKLEDGPKFLKSGDAAIVDIVPGRPMCVESFSDYPPLGRFAVRDMRQTVAVGVIKAVDKKVCWSWARSPKFAQKG

SEQ ID NO: 8360 - protein, 183 aa, Homo sapiens
  DOMAIN (110)..(122): Globins profile domain identified by eMATRIX, accession number BL01033B, p-value=1.000e-15, raw score of 13.81
  misc_feature (1)...(183): Xaa = X or * as defined in Table 2
APSPRRPWGHFTEEDQGLLSTSLWGKVKCGKNAGRKKPLGKAPLVVLHPWDPKRSFEQALGNPVPLPSAIMGNPPKSRAHGKKVLTSLGEMPIKHPGXSSKGTFAQAXSELHCDKLHVDPENFKLLGNVLVTVLAIPFSAKEFTPGGCRASWAERWVTWSWPVPCSSRIPLSSLAHDCRAFQG

SEQ ID NO: 8361 - protein, 122 aa, Homo sapiens
  DOMAIN (71)..(103): Actin-depolymerizing proteins domain identified by eMATRIX, accession number BL00325A, p-value=4.545e-09, raw score of 24.83
  misc_feature (1)...(122): Xaa = X or * as defined in Table 2
PGFPLFSFPEGNGPSKRQTGDXIRCLFXDGKVWECSPPSSSSSPKKRKKAVIFCVPVQTKCIVVEGGEETLVGDVXVXPXGSFKHVVAMFPEKDCLCTLYEASFKTKESRRVDGFVCVRVGT

SEQ ID NO: 8362 - protein, 71 aa, Homo sapiens
LGVRIPTVALHVMELFDTTVEQLYSIFTVKELTNKKIIMKWRCGNWPEGMLLITALHIKGPKTLRLGFSYG

SEQ ID NO: 8363 - protein, 761 aa, Homo sapiens
MAASIALEALEALYGIVKESGVKHKGLIEIPNLSEENEVDDTESSFCYRHWAFQIVLIRLCGSCVVVRVPCGGPVCREGLPYCGGSVLCGAGVVQERESTLSKKKGDGVILKDLMKTAGTAKVREALGDYLKALKTEFTTGMILPTKAMATQELTVKRKLSGNTLQVQASSPVALGVRIPTVALHMMELFDTTVEQLYSIFTVKELVQKFSKSTAVLETEKGGKFQMFDGNITGEYLGLLTNKKIIMKWRCGNWPEGLNCTDPLVSGFSPNSGTPKAARPTPHLPPPLLLPDQCEDHEDEDLYDDPFPLEEQTERDATSLSKGKFQELLVGIVVENDAGRGEINELKQVEGEASCSSRKGKLIFFYEWNIKLGWKERTVPFCPSIAFVTASPLQGTPLSCFAQAKSTLGQEEEYGCTCPTLLSGRRTADSSCPLLGHGLPDLSSVAAQGALEWWNPVRAAELFSIVKESGVKHKGLIEIPNLSEENEVDDTESSFCYRHWAFQIVLIRLCGSCVVVRVPCGGPVCREGLPYCGGSVLCGAGVVQERESTLSKKKGDGVILKDLMKTAGTAKVREALGDYLKALKTEFTTGMILPTKAMATQELTVKRKLSGNTLQVQASSPVALGVRIPTVALHMMELFDTTVEQLYSIFTVKELVQKFSKSTAVLETEKGGKFQMFDGNITGEYLGLLTNKKIIMKWRCGNWPEEHYAMVALNFVPTLGQTELQLKEFLSICKEENMKFCWQKQHFEEIKGSLQLTPLNG

SEQ ID NO: 8364 - protein, 61 aa, Homo sapiens
  misc_feature (1)...(61): Xaa = X or * as defined in Table 2
KWRCGNWPRRTLMPWLHXNFVPTLGQTELQLKEFLSICKEENMKFCWQKQHFEENKKVPAS

SEQ ID NO: 8365 - protein, 267 aa, Homo sapiens
  misc_feature (1)...(267): Xaa = X or * as defined in Table 2
PRQVDPSWGFHSRLSGPWHWTERDATSLSKGKVPGAPGGHPLWKNDAGRGEINELKQVEGEASCSSRKGKLIFFYEWNIKLGWKGIVKESGVKHKGLIEIPNLSEENEVDDTEEFTTGMILPTKAMATQELTVKRKLSGNTLQVQASSPVALGVRIPTVALHMMELFDPTSXSSLYSIFTVKEEERVCVLFSLTNKKIIMKWRWGTWPEEHYAMVALNFVPTLGQTELQLKEFLSIYLXRKVPXNFCWQKQHFEEIKGSLQLTPLNG

SEQ ID NO: 8366 - protein, 113 aa, Homo sapiens
  DOMAIN (26)..(73): HMG1/2 proteins domain identified by eMATRIX, accession number BL00353C, p-value=1.000e-40, raw score of 14.83
  DOMAIN (3)..(61): HMG (high mobility group) box domain identified by PFam, accession name HMG_box, E-value=1.2e-06, PFam score of 34.9
  misc_feature (1)...(113): Xaa = X or * as defined in Table 2
XIRHESGSRSHSHCSTLSSIGDVAKKLGEMWNNTAADDKQPYEKKAAKLKEKYEKDIAAYRAKGKPDAAKKGVVKAEKSKKKKEEEEDEEDEEDEEEEEDXEDDDEEEDDDDE

SEQ ID NO: 8367 - protein, 73 aa, Homo sapiens
  DOMAIN (22)..(73): Neuromodulin (GAP-43) proteins domain identified by eMATRIX, accession number BL00412D, p-value=7.648e-11, raw score of 16.54
CFFLPYCFILPLLWKDIAAYRAKGKPDAAKKGVVKAEKSKKKKEEEEDEEDEEDEEEEEDEEDEDEEEDDDDE

SEQ ID NO: 8368 - protein, 240 aa, Homo sapiens
  DOMAIN (42)..(65): HIGH MOBILITY GROUP (HMG1/HMG2) PROTEIN SIGNATURE domain identified by eMATRIX, accession number PR00886A, p-value=6.400e- 24, raw score of 10.08
  DOMAIN (10)..(178): HMG (high mobility group) box domain identified by PFam, accession name HMG_box, E-value=1.3e-05, PFam score of 25.6
  misc_feature (1)...(240): Xaa = X or * as defined in Table 2
TWGKGDLKKPRANMSSYAFFVQTCRGGHKKKHPDASVNFSESFSKKCSERWKTMSAXREKGKFEDMAKADKARYEREMKTYIPPQRGRQKRKFKDSQLHPRGPPSGLLSSSCSEYRPKIKGEHPGLSIGDVAKKLGRDVGINTAADDKQPYERRAAKLKEKYEKDIAAYRAKGKPDAAKKGVVKAEKSKKKKEEEEGEEDEEDEEDEEIEEDEEDEEDEEEDDGLMNKLGSGAVFFFSCL

SEQ ID NO: 8369 - protein, 149 aa, Homo sapiens
  DOMAIN (71)..(116): Ribosomal protein L22 proteins domain identified by eMATRIX, accession number BL00464B, p-value=8.636e-29, raw score of 28.48
  DOMAIN (3)..(118): Ribosomal protein L22p/L17e domain identified by PFam, accession name Ribosomal_L22, E-value=1.6e-50, PFam score of 181.3
CKSRGSNLRVHFKNTRETAQAIKGMHIRTATKYLKDVTLQKQCVPFRRYNGGVGRCAQAKQWGWTQGRWPKKSAEFLVIEHIQVNKAPKMRRRTYRAHGRINPYMSSPCHIEMILTEKEQIVPKPEEEVAQKKKISQKKLKKQKLMARE

SEQ ID NO: 8370 - protein, 575 aa, Homo sapiens
  DOMAIN (497)..(542): Ribosomal protein L22 proteins domain identified by eMATRIX, accession number BL00464B, p-value=5.345e-31, raw score of 28.48
  DOMAIN (422)..(543): Ribosomal protein L22p/L17e domain identified by PFam, accession name Ribosomal_L22, E-value=1.4e-51, PFam score of 184.8
MAHKEGDMPAEQGFGAGYGFKRFYVPMKEGLKGSWSFLKYQRRRKYSLSAVFHSATMLQDVGEAIQFEVSIGNYGNKFDTTCKPLASTTQYSRAVFDGNYYYYLPWAHTKPVVTLTSYWEDISHRLDAVNTLLAMAERLYPQEKNNGPKVPVELRVNIWLGLSAVEKKFNSFAEGTFTVFAEMYENQALMFGKWGTSGLVGRHKFSDVTGKIKLKREFFLPPKGWEWEGEWIVDPERSLLTEADAGHTEFTDEVYQNESRYPGGDWKPAEDTYTDANGDKAASPSELTCPPGWEWEDDAWSYDINRAVDEKGWEYGITIPPDHKPKSWVAAEKMYHTHRRRRLVRKRKKDLTQTASSTARAMEELQDQEGWEYASLIGWKFHWKQRSSDTFRRRRWRRKMAPSETHGAAAIFKLEGALNTCETAQAIKGMHIRKATKYLKDVTLQKQCVPFRRYNAGVGRCAQAKQRGWTQGRWPRKSTEFLLHMLKNAESNAELKGLDVDSLVIEHIQVNKAPKMRRWTYRAHGRINPYMSSPCRIEMILTEKEQIVPKPEEEVAQKKKISQKKLQKQKLMAWE

SEQ ID NO: 8371 - protein, 197 aa, Homo sapiens
  DOMAIN (117)..(162): Ribosomal protein L22 proteins domain identified by eMATRIX, accession number BL00464B, p-value=2.000e-33, raw score of 28.48
  DOMAIN (87)..(175): Ribosomal protein L22p/L17e domain identified by PFam, accession name Ribosomal_L22, E-value=7.1e-12, PFam score of 46.5
  misc_feature (1)...(197): Xaa = X or * as defined in Table 2
SVKMVRYSLDPGGTPRKSCKSQRGSNLRVPFKDHSXKLPQAHQGVCHIRKSPTKYLKDVHLTRNQCVPIPDRYNGGICKVCRRPKQWGWTQGRWPQKGVLNFLLHMLKNAESNAELKGLDVDFLVIEHIQVNKAPKMRRRTYRAHGRINPYMSSPCHIEMILTEKEQIVPKPEEEVAQKKKISQKKLKETPTLWHGE

SEQ ID NO: 8372 - protein, 57 aa, Homo sapiens
  DOMAIN (47)..(56): Cell division protein domain identified by PFam, accession name GTP_CDC, E-value=0.037, PFam score of 11.1
MSVSARSAAAEERSVNSSTMVAQQKNLEGYVGFANLPNQVYRKSVKRGFEFTLMVVE

SEQ ID NO: 8373 - protein, 67 aa, Homo sapiens
  misc_feature (1)...(67): Xaa = X or * as defined in Table 2
VFVCLFVCFETGSCSVTQAGGQWCNHGSLQPQPATSASXIVGGVAGVYHHFQVFLLLLFNRDEVLLY

SEQ ID NO: 8374 - protein, 60 aa, Homo sapiens
  DOMAIN (30)..(53): Methionine aminopeptidase subfamily 2 proteins domain identified by eMATRIX, accession number BL01202C, p-value=5.846e- 11, raw score of 15.41
LSHCLPLQTTEVGGFGNLLGYWIACSIGCVLSTGMLSHQLKQHVIDGEKTIIQNPTDQQK

SEQ ID NO: 8375 - protein, 592 aa, Homo sapiens
  DOMAIN (448)..(470): Methionine aminopeptidase subfamily 1 proteins domain identified by eMATRIX, accession number BL00680, p-value=4.130e-17, raw score of 14.37
  DOMAIN (369)..(592): metallopeptidase family M24 domain identified by PFam, accession name Peptidase_M24, E-value=3.5e-39, PFam score of 143.6
MSATGDRHPTQGDQEAPVSQEGAQAEAAGAGNQEGGDSGPDSSDMVPAAEVVGVAGPVEGLGEEEGEQAAGLAAVPQGGSAEEDSDIGPATEEEEEEEEGNEAANFDLAVATRRYPAAGIGFVFLYLVHSLLRRLYHNDHIQIANRHLSRLMVGPHAAVPNLWDNPPLLLLSQRLGAGAAAPEGEGLGLIQEAASVQEAASVPEPAVPADLAEMAREPAEEAADEKPPEEAAEEKLTEEATEEPAAEEPTSEEAVAPEGKGASGSSGEAGIHVSKGSGQGCGAGTAGEAGELEIISRFGWEIYWKKGKYSVPVEMIKQQQQVTKSQPEKWDEEAQDAAGEEEKEQEKEKDVENKVFKRKTSSMALLPHTKYQCAPESHQLEASSSGVLVLSLCEKDDAMIMEEIGKIFKKKIEMRKGIAFPTSISVNNCICHFSPLKSNQDYILKEGDLVKIDLGVHVDGFIANVAHTFVVDVAQGTQVTGRKADVIKAIHLCDEAVLRLVKPGNQNTQVTEALNKAAHSLNCTPIEGMLSHQLKQHVIDGEKTIIQNLTDQKKKDHEKAELAVHEVYAVDVLVSSGEGKSKDAGQRTTIYK

SEQ ID NO: 8376 - protein, 474 aa, Homo sapiens
  DOMAIN (336)..(358): Methionine aminopeptidase subfamily 2 proteins domain identified by eMATRIX, accession number BL01202D, p-value=9.500e- 16, raw score of 15.14
  DOMAIN (80)..(353): metallopeptidase family M24 domain identified by PFam, accession name Peptidase_M24, E-value=3.8e-21, PFam score of 83.7
  misc_feature (1)...(474): Xaa = X or * as defined in Table 2
LSQRALRLSPRARSFSLSPACPLPCLLALSLALSSRIEGTLTTACGWGRETEAAAAQGKRGCSGGSRKMSGEDEQQEQTIVDDSLVVTKYKMGGDIANRVLRSLVEASSSGVSVLSLCEKGDAMIMEETGKIFKKEKEMKKGIAFPTSISVNNWCMCHFSPFERSDPGLYSSKEGDLVKIDLGVPCWMGFIANVASHSFVVDVAQGTQVTGRKADVIKAAHLCAEAALRLVKPGNQNTQVTEAWNKVAHSFNCTPIEGMLSHSLKQHVIDGEKPXFQNPTDKQKRAHEKADFEVHEVYAVDVLVKPQERARPKDAGQRTTIYKRDPSKQYGLKMKTSRAFFSEVERRFDAMPFTLRAFEDEKKARMGVVECAQTXTCWQPFNVLYXEGRVILFAQFKFTVLAHGPNGPMRITSGPFEPDFYKSEMEVQDAELKALLQSSAKSEKPQKKKKKKASKTAENATGGILCSLGNIRRK

SEQ ID NO: 8377 - protein, 58 aa, Homo sapiens
  misc_feature (1)...(58): Xaa = X or * as defined in Table 2
MSRTRLVCPSLIPFCIYVVDVGFSPGPQSCTSHEPKDIHAKCELAFLHHQRFYKNEGX

SEQ ID NO: 8378 - protein, 582 aa, Homo sapiens
  misc_feature (1)...(582): Xaa = X or * as defined in Table 2
ASRTAVARWECVLQNVRREPSPSRAWPSQLRPIASTATKCRECGPGYSTPLEAMKGPREEIVYLPCILPETQGTEGPRLSWATVDVDPKSPQYCQVIHRLPMPNLKDELHHSGWNTCGSCFGXLAPSRGTKLVLPSFHLLFGIYVGGTWGSEPRAPKLAQGSLSPRDIHAKCNWAFLHTSHCLASGEVMISSLGDVKGNGKGGFVLLDGETFEVKGTWERPGGAAPLGYDFWYQPRHNVMISTEWAAPNVLRDGFNPADVEAGLYGSHLYVWDWQRIEIVQTLSLKDGLIPLEIRFLHNPDRCPKAFVGCALQAPNIQRFLQRTRGGTLFSGRRXFQVPPRKLKGWLLPKMPGLITTILASPWNDGFLYFSNWLAWGPXGKYDISDPQRPALTGQLFLGGSIVKEGPVQVLEDEELTSPSPEPLVVKGKRVGEGPQMIQLSLDGKRLNNHHGRCTSALGQSSFYPXSQSGERLLVNAGRVEWXDNSKKGGAXKLNPQLSWVDFGEGAPLPKPLPHXARYPGGDCSSDIWILNSPPSHPHSLFWALHFPGGPGLSFCISLGTRTLGKHVPTTAKLRLWQCVES

SEQ ID NO: 8379 - protein, 329 aa, Homo sapiens
  DOMAIN (70)..(101): Eukaryotic-type carbonic anhydrases proteins domain identified by eMATRIX, accession number BL00162A, p-value=8.714e- 30, raw score of 22.92
  DOMAIN (59)..(329): Eukaryotic-type carbonic anhydrase domain identified by PFam, accession name carb_anhydrase, E-value=7.3e-121, PFam score of 414.9
  misc_feature (1)...(329): Xaa = X or * as defined in Table 2
STRAPSPGPFPSSKLAGAYKSWCRRDPRTHSAGAQAAAARSVPIRCPAPTASATMSHHWGYGKHNGPEHWHKDFPIAKGERQSPVDIDTHTAKYDPSLKPLSVSYDQATSLRILNNGHAFNVEFDDSQDKAVLKGGPLDGTYRLISVFTFHWGSFXWDKVSEAYCGIKKKYAAELTLGHWNTKYGDFGKAVQEPDGLAVLGIFLKVGSAKPGLQKVVDVLDSIKTKGKSADFTNFDPRGLLPESLDYWTYPGSLTTPPLLECVTWIVLNFPFSVSSEQVFEIPXTLTFNGGGVNPEELMVDNWRPAQPLKNRQIKASFQIRWSHSLYSK

SEQ ID NO: 8380 - protein, 102 aa, Homo sapiens
  DOMAIN (12)..(85): 60s Acidic ribosomal protein domain identified by PFam, accession name 60s_ribosomal, E-value=7.1e-10, PFam score of 34.6
  misc_feature (1)...(102): Xaa = X or * as defined in Table 2
MAASXNPEVLDITEETLHSRFLEGVRNVASVCLQIGYPTXASVPHSIINGYKRVLALSVETDYTFPLAEKVKAFLADPSAFVAAAXLGCCHHSCSXCCCSPS

SEQ ID NO: 8381 - protein, 230 aa, Homo sapiens
  DOMAIN (216)..(228): RIBOSOMAL PROTEIN P2 SIGNATURE domain identified by eMATRIX, accession number PR00456F, p-value=1.000e-10, raw score of 5.86
  DOMAIN (130)..(230): 60s Acidic ribosomal protein domain identified by PFam, accession name 60s_ribosomal, E-value=9.1e-32, PFam score of 104.2
  misc_feature (1)...(230): Xaa = X or * as defined in Table 2
KCFIVGADNVASKQMQQIRMSFRGKAVCXWGKNTMMRKPIRGHLENNPALEKLLPHIRGNVGFVFTKEDLTEIRDMLLANKVPAAARAGAIAPCEVTVPAQNTGLGPEKTSFFQALGITTKISRGTIEILGVRNVASVCLQIGYPTVASVPHSIINGYKRVLALSVETDYTFPLAEKVKAFLADPSAFVAAAPVAAATTAAPRAAAAPAKVEAKEESEESDEDMGFGLFD

SEQ ID NO: 8382 - protein, 343 aa, Homo sapiens
  DOMAIN (327)..(339): RIBOSOMAL PROTEIN P2 SIGNATURE domain identified by eMATRIX, accession number PR00456F, p-value=1.000e-10, raw score of 5.86
  DOMAIN (331)..(343): 60s Acidic ribosomal protein domain identified by PFam, accession name 60s_ribosomal, E-value=7.1e-11, PFam score of 37.7
  misc_feature (1)...(343): Xaa = X or * as defined in Table 2
RTAVMPREDRATWKSNYFLKIIQLLDDYPKCFIVGADNVGSKQMQQIRIVPWGEACVLMGQKTMMGQAHPKGTLXNNPSLWRKLLPHIRGNLGFCFTQGGPSLEIKGHVCLANKGLPSWLPVVGANCPHGESHWWPAPEHWSSGPEKTSFFPGLXAITTKISQGAPIENPEVNVPAESRTGDQSGEPSEANAAXTCSNISPFSFGAGSSQPGVSTNGSHLPPLKGLDIHRRNLCIFWLSWEGVRKCCPVSVCQIGYPTVASVPHSIINGYKRVLALSVEPDYTFPLAEKVKAFLADPSAFVVAATCGLLPPQLLLVVVAAPAKVEAKEESEESDEDMGFGLFD

SEQ ID NO: 8383 - protein, 169 aa, Homo sapiens
  misc_feature (1)...(169): Xaa = X or * as defined in Table 2
STDLEELPTLGWFXKQELIILSCPFVSLTYRERLPANFFKFQFRNVEYSSGRNKTFLCYVVEAQGKGGQVQASRGYLEDEHAAAHAEEAFFNTILPAFDPALRYNVTWYVSSSPCAACADRIIKTLSKTKNLRLLILVGRLFMWEEPEIQAALKKLKEAGCKLRIMNLV

SEQ ID NO: 8384 - protein, 62 aa, Homo sapiens
  misc_feature (1)...(62): Xaa = X or * as defined in Table 2
YTHILRQLPTLRHEQKSRENCLEEMSLDRFQAAKPSPTPTHHTYKPTLAGHXKIHAMGLTRA

SEQ ID NO: 8385 - protein, 261 aa, Homo sapiens
  misc_feature (1)...(261): Xaa = X or * as defined in Table 2
QLRWDSGARAWPRPACLSPLPQRLLSHSPSMAQKEEAAVATEAASQNGEDLENLDDPQKLKELIELPPFEIVTGERLPANFFKFQFRNVEYSSGRTKTLLCYVVXSTGARGGKVQASWGYLEDEHAACPLQKESFSFNTILPAFRPKPLAVTNVTWGYVSSSPCAACADRIVKTLSKTKNLRLLILVGRLFMWEEPEIQAALKKLKEAGCKLRIMKPQDFRILSWENFVEQEEGESKAFQPWEDIQENFLYYEEKLADILK

SEQ ID NO: 8386 - protein, 240 aa, Homo sapiens
  DOMAIN (168)..(191): G-PROTEIN ALPHA SUBUNIT GROUP S SIGNATURE domain identified by eMATRIX, accession number PR00443C, p-value=1.346e-29, raw score of 14.35
  DOMAIN (6)..(240): G-protein alpha subunit domain identified by PFam, accession name G-alpha, E-value=1.7e-108, PFam score of 373.8
  misc_feature (1)...(240): Xaa = X or * as defined in Table 2
NTEDQRNEEKAQREANKKIEKQLQKDKQVYRATHRLLLLGAGESGKSTIVKQMRILHVNGFNGDEKATKVQDIKNNLKEAIETIVAAMSNLVPPVELANPENQFRVDHILSVMNVPDFDFPPEFYEHAKALWEDEGVRACYERSNEYQLIDCAQYFLDKIDVIKQADYVPSDQDLLRCRVLTSGIFETKFQVDKVNFHIVXRGVGQRDERRKWIQCFNDVTAIIFVVASSSYNMVIREDN

SEQ ID NO: 8387 - protein, 419 aa, Homo sapiens
  DOMAIN (266)..(295): ALPHA G-PROTEIN (TRANSDUCIN) SIGNATURE domain identified by eMATRIX, accession number PR00318D, p-value=3.625e-26, raw score of 16.28
  DOMAIN (73)..(419): G-protein alpha subunit domain identified by PFam, accession name G-alpha, E-value=3.9e-161, PFam score of 548.7
  misc_feature (1)...(419): Xaa = X or * as defined in Table 2
PVRSSAPRRGHSVASAPRSGLRQVAGRRGAALPCSLAPGCGAAAGASPCPGAGRRRAAGGRCLACECTSLTCAGESGKSTIVKQMRILHVNGFNGEGGEEDPQAARSNSDGEKATKVQDIKNNLKEAIETIVAAMSNLVPPVELANPENQFRVDYILSVMNVPDFDFPPEFYEHAKALWEDEGVRACYERSNEYQLIDCAQYFLDKIDVIKQADYVPSDQDLLRCRVLTSGIFETKFQVDKVNFHMFDVGGQRDERRKWIQCFNDVTAIIFVVASSSYNMVIREDNQTNRLQEALNLFKSIWNNRWLRTISVILFLNKQDLLAEKVLAGKSKIEDYFPEFARYTTPEDATPEPGEDPRXTRAKYFIRDEFLRISTASGDGGHYCYPHFTCAVDTENIRRVFNDCRDIIQRMHLRQYELL

SEQ ID NO: 8388 - protein, 440 aa, Homo sapiens
  DOMAIN (241)..(259): ALPHA G-PROTEIN (TRANSDUCIN) SIGNATURE domain identified by eMATRIX, accession number PR00318C, p-value=9.526e-22, raw score of 12.09
  DOMAIN (33)..(425): G-protein alpha subunit domain identified by PFam, accession name G-alpha, E-value=5.6e-87, PFam score of 302.4
  misc_feature (1)...(440): Xaa = X or * as defined in Table 2
GRPRPPPPQPGRAPPPPPPRMGCLGNSKTEDQRNEEKAQREANKKIEKQLQKDKQVYRATHRLLLLGAGESGKSTIVKQMRILHVNGFNGEGGEEDPQAARSNSDGSEKATKVQDIKNNLKEAIETIVAAMSNLVPPVELANPENQFRVDYILSVMNVPDFDFPPEFYEHAKVLWEDEGVRACYERSNEYQLIDCAQYFLDKIDVIKQADYVPSDQDLLRCARVLTSGIFETKFQVDKVNFHMFDVGGQRDERRKWIQCFNDVTAIIFVVGSSSYNMVIREDTGHNGLAGRLXTSPKGIWDNRWAAAPSLVILFLTKQEILLAXESPLAGNSKIKDYFPEFARYTTPEGCYSRRPGEGPHGVYRGQVTPFEDEFLRSSNCPVEDGRHYCYPHFTCAVDTENIRRVFNGLAVDIHFSGMHLSFSYGAGFKEGEPPKFNLKA

SEQ ID NO: 8389 - protein, 260 aa, Homo sapiens
PLFVVFPLSPDIAGRPGGVVGGGPGGGPAWAAPAMNGLSLSELCCLFCCPPCPGRIAAKLAFLPPEATYSLVPEPEPGPGGAGAAPLGTLRASSGAPGRWKLHLTERADFQYSQRELDTIEVFPTKSARGNRVSCMYVRCVPGARQGHQAQGGHPQLAWVGRLGDSNNPAPGGCLLGKSWGTGAALACGYIHLLARYTVLFSHGNAVDLGQMSSFYIGLGSRLHCNIFSYDYSGYGASSGRPSERNLYADIDAAWQALRT

SEQ ID NO: 8390 - protein, 424 aa, Homo sapiens
  misc_feature (1)...(424): Xaa = X or * as defined in Table 2
PAMNGLSLSELCCLFCCPPCPGRIAAKLAFLPPEATYSLVPEPEPGPGGAGAAPLGTLRASSGAPGRWKLHLTERADFQYSQRERSTIEVFPTKSARGNRVSCMYVRCVPGARYTVLFSHGNAVDLGQMSSFYIGLGSRLHCNIFTYDSSGYGASSGRPSERNLYADIDATWQALRTRXGRPLVGRVRARWRPRLTLLRRRQVRHQPGQHPSCTGRSIGHGAPPWDWASRYECAAVILHSPLNLGHARRIPRHPRKTYCFDAFPLHSRKVSKINVSPCSSSHGHEGRGDRLSRTGWALYEALPPRRVEPLWVEGAPGTTDIEPLQPVPGAAGVAFILPGAAQPARLAAAPNRPDLSNKAAPGLHPAPAPTQGLACGPPGRPRWRPGLGGARHEWAVDDVQATRRTHSFPFGSKKKIRENGQLKI

SEQ ID NO: 8391 - protein, 449 aa, Homo sapiens
  DOMAIN (71)..(100): kw REPLICATION REPB REPA INITIATION domain identified by eMATRIX, accession number DM00653A, p-value=7.207e-27, raw score of 20.40
  DOMAIN (55)..(97): Initiator RepB protein domain identified by PFam, accession name RepB_protein, E-value=0.0091, PFam score of 12.3
MTSTVLLQRGSRMKSFAGKEVVFYRPEEDAGDEKGYESFPWFIKRAHSPSRGLYSVHINPYLIPFFIGLQNRFTQFRLSETKEITNPYAMRLYESLCQYRRTSLSKFFMVKGVERTPIFGGLDPSSVIPEGDLGNESSLGNLVWFVDILQGNSPARSPGKVHRQYSTLRASSLFFSPYSSIQQTIGLPELRESLAIDRSQSEHQQKPIWTCAEAFLVVIFGQKSQVAIAAENWREEEPQAGPSGGVPEGIAVRDDSSMRVVVPEDLLVGEDVEVKDDRVQTNPKAPISRSFKASESKNFQKQHEMTEAEGREYKGYARISCFQKFGNLVPSRGHIALARAPEEPQAGPFGGVPEGIAVRDDSSLRVVVPEDLLVGEDVEAEQQKKVAIISAEGYSKAAELIANSLATARIRLMELCKLEAAEDIAYQLSRSRNITYPPAGQSVLLQLPQ

SEQ ID NO: 8392 - protein, 319 aa, Homo sapiens
  DOMAIN (179)..(199): PROHIBITIN SIGNATURE domain identified by eMATRIX, accession number PR00679E, p-value=6.000e-22, raw score of 12.82
  DOMAIN (29)..(246): SPFH domain / Band 7 family domain identified by PFam, accession name Band_7, E-value=1.4e-06, PFam score of 13.8
  misc_feature (1)...(319): Xaa = X or * as defined in Table 2
NFRVEAGVRGVQQKETCAFKVLESIGKLGLALSVAGGAENSALYNVDAGHRAVIFDPIPGQKXQDIVVGEGTHFLIPWVQKPQLSNDCRSRPRNCCQSITGSKDLQNVNITLRHPSSGPVRQPSFPRIFTSIGEDYDERVLAVPSQLENLKSVWARFDAGELITQRELVSRQVSDDLTERAATFGLILDDVSLTHLTFGKDFTXAVEAKQVAQQGKQRRARFVVLEKAEQQKKAAIISAEGDSKAAELIANSLATAGDGLIELRKLGKLQRTFAYQLSTLSGTSPYLPAGQSVLLQLPQLRAHPCLAPPAGLTWGHSPD

SEQ ID NO: 8393 - protein, 58 aa, Homo sapiens
MTKGRSASAKEGQGGIGIGGGHPRSWRLCGQMCRDIKGLWLREIKPCPLTNRAGAGPS

SEQ ID NO: 8394 - protein, 122 aa, Homo sapiens
  DOMAIN (24)..(43): FLAVIN-CONTAINING MONOOXYGENASE (FMO) SIGNATURE domain identified by eMATRIX, accession number PR00370E, p-value=1.563e- 18, raw score of 11.96
  DOMAIN (1)..(118): Flavin-binding monooxygenase-like domain identified by PFam, accession name FMO-like, E-value=0.029, PFam score of -377.9
SIKPSVKEFTETSAVFEDGTMFEAIDSVIFATGYDYSYPFLDETIMKSRNNEVTLFKGIFPPLMEKPTLAVIGLVQSLGAAIPTADLQAWWAAKVFASRWAILSFIHFINEHLLNTCYKLKW

SEQ ID NO: 8395 - protein, 359 aa, Homo sapiens
  DOMAIN (185)..(224): Fucosyl transferase domain identified by eMATRIX, accession number PF00852E, p-value=1.000e-40, raw score of 16.37
  DOMAIN (4)..(359): Fucosyl transferase domain identified by PFam, accession name Fucosyl_transf, E-value=1.1e-151, PFam score of 517.3
MDPLGPAKPQWSWRCCLTTLLFQLLMAVCFFSYLRVSQDDPTVYPNGSRFPDSTGTPAHSIPLILLWTWPFNKPIALPRCSEMVPGTADCNITADRKVYPQADAVIVHHREVMYNPSAQLPRSPRRQGQRWIWFSMESPSHCWQLKAMDGYFNLTMSYRSDSDIFTPYGWLEPWSGQPAHPPLNLSAKTELVAWAVSNWGPNSARVRYYQSLQAHLKVDVYGRSHKPLPQGTMMETLSRYKFYLAFENSLHPDYITEKLWRNALEAWAVPVVLGPSRSNYERFLPPDAFIHVDDFQSPKDLARYLQELDKDHARYLSYFRWRETLRPRSFSWALAFCKACWKLQEESRYQTRGIAAWFT

SEQ ID NO: 8396 - protein, 532 aa, Homo sapiens
  DOMAIN (471)..(493): FLAVIN-CONTAINING MONOOXYGENASE (FMO) SIGNATURE domain identified by eMATRIX, accession number PR00370G, p-value=9.182e- 25, raw score of 10.45
  DOMAIN (2)..(532): Flavin-binding monooxygenase-like domain identified by PFam, accession name FMO-like, E-value=0, PFam score of 1198.5
MSKRVGIIGAGVSGLAAIWCCLEEGLEPTCFERSDDVGGLWKFSDHTEEGRASIYQSVFTNSSKEMMCFPDFPYPDDYPNYIHHSKLQEYIKTYAQKKELLRYIQFETLVSGIKKCPSFLVTGQWVVVTEKDGKQESTIFDAVMICSGHHVYPNLPTDSFPGLDQFRGNYLHSRDYKNPEAFKGKRVLVIGLGNSGSDIAVELSRLATQVIISTRSASWVMSRVWDDGYPWDMMYVTRFASFLRNVLPSFISDWLYVQKMNTWFKHENYGLMPLNGSLRKEPVFNDELPSRILCGTLSIKPSVKEFTETSAVFEDGTMFEAIDSVIFATGYDYSYPFLDETIMKSRNNEVTLFKGIFPPLMEKPTLAVIGLVQSLGAAIPTADLQAWWAAKVFANSCTLPTTNEMMDDTDEKMGKKLKWFGQSQTLQTDYITYVDELGSFIGAKPNIPWLFLTDPRLALEVYFGPCSPYQFRLMGPGKWDGARNAILTQWNRTVKPTRTRVVSEVQRPHPFYNLLKMLSFPLLLLAVTLTFY

SEQ ID NO: 8397 - protein, 185 aa, Homo sapiens
  DOMAIN (89)..(108): FLAVIN-CONTAINING MONOOXYGENASE (FMO) SIGNATURE domain identified by eMATRIX, accession number PR00370E, p-value=1.563e- 18, raw score of 11.96
  DOMAIN (1)..(185): Flavin-binding monooxygenase-like domain identified by PFam, accession name FMO-like, E-value=1.7e-11, PFam score of -203.9
  misc_feature (1)...(185): Xaa = X or * as defined in Table 2
WDMMYVTRFASFLRNVLPSFISDWLYVQKMNTWFKHENYGLMPLNGYLKMEIFFIQKRGALIXXIYLSIKPSVKEFTETSAVFEDGTMFEAIDSVIFATGYDYSYPFLDETIMKSRNNEVTLFKGIFPPLMEKPTLAVIGLVQSLGAAIPTADLQAWWAAKVFASRWAILSFIHFINEHLLNTCY

SEQ ID NO: 8398 - protein, 77 aa, Homo sapiens
  misc_feature (1)...(77): Xaa = X or * as defined in Table 2
IFFFFFFKMESCPFAQAGVQWCDLGSLQALPPGFTPFSCLSLLSSWDYRRPPPHLANFLYFXXTWVFTVLARMVSIS

SEQ ID NO: 8399 - protein, 197 aa, Homo sapiens
  DOMAIN (94)..(113): FLAVIN-CONTAINING MONOOXYGENASE (FMO) SIGNATURE domain identified by eMATRIX, accession number PR00370E, p-value=1.563e- 18, raw score of 11.96
  DOMAIN (1)..(194): Flavin-binding monooxygenase-like domain identified by PFam, accession name FMO-like, E-value=5.4e-10, PFam score of -232.2
ERNCHERRESVALMLMFKCLMLFQCYGLLQVFLGNELFTARVFASHCCSSLRKEPVFNDELPSRILCGTLSIKPSVKEFTETSAVFEDGTMFEAIDSVIFATGYDYSYPFLDETIMKSRNNEVTLFKGIFPPLMEKPTLAVIGLVQSLGAAIPTADLQAWWAAKVFASRWAILSFIHFINEHLLNTCYMQSTVLGIQ

SEQ ID NO: 8400 - protein, 84 aa, Homo sapiens
MHLDLFLNKTLPQIRGVESEQSSRLHPLPDPRGDRHRMADNLPMEIHGSSATSSGKPSDFNQAAVDGAGERGGKEVLGGTLDVL

SEQ ID NO: 8401 - protein, 60 aa, Homo sapiens
MVSTQLRQASDPRTTIGRERFELLLRRVDKLMSPRLPTGTLNPHHFWTLSIPQVGRCNAP

SEQ ID NO: 8402 - protein, 167 aa, Homo sapiens
  DOMAIN (56)..(93): S-100/ICaBP type calcium binding protein domain identified by eMATRIX, accession number BL00303A, p-value=7.787e-12, raw score of 21.77
  misc_feature (1)...(167): Xaa = X or * as defined in Table 2
GELRVNSLHVSTHFQIPEETDIGWLVSPGQGPARPFEDIQLWPPGSLMAAEPTDQSLEESHXDRWITTFFTFARQEGRKDXPQRSNEFKELVTQQLPHLLKDVGSLDRKNXGAWDVNQDFGGSRFNEYWRLIGGAWPKEIRKEEKTLKIQERSKAAWLEDGVGQGRT

SEQ ID NO: 8403 - protein, 112 aa, Homo sapiens
PAGRDAQPGLHHWFLRAQRHHPATGDPHGPLWPPTRAAGWQCLLHCVLHPHGPGLPGRGSSVSVDIPGAVPEWLWWHLPNVHFTHGTGLLPNPSDHATARSKSSPMPSVPSP

SEQ ID NO: 8404 - protein, 112 aa, Homo sapiens
  DOMAIN (47)..(82): Prion protein domain identified by eMATRIX, accession number BL00291A, p-value=7.724e-09, raw score of 4.49
  misc_feature (1)...(112): Xaa = X or * as defined in Table 2
WASVGLSGPRSPPSSRPQXARPRPGAPASLRQADLGRGWRDRLGAPRPRPPRTGGWRSCCRGRGPGSRPRGARAGLGPGAPGGWRRSRRSWTRARAATRPRAAARGSRTPRG

SEQ ID NO: 8405 - protein, 331 aa, Homo sapiens
  DOMAIN (220)..(249): kw REPLICATION REPB REPA INITIATION domain identified by eMATRIX, accession number DM00653A, p-value=7.207e-27, raw score of 20.40
  DOMAIN (44)..(115): Leucine Rich Repeat domain identified by PFam, accession name LRR, E-value=1.1e-10, PFam score of 49.0
MDWRIKDCVDAPTQGTVLGDARPILFFCAPLHPTQDDLFADLANLSHLFLHGNRLRLLTEHVFRGLGSLDRLLLHGNRLQGVHRAAFRGLSRLTILYLFNNSLASLPGEALADLPSLEFLRLNANPWACDCRARPLWAWFQRARVSSSDVTCATPPERQGRDLRALREGRFQACPPAGPTRPGSRARGNSFSNHLYGPSRGFTVYISTHVSFPIFIGLQNRFTQFRLSETKEITNPYAMRLYESLCQYRKPDGSGIVSLRVDWIIERYQLPQSYQRMPDFRRRFLQDKAKMKLPLLLALLFGAVSALHLKTWFQVSPFRPELSPLMPQAQV

SEQ ID NO: 8406 - protein, 359 aa, Homo sapiens; identical to SEQ ID NO: 8395
  DOMAIN (185)..(224): Fucosyl transferase domain identified by eMATRIX, accession number PF00852E, p-value=1.000e-40, raw score of 16.37
  DOMAIN (4)..(359): Fucosyl transferase domain identified by PFam, accession name Fucosyl_transf, E-value=1.1e-151, PFam score of 517.3

SEQ ID NO: 8407 - protein, 107 aa, Homo sapiens
  misc_feature (1)...(107): Xaa = X or * as defined in Table 2
PPWARGSARRPPAWRTVRMPSCHPRMFGAPQKTFLRVSVWSRCRPWGIVMRMMXPMRGQVRRHNSCMAPKTEEXNPTVSATFCCCSFVSCSWPPVTRYSSILFTAAM

SEQ ID NO: 8408 - protein, 58 aa, Homo sapiens
MTPYLTLFLSPLPPKGEIWGLLLFLTPLGFLLPSLPLLLPCPAPAGVRRQWDGPTEGA

SEQ ID NO: 8409 - protein, 513 aa, Homo sapiens
MDPLRAQQLAAELEVEMMADMYNRMTSACHRKCVPPHYKEAELSKGESVCLDRCVSKYLDIHERMGKKLTELSMQDEELMKRIHFIQAQLRRPLAPGGFPVPPLLPRRQRRRGHRAVRLKLRGGRVLHAEKTPAPARLRAGPTGLRTRRESVALPEASAAAGCSFAGDRRLGASMAPTLQQAYRRRWWMACTAVLENLFFSAVLLGWGSLLIILKNEGFYSSTCPAESSTNTTQDEQRRWPGCDQQDEMLNLGFTIGSFVLSATTLPLGILMDRFGPRPVRLVGSACFTASCTLMALASRDVEALSPLIFLALSLNGFGGICLTFTSLTLPNMFGNLRSTLMALMIGSYASSAITFPGIKLIYDAGVAFVVIMFTWSGLACLIFLNCTLNWPIEAFPAPEEVNYTKKIKLSGLALDHKVTGDLFYTHVTTMGQRLSQKAPSLEDGSDAFMSPQDVRGTSENLPERSVPLRKSLCSPTFLWSLLTMGMTQLADHLLHGCCEQDAGVPCDWWPGA

SEQ ID NO: 8410 - protein, 111 aa, Homo sapiens
  misc_feature (1)...(111): Xaa = X or * as defined in Table 2
YLSEVGVSVGIVIRPRQWIRRPEGDPFHGGRLKMDPLRAQQLAAELEVEMMADMYNRMTSACHRKCVPPPFKEAELSKGESVCLDRCVSKYLDIHGAXWGKKFDRVVLLQG

SEQ ID NO: 8411 - protein, 223 aa, Homo sapiens
  misc_feature (1)...(223): Xaa = X or * as defined in Table 2
EHVYKLPSKAKITRPLMLSSARGGAEESERAEPPLRWAFLLLGLGTVVGVDESTAFSWPVCDMCGNGRLEQRPEDRGAFSCGDCSRVVTSPVLKRHLQVSLDCRSRPQCRVKVKLLQRSISSLLRFAAGEDGLYSQWLIRSLLRIWKEADRRWVPEGPGXRCXLRDTQYGFCQFSGATKXRSVFGKEVGLLNCFVQSVTAHPTSCIGLEEIELLSAGGASAEH

SEQ ID NO: 8412 - protein, 964 aa, Homo sapiens
  misc_feature (1)...(964): Xaa = X or * as defined in Table 2
FVLRRRCAQAALPEMPRGSRARGSKRKRSWNTECPSFPGERPLQGRRAGLRTAGAAASLSEAWLRCGEGFQNTSGNPSLTAEEKTITEKHLELCPRPKQETTTSKSTSGLTDITWSSSGSDLSDEDKTLSQLQRDELQFIDWEIDSDRAEASDCDEFEDDEGAVEISDCASCASNQSLTSDEKLSELPKPSSIEILEYSSDSEKEDDLENVLLIDSESPHKYHVQFASDARQIMERLIDSRTKSPETILHTPQNPTVKFPRTAENSAKKKLLRGGLAERLNGLQNRERSAISLWRHQCISYQKTLSGRKSGVLTVKILKLHEECAMQVAMCEQLLGSPATSSSQSVAPRPGAGLKVLFTKETAGYLRGPPQDTVRIFPPWQKLIIPSGSCPVILNTYFCEKVVAKEDSEKTCEVYCPDIPLPRRSISLAQMFVIKGLTNNSPEIQVVCSGVATTGTAWTHGHKEAKQRIPTSTPLRDSLLDVVESQGAASWPGAGVRVVVQRVYSLPSRDSTRGQQGASSGHTDPAGTRACLLVQDACGMFGEVHLEFNMSKARQLEGKSCSLVWGMKVLQKVTRGRTAGIFRLIDTLWPPAIPLKTPGRDQPCEEIKTHLATPAFGYNLTAHPNLGQIDIIDEDPIYKLYQPPVTRCLRDILQMNDLGTRCSFYATVIYQKPTQLKSLLLLWEQREIWLLVTDVTLQTKEERDPRLPKTLLVYVAPLCVLGSEVLEALAGAAPHSLFFKDALRDQGRIVCAXTNWSSLLQKPLLSVVSGASSCELPGPVMLDSLDSATPVNSICSVQGTVVGVDESTAFSWPVCDMCGNGRLEQRPEDRGAFSCGDCPRVGPFPVLKRHCRFFLDCRSKPQCARVRVKLLQRSISSLVKVCPPGEDGSYEVKEVSLGKGSGGLLNCFVQSVTAHPTSCIGWEEIELLSAGGASARTLAVAPRIWGTLPMWPAKGWWVVVVIGG

SEQ ID NO: 8413 - protein, 158 aa, Homo sapiens
  DOMAIN (52)..(69): BETA HAEMOGLOBIN SIGNATURE domain identified by eMATRIX, accession number PR00814A, p-value=6.250e-16, raw score of 12.94
  misc_feature (1)...(158): Xaa = X or * as defined in Table 2
NFALEAKNSARAISSVVQTPMGHFTEEDQALTITSLWGKVNVEDAGGETPGKGSLVVYPWTQRFFDSFGNLVLLPSCPSMGNPQKSKATWPRKVLTSLGDATKHLDDLKGHLLPKPEVNLHLLTSLHVGSXGTFKLPGEILLVTRFWAIPFSAKEFHP

SEQ ID NO: 8414 - protein, 134 aa, Homo sapiens
  DOMAIN (80)..(92): Globins profile domain identified by eMATRIX, accession number BL01033B, p-value=7.000e-14, raw score of 13.81
  DOMAIN (10)..(134): Globin domain identified by PFam, accession name globin, E- value=1.9e-43, PFam score of 156.0
SQTQREPTMVLSPADKTNVKAAWGMFLSFPTTKTYFPHFDLSHGSAQVKGHGKKVADALTNAVAHVDDMPNALSALSDLHAHKLRVDPVNFKLLSHCLLVTLAAHLPAEFTPAVHASLDKFLASVSTVLTSKYR

SEQ ID NO: 8415 - protein, 200 aa, Homo sapiens
  DOMAIN (90)..(104): ALPHA HAEMOGLOBIN SIGNATURE domain identified by eMATRIX, accession number PR00612D, p-value=3.400e-15, raw score of 9.76
  misc_feature (1)...(200): Xaa = X or * as defined in Table 2
PTLLVPTDSERTHPWLLSPADKDQRQGPAWGXGXGSHPPSNVAKTLERMVLFPPPTPKPYFPHFDLSHGSAQVKGHGKKVADALTNAVAHVDDMPNALSALSDLHAHKLRVDPFNFKLLSHCLLGXPWAAHLPRPSFTPCGCKASLDKFPGLFVEAPLLEPSKLPLKLGSLRLAMLLCPFGPFPQPLLPFPAPVPPWSLK

SEQ ID NO: 8416 - protein, 129 aa, Homo sapiens
  DOMAIN (65)..(91): ATP SYNTHASE C SUBUNIT SIGNATURE domain identified by eMATRIX, accession number PR00124C, p-value=9.400e-26, raw score of 12.42
  DOMAIN (41)..(92): ATP synthase subunit C domain identified by PFam, accession name ATP-synt_C, E-value=0.015, PFam score of 12.8
GWDWNCVWEPHHWLCQSLNSVTQAGVQLCNLSSLQPLPLGFKQFSCLSLPSSWDYRNPSLKQQLFSYAILGFALSEAMGLFCLMVAFLISLPCEGAVSTSHSSPASGWPRVFLFLYLPRQPGERGWLRV

SEQ ID NO: 8417 - protein, 359 aa, Homo sapiens; identical to SEQ ID NO: 8395
  DOMAIN (185)..(224): Fucosyl transferase domain identified by eMATRIX, accession number PF00852E, p-value=1.000e-40, raw score of 16.37
  DOMAIN (4)..(359): Fucosyl transferase domain identified by PFam, accession name Fucosyl_transf, E-value=1.1e-151, PFam score of 517.3

SEQ ID NO: 8418 - protein, 283 aa, Homo sapiens
  misc_feature (1)...(283): Xaa = X or * as defined in Table 2
VSLSPRLKCSGTISAHCNLCLPGSNDSPASASQVAGITGAHHHARLIFYFFILFYFIFLRHESDSVTQAGVQLCNLSSLQPLPLGFKHSLASASQVAGITGTHRYPQLIFVFFFFLFSFLRQSLDSVAQAGVQWRGLGSLHPLPPGFTPFSCLSLLSSWDYKRLPTRLANFLYFXXRQGVTVLARMVSISXPRDLPTSASQSAGITDMSHCAQLIFVFLVETGFHQVGQAGLEPPDLKQSTHLGLPKCWDYRREPPRLANFCIFSRDGVSPCWPGWSPTSGFK

SEQ ID NO: 8419 - protein, 174 aa, Homo sapiens
  DOMAIN (17)..(174): HECT-domain (ubiquitin-transferase) domain identified by PFam, accession name HECT, E-value=2.6e-09, PFam score of 21.5
DSGTRDTVLKLLREWYMIISREMFNPMYALFRTSPGDRVTYTINPSSHCNPNHLSYFKFVGRIVAKAVYDNRLLECYFTRSFYKHILGKSVRYTDMESEDYHFYQGLVYLLENDVSTLGYDLTFSTEVQEFGVCEVRDLKPNGGNILVTEENKKEYVHLVCQMRMTGAIRKQFG

SEQ ID NO: 8420 - protein, 176 aa, Homo sapiens
AEADAIIQMVREGQRARRQQQAATSESSQSEASVRREESPMDVDQPSPSAQDTQSIASDGTPQGEKEKEERPPELPLLSEQLALDELWDMLGECLKELEESHDQHAVLETHRTVLNQILRQSTTHLADGPFAVLVDYIRVLDFDVKRKYFRQELERLDEGLRKEDMAVHVRRDHVF

SEQ ID NO: 8421 - protein, 109 aa, Homo sapiens
PVSKESRVAPLCDFCLPFIQSESSQSEASVRREESPMDVDQPSPSAQDTQSIASDGTPQGEKEKEERPPELPLLSEQLSLDELWDMLGECLKELEESHDQHAVLVLQPA

SEQ ID NO: 8422 - protein, 832 aa, Homo sapiens
  DOMAIN (329)..(364): Troponin domain identified by eMATRIX, accession number PF00992A, p-value=3.842e-09, raw score of 16.67
  DOMAIN (249)..(287): UBA domain identified by PFam, accession name UBA, E-value= 7.5e-09, PFam score of 42.8
MTPPHLPPRRASDDEFENLRIKGPNAVQLVKTTPLKPSPLPVIPDTIKEVIYDMLNALAAYHAPEEVGFTSPMLFDERKYPYHLMLQKFLCSGGHNALFETFNWALSMGGKVPVSEGLEHSDLPDGTGEFLDAWLMLVEKMVNPTTVLESPHSLPAKLPGGVQNFPQFSALRFLVVTQKAAFTCIKNLWNRKPLKVYGGRMAESMLAILCHILRGEPVIRERLSKEKEGSRGEEDTGQEEGGSRREPQVNQQQLQQLMDMGFTREHAMEALLNTSTMEQATEYLLTHPPPIMGGVVRDLSMSEEDQMMRAIAMSLGQDIPMDQRAESPEEVACRKEEEERKAREKQEEEEAKCLEKFQDADPLEQDELHTFTDTMLPGCFHLLDELPDTVYRVCDLIMTAIKRNGADYRDMILKQVVNQVWEAADVLIKAALPLTTSDTKTVSEWISQMATLPQASNLATRILLLTLLFEIEVRSWSYPPFQDKDHCKKEKENFEAIAAALAAERESKPPVRDTRESQLAHSKDEPPPLSPAPLTPATPSSLDPFFSREPSSMHISSSLPPDTQKFLRFAETHRTVLNQILRQSTTHLADGPFAVLVDYIRVLDFDVKRKYFHQELERLDEGLRKEDMAVHVRRDHVFEDSYHTASQSLTHTNDWMYPGFSAQLFSASAFLCRYIVFEGEEGQDAGGLLREWYMIISREMFNPMYALFRTSPGDRVTYTINPSSHCNPNHLSYFKFVGRIVAKAVYDNRLLECYFTRSFYKHILGKSVRYTDMESEDYHFYQGLVYLLENDVSTLGYDLTFSTEVGQEILITAHPSQSGRSNSQVHLRTSTA

SEQ ID NO: 8423 - protein, 739 aa, Homo sapiens
  DOMAIN (485)..(540): Flocculin repeat proteins domain identified by eMATRIX, accession number PF00624J, p-value=7.000e-09, raw score of 6.21
MPQLPGISLPEGVDPSFLAALPDDIRREVLQNQLGIRPPTRTAPSTNSSAPAVVGNPGVTEVSPEFLAALPPAIQEEVLAQQTAEQQRPELAQNASSDTLMDPVTLIQTLPSDLRRSVLEDMEDSVLAVMPPDIAAEAQALRREQEARQRQLMHERLFGHSSTSALSAILRSPAFTSRLSGNRGVQYTRLAVQRGGTFQMGGSSSHNRPSGSNVDTLLRLRGRLLLDHEALSCLLVLLFVDEPKLNTSRLHRVLRNLCYHAQTRHWVIRSLLSILQRSSESELCIETPKLTTSEEKGKKSSKSCGSSSHENRPLDLLHKMESKSSNQLSWLSVSMDAALGCRTNIFQIQRSGGRKHTEKHASGGSTVHIHPQAAPVVCRHVLDTLIQLAKVFPSHFTQQRTKETNCESDRERGNKACSPCSSQSSSSGICTDFWDLLVKLDNMNVSRKGKNSVKSVPVSAGENKVSEAQANSGSGASSTTTATSTTSTTTTTAASTTPTPPTAPTPVTSAPALVAATAISTIVVAASTTVTTPTTATTTVSISPTTKGSKSPAKVSDGGSSSTDFKMVSSGLTENQLQLSVEVLTSHSCSEEGLEDAANVLLQLSRGDSGTRDTVLKLLLNGARHLGYTLCKQIGTLLAELREYNLEQQRRAQCETLSPDGLPEEQPQTTKLKGKMQSRFSGLGSASSIQAAVRQLEAEADAIIQMSESSQSEASVRREESPMDVDQPSPSAQDTQSIA

SEQ ID NO: 8424 - protein, 2088 aa, Homo sapiens
  DOMAIN (2048)..(2080): HECT-domain (ubiquitin-transferase) domain identified by eMATRIX, accession number PF00632C, p-value=1.000e-29, raw score of 20.66
  DOMAIN (1774)..(2088): HECT-domain (ubiquitin-transferase) domain identified by PFam, accession name HECT, E-value=4.4e-74, PFam score of 259.5
  misc_feature (1)...(2088): Xaa = X or * as defined in Table 2
KISQYYMHTPISPHPRLLISPSIAPRKVEWTGLKVKSQDRLFAQQLQVELVALPLVLCLAASALGRSTTSFVSLGQPHAAIQTYSQKWPTAVSASPFLPLRGSGTGNGSSRIPRESAPEMATAESLVEELSEDAAGGASPGVELPALGCSELPAAEVSPTASSKNLETICEYAYCMAMLPETGLDPYPKRGFLDLTQERIWTDIPPSPGNIPTTHPLMVRHADHSSLTLGSGSSTTRLTQGIGRSQRTLRQLTANTGHTIHVHYPGNRQPNPPLILQRLLGPSAAADILQLSSSLPLQSRGRARLLVGNDDVHIIARSDDELLDDFFHDQSTATSQAGTLSSIPTALTRWTEECKVLDAESMHDCVSVVKVSIVNHLEFLRDEELEERREKRRKQLAEEETKITDKGKEDKENRDQSAQCTASKSNDSTEQNLSDGTPMPDSYPTTPSSTDAATSESKETLGTLQSSQQQPTLPTPPALGEVPQELQSPAGEGGSSTQLLMPVEPEELGPTRPSGEAETTQMELSPAPTITSLSPERAEDSDALTAVSSQLEGSPMDTSSLASCTLEEAVGDTSAAGSSEQPRAGSSTPGDAPPAVAEVQGRSDGSGESAQPPEDSSPPASSESSSTRDSAVAISGADSRGILEEPLPSTSSEEEDPLAGISLPEGVDPSFLAALPDDIRREVLQNQLGIRPPTRTAPSTNSSAPAVVGNPGVTEVSPEFLAALPPAIQEEVLAQQRAEQQRRELAQNASSDTPMDPVTFIQTLPSDLRRSVLEDMEDSVLAVMPPDIAAEAQALRREQEARQRQLMHERLFGHSSTSALSAILRSPAFTSRLSGNRGVQYTRLAVQRGGTFQMGGSSSHNRPSGSNVDTLLRLRGRLLLDHEALSCLLVLLFVDEPKLNTSRLHRVLRNLCYHAQTRHWVIRSLLSILQRSSESELCIETPKLTTSEEKGKKSSKSCGSSSHENRPLDLLHKMESKSSNQLSWLSSVSMDAALGCRTNIFQIQRSGGRKHTEKHASGGSTVHIHPQAAPVVCRHVLDTLIQLAKVFPSHFTQQRTKETNCESDRERGNKACSPCSSQSSSSGICTDFWDLLVKLDNMNVSRKGKNSVKSVPVSAGGEGETSPYSLEASPLGQLMNMLSHPVIRRSSLLTEKLLRLLSLISIALPENKVSEAQANSGSGASSTTTATSTTSTTTTTAASTTPTPPYVHPPRVTSAPALVAATAISTIVVAASTTVTTPTTATTTVSISPTTKGSKSPAKVSDGGSSSTDFKMVSSGLTENQLQLSVEVLTSHSCSEEGLEDAANVLLQLSRGDSGTRDTVLKLLLNGARHLGYTLCKQIGTLLAELREYNLEQQRRAQCETLSPDGLPEEQPQTTKLKGKMQSRFDMAENVAIVASQKRPLGGRELQLPSMSMLTSKTSTQKFFLRVLQVIIQLRDDTRRANKKAKQTGRLGSSGLGSASSIQAAVRQLEAEADAIIQMVREGQRARRQQQAATSESSQSEASVRREESPMDVDQPSPSAQDTQSIASDGTPQGEKEKEERPPELPLLSEQLSLDELWDMLGECLKELEESHDQHAVLVLQPAVEAFFLVHATERESKPPVRDTRESQLAHIKDEPPPLSPAPLTPATPSSFDQFFSGEPSSMHISSSLPPDTQKFLRFAETHRTVLNQILRQSTTHLADGPFAVLVDYIRVLDFDVKRKYFRQELERLDEGLRKEDMAVHVRRDHVFEDSYRELHRKSPEEMKNRLYIVFEGEEGQDAGGLLREWYMIISREMFNPMYALFRTSPGXSESPNTINPSSHCNPNHLSYFKFVGRIVAKAVYDNRLLECYFTRSFYKHILGKSVRYTDMESEDYHFYQGLVYLLENDVSTLGYDLTFSTEVQEFGVCEVSWTSNPMGANILVTEEIKEGVLLHLVCQMRMTGAFRKQLPAFLEGFYEIIPKRLISIFTEHELELLISGLPTIDIDDLNPNTEYHKYQSNSIQIQWFWKKHCRSFRIKTDPCPKFPPSLFTGYLPRVTPGKGFACPSKGMEWGFQEVFRFPSEVDRSTDRLPSAHTCFNQLDLPAYESFEKLRHMLLLAIQECSEGFGLA

SEQ ID NO: 8425 - protein, 246 aa, Homo sapiens
  DOMAIN (65)..(204): NifU-like N terminal domain identified by PFam, accession name NifU_N, E-value=4.9e-17, PFam score of 70.0
  misc_feature (1)...(246): Xaa = X or * as defined in Table 2
MAAAGAFRLRRAASALLLRSPRLPARSCRPRPDSITRSPPDVRLPLEKQLKNAINQRGTKGPYIRYYPEVVDHYENPRNVGSLDKTSKNVGTGLVGAPACGDVMKLQIQVGXKRGRFVGCXGFKTFSAVGSAIASSSLSHLNGVKGKTVEEALTIKNTDIAKELCLSFPWKLALAPMLGLKVAFKAALADYKIETRTQKKGEAEKKWSPPLGEASSRPTPAVPQPAVPVTLDVSGSRLPSPTEGAL

SEQ ID NO: 8426 - protein, 275 aa, Homo sapiens
  DOMAIN (69)..(147): RNA recognition motif. domain identified by PFam, accession name rrm, E-value=0.026, PFam score of 19.2
  misc_feature (1)...(275): Xaa = X or * as defined in Table 2
SARGSTVAAIICSPRLTPPRTRDAKAACERLRRVGVEPQLSRGLALFWSPRPNPPEEMSGGLAPSKSTVYVSNLPFSLTNNDLYPDIFQSIGKSLXKVTNQXKSKRYHRKEVKGVAFILFLDKDSAQKCARAINNKQLFGRVIKASIAIDNGRAAEFIRRRNYFDKSKCYECGESGHLSYACPKNMLGEQXRLPKKKEKKKKKKAPEPEEEIEEVEESEDEGEDPALDSLSQAIAFQQAKIEEEQKKWETQFQGVPSNIRMIPRRTRIKKSTYFQ

SEQ ID NO: 8427 - protein, 118 aa, Homo sapiens
  DOMAIN (24)..(79): APOLIPOPROTEIN PLASMA LIPID TRANSPORT H domain identified by eMATRIX, accession number PD01733B, p-value=1.000e-40, raw score of 20.44
  DOMAIN (2)..(116): Apolipoprotein A1/A4/E family domain identified by PFam, accession name Apolipoprotein, E-value=0.00026, PFam score of -15.7
  misc_feature (1)...(118): Xaa = X or * as defined in Table 2
XNLKLLDNWDSVTSTFSKLREQLGPVTQEFWDNLEKETEGLRQEMSKDLEEVKAKVQPYLDDFQKKWQEEMELYRQKVEPLRAELQEGARQKLLPVLESFKVSFLSALEEYTKKLNTQ

SEQ ID NO: 8428 - protein, 96 aa, Homo sapiens
  DOMAIN (27)..(68): Ferritin iron-binding regions proteins domain identified by eMATRIX, accession number BL00540A, p-value=4.176e-20, raw score of 15.06
  DOMAIN (38)..(93): Ferritins domain identified by PFam, accession name ferritin, E-value=1.6e-31, PFam score of 109.2
LSQGPRRHSSAVQPPPHSHRGHHHDDCASPSQVRQNYAINRQINVELYASYIYLSMSYYFDHNDVALKNFAKYFLHQSHEEREHAKKLMKLLHFDC

SEQ ID NO: 8429 - protein, 185 aa, Homo sapiens
  DOMAIN (44)..(99): APOLIPOPROTEIN PLASMA LIPID TRANSPORT H domain identified by eMATRIX, accession number PD01733B, p-value=1.000e-40, raw score of 20.44
  DOMAIN (1)..(185): Apolipoprotein A1/A4/E family domain identified by PFam, accession name Apolipoprotein, E-value=2.1e-45, PFam score of 164.3
RSPTALQDESCGADLGRALPDGLKLLDNWDSVTSTFSKLREQLGPVTQEFWDNLEKETEGLRQEMSKDLEEVKAKVQPYLDDFQKKWQEEMELYRQKVEPLRAELQEGARQKLHELQEKLSPLGEEMRDRARAHVDALRTHLAPYSDELRQRLAARLEALKENGGARLAEYHAKATEHLSTLSEK

SEQ ID NO: 8430 - protein, 38 aa, Homo sapiens
KAKPALEDLRQGLLPVLESFKVSFLSALEEYTKKLNTQ

SEQ ID NO: 8431 - protein, 119 aa, Homo sapiens
  DOMAIN (32)..(81): APOLIPOPROTEIN PLASMA LIPID TRANSPORT H domain identified by eMATRIX, accession number PD01733A, p-value=5.600e-10, raw score of 17.77
  DOMAIN (2)..(119): Apolipoprotein A1/A4/E family domain identified by PFam, accession name Apolipoprotein, E-value=1.7e-05, PFam score of 11.0
MKAAVLTLAVLFLTGSQARHFWQQDEPPQSPWDRVKDLATVYVDVLKDSGKDSVTSTFSKLREQLGPVTQEFWDNLEKETEGLRQEMSKDLEEVKAKVQPYLDDFQKKWQEEMELYRQK

SEQ ID NO: 8432 - protein, 359 aa, Homo sapiens
  DOMAIN (259)..(309): APOLIPOPROTEIN E PRECURSOR APO-E GLYCOPROTEIN PLAS domain identified by eMATRIX, accession number PD02807D, p-value=6.084e- 09, raw score of 7.99
  DOMAIN (76)..(359): Apolipoprotein A1/A4/E family domain identified by PFam, accession name Apolipoprotein, E-value=5.3e-19, PFam score of 76.6
  misc_feature (1)...(359): Xaa = X or * as defined in Table 2
GGASCCLPRSLWLPSSRFRPCPRPGLWVPEVFSRSVPFSSPGCNEWGSTGLLHAEGTPLSQALLLLQVPHGPFRMKAAVLTLAVLFSDGXARRRHFWQGGXSPPRAAWDRVKDLATRVPWTVLKEQRTETYVSQFEGSALGKQLNLKAPLTTGDSVDLPPFSKLREQFGPCXPRDFLGINLGKRETEGPXGKGRXGKDLWKEVKAKVAALTLDDFQERSWQEEIGAFTRQKVEPLARKNFQEGARPESLHELARRSLSPLGEEMRDRARAHVDALRTHLAPYSDELRQRLGARLGALRENGGARMGQYHAQATEHLSTLSEKAKPALEDLRQGLLPVLESFKVSFLSALEEYTKKLNTQ

SEQ ID NO: 8433 - protein, 132 aa, Homo sapiens
  misc_feature (1)...(132): Xaa = X or * as defined in Table 2
INDKRKKKRPARPGAGGLHLQLCLSQPPQPRGHPAPIPTGQAGPRDSGPGASPXGRDPPSDXWTPADLGSDPWAGPLPTPQEPXGSRWPSSATVSLSASTATGTPCTYSHGTGWTQRLWTRGLPLSRDPPSD

SEQ ID NO: 8434 - protein, 349 aa, Homo sapiens
  DOMAIN (91)..(102): AT-HOOK-LIKE DOMAIN SIGNATURE domain identified by eMATRIX, accession number PR00929C, p-value=3.948e-09, raw score of 5.26
  misc_feature (1)...(349): Xaa = X or * as defined in Table 2
RGLAGNFEDRKSAHYVFQTFRGGERRSLELEAHLEGWSLGLRFLLGPLKGPPAQGHFHPSLPISSWRGAGVPHSRSPFPTLGIPGXIFPPKPGRRPRGPPRKEDLGPGMVGRPSGPLPQLPSAVLSADPAGPRPHVPFCEPSPSHGVRASPGSKWVEEEIGGEEGRQPKCRQAFQEAWLMQGGARGQGLPGSGCWRINKPSKPSKRGGKGLTCQTFSTNICXSPPLMPRSLPGPSFILHLISSQQPXSGLLFIDPIPPEKGRGGLSERWGRAFGDSVACSFQKPTPGPWEVFEQDAWPNPWPQGPPPENFPKGNPSHSRNIHKGDEQSPVRTKTEPTPWGGKHSQFASR

SEQ ID NO: 8435 - protein, 46 aa, Homo sapiens
  misc_feature (1)...(46): Xaa = X or * as defined in Table 2
KCLCPPRRCPQPLTPYPCXGVKCPPSEIKYKPXMCPIGCPKPSIQC

SEQ ID NO: 8436 - protein, 107 aa, Homo sapiens
KNYYNYLSHISNSTGFFPIFLSYFRKTRIQDLNRIFPLSEDYSGSGFGSGSGSGSGSGSGFLTEMEQDYQLVDESDAFHDNLRSLDRNLPSDSQDLGQHGLEEDFML

SEQ ID NO: 8437 - protein, 164 aa, Homo sapiens
  misc_feature (1)...(164): Xaa = X or * as defined in Table 2
TKLVMMQKLLKCSRLVLALALILVLESSVQGYPTRKPRHQWVRCNPDSSSAHCLEEKGHMFELLPGESNKIPRLRTDLFPKTRIQDLNRIFPLSEDYSGSGFGSGSGSGSGSGSWFLTGNGNRNYQLVDESDAFQXQPLGSLDRNLPSDSQDLGQHGLEEDSMV

SEQ ID NO: 8438 - protein, 114 aa, Homo sapiens [sequence omitted]

SEQ ID NO: 8439 - protein, 30 aa, Homo sapiens
LRVQACTVVLVNFLYFFCRDGVSLCGPDWS

SEQ ID NO: 8440 - protein, 121 aa, Homo sapiens
QQHGRDLWGCRGLIGTDKCVERINEMVNRAKRKAGVDPLVPLRMLGGVVLISGTGSNCRLINPDGSESGCGGWGHMMGDEGSAYWIAHQAVKIVFDSIDNLEAAPHDIGYVKQAMFHYFQV

SEQ ID NO: 8441 - protein, 102 aa, Homo sapiens
KEHNFVTSVFARGTMGSGLTHLLGNSLTEKCKLPSWLPITAEGNSLKGFLLALTQGKEIQAQNFFSSFILMKLRHSSALGGASLLPMDYSANAIAFYSYTFS

SEQ ID NO: 8442 - protein, 40 aa, Homo sapiens
FPVRRFRLEGRRCQAVRDANGGTISDGSSSMAAIYGGVEG

SEQ ID NO: 8443 - protein, 17 aa, Homo sapiens
LCYATACPQSSWELWPR

SEQ ID NO: 8444 - protein, 45 aa, Homo sapiens
ICGKQQLYADRSAWHASNGNSGLAGCGGGTARARLLGPLLPRDAG

SEQ ID NO: 8445 - protein, 26 aa, Homo sapiens
RGFQQTGGGGTARARLLGPLLPRDAG

SEQ ID NO: 8446 - protein, 46 aa, Homo sapiens
DQEPTNSGHTYTLGTGRSGFACRCLEPGSAAPCPSHCRSAGPEGTL

SEQ ID NO: 8447 - protein, 981 aa, Homo sapiens
  DOMAIN (261)..(278): G-protein coupled receptors proteins domain identified by eMATRIX, accession number BL00237D, p-value=1.000e-09, raw score of 11.23
  DOMAIN (203)..(269): 7 transmembrane receptor (rhodopsin family) domain identified by PFam, accession name 7tm_1, E-value=4.5e-10, PFam score of 34.2
  misc_feature (1)...(981): Xaa = X or * as defined in Table 2
MNTSQLLEIANQVFVNRAAVSLEENRKENGHQARRNTDLVVSCSNQRGQESLEKLLGRYFYISHLSALAKTMRQRFVTCRHHNARQGPAVPPGIQAYAAAPIEDLQAIRNNITAGVYTPCDIGGNIILCPLAYYQRYQTGVVYTPCDIGSIIILSTSGCPSHTEPRNLTGVSEFLLLGLSEDPELQPVLPGLSLSMYLLTVLRNLLIILAVSSDSHLHTPMYFFLSNPSWADIAFTSATVPKMIVDMQSGVVVSVMYTVVTPMLNPFIYCLRNRDIQSALWRLRSRTVESHDLFHPFSCVGIHCQVSELDAVMSLDTASGAFRWMAFGVEVAAPAYQPSCSCPGSQSSGEGARKGWSSRSLSETVSAVYSGLTQERRCQPQSPTSTVGSIIMNGSNMANTSPSVKSKEDQGLSGHDEKENPFAEYMWMENEEDFNRQVEEELQEQDFLDRCFQEMLDEEDQDWFIPSRDLPQAMGQLQQQLNGLSVSEGHDSEDILVHGRRSLSPQLRGGLAEHASQPTRPRAVRTRNLTRDCQQLPGVYRQAGSRRTGGAAADRSRSTWRRHQKEDSLRDAAIPGSYRRPAPRMRTRTGSQLAAREVTGSGAVPRQLEGRRCQAGRDANGGTSSDGSSSMAAIYGGVEGGGTRSEVLLVSEDGKILAEADGLSTIHWLIGTDKCVERINEMVNRAKRKAGVDPLVPLRSLGLSLSGGDQEDAGRILIEELRDRFPYLSESYLITTDAAGSIATATPDGGVVLISGTGSNCGLINPDGSESGCGGWGHMMGDEGSAYWIAHQAVKIVFDSIDNLEAAPHDIGYVKQAMFHYFQVPDRLGILTHLYKDLXXNARFAGFCARKIAEGAQQGDPLSRYIFQGRLGRCWGRHIVAVLPEIDPGLIPQGKIGLPILSVGSVWKSWELLKEGFLLALTQGREIQAQNFFSKLSPLMKAXGNSSALGGASALGARHIGHLLPMDYSANAIAFYSYTFS

SEQ ID NO: 8448 - protein, 385 aa, Homo sapiens
  DOMAIN (267)..(283): GLYCOSYL HYDROLASE FAMILY 35 SIGNATURE domain identified by eMATRIX, accession number PR00742F, p-value=8.479e-10, raw score of 11.91
  DOMAIN (32)..(169): KH domain identified by PFam, accession name KH-domain, E- value=7.3e-23, PFam score of 89.4
  misc_feature (1)...(385): Xaa = X or * as defined in Table 2
PRNEPNSPERRPPLAMDAGVTESGLNVTLTIRLLMHGKEVGSIIGKKGESVKRIREESGARINISEGNCPERIITLTGPTNAIFKAFAMIIDKLEERDINSSMTNSTAASRPPVTLRLVVPATQCGSLIGKGGCKIKEIRESTGAQVQGWRGICLPNSTERAITIAGVPKSVTECVQADFAWVMLETLSPSFPQGRSSWTIPYQPMPASFPSSSCAGGQDRCSDVGGYPHGHPXPGKGPLLDGLFDFKGQHTISPLDLGQAXTRIGKPTSLNVHMMHGGTGFAGIDSASPEVKGYWAKFECIYPKTPHELTIPNNLIGCIIGRQADSDLMRSAQMSGAQDQKLANPVEGSSGRQVTITGLCCPVISLAQYLINARLSSEKGMGCS

SEQ ID NO: 8449 - protein, 41 aa, Homo sapiens
VILKELCGNLCFLLCGFNERNLNMSRVDVYTTHSPCSFSPK

SEQ ID NO: 8450 - protein, 262 aa, Homo sapiens
  DOMAIN (173)..(228): Ferritin iron-binding regions proteins domain identified by eMATRIX, accession number BL00540B, p-value=1.757e-09, raw score of 18.82
  DOMAIN (161)..(262): Ferritins domain identified by PFam, accession name ferritin, E-value=4e-12, PFam score of 44.1
  misc_feature (1)...(262): Xaa = X or * as defined in Table 2
SSGFPASTVLGRNPALVPHPGRPPIASPPSPLHRTLGLPQGPRRRSSAAQPPPPAAASPLVAAMKTAVPPRKVRQNYHQGLKRAAHQPARINPGSSTASYVLPCPMSYLLLTRDDGGLXRTFAKYFLHQFSMKEEGNHAEKTXXKLAEPNEGGRNLSFKDIQEPDCSDWGERGLNAMECALHLEKNVNQSLLELHKTGPLTKMTPHLCDFIETHYLNEQGESHQKNLGDHVTNLRKMGAPESGCAEYLFDKAHPWGDSDNES

SEQ ID NO: 8451 - protein, 449 aa, Homo sapiens
  DOMAIN (305)..(349): Prephenate dehydratase proteins domain identified by eMATRIX, accession number BL00857D, p-value=8.594e-09, raw score of 31.60
  DOMAIN (165)..(449): alpha/beta hydrolase fold domain identified by PFam, accession name abhydrolase, E-value=6.3e-11, PFam score of 49.7
  misc_feature (1)...(449): Xaa = X or * as defined in Table 2
LAEQIVPRGVGIRPPDKADQAPCRSPIRTPAPESWHCDSRQRFRQDSSRMKMRVLGLVVCLVLWTLHSEGSGGKLTAVDPETNMNVSEIISYWGFPSEEYLVETEDGYILCLNRIPHGRKNHSDKGPKPVVFLQHGLLADSSNWVTNLGNSRLGFILADAAIDVWMGNTRGNTWSPKHKTLSVSQDEFWAFSYDEMAKYDLPASINFLLNKTGQEQVYYVGHSQGTTIGFIAFSQMLELAKGLKMFFAWGPVASVAFCTSPMAKLGRLPDHLIKDLFGDEEFLPQSAFWKVAGVPHLATHVILKELCGNLCFLLCGFNERNLNMSRVDVYTTHSPAGTFVQNMXHWSQAVKFQKFQAFDWGSSAKNYFHYNQSYPPTYNVKDMLVPTAVXTGGHDWLEDVYGVNIXLTQITNLVFHESIPEWEHLDFIWGLDAPWRLYNKIINLMRKYQ

SEQ ID NO: 8452 - protein, 127 aa, Homo sapiens
  DOMAIN (2)..(16): ACTIN SIGNATURE domain identified by eMATRIX, accession number PR00190E, p-value=1.450e-19, raw score of 7.16
  DOMAIN (1)..(111): Actin domain identified by PFam, accession name actin, E- value=8.2e-52, PFam score of 171.3
  misc_feature (1)...(127): Xaa = X or * as defined in Table 2
ANREKMTQIMFETFNVPAMRACPSTPPEDHRHRAGLRRRVTHNVPIYEGYALPHAIMRLDLAGRDLTDYLMKILTERGYSFVTTAEREIVRDIKEKLCYVALDFENEMATAPPPPPWKRATSCQTGX

SEQ ID NO: 8453 - protein, 97 aa, Homo sapiens
  DOMAIN (9)..(44): Actins proteins domain identified by eMATRIX, accession number BL00406A, p-value=1.643e-37, raw score of 9.95
  DOMAIN (1)..(97): Actin domain identified by PFam, accession name actin, E- value=7.7e-51, PFam score of 168.1
MCDEDETTALVCDNGSGLVKAGFAGDDAPRAVVPSIVGRPRHQGVMVGMGQKDSYVGDEAQSKRGILTLKYLIEHGIITNWDDMEKNGPHLLHELRV

SEQ ID NO: 8454 - protein, 404 aa, Homo sapiens
  DOMAIN (71)..(94): ACTIN SIGNATURE domain identified by eMATRIX, accession number PR00190C, p-value=4.789e-30, raw score of 11.49
  DOMAIN (9)..(404): Actin domain identified by PFam, accession name actin, E- value=7e-153, PFam score of 503.0
  misc_feature (1)...(404): Xaa = X or * as defined in Table 2
LPAQKLDTMCDEDETTALVCDNGSGLVKAGFAGDDAPRAVFPSIVGRPRHQGVMVGMGQKDSYVGDEAQSKRGILTLKYPIEHGIITNWDDMEKIWHHTFYTNELRVGFPKEDPTTLAXPKAPLKFPKANREEMNEPQIMFETFNVPAMYVAIQAVLCSLYASGRTTGIVLDSGDGVTHNVPIYEGYALPHAIHAPWTMAGRDLTDYLMKILTERGYSFVTTAEREIVRDIKEKLCYVALDFENEMATAAIHPSSLEKSYELPDGQVITIGNERFRCPETLFQPSFLSGMEVGGAFHETTYNSIMKCYIRHPGRTFYANNVLSGGTTIVPLGFADRMQERDSPALAPQHPXGSRIHSPPPERKYSVWIGGFHPWPRLSTSQQKWVSPKQEYDEAGPSIVHRKCF

SEQ ID NO: 8455 - protein, 84 aa, Homo sapiens
  misc_feature (1)...(84): Xaa = X or * as defined in Table 2
MTSALTQGLERIPDQLGYLVLSEGAGLASSGDLENDEHAASAMSELVSTACGLRLHRGMNVHFKRLSVVFGEHTLLETRVLTEX

SEQ ID NO: 8456 - protein, 76 aa, Homo sapiens
TSALTQGLERIPDQLGYLSSGDLENDEQAASAISELVSTACGFRLHRGMNVPFKRLSVVFGEHTLLVTVSGQRVFV

SEQ ID NO: 8457 - protein, 131 aa, Homo sapiens
  misc_feature (1)...(131): Xaa = X or * as defined in Table 2
EAGRREAEKPLGSSPPLPVPPPRAGAGAHQTGAXRAHSMPRCSRKPQAVLTSSEMALAACSSFSRSPDDASTAPSLSTRXPSTTTKGRGRGSPDRRLKGTFNAAVQPETAGCADQLRDGTGCLLIILQVPR

SEQ ID NO: 8458 - protein, 379 aa, Homo sapiens
  DOMAIN (266)..(295): w MYOD MYOBLAST DETERMINATION SHORT domain identified by eMATRIX, accession number DM00984A, p-value=3.060e-09, raw score of 11.81
  misc_feature (1)...(379): Xaa = X or * as defined in Table 2
NPGPVQVGVEGGQEEGPSSKKQAKTRQWSPASITEAPGPKIRFSEPLRPPAGCRHQLASRPRVLPPSPQTPFCPGPPSPSSVCSPKDHWRRDTPDRRLKGTFMPRCSRKTAGCAEQLQRWHWLPAHHSPGPQMTPALHLHSVPGSRAGLGFAPAPGSAQKSSGXRCKSXEACXRDGRPDTLHLQTQVSGLTWPQVFSFPSQVPSRPPPPYMVLNTDLPEPPSAPTLAPRLPWPSTSHLCYPKGPVLPLWPLPSDPSSPPFVSARPAALPAAPEHPPTDPSPAFSSPSLPFPSPLPPRADRRXGWSAGPPGGEPHRLGSRDAEPPAGPLAHASSLTIAVFGAGGAPYQIGSFRLQAPVTCLQPLRSSFCLRHWPLAPPLA

SEQ ID NO: 8459 - protein, 114 aa, Homo sapiens
PTEYENLFPCIKEAFVVEEWVKETLAVLWPAKQYPFVTPIEERILMEEGKAFPPSRSTAKQKLDGNPVSPTPVIGLSPTPNKEEKHLNLCPFEPTGHLDGARDTAGPSWLHHRF

SEQ ID NO: 8460 - protein, 940 aa, Homo sapiens
  DOMAIN (256)..(280): LETHAL(2) GIANT LARVAE PROTEIN SIGNATURE domain identified by eMATRIX, accession number PR00962D, p-value=9.511e-10, raw score of 10.40
  DOMAIN (20)..(272): WD domain, G-beta repeat domain identified by PFam, accession name WD40, E-value=7.5e-54, PFam score of 192.3
  misc_feature (1)...(940): Xaa = X or * as defined in Table 2
VAGNKRGFPGLDRRTMPLRLDIKRKLTARSDRVKSVDLHPTEPWMLASLYNGSVCVWNHETQTLVKTFEVCDLPVRAAKFVARKNWVVTGADDMQIRVFNYNTLERVHMFEAHSDYIRCIAVHPTQPFILTSSDDMLIKLWDWDKKWSCSQVFEGHTHYVMQIVINPKDNNQFASASLDRTIKVWQLGSSSPNFTLEGHEKGVNCIDYYSGGDKPYLISGADDRLVKIWDYQNKTCVQTLEGHAQNVSCASFHPELPIIITGSEDGTVRIWHSSTYRLESTLNYGMERVWCVASLRGSNNVALGYDEGSIIVKLGREEPAMSMDANGKIIWAKHSEVQQANLKAMGDAEIKDGERLPLAVKDMGSCEIYPQTIQHNPNGRFVVVCGDGEYIIYTAMALRNKSFGSAQEFAWAHDSSEYAIRESNSIVKIFKNFKEKKSFKPDFGAESIYGGFLLGVRSVNGLAFYDWDNTELIRRIEIQPKHIFWSDSGELVCIATEESFFILKYLSEKVLAAQETHEGVTEDGIEDAFEVLGEIQEIVKTGLWVGDCFIYTSSVNRLNYYVGGEIVTIAHLDRTMYLLGYIPKDNRLYLGDKELNIISYSLLVSVLEYQTAVMRRDFSMADKVLPTIPKEQRTRVAHFLEKQGFKQQALTVSTDPEHRFELALQLGELKIAYQLAVEAESEQKWKQLAELAISKCQFGLAQECLHHAQDYGGLLLFGHCPLKMPIMVNQPSQRVRRRDGQKXLAFMASFLPGRVVACLRLXIRTGRLPEAAFLARTYLPSQVSRVVKLWRENLSKVNQKAAESLAAPNRVSKHLFPCIKRRPFLLKNWVKETHVDLGPAKTIPTLSRPNEERNAHGSGQKTFSPSRSTASTGTLMGNPAFSLPPVIVALPTTANQEKKRVYPELEVDLDNLELEDIATTDINLDEDYFGGLTGMAFHLP

SEQ ID NO: 8461 - protein, 133 aa, Homo sapiens
  misc_feature (1)...(133): Xaa = X or * as defined in Table 2
HGKIFYFILFYFYFFIFLRRSLALSPQVRTADCSGAISAHCKLRLPGFTPFSCLSLPSSWDYRRPHPRPANFFLYFLVETGVSPCXPGMGLDLLNSSIPPRLGLPKCWDYRREPPRPVETFFLKAENVRVNYI

SEQ ID NO: 8462 - protein, 133 aa, Homo sapiens
  misc_feature (1)...(133): Xaa = X or * as defined in Table 2
MLLICSFAPATLXXXXXXXXXXXXXXXXXXXXXXXXXXXXXXXXXXXXXXXXXXXXXXXXXXXXXXXXXXXXXXXXXXXXXXXXXXXXXXXXXXXXXXXXXXXXXXXXXXXXXXXXXXXXXXXXXXXXXXVSA

SEQ ID NO: 8463 - protein, 28 aa, Homo sapiens
KKTCSLNNCFAEMLLICSFAPATLPQPL

SEQ ID NO: 8464 - protein, 84 aa, Homo sapiens
  misc_feature (1)...(84): Xaa = X or * as defined in Table 2
MYLGISRRLSSMLTFLAYLHPRERPPHRAPXXXXXXXXXXXXXXXXXXXXXXXXXXXXXXXXXXQQWAQGTGISIPRTCTSTGL

SEQ ID NO: 8465 - protein, 45 aa, Homo sapiens
KSGLRAHPGIVPSLELNYDIDYFAHMFFDDFLLIITLLSYYISFC

SEQ ID NO: 8466 - protein, 203 aa, Homo sapiens
MASWDEKDLTVPQPDTRKGSVLSYLHPLIDLVQTQGLDTSIHTEDSQMGIFSSELSPHFRFAYPAVFSASPLGVYLLGGVEGEAPVGTGANGSSGWAWSQWARTQRLAVPQAPGSRAPDLQPAMPEPPHAPSSPIWAPAQGSLPDKCRPLLHGAQSHHHLRAEECRLRALDWQAAPPVALVRYPLGEASWAPESDGDLENLYV

SEQ ID NO: 8467 - protein, 229 aa, Homo sapiens
MASWDEKDLTVPQPDTRKGSVLRCGLSSRALRWAGRGHVAAGWRPLAPESAGGWGMAAAMVPGRSESWERGEPGRPALYFCGSIRGGREDRTLYERIVSRLRRFGTVLTEHVAAAELGARGEEAAGGDRLIHEQDLEWLQQADVVVAEVTQPSLGVGYELGRAVAFNKRILCLFRPQSGRVLSAMIRGAADGSRFQVWDYEEGEVEALLDRYFEADPPGQVAASPDPTT

SEQ ID NO: 8468 - protein, 324 aa, Homo sapiens
  DOMAIN (70)..(121): SAR1 family proteins domain identified by eMATRIX, accession number BL01020C, p-value=6.400e-15, raw score of 15.35
  DOMAIN (4)..(161): ADP-ribosylation factor family domain identified by PFam, accession name arf, E-value=8.3e-33, PFam score of 122.4
MSPPGREQGLLLNLLRPSGLDNAGKTTILKKFNGEDIDTISPTLGFNIKTLEHRGFKLNIWDVGGQKSLRSYWRNYFESTDGLIWVVDSADRQRMQDCQRELQSLLVEEVGSSYPLCTWRFFSYLRIEQMYNLVLYRDIQFPDFCFNSNTDWSKGLKTHARFGNTSLHVAHTDSTNTTNFVDVWRGRTKSLACLLQLSSLTCIYTAGKMRLQDRIATFFFPKGMMLTTAALMLFFLHLGIFIRDVHNFCITYHYDHMSFHYTVVLMFSQVISICWAAMGSLYAEMTENKYVCFSALTILMLNGAMFFNRLSLEFLAIEYREEHH

SEQ ID NO: 8469 - protein, 108 aa, Homo sapiens
EVCYYRSSEAFFSELIKVILRHLCSVAGKGLCSIPQLNTREGSVLRRISKRGSPLAVEIEEGHCLCLPLGTECLGIKPIVHLLNSEIGEKPPFSPLSPCSSAAFLLLR

SEQ ID NO: 8470 - protein, 128 aa, Homo sapiens
RPESQRANGVDSGPNLKTVPQPDTRKGSVLKWISKRGKPLAVEIEESHCLCLPLRTECLGIKPIVHLFSCTRPVIVPSLELHYDIDSIAHMFVADLLLIITLLSYYIPFYLGFQNAGITGINHRAWFY

SEQ ID NO: 8471 - protein, 80 aa, Homo sapiens
LCPSHFAPTTLTQSGSSLKTCVVLNSRFKACRAVPGPCLVNQMFASSILGKSHHHSLVPINQGHNALWKAAGPLPLKAGY

SEQ ID NO: 8472 - protein, 477 aa, Homo sapiens
  misc_feature (1)...(477): Xaa = X or * as defined in Table 2
DPARAGTGVGASFRGATWQQGQGRGSACSCTQCPPATCLLTGADAPTSRPWSLLSRLLGHCFSVLTVPAAAPPPPGSLPEPPRAGPQCPXTRPPLRXPGCSHLAGPHSGSPRPCSLLGASATLYGFRHFLAGPAAQGGGQAVGSQGDHPTRAQPPXWSSPQTPLNLSAAQEFEPRGTCPQTRWXSRPDALPWPRPWEPWSGXAEGWEQEXWRLQPQGTAAPRATSSGYSGSSRGQRARPGPARCGDGGGAGRCGHVRGRWRQLGHRPRGSSAPAVCCGTLSAAPPGPQHSLSSLXSSAPGPQWCPHWHPQSGRQGXSPLPPPPGPGRPPCAPCSGSPSAXGGCTPGCPTAPXGRRQGRWRXPRTGRLSPLGHLPGCRSQAAVSHHRCWPLLPPPRPSGPPPPLRSGSSPGGPLPKGCXCQGGERPGQQHKEAGQGPAQQTWLHPQAPGGRRPSHTGWGGGAPGGXQRRNLAXRPLLP

SEQ ID NO: 8473 - protein, 243 aa, Homo sapiens
  misc_feature (1)...(243): Xaa = X or * as defined in Table 2
FVALPQPLCPSHFDPTTLIQSGAHKNMCCIKSRFKRDLGLCRTCLVNKMFTSSILGKSHCHSLVSINQGHNAPWKAAGPLPFRAGYCQGFSPCDSLKYGSWDEKDLTVPQPDTRKGSVLRWISQRGKPLAVEMEEGHCLCLPLGTECLGIKPPIVHLFNSEIGENRPMVGGRHVLQXCCLGXFLXLPLRCLGGEKHKSGLHVHIPVIVLSLELNYDIDSFAHMFFSVDLLLIITLLSYYIPFC

SEQ ID NO: 8474 - protein, 354 aa, Homo sapiens
  DOMAIN (108)..(328): Methylpurine-DNA glycosylase (MPG) domain identified by PFam, accession name Pur_DNA_glyco, E-value=1.1e-37, PFam score of 138.6
  misc_feature (1)...(354): Xaa = X or * as defined in Table 2
TRAAGLRAGVRVPRSPGPSRRMPARSGAQFCRRMGQKKQRPARAGQPHSSSDAAQAPAEQPHSSSNPAQAPCPRERCLGPPTTPGPYRSIYFSSPKGHLTRLGVEFFDQPAVPLARAFLGQVLVRRLPNGTELRGPHRWETEAYTLGPEDEAAPLQGGWPGKTPRNRGMFHXKPGDLWVVYIIYGMYFCMNISSQGDGACVFLRALEAPGKSWRPMRQLRSTLRKGTRQARVLKGPPKLCSGPSKLCQALPINKSFXPEGTLAQDEAVWLERGPLEPSEPAVVGSAPRVGVGHAGEWARKPLRFYVRGSPWASVVDRVAEQDTQACAKGLPRQDFLHCLKTRINVLFLEKKKKK

SEQ ID NO: 8475 - protein, 149 aa, Homo sapiens; identical to SEQ ID NO: 8286
  DOMAIN (33)..(55): Globins profile domain identified by eMATRIX, accession number BL01033A, p-value=3.250e-20, raw score of 16.94
  DOMAIN (9)..(149): Globin domain identified by PFam, accession name globin, E- value=4.6e-57, PFam score of 203.0

SEQ ID NO: 8476 - protein, 154 aa, Homo sapiens
  DOMAIN (38)..(60): Globins profile domain identified by eMATRIX, accession number BL01033A, p-value=4.857e-17, raw score of 16.94
  misc_feature (1)...(154): Xaa = X or * as defined in Table 2
NSTDSERTHPWLLSPARQRPTSRPAWGKVGAHAVRSMCAEALERMFLSFPTTKTYFPHFDLSHGFCPGXRATGKKVDDSADQTPWPTWDDMPKRRCPPXSDLHAHKLSRLDPVNFKAPKATCLAGXPLAAHLPAEFQPLAVARLPWGQISWGFC

SEQ ID NO: 8477 - protein, 136 aa, Homo sapiens
PGNPVYLKTLHLPQAPPYTDAPPAYSELYRPSFVHPGAATVPTMSAAFPGASLYLPMAQSVAVGPLGSTIPMAYYPVGPIYPPGSTVLVEGGYDAGARFGAGATAGNIPVKEDQDHDREQGEEDNGDNNLERRGKM

SEQ ID NO: 8478 - protein, 263 aa, Homo sapiens
  misc_feature (1)...(263): Xaa = X or * as defined in Table 2
HGSSSEQEEDEKNNQSATPIHSGPATTMNSIGXYPTQPTYPVQSPGNPVYPQTLNLPQAPPYTDAPPAYSELYRPSFVHPGAATVPTMSAAFPGASLYLPMAQSVAVGPLGSTIPMAYYPVGPIYPTLAPQVLGGKGGYDAGARFGAGANGGNIPSPPPGCPPNAAQLAVMQGANVLVTQRKGNFFMGGSDGGYTHLVRNQGHLCAREKTSHTLQHFSQCNCFSHINLKLQFRHMLLGCLSGAQTFRHFSNLIRNHVMVAVPP

SEQ ID NO: 8479 - protein, 122 aa, Homo sapiens
  DOMAIN (105)..(122): PROFILIN SIGNATURE domain identified by eMATRIX, accession number PR00392F, p-value=3.750e-13, raw score of 17.40
  DOMAIN (4)..(118): Profilins domain identified by PFam, accession name profilin, E-value=8.2e-44, PFam score of 159.0
GTRSYVDNLMCDGCCQEAGIGGYCDAKYVWAATAGGVFQSITPIEIDMIVGKDREGFFTNGLTLGAKKCSVIRDSLYVDGDCTMDIRTKSQALVIVMGKEGVHGGTLNKKAYELALYLRRSD

SEQ ID NO: 8480 - protein, 765 aa, Homo sapiens
  DOMAIN (8)..(22): Profilin proteins domain identified by eMATRIX, accession number BL00414A, p-value=6.344e-13, raw score of 13.85
  DOMAIN (9)..(114): Profilins domain identified by PFam, accession name profilin, E-value=6.3e-49, PFam score of 176.0
NAKGSKMAGWQSYVDNLMCDGCCQEAAIVGYCDAKYVWAATAGGVFQSITPIEIDMIVGKDREGFFTNGLTLGAKKCSVIRDSLYVDGDCTMDIRTKSQGGEPTYNVAVGRAGRGDACHHPMEDLMDMDMSPLRPQNYLFSCQQKADKDYHFKVNNDENEHQLSLRTVISGTGAKDKLHIVETEAMNYEGSPIKVTLATLKMSVQPMVSGGLEITPLVILRLKCASEPVHISGQHLVAVEEDAESEDEEEEYVKLKFIWKAICPRRWQKSSTEKKEEEKSKSLENIFALIIDENFLGFVRDLDIQIQEAQRTPGKFITKRTPSRHIIIRLLKVKTKERILRVVRQKHQLNAVRQEVKSLCGLEASHVPAEEALSGAGEPYDIIDSSDEMDAQEENIHERTVSRKKKSKRHKEELDGAGGEEYPMDIWLLLASYIRPEDIVNFSLICKNAWTVTCTAAFWTRLYRRHYTLDASLPLRLRPESMEKLHCLRACVIRSLYHMYEPFAARISKNPAIPESTPSTLKNSKCLLFWCRKIVGNRQEPMWEFNFKFKKQSPRLKSKCTGGLQPPVQYEDVHTNPDQDCCLLQVTTLNFIFIPIVMGMIFTLFTINVSTDMRHHRVRLVFQDSPVHGGRKLRSEQGVQVILDPVHSVRLFDCQAPCMKSNNALIVILGTVTLDAVGIGLVMPVLPGLLRDIVHSDSIASHYGVLLALYALMQFLCAPVLGALSDRFGRRPVLLASLLGATIDYAIMATTPVLWIYPLVNSPSC

SEQ ID NO: 8481 - protein, 177 aa, Homo sapiens
  DOMAIN (18)..(32): Profilin proteins domain identified by eMATRIX, accession number BL00414A, p-value=6.344e-13, raw score of 13.85
  DOMAIN (19)..(125): Profilins domain identified by PFam, accession name profilin, E-value=1e-27, PFam score of 104.1
  misc_feature (1)...(177): Xaa = X or * as defined in Table 2
HHYAKLGTRAVRRARRCAGWQSYVDNLMCDGCCQEAAIAGYCDAKYVWAATAGGVFQSITPIEIDMIVGKDRKGFFTSGLTLGAKKCSVIRDSLYVDGDCTMDIRDKQSQGGEPTYNVAVGRSGRALVIVMGKGKVFHRRHTLTRKAYETPLYTXRQAWHEGSAKGSKMCRLAELRG

SEQ ID NO: 8482 - protein, 90 aa, Homo sapiens
SLALSFPFLEEEAEGDLEIKVEVRRLFPSTFLVSLLLHGAVYNLGLVFCYSLGDALDSSNSMQTIQKTTTRRIVDGKVVSETNDTKVLRH

SEQ ID NO: 8483 - protein, 152 aa, Homo sapiens
  misc_feature (1)...(152): Xaa = X or * as defined in Table 2
SSIMTFLESSAVPPHWTGQDGRVCWTGWIPQCQAGSAPERSXVFINSAGQKSADTGWSSSKPQNXHLSSFHQAVVGMIQPSHSQFLMKRKAASPRKLEWEHLQPLHPMTLLYRXDGKPFRXVLLSTYTYCSSRDRPKSSGKNARRFPAHGSS

SEQ ID NO: 8484 - protein, 96 aa, Homo sapiens; identical to SEQ ID NO: 8428
  DOMAIN (27)..(68): Ferritin iron-binding regions proteins domain identified by eMATRIX, accession number BL00540A, p-value=4.176e-20, raw score of 15.06
  DOMAIN (38)..(93): Ferritins domain identified by PFam, accession name ferritin, E-value=1.6e-31, PFam score of 109.2

SEQ ID NO: 8485 - protein, 369 aa, Homo sapiens
  DOMAIN (251)..(282): Intermediate filaments proteins domain identified by eMATRIX, accession number BL00226C, p-value=7.692e-15, raw score of 13.23
  DOMAIN (98)..(369): Intermediate filament proteins domain identified by PFam, accession name filament, E-value=1.3e-99, PFam score of 344.4
MGHHRRQSLSPVLSLSSPDSMSFTTRSTFSTNYQSLGSVQAPSYGARPVSSAASVYAGAGGSGSRISVSRSTSFRGGMGPGGLAAGMAGGLAGMGGIQNKKTMQSLNDRLASYLDRVRSLETENRRLESKIREHLENKGPQVKDWSHYCKTIEDLRAQIFANTVDNACIVLHIDNARLAADDFRVKYETQLAMRQSVENDIHGLRKLETEIEALREELLFMKNHEEEVKGLQAQIASFRLTVEVDAPKSQDLAKIMADIRAKYDELAGKNREELDKYWPQQFEENTTVVTTQSAEVGAAEMTLTELRRTVQSLEIDLDSMRNLKASLENNPREVEARYSLQMVQLIGILLHLESELAQTRAERQRQAQE

SEQ ID NO: 8486 - protein, 478 aa, Homo sapiens
  DOMAIN (390)..(437): Intermediate filaments proteins domain identified by eMATRIX, accession number BL00226D, p-value=7.600e-18, raw score of 19.10
  DOMAIN (110)..(467): Intermediate filament proteins domain identified by PFam, accession name filament, E-value=2.7e-20, PFam score of 80.1
  misc_feature (1)...(478): Xaa = X or * as defined in Table 2
GPQQPHSRSTHASGRPQSLSPVLSLSPDSMSFTTRSTFSTNYRSLGSVQAPSYGARPVSSAASVYAGAGGSGSRISASRSTSFRGGMGSGGLATGVAGGLAGMGGIQNEKETMQSLNDRLASYLDRVRSLETENRRLESKIREHLEKKGPQVRDWSHYFKIIEDLRAQIFANTCGTMPRIRSARIDNARLAADDFRVKYEDRSWPMCPVLWRTDIHGLPKVHIDDTNYHTDLQLETEIEALKEELLFQXRRNHEEGSXKALRRQISSSGMNAWRLDAPKSQDLAKIMADIRAQYDELGSKKNPRGSLDKYWSQQIEESTTGGSPQKSAEVGAVETHAHRSLKRTVPVLGRSTLDSMRNLKGQLWRTSLREGXRPAYALTRLEPAPTGSLLHLESELAQTRARGTAARPREYEALLNIKVKLEAEIATYRRLLEDGEDFNLGDALDSSNSMQTIQKTTTRRIVDGKVVSETNDTKVLRH

SEQ ID NO: 8487 - protein, 117 aa, Homo sapiens
PALQEFGTSRNEPDVYETSDLPEDDQAEFDAEELTSTSVEHIIVNPNAAYDKFKDKRVGTKGLDFSDRIGKTKRTGYESGEYEMLGEGLGVKETPQQKYQRLLHEVQELTVILYNCF

SEQ ID NO: 8488 - protein, 76 aa, Homo sapiens
QHKCGTIIVTIKQLHEQAMQFGQLLTHLDTTQQMIANSLKDNTTLLTQVQTTMRENLATVEGNFASIDERMKKLGK

SEQ ID NO: 8489 - protein, 129 aa, Homo sapiens
GNFARNEPDVYETSDLPEDDQAEFDAEELTSTSVEHIIVNPNAAYDKFKDKRVGTKGLDFSDRIGKTKRTGYESGEYEMLGEGLGVKETPQQKYQRLLHEVQELTTHVQYCFAWCGEGLGLVPQHSFCG

SEQ ID NO: 8490 - protein, 438 aa, Homo sapiens
MADPKYADLPGIPILRPRAPAARSPIGLSTPRTLLTRLGRAAGRHQAPFPAVAVARPRNRLRARNEPDVYETSDLPEDDQAEFDAEELTSTSVEHIIVNPNAAYDKFKDKRVGTKGLDFSDRIGKTKRTGYESGEYEMLGEGLGVKETPQQKYQRLLHEVQELTTEVEKIKTTVKESATEEKLTPVLLAKQLAALKQQLVASHLEKLLGPDAAINLTDPDGALAKRLLLQLEATKNSKGGSGGKTTGTPPDSSLVTYELHSRPEQDKFSQAAKVAELEKRLTELETAVRCDQDAQETVELLQAKVSALDLAVLDQVEARLQSVLGKVNEIAKHKASVEDADTQSKVHQLYETIQRWSPIASTLPELVQRLVTIKQLHEQAMQFGQLLTHLDTTQQMIANSLKDNTTLLTQVQTTMRENLATVEGNFASIDERMKKLGK

SEQ ID NO: 8491 - protein, 92 aa, Homo sapiens
FVFPLPEHRPRLFRCPGPPARLAAAMADPKYADLPGIARNEPGVYETSDLPEDDQAEFDAFAQVRPFNASSLHVFFICHLACNALPLCYCCS

SEQ ID NO: 8492 - protein, 481 aa, Homo sapiens
  misc_feature (1)...(481): Xaa = X or * as defined in Table 2
TSCSSAAPFAAALARDPNPASPLPEHRPRLHRGPGPPARLAAAMADPKYADLTGIARNDPDVYETSDLPEDDHAEFDAFAQELEELTSTSVEHIIVNPNAAYDKFKDKRVGDKGIXFSQIVLGKTKRTGYESGEYEMLGEGLGVKETPQQKYQRLLHEVQELTTEVEKIKTTVKESAAEEKLTPVLLAKQLAALKQQVWVASHLEGKLLGPDAAINLTDPDGRPGLRRLLLQLEATKNSLGGSRGKTPGTPPDSSLVTYELHSRPEQDKFSSSLPKSQKLEKRLTELETAVTLLIQDAQNPLSAGLQGACLMETVELLQAKVSALDLAVLDQVEARLQSVLGKVNEIAKHXSLCXEGAGYTKARLHQLIIETITALGAPLPSTLPGAGCRRLVTHQSSLHEASPCQFGQLLDTHLDTTQPMIANFLGRTNTNPLXPQVADKPLRENLAHQLKGNFAQQXRNGXKKLGKSEAHLGKLEEPGG

SEQ ID NO: 8493 - protein, 1543 aa, Homo sapiens
  DOMAIN (946)..(970): E1-E2 ATPases phosphorylation site proteins domain identified by eMATRIX, accession number BL00154F, p-value=8.941e-21, raw score of 8.23
  DOMAIN (372)..(460): E1-E2 ATPase domain identified by PFam, accession name E1- E2_ATPase, E-value=1.5e-14, PFam score of 51.4
MAPPLAAGPSPPLHPSAAGLEAGRLCKRVLGPCGDGEATPRPLNRIPPRVTDVQLCCVQETDIHSFSQSVNQCFLTPEHMADSSPLVGSTPTGYGTLTIGTSIDPLSSSVSSVRLSGYCGSPWRVIGYHVVVWMMAGIPLLLFRWKPLWGVRLRLRPCNLAHAETLVIEIRDKEDSSWQLFTVQVQTEAIGEGSLEPSPQSQAEDGRSQAAVGAVPEGAWKDTAQLHKSEEAKRVLRYYLFQGQRYIWIETQQAFYQVSLLDHGRSCDDVHRSRHGLSLQDQMVRKAIYGPNVISIPVKSYPQLLVDEALNPYYGFQAFSIALWLADHYYWYALCIFLISSISICLSLYKTRKQSQTLRDMVKLSMRVCVCRPGGEEEWVDSSELVPGDCLVLPQEGGLMPCDAALVAGECMVNESSLTGESIPVLKTALPEGLGPYCAETHRRHTLFCGTLILQARAYVGPHVLAVVTRTGFCTAKGGLVSSILHPRPINFKFYKHSMKFVAALSVLALLGTIYSIFILYRNRVPLNEIVIRALDLVTVVVPPALPAAMTVCTLYAQSRLRRQGIFCIHPLRINLGGKLQLVCFDKTGTLTEDGLDVMGVVPLKGQAFLPLVPEPRRLPVGPLLRALATCHALSRLQDTPVGDPMDLKMVESTGWVLEEEPAADSAFGTQVLAVMRPPLWEPQLQAMEEPPVPVSVLHRFPFSSALQRMSVVVAWPGATQPEAYVKGSPELVAGLCNPETVPTDFAQMLQSYTAAGYRVVALASKPLPTVPSLEAAQQLTRDTVEGDLSLLGLLVMRNLLKPQTTPVIQALRRTRIRAVMVTGDNLQTAVTVARGCGMVAPQEHLIIVHATHPERGQPASLEFLPMESPTAVNGVKDPDQAASYTVEPDPRSRHLALSGPTFGIIVKHFPKLLPKVLVQGTVFARMAPEQKTELVCELQKLQYCVGMCGDGANDCGALKAADVGISLSQAEASVVSPFTSSMASIECVPMVIREGRCSLDTSFSVFKYMALYSLTQFISVLILYTINTNLGDLQFLAIDLVITTTVAVLMSRTGPALVLGRVRPPGALLSVPVLSSLLLQMVLVTGVQLGGYFLTLAQPWFVPLNRTVAAPDNLPNYENTVVFSLSSFQYLILAAAVSKGAPFRRPLYTNVPFLVALALLSSVLVGLVLVPGLLQGPLALRNITDTGFKLLLLGLVTLNFVGAFMLESVLDQCLPACLRRLRPKRASKKRFKQLERELAEQPWPPLPAGPLRKGKKEPLVVEASHGPELSSVGEEGAGLREAAGLAGEAEGKPRQESVLEAGRRQREIEAYFLAEGPRDAGESGVGEAAAVEEARAVLSDTTPACLFVAMRAAYLFLLFLPAGLLAQGQYDLDPLPPFPDHVQYTHYSDQIDNPDYYDYQEVTPRPSEEQFQFQSQQQVQQEVIPAPTPEPGNAELEPTEPGPLDCREEQYPCTRLYSIHRPCKQCLNEVCFYSLRRVYVINKEICVRTVCAHEELLRVPAPPPYPPAPALPCPERCVMTVYARMRVVGIAREMEGFRDTAF

SEQ ID NO: 8494 - protein, 203 aa, Homo sapiens
  misc_feature (1)...(203): Xaa = X or * as defined in Table 2
PGQLSSLTPPRPASLLPWRAAYLFLLFLPAGLLAQGQYDLDPLPPFPDHGQYTHYMDQIDNPDYYDYQEGTPRPSEGQFQFQSQQEVQQGVIPSPNPRAQGNAELEPTEPGPLDCREEQYPCTRLYSIHRPCKQCLNEVCFYSLRRVYVINKEICVRTVCAHEELLRADLCSGTSFSKCGRXWASSGLCQSVAASCARSCGSF

SEQ ID NO: 8495 - protein, 188 aa, Homo sapiens
  DOMAIN (22)..(188): Ferritins domain identified by PFam, accession name ferritin, E-value=5.7e-29, PFam score of 100.6
  misc_feature (1)...(188): Xaa = X or * as defined in Table 2
IVTATCLWGSLVLTHSVFPFQSYYFDRDDVALKDFAKYFLHQSHEERGTCLRNLMKLQNPRGGLIFLQDIKVNKRSXGCHTSSSGSVRVSEITXTSNCPYKVMIHWAFAFCAFLGLPSKLNXANSNVPFAKTWWLEMMGLLTSRLVGRDALTYSHSKPDCDDWESGLNAMECALHLGKNVNQSLLELH

SEQ ID NO: 8496 - protein, 45 aa, Homo sapiens
MFCFFLKPIAEAPFKFDMELDDLPKEKLKELIFEETARFQPGYRS

SEQ ID NO: 8497 - protein, 127 aa, Homo sapiens
  misc_feature (1)...(127): Xaa = X or * as defined in Table 2
AVGGFWGCPRVELHMLVHITPLSHFKCGCFSNHVPCLRIXQRGTLRLXMRKYTILFPSTACQHLKFIFQPTVXQFVIKPPGAHDVKHCSVLKYSNISDTAESDCQKKLSTNSCLELYPYFTDLFKYL

SEQ ID NO: 8498 - protein, 483 aa, Homo sapiens
  DOMAIN (148)..(179): Protein kinases ATP-binding region proteins domain identified by eMATRIX, accession number BL00107A, p-value=5.800e-23, raw score of 18.39
  DOMAIN (48)..(245): Eukaryotic protein kinase domain identified by PFam, accession name pkinase, E-value=2.2e-20, PFam score of 77.4
  misc_feature (1)...(483): Xaa = X or * as defined in Table 2
RRRPRQPTMAAAVVGGRGPEVWSAGTLFDVGPRYTNLSYIRRGRLTTCVCSAYDNVNKVRVAIKKISPFEHQTYCQRTLREIKILLRFRHENIIGINDIIRAPTIEQMKGCIXXYRDLMETDLYKLLKTQHLSNDHIWYFLYQILRGLKYIHSANVLHRDLKPSNLLLNTTCDLKICDFGLARVADPDHDHTGFLTEYVATRWYRAPEIMLNSKGYTKSIDIWSVGCILAEMLSXQGPSFQGKHYLDQLNHIFGVFLGSPSQEDLNCIIKFXKLGNYLLSSHTSKIMVPLEHACPQNADSKSSGTLLGQNCLTFNPHKRIEVEQALAHTPYLEQYYDPSDEPIAEAPIQVRPWKLDDLPKEKLKGTNFLKRLARFQPGVQILNFVQTKGSEGLDVLRHRCSSSQFLTPGPVFQPCLGLSTLTPLNPFGRGRFLGSCGFYGFSKISFSPGGFLLGQPCCCVHPLVTLRAVCTSVHLTAYCCFSH

SEQ ID NO: 8499 - protein, 96 aa, Homo sapiens
GNKMAAPKGSLWVRTQLGLPPLLLLTMALAGGSGTASAEAFDSVLGDTASCHRACQLTYPLHTYPKVGPVRSGLRPFPCSPFLGSPHVCRLWQPGC

SEQ ID NO: 8500 - protein, 345 aa, Homo sapiens
  misc_feature (1)...(345): Xaa = X or * as defined in Table 2
QRGTRWRRERGSLWVRTQLGLPPLLLLTMALAGGSGTASAEAFDSVLGDTASCHRACQLTYPLHTYPKEEELYACQRGCRLFSICQFVDDGIDLTRTKLECESACTEAYSQSDEQYALPFLGCQNSACHFAELRQEQLYVPRWPKMAPTFFLXLLGEGSFWELTXWDSAQSFITSSWTFYLQADDGKIVIFPVXSQKSQYAPHFGAREPTNFEENHLLSKMSSDLQMGKFHQAHQGIFLKNEERDGLFKKPSILNSGWILTTTLVLSVMVLLWICCATVATAVEQYVPSGEAGVTMGDLEFMNEQKLNRYPASFSCGLVRSKTEDHEEAGPSYLPKVNLAPFLEI

SEQ ID NO: 8501 - protein, 103 aa, Homo sapiens
  DOMAIN (37)..(47): Eukaryotic  RNA-binding region RNP-1 proteins domain identified by eMATRIX, accession number BL00030B, p-value=1.000e- 12, raw score of 7.03
  DOMAIN (6)..(69): RNA recognition motif. domain identified by PFam, accession name rrm, E-value=8e-16, PFam score of 66.0
MSGWGVLSGRLNPAAREKDVERFFKGYGRIRDIDLKRGFGFVEFEDPRDADDAVYELDGKELCSERVTIEHARARSRGGRGRGRYSDRFSSRRPRNDRRNAPP

SEQ ID NO: 8502 - protein, 75 aa, Homo sapiens
  DOMAIN (17)..(37): CORONAVIRUS NUCLEOCAPSID PROTEIN domain identified by eMATRIX, accession number DM01206B, p-value=3.714e-12, raw score of 10.69
SRSRSRSRSRSRKSYSRSRTRSRSRSRSKSRSVSRSPVPEKSQKRGSSSRSKSPASVDRQRSRSRSRSRSVDSGN

SEQ ID NO: 8503 - protein, 127 aa, Homo sapiens
  DOMAIN (40)..(50): Eukaryotic  RNA-binding region RNP-1 proteins domain identified by eMATRIX, accession number BL00030B, p-value=1.000e- 12, raw score of 7.03
  DOMAIN (9)..(74): RNA recognition motif. domain identified by PFam, accession name rrm, E-value=1.3e-12, PFam score of 55.3
PDIMSGCRVFIGRLNPAAREKDVERFFKGYGRIRDIDLKRGFGFVEFEDPKDADDAVYELDGKELCSERVTIEHARARSRGGRGRGRYSDRFSSRRPRNDRRNAPPVRTENRLIVENLSSRVSWQVC

SEQ ID NO: 8504 - protein, 201 aa, Homo sapiens
  DOMAIN (108)..(128): CORONAVIRUS NUCLEOCAPSID PROTEIN domain identified by eMATRIX, accession number DM01206B, p-value=7.714e-12, raw score of 10.69
  misc_feature (1)...(201): Xaa = X or * as defined in Table 2
ILIEYKCGKCHVCTLSNIFSFSSLVFFISCDCLCVPFPLLCLTQLSCVKDLKDFMRPAGEVTFADAHRPKLNEGVVEFASYGDLKNAIEKLSEKEINGRKIKLIEGSKRHSRSRSRSRSRTRSSSRSRSRSRSRSSKSYSRSRSRSRSRSRSDVPVLLSRSPRAXEEPRNRGSSSRSKSPASVDRQRSRSRSRSRSVDSGN

SEQ ID NO: 8505 - protein, 379 aa, Homo sapiens
  DOMAIN (291)..(345): Nuclear transition protein 1 proteins domain identified by eMATRIX, accession number BL00541, p-value=8.875e-09, raw score of 8.44
  DOMAIN (9)..(276): RNA recognition motif. domain identified by PFam, accession name rrm, E-value=3.2e-35, PFam score of 130.4
  misc_feature (1)...(379): Xaa = X or * as defined in Table 2
PDIMSGCRVFIGRLNPAAREKDVERFFKGYGRIRDIDLKRGFGFVEFEDPRDADDAVYELDGKELCSERVTIEHARARSRGGRGRGRYSDRFSSRRPRNDRRVCEGWMAALNNYWXGXPFKIQESLAVMILGPAVXSVLLFPRXPIVLDESIXVIEHKSIDGSHXNGLXYLMAXTCPQLNTSAVIAFLPLXIRIFFLRNAPPVRTENRLIVENLSSRVSWQDLKDFMRQAGEVTFADAHRPKLNEGVVEFASYGDLKNAIEKLSGKEINGRKIKLIEGSKRHRSRSRSRSRTRSSSRSRSRSRSRSRKSYSRSRSRSRSRSRSKSRSVSRSSPCPEKSQKRGSSSRSKSPSHLWNRPEVPGPRSRSQIQLDQWPIKPVK

SEQ ID NO: 8506 - protein, 265 aa, Homo sapiens
  DOMAIN (184)..(264): Ferritins domain identified by PFam, accession name ferritin, E-value=0.0014, PFam score of 15.5
  misc_feature (1)...(265): Xaa = X or * as defined in Table 2
VVGVSCFNSAWTEPGARSPPRPAAHSQPSVTSSPHPRTAPRPPPPLQRREATAAGRRLSLVAAMTTASHLAGCAKNYHQGLKRPPINRQDQPWKLYGLLRFTLSHVLTNFDPRMMLAFERTFAKYFLHQFSMKEEGNHAEETXXKLQNQRGWPEFFLQDIKETQTCDDWEERGLNAMECALHLEKNVESSHLLELHKTGQLDKNDPPFCVTFIETHYLNEQVKGHQRIWGDHVTNLRKMGSAPNLAWAKYLFDHSTSLGDSDNES

SEQ ID NO: 8507 - protein, 297 aa, Homo sapiens
  DOMAIN (40)..(50): Eukaryotic  RNA-binding region RNP-1 proteins domain identified by eMATRIX, accession number BL00030B, p-value=1.000e- 12, raw score of 7.03
  DOMAIN (9)..(297): RNA recognition motif. domain identified by PFam, accession name rrm, E-value=2.2e-32, PFam score of 121.0
  misc_feature (1)...(297): Xaa = X or * as defined in Table 2
PDIMSGCRVFIGRLNPAAREKDVERFFKGYGRIRDIDLKRGFGFVEFEDPRDADDAVYELDGKELCSERVTIEHARARFTRLGRGRGRYSDRFNNSAELRNDRRNAPPVRPENRLIVENLSSRVSWQDLKDFMRQAGEVTLPDTTRLNLNEGVVEFASMGDLRNAIEKLSGRELNGRKIKLIERPAKRPQXVQQSRSSDPGTQKSPLGPRSRSPSPVVANLNSRSKKRRGSREPGSPEPSPRSCXVGSSPVPXERFFKGYGRIRDIDLKRGFGFVEFEDPRDADDAVYELDGKELCS

SEQ ID NO: 8508 - protein, 439 aa, Homo sapiens
  DOMAIN (175)..(198): POTASSIUM CHANNEL SIGNATURE domain identified by eMATRIX, accession number PR00169G, p-value=8.657e-11, raw score of 9.39
  DOMAIN (5)..(226): Ion transport protein domain identified by PFam, accession name ion_trans, E-value=8.7e-07, PFam score of -41.9
MTQRFLIVLGCLILAVLTTFKEYETVSGDWLLLLETFAIFIFGAEFALRIWAAGCCCRYKGWRGRLKFARKPLCMLDIFVLIASVPVVAVGNQGNVLATSLRSLRFLQILRMLRMDRRGGTWKLLGSAICAHSKELITAWYIGFLTLILSSFLVYLVEKDVPEVDAQGEEMKEEFETYADALWWGLITLATIGYGDKTPKTWEGRLIAATFSLIGVSFFALPAGILGSGLALKVQEQHRQKHFEKRRKPAAELIQAAWRYYATNPNRIDLVATWRFYESVVSFPFFRQVGTHLNAQGVTSHLSCEESNFDPEGNEKLDEPENDISRSTFQEDDSKECGGWIYGLKSKQEDQLANIAGFRVRGNEGLDQGKNSWRQHPDFSAYICEMKELKQMVPKACQGYYHGFRLSANNPELAPRLSFMWSHQLYEFNMNAEKEPNGN

SEQ ID NO: 8509 - protein, 272 aa, Homo sapiens
  DOMAIN (234)..(246): ETHYLENE RESPONSIVE ELEMENT BINDING PROTEIN SIGNATURE domain identified by eMATRIX, accession number PR00367A, p-value=6.897e- 09, raw score of 8.25
MTDEDLVFRKHRVTVWQKECSFPFQQPQHHDLHTAPSFKDKVTEAQKGHRFAEGQPDGKGGLGLKSSQKLGLLDRVRLSNPRGSNTKGKLFTPLNVDAIEESPSKEPKPVGLNNKESLRTAFRMKAYAFWQSSEDAGTGDPMAEDRGYGNDFPIEDMIPTLKAAIRAVRILQFRLYKKKFKETLRPYDVKDVIEQYSAGHLDMLSRIKYLQTSICGWRVNIWTSDCISPAMLTLRGKRERKCRQWRSSWVSKEETEGAMTVSGCIILMVLDL

SEQ ID NO: 8510 - protein, 946 aa, Homo sapiens
  DOMAIN (370)..(393): POTASSIUM CHANNEL SIGNATURE domain identified by eMATRIX, accession number PR00169G, p-value=8.657e-11, raw score of 9.39
  DOMAIN (192)..(425): Ion transport protein domain identified by PFam, accession name ion_trans, E-value=2.4e-05, PFam score of -64.0
  misc_feature (1)...(946): Xaa = X or * as defined in Table 2
PPDPLPGLPCPPGGPPLPAFGGGWGGARGSWHWSSRACSRRRRLVHAPRAPLLPRAAAEKAKRPAGARQMGLKARRAAGAAGGGGDGGGGGGGAANPAGGDAAAAGDEERKVGLAPGDVEQVTLALGAGADKDGTLLLEGGGRDEGQRRTPQGIGLLAKTPLSRPVKRNNAKYRRIQTLIYDALERPRGWALLYHALVFLIVLGCLILAVLTTFKEYETVSGDWLLLLETFAIFIFGAEFALRIWAAGCCCRYKGWRGRLKFARKPLCMLDIFVLIASVPVVAVGNQGNVLATSLRSLRFLQILRMLRDGPGEGGTWKLLGSAICAHSKELITAWYIGFLTLILSSFLVYLVEKDVPEVDAQGEEMKEEFETYADALWWGLITLATIGYGDKTPKTWEGRLIAATFSLIGVSFFALPAGILGSGLALKVQEQHRQKHFEKRRKPAAELIQAAWRYYATNPNRIDLVATWRFYESVVSFPFFRKEQLEAASSQKLGLLDRVRLSNPRGSNTKGKLFTPLNVDAIEESPSKEPKPVGLNNKERFRTAFRMKAYAFWQSSEDAGTGDPMAEDRGYGNDFPIEDMIPTLKAAIRAVRILQFRLYKKKFKETLRPYDVKDVIEQYSAGHLDMLSRIKYLQTRIDMIFTPGPPSTPKHKEVFRKGQHFTFPSQQSSRGLNHMXARPSTSEIEDQRHXWGKFVKSLKGQVQGLGRKLDFLVDMHMQHMERLQVQVTEYYPTKGTSSPAEAEKKEDNRYSDLKTIICNYSETGPPEPPYSFHQVTIDKVSPYGFFAHDPVNLPRGGPSSGKVQATPPSSATTYVERPTVLPILTLLDSRVSCHSQADLQGPYSDRISPRQRRSITRDSDTPLSLMSVNHEELERSPSGFSISQDRDDYVFGPNGGSSWMREKRYLAEGETDTDTDPFTPSGSMPLSSTGDGISDSVWTPSNKPI

SEQ ID NO: 8511 - protein, 163 aa, Homo sapiens
  DOMAIN (42)..(64): Globins profile domain identified by eMATRIX, accession number BL01033A, p-value=7.000e-19, raw score of 16.94
  misc_feature (1)...(163): Xaa = X or * as defined in Table 2
PDSSGPHRLRENPPMVAVSCPTKTNVKGPPGGKVGAHAGEYGSEALERMFLSFPTTKTYFPHFDLSHGLCPRLKGHGKKVADALTNAVAHVDDMPNGVVRPXSDLHAHKLRVDPVNFKLLSHCLLVTLAAHLPAEFTPAVPRPPWDKFPWLSVKHRCLTFKYR

SEQ ID NO: 8512 - protein, 33 aa, Homo sapiens
  misc_feature (1)...(33): Xaa = X or * as defined in Table 2
MILLVFLPXHQVFLERXQESEILHHLNTLADVL

SEQ ID NO: 8513 - protein, 134 aa, Homo sapiens
  DOMAIN (97)..(108): Nuclesosome assembly protein (NAP) domain identified by eMATRIX, accession number PF00956A, p-value=1.000e-13, raw score of 11.88
  DOMAIN (51)..(134): Nucleosome assembly protein (NAP) domain identified by PFam, accession name NAP_family, E-value=5.3e-36, PFam score of 132.2
PAAWLPILVAARQLTVQMMQNPQILAALQERLDGLVETPTGYIESLPRVVKRRVNALKNLQVKCAQIEAKFYEEVHDLQRKYAVLYQPLFDKRFEIINAIYEPTEEECEWKPDEEDEISEELKEKAKIEDEKKD

SEQ ID NO: 8514 - protein, 265 aa, Homo sapiens
MDVTVSELLELFLQSPLVTWVKTFGPFGSGSQDNLTMYMDLVDGIFLNQIMLQIDPRPTNQRINKHVNNDVNLRIQNLTILVRNIKTYYQDMGYGQTQAWGAGILESFLGGNVCLRLVGLTGREGVSSGEERHLQSFGDIKQPEGWGVSCGYRFRKGELEPLEVAVFVGTGSVGAAVMVAMGAATLEAPEALESINQESSCGCIKPCGNSLEWRQLARALLVRWGDDYDEEGEEADEEGEEGGDEENDPDYDPKKDQNPTECKQQ

SEQ ID NO: 8515 - protein, 278 aa, Homo sapiens
MDVTVSELLELFLQSPLVTWVKTFGPFGSGSQDNLTMYMDLVDGIFLNQIMLQIDPRPTNQRINKHVNNDVNLRIQNLTILVRNIKTYYQDMGYGQTQAWGAGILESFLGGNVCLRLVGLTGREGVSSGQERHLQSFGDIKQPEEAQGRMVGSFERTPQICGLGYRFRKGELEPLEVAVFVGTGSVGAAVMVAMGAATLEAPEALESINQESSCGCIKPCGNSLEWRQLARALLVRWGDDYDEEGEEADEEGEEGGDEENDPDYDPKKDQNPTECKQQ

SEQ ID NO: 8516 - protein, 135 aa, Homo sapiens
  DOMAIN (68)..(79): Nuclesosome assembly protein (NAP) domain identified by eMATRIX, accession number PF00956D, p-value=3.700e-12, raw score of 7.51
  DOMAIN (4)..(125): Nucleosome assembly protein (NAP) domain identified by PFam, accession name NAP_family, E-value=1.9e-67, PFam score of 237.5
ARAKTYRMRSEPDDSDPFPFDGPEIMGCTGCQIDWKKGKNVTLKTIKKKQKHMGRGTVRTVTKTVSNDSFFNFFAPPEVPESGDLDDDAEAILAADFEIGHFLRERIIPRSVLYFTGEAIEDDDDDYDEEGEKSG

SEQ ID NO: 8517 - protein, 113 aa, Homo sapiens
  misc_feature (1)...(113): Xaa = X or * as defined in Table 2
APGVPDKPRQQNEIPVSTKNMXLGVGDCLRGLRQEDHLNQEVPGCSEPXCHDQATALPAWATQQDPVSKKKKKKWWREARKGKPQXGDGEKDSTTHSWLXRWRSLKSRITVSL

SEQ ID NO: 8518 - protein, 88 aa, Homo sapiens
  misc_feature (1)...(88): Xaa = X or * as defined in Table 2
LQKQKQANKQQITXKXACQMVSNSSFPGKQKVDPTTKKRCLVNGGLNLKIQLIIQANFXKSRFIHLTVVPVTILSQVTLQLTMSPKTQ

SEQ ID NO: 8519 - protein, 418 aa, Homo sapiens
  DOMAIN (184)..(225): Nuclesosome assembly protein (NAP) domain identified by eMATRIX, accession number PF00956B, p-value=8.642e-21, raw score of 23.14
  DOMAIN (104)..(393): Nucleosome assembly protein (NAP) domain identified by PFam, accession name NAP_family, E-value=1.2e-115, PFam score of 397.7
  misc_feature (1)...(418): Xaa = X or * as defined in Table 2
VTACAAPAAWLPILVADIWSSYNMADIDNKEQSELDQDLDDVEEVEEEETGEETKLKARQLTVQMMQNPQILAALQERLDGLVETPTGYIESLPRVVKRRVNALKNLQVKCAQKETQFYEEVHDLERKYAVIYQPLFDKRFEIINAIYEPTEEECEWKPDEEDEISEELKEKAKIEDEKKDEEKEDPKGIPXIWLTVFKNVDLLSDMVQEHDEPILKHLKDIKVKFSDAGQPMSFVLEFHFEPNEYFTNEVLTKTLRMSSIPDDSDPFFFXMEPEHXGCTGCQIDWKKGKNVTLKTIRKRPKPQGTWGQFRTVNXNQFPNDSFSNFFCPLLKFLESEDRNDDAEAILAADFEIGHFLRERIIPRSVLYFTGEAIEDDDDDYDEEGEEADEEGEEEGDEENDPDYDPKKDQNPAECKQQ

SEQ ID NO: 8520 - protein, 201 aa, Homo sapiens
  misc_feature (1)...(201): Xaa = X or * as defined in Table 2
PLKRSDGCNDGRPTRPPTRPDTTVFTSNLKQTLLVHLTPVEKSAVTALWGKVNVDEVGGKALGRLLVVLPWDPKRSFQSPLGESVPTPXMAKEKVLGCPLVVGLASPGTTLKGHLCPHWSELALLTSLPRGIPEELQGSWGKRAGSCVAWAQSTFGQKNFNPNKLQGLPNQENWLAWCWLNALGPTSNHLSLAFLAGPISN

SEQ ID NO: 8521 - protein, 74 aa, Homo sapiens
GLVFSRLSPEYYDLARAHLRDEEKSCPCLAQEGPQGDLLTKTQELGRDYRTCLTIVQKLKKMVDKPTQRSVSNA

SEQ ID NO: 8522 - protein, 68 aa, Homo sapiens
TMSTVVLLLQRSVSNAATRVCRTGRSRWRDVLSCGRSTGSCPQIPGTSATSAGSSLPRSRIHSPVSLP

SEQ ID NO: 8523 - protein, 118 aa, Homo sapiens
PVCTVSGPMAPGASSSHPVLPLLGLLEPAGLAELGRTHPITMSTVVLLLQRSVSNAATRVCRTGRSRWRDVCRNFMRRYQSRVIQGLVAGETAQQICEDLRLCIPSTGECRGDSRDTS

SEQ ID NO: 8524 - protein, 179 aa, Homo sapiens
  misc_feature (1)...(179): Xaa = X or * as defined in Table 2
ENKISSVFKADFLPPAPCSLPGLEVSVSPKGKNTSGRESGFGWAIWMEGLVFSRLSPEYYELARPHLRDEEKSCPCLAQEGPQGDLLTKTPELGPXITRTCLTIVQKTXRKMVDKPTQRSVSNAATRVCRTGRSRWRDVCRNFMRRYQSRVTQGLVAGELAQQNLVSTSRLCIPSTGPL

SEQ ID NO: 8525 - protein, 149 aa, Homo sapiens; identical to SEQ ID NO: 8286
  DOMAIN (33)..(55): Globins profile domain identified by eMATRIX, accession number BL01033A, p-value=3.250e-20, raw score of 16.94
  DOMAIN (9)..(149): Globin domain identified by PFam, accession name globin, E- value=4.6e-57, PFam score of 203.0

SEQ ID NO: 8526 - protein, 158 aa, Homo sapiens
  DOMAIN (42)..(64): Globins profile domain identified by eMATRIX, accession number BL01033A, p-value=4.857e-17, raw score of 16.94
  DOMAIN (44)..(68): Globin domain identified by PFam, accession name globin, E- value=0.00041, PFam score of 18.8
  misc_feature (1)...(158): Xaa = X or * as defined in Table 2
PTLLVPTDSERTHPWLLSPADKTNVKGPPGGKVGAHAVRSMCAEALERMFLSFPTTKTYFPHFDLSHGSAQVXGPRARKVADALTNAVAHVGRTLPNALVPPLSDLHAHKLRVGPGSTFKLLKATCLAGLTLAAHLPARVQPLAVASLPWDKVSWASC

SEQ ID NO: 8527 - protein, 86 aa, Homo sapiens
  misc_feature (1)...(86): Xaa = X or * as defined in Table 2
RTCASLKSLHRPHGSHGHGQRGGFLXVFSSSFDSSDGVWQVCSPGGQIPPTCPHHCCDPESPDSSSGPPVPWHLPCAVQGPSPGGL

SEQ ID NO: 8528 - protein, 139 aa, Homo sapiens
  DOMAIN (53)..(79): Elongation factor 1 gamma chain profile domain identified by eMATRIX, accession number BL50040B, p-value=7.000e-30, raw score of 13.65
  DOMAIN (4)..(129): Glutathione S-transferases domain identified by PFam, accession name GST, E-value=8.8e-31, PFam score of 104.6
MAAGTLYTYPENWRAFKALIAAQYSGAQGRVLSAPPHFHFGQTNRTPEFLRKFPAGKVPAFEGDDGFCVFESNAIAYYVSNEELRGSTPEAAAQVVQWVSFADSDIVPPASTWVFPTLGIMHHNKQVLEPSFRQAFPNT

SEQ ID NO: 8529 - protein, 56 aa, Homo sapiens
  misc_feature (1)...(56): Xaa = X or * as defined in Table 2
REHPVAGLQEHLQGGGSGQQDLRGXWAYFSHRXSRKVPTSWXRRWKMVAPWAARRV

SEQ ID NO: 8530 - protein, 262 aa, Homo sapiens
  misc_feature (1)...(262): Xaa = X or * as defined in Table 2
SWPQVPKTNKIEPRSYSIITSCGIRRLGPALNTLIFSKXNASGPAGHSAKSIEGAPRGKGRGRAVARLAADRPPAPKIQLPSFVLRSTLXYPLLELELPRLLATHLPSNGSSLKDLKWTHSNYRASKEPCIVIFVTTSPGREWVICAPAAFLGCGSRFSGSPLPESNPXFPVTRGHHGRHGDYHRKLIGQTFEWVVVRRHGGRAIGPRLSRVTKAAGARPPAGAGEGLDRVGFDLINAPSPPAKGVSARRHVLALELPQLSK

SEQ ID NO: 8531 - protein, 79 aa, Homo sapiens
  misc_feature (1)...(79): Xaa = X or * as defined in Table 2
RKTQTTRRGPGLWAGPGGXRGGWWSRRLLLAAGFLGTHPGSTHPGLQQPRFKWDHTRSSQGAFIFTFFPRGGQEHSFTS

SEQ ID NO: 8532 - protein, 86 aa, Homo sapiens
LKQSWVWEGPAGMPGLGAAGPGHPGAGPVCPLDGPSSYPYYYFVTREVMQRDISAGDFIEHAEFSGNLYGTRWAMRGCGWAPRVAV

SEQ ID NO: 8533 - protein, 250 aa, Homo sapiens
  DOMAIN (98)..(146): Guanylate kinase proteins domain identified by eMATRIX, accession number BL00856C, p-value=8.714e-28, raw score of 29.21
  DOMAIN (76)..(189): Guanylate kinase domain identified by PFam, accession name Guanylate_kin, E-value=5.7e-06, PFam score of 20.9
  misc_feature (1)...(250): Xaa = X or * as defined in Table 2
PRSIGEGLGPSLLCGSGRARFSSGGMSGPRLVVLSGPSGAGKSTLLKRLLQEHSGIFGFSVSRESRALVEGTTRNPRPGEGRRQKITYFVTREVMQRDIAAGDFIEHAEFSGNLYGTSKVAVQAVQALXPHRVCLDVDLQGVRNIRPTDLRPNLHLLFSPPFTATCWKQPGFRQPQQLETEGRAWLKAGLLLAQADMEEPAKEAPALFDVVHPLNDQPGTQAYAELKEALSEEIKKAQRTGALRLAVCSR

SEQ ID NO: 8534 - protein, 153 aa, Homo sapiens
  DOMAIN (41)..(83): Ribosomal protein L34e proteins domain identified by eMATRIX, accession number BL01145A, p-value=7.730e-09, raw score of 13.73
  DOMAIN (42)..(152): Ribosomal protein L34e domain identified by PFam, accession name Ribosomal_L34e, E-value=0.00028, PFam score of 15.9
  misc_feature (1)...(153): Xaa = X or * as defined in Table 2
AGVGVRGTTGRLVVRKFLTLIFGNPLFLVAPPKPHSEWSQRLTYRRRPSPYNTASNKTRLSPNPDGNRICLPFIPKKVGKAPQSLHVVCAPGRLRGVRAVRPKVLLXRLSKTKKHVSRAYGWFHCVLKCGRDRIKACFSLIGGSRKIRCGKSV

SEQ ID NO: 8535 - protein, 211 aa, Homo sapiens
  DOMAIN (20)..(68): IMMUNOGLOBULIN V REGION domain identified by eMATRIX, accession number DM00031A, p-value=7.400e-32, raw score of 16.80
  DOMAIN (34)..(210): Immunoglobulin domain identified by PFam, accession name ig, E-value=6.4e-11, PFam score of 40.2
MDWTWSILFLVAATTGVHSQVHLVQSGAEVKKPGASVKVSCKASFNSFDTYGFNWVRQAPGQGLEWMGWVSAFNGDTNYIRKLQGRVTMTTDSSTSTAYLELRSLKSDDSAIYYCAATNSDKYFWGQGTLVTVSAASPTSPKVFPLSLCSTQPDGNVVIACLVQGFFPQEPLSVTWSESGQGVTARNFPPSQDAFGDLYTTSSQLTLPATH

SEQ ID NO: 8536 - protein, 542 aa, Homo sapiens
  DOMAIN (40)..(88): IMMUNOGLOBULIN V REGION domain identified by eMATRIX, accession number DM00031A, p-value=3.250e-39, raw score of 16.80
  DOMAIN (54)..(512): Immunoglobulin domain identified by PFam, accession name ig, E-value=2.7e-12, PFam score of 44.7
  misc_feature (1)...(542): Xaa = X or * as defined in Table 2
SPGIFRGFQSVIRTEQRELTMESGLNWLLLVAVLKGVQCEVQILESGGGQVQPGGSRTLSCAASGFIFSNYVMTWVRQAPGKGLEWVSSTAASGANTFYAESVKGRFTVSRENSENMMYLQMSSLRDEDTGIYYCAKDGDVPNLGVAWIVAGPGNVRPRKWFDAWGQGTTVTVSSASPTSPKVFPLSLCSTQPDGNVVIASCLVQGFFPQEPLSVTWSESGQGVTARNFPPSQMASGDLYTTSSQLTLPATQCLAPKSVTCHVKHYTNPHPDVDGPCPVPSTPPTPCSLNSTYPISLMLPPPTVTAPTGPSKDLFLGSEANLTCTLTGLENASGCHFQSEGLQVGKSAVQGPPEAXPSVAAYSVVQLSCRGWREAMEPLVRPFTCTAALPRSPRTRANRPPSSKSGKHISGPEGPPCCRPPSEELALNELVTLTCLARAFSPQGPCWVRWLQGSPKLPPRKSTXLGPFPAGAQARAPTTFAVTSILGRVQPEDWKKGDTFSCMAGHEALALAFTQKTIDRLAGKPTHVNVSVVMAEVDGTCY

SEQ ID NO: 8537 - protein, 45 aa, Homo sapiens
  DOMAIN (20)..(30): Ferritins domain identified by PFam, accession name ferritin, E-value=0.023, PFam score of 11.4
  misc_feature (1)...(45): Xaa = X or * as defined in Table 2
XAAMTTASTSQVRQNYHQDSEAAINRQINLGALRLLRLPVHVLLL

SEQ ID NO: 8538 - protein, 116 aa, Homo sapiens
  misc_feature (1)...(116): Xaa = X or * as defined in Table 2
VMGPKPLPGIVPEFLKNWPRPSGLLIEFCPHWDTTDMTSNCLVXEENYSEQCLELLNPVGMDLILRGDCESYHGHKPNRKLGSQHLSDQAALTGRLSSPCLMKRRRSASFRFTQAG

SEQ ID NO: 8539 - protein, 448 aa, Homo sapiens
  DOMAIN (63)..(93): Glutathione S-transferases domain identified by eMATRIX, accession number PF00043, p-value=1.675e-09, raw score of 21.83
  DOMAIN (301)..(408): Elongation factor 1 gamma, conserved doma domain identified by PFam, accession name EF1G_domain, E-value=3e-84, PFam score of 293.3
  misc_feature (1)...(448): Xaa = X or * as defined in Table 2
HASGITMAAGTLYTFSVNWRAFKALIAAQYSGAQVRVLSAPPHFHFGQTNRTPEVLRKFPAGKGPAFEGDDGFCVFESNAIAYYVSNEELRGSTPEAAAQVVQWVSFADSDIVPPASTWVFPTLGIMHHNKQATXECKGRKXGRILGLVDAYLKTEDFCWGANVERLSGITVVCTLLWLYKQVLEPSFRQAFPNTNRWFLTCINQPQFPAVLGGSETCVRRLAPFGAXKVLQRPQPKKDTPRKEEGFTGKKKQKPQAERKEEKKAAAPGPEEEMDECEQALAAEPKAKDPFAHLPKSTFVLDEFKRKYSNEDTLSVALPYFWEHFDKDGWSLWYSEYRFPEELTQTFMSCNLITGMFQRLDKLRKNAFASVILLGTNNSSSISGVWVFRGQELAFPLSPDWQVDYESYTWRKLDPGSEETQTLVREYFSWEGAFQHVGKAFNQGKIFK

SEQ ID NO: 8540 - protein, 358 aa, Homo sapiens
  DOMAIN (88)..(129): Ferritin iron-binding regions proteins domain identified by eMATRIX, accession number BL00540A, p-value=1.000e-40, raw score of 15.06
  DOMAIN (99)..(277): Ferritins domain identified by PFam, accession name ferritin, E-value=4.1e-22, PFam score of 77.6
  misc_feature (1)...(358): Xaa = X or * as defined in Table 2
AIEHCQSGDNPESRRGFLLQQWLGRNPALVPHPGRTGHSQPPVTFHRHPSDCQRSPAGRFKGGPSHRGQPPPFHKSPPMTTARPTSQVRQNYHQDSEAAINRQINLELYASYVYLSMSYYFDRDDVALKNFAKYFLHQSHEEREHCXENLMKACRTNEGWPNLSFQDIKETKTCDDWESGAECQWKCALHLEKNVESSHYWNLHKLATDKNXPPICVDFIXDTFTLNEQVXKAIKRIWGDHVXPKLWRKMGSAPNLGFGEYLFXQSTPWETVIMKAKPRANFPNSRGVTFLVTKAVHACWGFLYLFYKLYQNIHLSSLICTIPSNKEIWYPGVVFEVLDESEIYPGYLPDSLSAVVQF

SEQ ID NO: 8541 - protein, 143 aa, Homo sapiens
  DOMAIN (21)..(43): Globins profile domain identified by eMATRIX, accession number BL01033A, p-value=2.929e-17, raw score of 16.94
  DOMAIN (10)..(143): Globin domain identified by PFam, accession name globin, E- value=4.3e-55, PFam score of 196.4
APSPDAMGHSLWGKVNVEDAGGETLGRLLVVYPWTQRFFDSFGNLSSASAIMGNPKVKAHGKKVLTSLGDAIKHLDDLKGTFAQLSELHCDKLHVDPENFKLLGNVLVTVLAIHFGKEFTPEVQASWQKMVTGVASALSSRYH

SEQ ID NO: 8542 - protein, 162 aa, Homo sapiens
  DOMAIN (103)..(115): Globins profile domain identified by eMATRIX, accession number BL01033B, p-value=1.000e-15, raw score of 13.81
  DOMAIN (50)..(81): Globin domain identified by PFam, accession name globin, E- value=0.021, PFam score of 12.9
  misc_feature (1)...(162): Xaa = X or * as defined in Table 2
APSPRRPWGHFTEEDKATITSLWGKVNVEDAGGRKPLGKAPWLSTPWTQRFFDSFGNLSSASAIHGQTPKVKAHGKKVLTSLGDATKHLDDLKGTFAQAXSELHCDKLHVDPENFKLLGNVLVTVLAIPFSAKEFTPEGCRASWAERWVTWSWPVPCSSRYH

SEQ ID NO: 8543 - protein, 411 aa, Homo sapiens
  DOMAIN (341)..(371): ANTI-PROLIFERATIVE PROTEIN BTG1 FAMILY SIGNATURE domain identified by eMATRIX, accession number PR00310D, p-value=1.540e- 37, raw score of 9.10
  DOMAIN (169)..(411): BTG1 family domain identified by PFam, accession name Anti_proliferat, E-value=3.6e-73, PFam score of 256.5
MGEAFAQENMAENPYISVVNSHILNNWEFPKWSLDDSTKVQLNSMKLGGTEMAPRRWQLVCEGTLAPRGCSPFSWTERPAGPFPPLSPALRQRTASTHSAGARIAPHHTRLRLEEPVTETRSGNEILPPGEEARGGCSAVGAAPPSPSRPGPPPHAAPMHPFYTRAATMIGEIAAAVSFISKFLRTKGLTSERQLQTFSQSLQELLAGEQGEGVGGTRAPHPWVRVRPSGLREPRQRPGAGRAWAPPRDRWQNGEEKTTRTTKKLKPTEAGAAVRGPSADLGTKEPWGWEHYKHHWFPEKPCKGSGYRCIRINHKMDPLIGQAAQRIGLSSQELFRLLPSELTLWVDPYEVSYRIGEDGSICVLYEASPAGGSTQNSTNVQMVDSRISCKEELLLGRTSPSKNYNMMTVSG

SEQ ID NO: 8544 - protein, 214 aa, Homo sapiens
  DOMAIN (134)..(156): BTG1 family proteins domain identified by eMATRIX, accession number BL00960C, p-value=6.000e-19, raw score of 12.68
  DOMAIN (43)..(214): BTG1 family domain identified by PFam, accession name Anti_proliferat, E-value=1.7e-08, PFam score of 29.1
  misc_feature (1)...(214): Xaa = X or * as defined in Table 2
ESPGVGCSARRGPRPRSPGPPPAAPGTPRPHGIPLYTRAGHQXXGEIRRRPCTFISKFLRPQGGSASERQLPDLQARAWQELLGRPFNKHHWFPRXSPCKGIGVTRCIRINPXKWIPLIGPGQHSAIGLSSQELFRLLPSELTLWGXPPIEVSYRIGEDGSHLCACMKPSPAGGSTQNQTNVQMVDSRISCKEELLLGRTEPFPKTTNMMTVSG

SEQ ID NO: 8545 - protein, 150 aa, Homo sapiens
  misc_feature (1)...(150): Xaa = X or * as defined in Table 2
AVPGPGFGLSPTMVTLAELLVLLAALLATVSGYFVSIDAHAEECFFERVTSGTKMGLIFEAEDGGFLDIDVVITLPDRRKIKPRLLKKKGQXTYRSFMDVTFKLCYNLRMSWMNPNIRNHNHWLLLTSIKFLITQFRSSLSYLSSCIQSE

SEQ ID NO: 8546 - protein, 633 aa, Homo sapiens
  DOMAIN (98)..(150): Catalase proximal heme-ligand proteins domain identified by eMATRIX, accession number BL00437A, p-value=1.000e-40, raw score of 18.82
  DOMAIN (78)..(528): Catalase domain identified by PFam, accession name catalase, E-value=5.4e-297, PFam score of 1000.0
LAEPEVATDSGQQADLPAEGGDPRAEASCSVLHSKPHAMADSRDAASDQMQHWKEQRAAQKYLGVDLLGHKKADVLTTGAGNPVGDKLNVITVGPRGPLLVQDVVFTDEMAHFDRERIPERVVHAKGAGAFGYFEVTHDITKYSKAKVFEHIGKKTPIAVRFSTVAGESGSADTVRDPRGFAVKFYTEDGNWDLVGNNTPIFFIRDPILVSFLFSDRGIPDGHRHMNGYGSHTFKLVNANGEAVYCKFHYKTDQGIKNLSVEDAARLSQEDPDYGIRDLFNAIATGKYPSWTFYIQVMTFNQAETFPFNPFDLTKVWPHKDYPLIPVGKLVLNRNPVNYFAEVEQIAFDPSNMPPGIEASPDKMLQGRLFAYPDTHRHRLGPNYLHIPVNCPYRARVANYQRDGPMCMQDNQGGAPNYYPNSFGAPEQQPSALEHSIQYSGEVRRFNTANDDNVTQTSLYLTYRFMENIEKVRAFYVNVLNEEQRKRLCENIAGHLKDAQIFIQKKAVKNFTEVHPDYGSHIQALLDKYNAEKPKRSLAFIRVTRSSLDEDSPVLDVQMQASGFKIENPTFYSRLCNNFNAISPGENEALTIEQMGSTEANCLLRNSVQLVAFVIEITSRKSDIVERHKCAWT

SEQ ID NO: 8547 - protein, 65 aa, Homo sapiens
  misc_feature (1)...(65): Xaa = X or * as defined in Table 2
XYWMLCSKAEGCCSGAPKAVGVVIWSTTLIVLHAHRAVTLVVGHSSTGRDSSQVYEDNWVPGRWR

SEQ ID NO: 8548 - protein, 956 aa, Homo sapiens
  DOMAIN (239)..(290): Ets-domain proteins domain identified by eMATRIX, accession number BL00345B, p-value=3.250e-26, raw score of 21.28
  DOMAIN (315)..(804): Catalase domain identified by PFam, accession name catalase, E-value=1.3e-207, PFam score of 703.1
  misc_feature (1)...(956): Xaa = X or * as defined in Table 2
RMLITGSPALGSAIPGTPGRRGEALQLLGQSGTLPFRTLLGISGLQASFGEPCSEPIGLPILACLAPSSQSEGSPPEGAGRGGGADWLSLKSPRTRGNRQICLLRVETHEPRPPAVFCTANRTLWLTAGIPPATRCSTGRSSGPRRIEMRACTTSIQGNNVQDKWKSNCEVPDVECACTFLESLKPGWLGQSKQGAKRSGGDECLQSSHLWEFVRDLLLSPEENCGILEWEDREQGIFRVVKSEALAKMWGQRKKNDRMTYEKLSRALRYYYKTGILERVDRREKLFNSAIRDTSNAPIPKVQKFSNNCGSSPKVRAFYVNVLNEEQRKRLCENIAGHLKDAQIFIQKKAVKNFTEVHPDYGSHIQALLDKYNAEKPKVWPHKDYPLIPVGKLVLNRNPVNYFAEVEQIAFDPSNMPPGIEASPDKMLQKADVLTTGAGNPVGDKLNVITVGPRGPFLVQDVVFTDEMAHFDRERIPEEKLCMLKGAGAFWYFXRSHIDITKYSKGKRYFEHIWKRRLPIAVRFFHCLLGESGFSLTQFRDPRGFAVKFYTEDGNWDLVGNNTPIFFIRDPILFPSFIHSQKRNPQTHLKDPDMVWDFWSLRPESLHQVSFLFSDRGIPDGHRHMNGYGSHTFKLVNANGEAVYCKFHYKTDQGIKNLSVEDAARLSQEDPDYGLRDLFXTPLATGKYPSWTFYIQVMTFNQAETFPFNPFDLTKVWPHKDYPLIPVGKLVLNTRNPVNYFAXGWNRXPFDPSNMPPGMXGPVPDKMAFRGRLFCLFLDTHRHSPGGPNYSFILPVELVPYRGSEWGQLTRRDGPDVALQDNQGWVVPKFINPNSFGAREQQPSALEHSIQYSGEVRRFNTANEMDNVNSGGGHFYVERAELREQERKRLCXGTFAGHLEGMAQIFIPEGKRVKNFHXGSHPXPTGAHIPRLFWTKYKAENPKNAIHTFVQSGISP

SEQ ID NO: 8549 - protein, 149 aa, Homo sapiens; identical to SEQ ID NO: 8286
  DOMAIN (33)..(55): Globins profile domain identified by eMATRIX, accession number BL01033A, p-value=3.250e-20, raw score of 16.94
  DOMAIN (9)..(149): Globin domain identified by PFam, accession name globin, E- value=4.6e-57, PFam score of 203.0

SEQ ID NO: 8550 - protein, 172 aa, Homo sapiens
  DOMAIN (41)..(63): Globins profile domain identified by eMATRIX, accession number BL01033A, p-value=4.857e-17, raw score of 16.94
  DOMAIN (16)..(66): Globin domain identified by PFam, accession name globin, E- value=2.5e-07, PFam score of 30.0
  misc_feature (1)...(172): Xaa = X or * as defined in Table 2
PDSSGPHRLRENPPWCLSPADKTNVKAAWGKVGAHAVRSMCAEALERMFLSFPTTKTYFPHFDLSHGFAQVXGPRARKVADALDTNAVANVGRTLPNALVRPLSDLHAHKLSGGTRFNFKAPKGHLPCLGEPWAAHLPRPSFNPWRLQRLPWGQSFLGFLLKHRCLNLPNYR

SEQ ID NO: 8551 - protein, 169 aa, Homo sapiens
  DOMAIN (94)..(137): Ribosomal protein S15 proteins domain identified by eMATRIX, accession number BL00362, p-value=8.239e-21, raw score of 24.67
  DOMAIN (99)..(131): Ribosomal protein S15 domain identified by PFam, accession name Ribosomal_S15, E-value=0.0024, PFam score of 17.2
  misc_feature (1)...(169): Xaa = X or * as defined in Table 2
PPLHLRDCFSPPGRALSPVGLYPYRRSVPTWLKLTSDDVKEQIYKLAKKGLTPSQIGVILRDSHGVAQVRLGTGHDTFKILKSKGLDPDLPEDLYHLIKKAVAVRKHLERNRKDKDAKFRLILIESRIHPFWLRYYKTKRVLPPNWEIXNHLTASALGRINLVWCTPSK

SEQ ID NO: 8552 - protein, 205 aa, Homo sapiens
FSYLPPGPSHGTWGLWELQFKMRFGVCRHLMEDSMDMDVSPLRPQNYLFSCELKADKDDHFKVDNDENEHQLSLRTPTVSLGVFEITPPVLLWLKCGSGPVHISGQHLVAVEEDAESEDEEEEDVKLLRISGKTKTFMATNGKEYKHYKISSEKSLDNKYKTRTPGFQAFGFEDLHPWPLGSQAFYLSLRVTPPVFLVLRLLDFD

SEQ ID NO: 8553 - protein, 206 aa, Homo sapiens
  DOMAIN (114)..(148): Amyloidogenic glycoprotein extracellular domain proteins domain identified by eMATRIX, accession number BL00319C, p-value= 2.881e-11, raw score of 17.12
  misc_feature (1)...(206): Xaa = X or * as defined in Table 2
AKDELHIVEQGHDIRGRSIKITLATLKMSVQPTFSLGGFEIQPTVVXGLKCVSGPCHISGQHLVAVEEDAESEDEEEENVKLLSISERRSAPGVVSMVPQKKVKLAADEDDDDDDEEDDDEDDDDDDFDDEEAEEKAPVKKSIRDTPAKNAQKSNQNGKDSKPSSTPRSKGQESFKKQEKTPKTPKGPSSVEDIKAKMQASIEKAH

SEQ ID NO: 8554 - protein, 563 aa, Homo sapiens [sequence omitted]

SEQ ID NO: 8555 - protein, 177 aa, Homo sapiens
  misc_feature (1)...(177): Xaa = X or * as defined in Table 2
DSVLRGCSLEQRSFISVRLLSYLSACRHPMEDSMDMDMSPLRPQNYLFGCELKADKDYHFKVDNDENEHQLSLRTVSLGAGAKDELHIVEAEAMNYEGSPIKVTLATLKMSVQPTVSLGGFEITPPVVLRLKCGSGPVHISGQHLVVYRRKHQELQAMQMDCRALSTSXASSAPRPS

SEQ ID NO: 8556 - protein, 140 aa, Homo sapiens
  misc_feature (1)...(140): Xaa = X or * as defined in Table 2
VQGLGVERVPLGSHRGWMGPPRPLLSPQERASCLLLLLLPLVHVSATTPEPRELDDEDFRCVLQLSPEPQPDWPEALHRASAVQAXISAGGSHLQSSFLIGLRLLKTVTVLLWPLFVLICVYLSVYLPFRLCLDTLSCVV

SEQ ID NO: 8557 - protein, 338 aa, Homo sapiens
  DOMAIN (205)..(239): Amyloidogenic glycoprotein extracellular domain proteins domain identified by eMATRIX, accession number BL00319C, p-value= 2.881e-11, raw score of 17.12
  misc_feature (1)...(338): Xaa = X or * as defined in Table 2
SVLRGCSLEQRSFIYGRLLSYLSACRHPMEDSMDMDMSPLRPQNYLFGCELKADKDYHFKVDNDENEHQLSLRTVSLGAGAKDELHIVEAEAMNYEGKSNXTXHLATLKMSVQPTVSLGGAFEITPPVVLRLKCGSGPVHIKWTSTYVAVEGKMQKSRRLKKEGRIVKLLKVYLGKRSAPWKVGSKVSTEKKVKTLLAXWKDDDRMNDEEDDDEDDDDDDFDDEEAEEKAPVKKSIRDTPAQKCSESQNQNGKRLQKPSFTPKNQKGQESFQETRKKLLKTPKGPSSVEDIKAKMQASIEKGGSLPKVEAKFINYVKNCSRMTDQEAIQDLWQWRKSL

SEQ ID NO: 8558 - protein, 161 aa, Homo sapiens
  DOMAIN (40)..(62): Globins profile domain identified by eMATRIX, accession number BL01033A, p-value=4.857e-17, raw score of 16.94
  DOMAIN (42)..(116): Globin domain identified by PFam, accession name globin, E- value=7.5e-07, PFam score of 28.3
  misc_feature (1)...(161): Xaa = X or * as defined in Table 2
SSGPTRLRENPPMVAVSCPTKTNVKAAWGKVGAHAVRSMCAEALERMFLSFPTTKTYFPHFDLEPRFLPRFKGHGKKVADALTNAVAHVDDMPKRAVPPLSDLHAHKFRVGPGSTFKLLKPLALLGXTLGRPTSPSEFQPLAVARLPWGQSFLGFLLKQPC

SEQ ID NO: 8559 - protein, 417 aa, Homo sapiens
  DOMAIN (166)..(212): Thiolases acyl-enzyme intermediate proteins domain identified by eMATRIX, accession number BL00098C, p-value=3.829e-32, raw score of 21.65
  DOMAIN (6)..(415): Thiolase domain identified by PFam, accession name thiolase, E-value=7.3e-156, PFam score of 531.2
KSSHCIKMGPQIFHKTSELFLPATSCPSCPDQNEEDVSQTQYKECCGGGWCSHSIFAVWHFAALGAGFSDKTPAHTVTMACISANQAMTTGVGLIASGQCDVIVAGGVELMSDVPIRHSRKMRKLMLDLNKAKSMGQRLSLISKFRFNFLAPELPAVSEFSTSETMGHSADRLAAAFAVSRLEQDEYALRSHSLAKKAQDEGLLSDVVPFKVPGKDTVTKDNGIRPSSLEQMAKLKPAFIKPYGTVTAANSSFLTDGASAMLIMAEEKALAMGYKPKAYLRDFMYVSQDPKDQLLLGPTYATPKVLEKAGLTMNDIDAFEFHEAFSGQILANFKAMDSDWFAENYMGRKTKVGLPPLEKFNNWGGSLSLGHPFGATGCRLVMAAANRLRKEGGQYGLVAACAAGGQGHAMIVEAYPK

SEQ ID NO: 8560 - protein, 547 aa, Homo sapiens
  DOMAIN (143)..(198): Thiolases acyl-enzyme intermediate proteins domain identified by eMATRIX, accession number BL00098B, p-value=5.219e-35, raw score of 32.59
  DOMAIN (110)..(547): Thiolase domain identified by PFam, accession name thiolase, E-value=5.5e-124, PFam score of 425.3
MLPRSPTPNPQDPQDLRRNARQPARSHAAQGDTDRAARPLSRLGEAGSRERGIRRPAVPCTYQSQPAAPGSPSHDDPKTERPLGSDSRLQGCDTQAPHRLGKDGKDWAAREALFVASFASVKIGELRGLLHRTSVPKEVVDYIIFGTVIQEVKTSNVAREAALGAGFSDKTPAHTVTMACISANQAMTTGVGLIASGQCDVIVAGGVELMSDVPIRHSRKMRKLMLDLNKAKSMGQRLSLISKFRFNFLAPELPAVSEFSTSETMGHSADRLAAAFAVSRLEQDEYALRSHSLAKKAQDEGLLSDVVPFKVPGKDTVTKDNGIRPSSLEQMAKLKPAFIKPYGTVTAANSSFLARGVESGVVPTGWNTTLLSPGGEELVRLVICKTELDDRAMWHGLHLPDLNPFDYFQGMLKVQVYLTDGASAMLIMAEEKALAMGYKPKAYLRPTYATPKVLEKAGLTMNDIDAFEFHEAFSGQILANFKAMDSDWFAENYMGRKTKKFNNWGGSLSLGHPFGATGCRLVMAAANRLRKEGGQYGLVAACAAGGQ

SEQ ID NO: 8561 - protein, 52 aa, Homo sapiens
HPVTVYLLLGYLLFQLPCGSEFSTSETHGHSADRLGAAFAVSRLEQDEYAPG

SEQ ID NO: 8562 - protein, 64 aa, Homo sapiens
  misc_feature (1)...(64): Xaa = X or * as defined in Table 2
VLMFSSSHGXGYQSSRLQCKLQIVQLIQDILLFFSFXIPEXLLSXLTPLKIFPLHQNGPSDFVS

SEQ ID NO: 8563 - protein, 74 aa, Homo sapiens
FLKHISVEKIYKACGSIELKKFIFLIGKDTVTKDNGIRPSSLEQMAKLKPAFIKPYGTVTAANSSFLELAMLFV

SEQ ID NO: 8564 - protein, 478 aa, Homo sapiens
  DOMAIN (344)..(382): Thiolases acyl-enzyme intermediate proteins domain identified by eMATRIX, accession number BL00098E, p-value=8.200e-29, raw score of 22.12
  DOMAIN (59)..(478): Thiolase domain identified by PFam, accession name thiolase, E-value=2.9e-80, PFam score of 280.1
  misc_feature (1)...(478): Xaa = X or * as defined in Table 2
KSSHCIKMGPQIFHKTSELVLPATSCPSCPDQNEEDVSQTQYKECCGGGWCSHSIFAVWHFIXRPDATXFGLEQRLTGLLASGPVSLREVVXLYSSLGTVISGKXKTSNVGXRGLALGSWAFSDKYSWFTMFTWACISGPTKALTTGVGLIAFGQCDVIVAGGVELMSDVPIRHSRKMIKLMLDLNKAKSMGQRLSLISKFRFNFLAPELPAVSEFSTSETMGHSADRLAAAFAVSFLDQDEYALRSHSLSKKAQDEGLLSDVVPFKVPGKDTVTKDNGIRPSSLEQMAKLKPAFIKPYGTVTAANSSFLLTDGASAMLIMAEEKALAMGYKPKAYLRRDFMYVSQDPKDQLLLGPTYATPKVLEKAGLTMNDIDAFEFHEAFSGQILANFKPMDSDWFAENYMGXKKPRFGLPPLWRRFNNWGGSLSLGHPFGTTGCRLVMTAANRLRKKGGQYGLVAACAPGGQGSATDYVEAYPK

SEQ ID NO: 8565 - protein, 119 aa, Homo sapiens
LDQQCKQTSEYLRYEDTLLLEDQPTGENEMVIMRPGNKYEYKFGFELPQGPLGTSFKGKYGCVDYWVKAFLDRPSQPTQETKKNFEVVDLVDVNTPDLMAPVSAKKEKKVSCILNNNVQ

SEQ ID NO: 8566 - protein, 193 aa, Homo sapiens
PRGVIGHGPLGTSFIGKYGCGDYWVKAFLDRPSQPNQGPKKNFEVWDLVDVNTPDLMAPVSAKKERKVSCMFIPDGRVSVSARIDRKGFCEGDEISIHADFENTCSRIVVPKAAIVARHTYLANGQTKVLTQKLSSVRGNHIISGTCASWRGKSLRVQKIRPSILGCNILRVEYSLLIYVSVPGSKQVFIKAL

SEQ ID NO: 8567 - protein, 113 aa, Homo sapiens
  misc_feature (1)...(113): Xaa = X or * as defined in Table 2
KDDTNTKCWXAWNCSSTRAHWKRTLTLLGRLLTMNIPHDSAIPLLGAHPTXMWAYVHQNPGTVMLTETLFMIATNWTLHKCPQXXKEXCNGAVTEWSAALKQNKLQLHVTPRV

SEQ ID NO: 8568 - protein, 479 aa, Homo sapiens
  misc_feature (1)...(479): Xaa = X or * as defined in Table 2
SEIIFCKGVSSIWSFFFLPPSFLTLKTNSVPSWVMFKKIKSFEVVFNDPGKGVTAVGEKVAGRVNSGRCVEVTRVKAVRIPACRSGLKCLWMPGIPSRCKQTSEYPRYEDTVFLEDQPTGENEMVIMRPGNQYEYKFGFELPQGPLEHSFKGKYGCVDYWVKAFLDRPSQPTQETKKNFEVVDLVDVNTPDLMAPVSALKKEKKVSCMVIPDGRVSVSARIDRKGFCEGDEISIHADFENTCSRIVVPKAAIVARHTYLANGQTKVLTQKLSSVRGNHIISGTCASWRGKSLRVQKIRPSILGCNILRVEYSLLIYVSVPGSKKVILDLPLVXLGSRSGLSSRTSSMGSRTSSLRMSWVDLNIPDTPEVPSCILGCSFPEGSTVWESPTTPLLDDMDGSQNSPIFMYAPEFKFMPPRTYTEVDPCIFNHQCAVSMWKKRSSFTLLVSFWPSLPWTVHFFQRLNSLCNGSVGPTLSPLTS

SEQ ID NO: 8569 - protein, 129 aa, Homo sapiens
  DOMAIN (103)..(129): Ribosomal protein S9 proteins domain identified by eMATRIX, accession number BL00360C, p-value=8.105e-27, raw score of 17.65
  DOMAIN (17)..(129): Ribosomal protein S9/S16 domain identified by PFam, accession name Ribosomal_S9, E-value=8e-67, PFam score of 217.0
  misc_feature (1)...(129): Xaa = X or * as defined in Table 2
MPSKVRCXSVQVFDAMKTATAVAHCKRGNGLIKLLEPVLLLGKERFAGVDTRVRVKGGGHVAQIYAIRQSISKALVAYYQKYVDEASKKEIKDILIQYDRTLLVADPRRCESKKFGGPGARARYQKSYR

SEQ ID NO: 8570 - protein, 153 aa, Homo sapiens
  DOMAIN (14)..(41): Ribosomal protein S9 proteins domain identified by eMATRIX, accession number BL00360A, p-value=6.478e-23, raw score of 16.97
  DOMAIN (14)..(141): Ribosomal protein S9/S16 domain identified by PFam, accession name Ribosomal_S9, E-value=2.3e-28, PFam score of 94.0
MPSKGPLQSVQVFGRKKTATAVAHCKRGNGLIKVNGRPLEMIEPRTLQYKVLGSGTGVSGWRTLGDRDVVALESWGAGISNGMFRSCVGCRQWAAGASSASRQERFAGVDIRVRVKGGGPWPRFMSKKFGGPGARARYQKSTDKPIVTQNSLV

SEQ ID NO: 8571 - protein, 162 aa, Homo sapiens
  DOMAIN (134)..(161): Ribosomal protein S9 proteins domain identified by eMATRIX, accession number BL00360C, p-value=8.105e-27, raw score of 17.65
  DOMAIN (1)..(162): Ribosomal protein S9/S16 domain identified by PFam, accession name Ribosomal_S9, E-value=1.8e-39, PFam score of 129.5
  misc_feature (1)...(162): Xaa = X or * as defined in Table 2
LLEPVLLLGKERFAGVDIRVRVKGGGHVAQIYGESQELGAWRRWLWEGGLHSAPVPFNCVSFSQLSVSPISKALVAYYQKWSEHGSFPXGRWVCGDQVKDSVXLSKSSSLLFLPDVDEASKKEIKDILIQYDRTLLVADPRRCESKKFGGPGARARYQKSYR

SEQ ID NO: 8572 - protein, 181 aa, Homo sapiens
  DOMAIN (152)..(179): Ribosomal protein S9 proteins domain identified by eMATRIX, accession number BL00360C, p-value=3.250e-16, raw score of 17.65
  DOMAIN (170)..(181): Ribosomal protein S9/S16 domain identified by PFam, accession name Ribosomal_S9, E-value=0.00098, PFam score of 15.2
  misc_feature (1)...(181): Xaa = X or * as defined in Table 2
GAARVRLSSPRSDAMPSKGVPLQSVQVFGRKKDSGQLLAHCKRANGLIQGXTGGPLEMIEARARLQYKLLEPVLLLGKERFAGVDIPCPVXKGGWSTWPQIYAIRQSISQKPLVAYYPEMXVSMGPSHEYVDEAFQRREIKDILHPSYDRNPAGLAGPFVRCESKKFGGPGARARYQKSYR

SEQ ID NO: 8573 - protein, 102 aa, Homo sapiens; identical to SEQ ID NO: 8380
  DOMAIN (12)..(85): 60s Acidic ribosomal protein domain identified by PFam, accession name 60s_ribosomal, E-value=7.1e-10, PFam score of 34.6
  misc_feature (1)...(102): Xaa = X or * as defined in Table 2

SEQ ID NO: 8574 - protein, 230 aa, Homo sapiens; identical to SEQ ID NO: 8381
  DOMAIN (216)..(228): RIBOSOMAL PROTEIN P2 SIGNATURE domain identified by eMATRIX, accession number PR00456F, p-value=1.000e-10, raw score of 5.86
  DOMAIN (130)..(230): 60s Acidic ribosomal protein domain identified by PFam, accession name 60s_ribosomal, E-value=9.1e-32, PFam score of 104.2
  misc_feature (1)...(230): Xaa = X or * as defined in Table 2

SEQ ID NO: 8575 - protein, 341 aa, Homo sapiens
  DOMAIN (322)..(334): RIBOSOMAL PROTEIN P2 SIGNATURE domain identified by eMATRIX, accession number PR00456F, p-value=1.000e-10, raw score of 5.86
  DOMAIN (334)..(341): 60s Acidic ribosomal protein domain identified by PFam, accession name 60s_ribosomal, E-value=1.4e-08, PFam score of 30.5
  misc_feature (1)...(341): Xaa = X or * as defined in Table 2
RTAVMPREDRATWKSNYFLKIIQLLDDYPKCFIVGADNVGSKQMQQIRIVPWGEACVLMGQKTMNGPGPSEGHLENNPASEELLPHXRGHLGFCFTREDLTEIRDMLLAQXGCQAAARCWCQLPPCEVTVPAQNTGLGPEKTSFFPGLXVSPTKNLPGGTHXKSXSYVQLIKTGDKMGSQTKAKAAEKMLKNLPPSPFGAGQPKQGVRKNGKHPTNPESAXISTRGKLCHSRFLGGCPANVAKCLSCKIGYPTVASSTPIPIINGYKRVPGPCLWTPDYTFPLAEKVKAFLADPSCLCVLLPPVGAATTACFALLLQPPAKVEAKEESEESDEDMGFGLFD

SEQ ID NO: 8576 - protein, 55 aa, Homo sapiens
  misc_feature (1)...(55): Xaa = X or * as defined in Table 2
XQVVCKKYRGFTIPEAFRGVHRYLSNAYAREEFASTCPDDEEIELAYEQVAKALK

SEQ ID NO: 8577 - protein, 351 aa, Homo sapiens
  misc_feature (1)...(351): Xaa = X or * as defined in Table 2
DPPSPVPAPPSSPRDGHFLVPDATMAEEQPQVELFVKAGSDGAKIGNCPFSQRLFMVLWLKGVTFNVTTVDTKRRTETVQKLCPGGQLPFLLYGTEVHPDTTKIEEFLEAVLCPPRYPKLAALNPEVQHSWGWDIFAKFFLPNIQEFQTPALNXQSGRRGFLESPXKVLDNYLTSPPSPEEVDETSCXKIEGVSQRKFLDGQRRPHPWLDLQTCCPKVTHXVQVVCKRKXPGNSPHPPKAFPGKCHRVPXSKMPYAPGKNSPSHPVPDDEEIELRPMSKVAKALQISPSLGLPSTPSIFSTKAPGGFHIATPMGHTPKLASGQGILGDIEPAKGVVEEGMRERNGGPGSDF

SEQ ID NO: 8578 - protein, 150 aa, Homo sapiens
  misc_feature (1)...(150): Xaa = X or * as defined in Table 2
LVSPGKPPEQQGQLPXPRCQIIXLVSPGKPPEPTGTAPRSQPRLSVCPSTQDICRICHCEGDEESPLITPCRCTGTLRFVHQSCLHQWIKSSDTRCCELCKYDFIMETKLKPLRKWEKLQMTPRERRKIFCSVTFQRNRGSPVWFGLCMY

SEQ ID NO: 8579 - protein, 248 aa, Homo sapiens
  DOMAIN (189)..(211): PRION PROTEIN SIGNATURE domain identified by eMATRIX, accession number PR00341G, p-value=2.000e-30, raw score of 16.09
  DOMAIN (26)..(248): Prion protein domain identified by PFam, accession name prion, E-value=3.6e-194, PFam score of 658.5
AVIMANLGCWMLVLFVATWSDLGLCKKRPKPGGWNTGGSRYPGQGSPGGNRYPPQGGGGWGQPHGGGWGQPHGGGWGQPHGGGWGQGGGTHSQWNKPSKPKTNMKHMAGAAAAGAVVGGLGGYMLGSAMSRPIIHFGSDYEDRYYRENMHRYPNQVYYRPMDEYSNQNNFVHDCVNITIKQHTVTTTTKGENFTETDVKMMERVVEQMCITQYERESQAYYQRGSSMVLFSSPPVILLISFLIFLIVG

SEQ ID NO: 8580 - protein, 262 aa, Homo sapiens
  DOMAIN (202)..(224): PRION PROTEIN SIGNATURE domain identified by eMATRIX, accession number PR00341G, p-value=2.000e-30, raw score of 16.09
  DOMAIN (32)..(262): Prion protein domain identified by PFam, accession name prion, E-value=9.8e-193, PFam score of 653.7
  misc_feature (1)...(262): Xaa = X or * as defined in Table 2
LNHNRLAVIMANLGCWMLVLFVATWSDLGLCKKRPKPGGWNTGGSRYPGQGSPGGNRYPPQGGGGWGQPHGGGWGQPHGGGWGQPHGGGWGQPHGGGWGQGGGTHSQWNKPSKPKTNMKHMAGAATAGAVXGGLCSYSLGSAMSRPIIHFGSDYEDRYYRENMHRYPNQVYYRPMDEYSNQNNFVHDCVNITIKQHTVTTTTKGENFTETDVKMMERVVEQMCITQYERESQAYYQRGSSMGLFSSPPVILLISFLIFLIVG

SEQ ID NO: 8581 - protein, 152 aa, Homo sapiens
  DOMAIN (18)..(40): Globins profile domain identified by eMATRIX, accession number BL01033A, p-value=2.929e-17, raw score of 16.94
  DOMAIN (7)..(126): Globin domain identified by PFam, accession name globin, E- value=6.3e-48, PFam score of 171.6
SRRHGSSLWGKVNVEDAGGETLGRLLVVYPWTQRFFDSFGNLSSASAIMGNPKVKAHGKKVLTSLGDAIKHLDDLKGTFAQLSELHCDKLHVDPENFKLLGNVLVTVLAIHFGKEFTPEVQASWQEDGDWSGQCPVLQIPLSSLPMMQSFQG

SEQ ID NO: 8582 - protein, 180 aa, Homo sapiens
  DOMAIN (37)..(54): BETA HAEMOGLOBIN SIGNATURE domain identified by eMATRIX, accession number PR00814A, p-value=1.000e-22, raw score of 12.94
  misc_feature (1)...(180): Xaa = X or * as defined in Table 2
APSPRRPWVISQRRTKATITSLWGKVNVEDAGGETLGRLLVVYPWTQRFFDSFGNLSSASAIHGQPPKVQGTWSKKVLTFLGEMPXKHLDDLKGHLLPKPEVNLHCDKPAMWDPENFKAPGEMLLVTRFWAIPFSAKEFHPWRLAGLPGQKDGXLGVGQCPCSFQIPLKPLGPXIQSFQG

SEQ ID NO: 8583 - protein, 156 aa, Homo sapiens
  misc_feature (1)...(156): Xaa = X or * as defined in Table 2
DTRFLERLRLSISSLVPDAMGHFTEEDKATITSLWGKVNVEDAGGETLGRLLVVYPMDPRGFFDSFGNLSSASAIHGQTPKVKATRAKKVLTSLGKMPIKHLGLIFKGTFCPSLSXTCTCXQACMWDPXGTFKLPGEMLLVTRFWAIPFSAKEFHP

SEQ ID NO: 8584 - protein, 122 aa, Homo sapiens
SVCVRAHESVVKSEDFSLPAYMDRRDHPLPEVAHVKHLSASQKALKEKEKASWSSLSMDEKVELYRIKFKESFAEMNRGSNEWKTVVGGAMFFIGFTALVIMWQKHYGLASKWDYEKNEWKK

SEQ ID NO: 8585 - protein, 93 aa, Homo sapiens
RAVAAGSGGRMLTTSVFSLVGKRAISTSVCVRAHESVVKSEDFSLPAYMDRRDHPLPEVAHVKHLSASQKALKEKEKASWSSLSMDEKVECGY

SEQ ID NO: 8586 - protein, 181 aa, Homo sapiens
  misc_feature (1)...(181): Xaa = X or * as defined in Table 2
LASEQFSTSVVCTSSMKVFVKSEDFSLPTYMESAVTHPLAGRWPHVKAPCSAQPRRPLKEKEKALLGAAFSMGXGKFELLFALKFKEEALLEDXTRGLRTELGKTGLFGPVPLFPSIGFSPRLVIHVGQKHYVLTAPFPQSFXTKSWVGPSRTKRMLGQXRXTPIQGLASKWDYEKNEWKK

SEQ ID NO: 8587 - protein, 67 aa, Homo sapiens
MELSNNHQLSMSLVELSMSLVWDANLLGWGKSCELTKPSWSLVRSTSRHSRKKGSSWHLPAKLCSTC

SEQ ID NO: 8588 - protein, 128 aa, Homo sapiens
  DOMAIN (60)..(75): Zinc-containing alcohol dehydrogenases proteins domain identified by eMATRIX, accession number BL00059C, p-value=7.429e- 09, raw score of 11.82
TIAIFSCVVRRLRFSGPKTSIICSPMTSLKTSDMVPSLFSSPGDRVAIESGAPRENDEFCKMGRYNLSPSIFFCATPPDDGNLCRFPEIVKLSLEEAKCLPFCVAPHGPSRGALGCRSAAFPLTQPRC

SEQ ID NO: 8589 - protein, 20 aa, Homo sapiens
MKESPGGELPQTGKKPVFLF

SEQ ID NO: 8590 - protein, 237 aa, Homo sapiens
  misc_feature (1)...(237): Xaa = X or * as defined in Table 2
EGFPGRSLSGGLCCRLRRRFPIDGYRPWRRRRWSCCPSGVRPVRRMSHKSWIESTLTKRECVYIIPSSKDPYRCLPGCQICQQLVRCFCGRLVKQHAWFTASPAMKYLDVKLGDHFNQAIEEWSVEKHTEQSPTDAYGVINFQGGSHSYRAKYVRLSYDNQPLVILQLTVKEWQMELPKLVISVHGGMQKFELHPRIKQLLXKGLIKAAVTTGALILTGGRNTGVGKHGGDAPQRTC

SEQ ID NO: 8591 - protein, 539 aa, Homo sapiens
  DOMAIN (300)..(342): Zinc-containing alcohol dehydrogenases proteins domain identified by eMATRIX, accession number BL00059D, p-value=6.595e- 20, raw score of 29.23
  DOMAIN (203)..(537): Zinc-binding dehydrogenases domain identified by PFam, accession name adh_zinc, E-value=1.5e-52, PFam score of 188.0
  misc_feature (1)...(539): Xaa = X or * as defined in Table 2
MSKPKCLVILVGIQKSSQMPQFPPPAGSERRRGIRQWEMGVVGGEMGVWWPPGVQGSPPQAHRRLGSREQLFAPPLKEKSHIPPWGYSRENYPIPEPGPNGRPVTEVWGSPGPTVQWGWEGLHEALSPALINQAQKDPEVRLGAMVRVSVDTHPPPLTPRQSGPLSALEELGVSFPTLSYLTPEPQLLGEHQIKGSFPGRSTALLLKEVLLRMHSVGICGSDVHYWEYLSRFGNFIVKKPMVLGHEASGTVRKSGIIGKSTLKPGDRVAIEPGCSPEENXWNSCQDGRRYNLSPSIFFCATPPDDGNLCRFYKHNAAFCYKLPDNVTFEEGALIEPLSVGIHACRRGGVTLGNKVLVCGSWANRGWVTLLVAKAMGAAQVVVTDLSATRLSKAKEIGADLVLQISKESPQEIARKVEGLLGCKPEVTIECTGAEASIQAGIYATRSGGTLVLVGLGSEMTTVPLLHAAIREVDIKGVFRYCNTWPVAISMLASKSVDMSKPLVTHRVSSWRKVLEAFETFKKGLGLKIMLKCDPSDQNL

SEQ ID NO: 8592 - protein, 268 aa, Homo sapiens
  DOMAIN (248)..(266): PROLIFERATING CELL NUCLEAR ANTIGEN (CYCLIN) SIGNATURE domain identified by eMATRIX, accession number PR00339F, p-value=1.000e- 22, raw score of 10.56
  DOMAIN (56)..(264): Proliferating cell nuclear antigen domain identified by PFam, accession name PCNA, E-value=8.7e-55, PFam score of 195.4
MPLRAFNPVSSFRWARGMTIVAALMTVFFIMQLVGQVPAALWVIFGEDRFRWSATMIGLSLAVFGILHALAQAFVTGPATKRFGEKQAIIAGMAADALGYVLLAFATRGWMAFPIMILLASGGIGMPALQAMLSRQEQEYSCVVKMPSGEFARICRDLSHIGDAVVISCAKDGVKFSASGELGNGNIKLSQTSNVDKEEEAVTIEMNEPVQLTFALRYLNFFTKATPLSSTVTLSMSADVPLVVEYKIADMGHLKYYLAPKIEDEEGS

SEQ ID NO: 8593 - protein, 301 aa, Homo sapiens
  DOMAIN (130)..(180): Proliferating cell nuclear antigen proteins domain identified by eMATRIX, accession number BL01251C, p-value=3.132e-27, raw score of 19.35
  DOMAIN (25)..(301): Proliferating cell nuclear antigen domain identified by PFam, accession name PCNA, E-value=1.2e-36, PFam score of 135.1
  misc_feature (1)...(301): Xaa = X or * as defined in Table 2
TFLLPACLLAALLPLRHHVRGRAWVQGSILNEGVGXALKDLINEACWGYXAPAGVNLQSMGHRPTVSLVQLTLRVXGASTPYRCDRNLGHGRXNLTSMSKILKMAAGNEDISLTLRAEDNAGYLGRXYFEGTKPGRKFSDYEMKLMDLDVEQLGIPEQEYSCVVKMPSGEYARICRESQPILGDAVVISCAKDGSENFSASGELGNETIKLSQTSNVDKEEEAVPIKMNEPVQPNFCHXGYLNFFTKATPLSSTVDTPVCSADGTPLVGRSIKIAGYGDHLKYLLGLPKDPRIEEGSLGHS

SEQ ID NO: 8594 - protein, 152 aa, Homo sapiens; identical to SEQ ID NO: 8581
  DOMAIN (18)..(40): Globins profile domain identified by eMATRIX, accession number BL01033A, p-value=2.929e-17, raw score of 16.94
  DOMAIN (7)..(126): Globin domain identified by PFam, accession name globin, E- value=6.3e-48, PFam score of 171.6

SEQ ID NO: 8595 - protein, 194 aa, Homo sapiens
  DOMAIN (46)..(68): Globins profile domain identified by eMATRIX, accession number BL01033A, p-value=5.800e-16, raw score of 16.94
  DOMAIN (54)..(115): Globin domain identified by PFam, accession name globin, E- value=0.0021, PFam score of 16.3
  misc_feature (1)...(194): Xaa = X or * as defined in Table 2
NFALEAKNSARAISSLVPDAHGVISQRRTKATITSLWGKVNVEDAGGETLGRLLVVYPWTQRFFDQLLANLSSASAHHGQPPKVQGHMAKKVLTFLGEMPIKHLDDLKGHLLPKPEVNCTVDKPAMWDPENFKAPGEMLLVTLFWAIPFSGKEFTPXRLQASWAERWVTWSGQCPCSFQIPLKPLGPXIQSFQG

SEQ ID NO: 8596 - protein, 75 aa, Homo sapiens
  DOMAIN (3)..(61): RHO protein GDP dissociation inhibitor domain identified by PFam, accession name Rho_GDI, E-value=5.6e-21, PFam score of 79.7
IRMTEKAPEPHVEEDDDDELDSKLNYKPPPQKSLKELQEMDKDDESLIKYKKTLLGDGPVVTGMCVQRTGWVEDR

SEQ ID NO: 8597 - protein, 210 aa, Homo sapiens
  DOMAIN (185)..(203): RHO PROTEIN GDP DISSOCIATION INHIBITOR SIGNATURE domain identified by eMATRIX, accession number PR00492F, p-value=7.943e- 24, raw score of 13.70
  DOMAIN (1)..(210): RHO protein GDP dissociation inhibitor domain identified by PFam, accession name Rho_GDI, E-value=9.9e-66, PFam score of 231.8
  misc_feature (1)...(210): Xaa = X or * as defined in Table 2
LFKAPEPHVEEDDDDELDSKLNYKPPPQKSLKELQEMDKDDESLIKYKKTLLGDGPVVTDPKAPNVVVTRLTLVCESAPGPITMDLTWKIWKALKKGNHLVLKGRFWNIRSSKFHFPKLNRGXLLFRAXNYVQHTYRTGVKVDKATFMVGSYGPRPEEYEFLSLPVEEASQRAWLARRHVTTKSPFFTDDDKQDHLSWEWNLSIKKEWTE

SEQ ID NO: 8598 - protein, 95 aa, Homo sapiens
  DOMAIN (5)..(17): Biopterin-dependent aromatic amino acid hydroxylases signatur domain identified by eMATRIX, accession number BL00367A, p-value= 2.000e-10, raw score of 10.92
  DOMAIN (60)..(88): Biopterin-dependent aromatic amino acid h domain identified by PFam, accession name biopterin_H, E-value=3e-21, PFam score of 69.1
FNLTHIESRPSRLKKDEYEFFTHLDKRSLPALTNIIKILRHDIGATVHELSRDKKKDTVPWFPRTIQELDRFANQILSYGAELDADHPVSPWPVG

SEQ ID NO: 8599 - protein, 81 aa, Homo sapiens
PLQSPGVLSILNPFSLLVPCLPSSLLGSYSTLNPYHLLVSCLYPQLLPSILTQQPEGVLGNTSEIMTIYLPIKIVTSIELL

SEQ ID NO: 8600 - protein, 200 aa, Homo sapiens
  DOMAIN (49)..(103): Biopterin-dependent aromatic amino acid hydroxylases signatur domain identified by eMATRIX, accession number BL00367E, p-value= 1.000e-40, raw score of 17.32
  DOMAIN (15)..(188): Biopterin-dependent aromatic amino acid h domain identified by PFam, accession name biopterin_H, E-value=1.1e-129, PFam score of 412.5
  misc_feature (1)...(200): Xaa = X or * as defined in Table 2
TSSPPSSLCFLSFSDICHELLGHVPLFSDRSFAQFSQEIGLASLGAPDEYIEKLATIYWFTVEFGLCKQGDSIKAYGAGLLSSFGELQYCLSEKPKLLPLELEKTGIQNYTVTEFQPLYYVAESINDAKEKVGNSAATIPRPFSVRYDPYTQRIEGLDNTQQAHDLGXFHLTVEIGILCSALQKNKVKAMDRMVVCQAVE

SEQ ID NO: 8601 - protein, 60 aa, Homo sapiens
  misc_feature (1)...(60): Xaa = X or * as defined in Table 2
CHSEHRNYKNNHHSIIKVRPRWRIHFHSNVISXSLVHISKVFVAYKCNQYFHIRKFRSVT

SEQ ID NO: 8602 - protein, 491 aa, Homo sapiens
  DOMAIN (272)..(295): BIOPTERIN-DEPENDENT AROMATIC AMINO ACID HYDROXYLASE SIGNATURE domain identified by eMATRIX, accession number PR00372B, p-value= 7.750e-24, raw score of 10.30
  DOMAIN (159)..(471): Biopterin-dependent aromatic amino acid h domain identified by PFam, accession name biopterin_H, E-value=1.8e-234, PFam score of 744.4
  misc_feature (1)...(491): Xaa = X or * as defined in Table 2
NLQPHVLFANLPVPEALKSQRPHSRGASMSTAVLENPGLGRKLSDFGQETSYIEDNCNQKWVPISLDPPHLKERKLGALGPKYCALFEENDVNLTHIESRPSRLKKDEYGFFPPFGIKRSLPALTNIIKILRHDIGATVHELSRDKKKDTVPWFPRTIQELDRFANQILSYGSGNWDADHPGFKDPVYRARRKQFADIAYNYRHGQPIPRVEYMEEEKKTWGTVFKTLKSLYKTHACYEYNHIFPLLEKYCASHEDNIPQLEDVSQFLQTCTGFRLRPVAGLLSSRDFLGDLAFRVFHCTQYIRHGSKPMYTPEPDICHELLGHVPLFSDRSFAQFSQEIGLASLGAPDESIEKLAPIYWFTVEFGLCKQGDSIKAYGAGLLSSFGEFQYCLSEKPKLLPLESLEKTAIQNYTVTEFQPLYYLAESFNDAQGEIXGTFAATIPRPFSVRHDPHTPQRIGGSWDNTQQLKILADSIXQXIGIPFAVALQNIK

SEQ ID NO: 8603 - protein, 63 aa, Homo sapiens
  DOMAIN (13)..(63): Actins proteins domain identified by eMATRIX, accession number BL00406E, p-value=1.000e-40, raw score of 8.44
  DOMAIN (1)..(63): Actin domain identified by PFam, accession name actin, E- value=1.8e-38, PFam score of 127.5
  misc_feature (1)...(63): Xaa = X or * as defined in Table 2
MQKXITAWAPAPMKIKIIASPERKYSVWIGGSIWPQLSTFQQMWISKQEYDESGPSIVHRKCF

SEQ ID NO: 8604 - protein, 118 aa, Homo sapiens
  DOMAIN (10)..(65): Actins proteins domain identified by eMATRIX, accession number BL00406D, p-value=1.000e-40, raw score of 12.58
  DOMAIN (16)..(118): Actin domain identified by PFam, accession name actin, E- value=3.2e-53, PFam score of 175.9
SGACPAFLVDRNLRHHETTFNLIMKCDVDIRKDLYANTVLSGGTTMYPGIADRMQKEITALAPPSTLRFRFIAPPERRKYSVWIGGSILASLSTFQQMCLGKQEYDESGPSIVQRKCF

SEQ ID NO: 8605 - protein, 416 aa, Homo sapiens
  DOMAIN (36)..(71): Actins proteins domain identified by eMATRIX, accession number BL00406A, p-value=1.000e-40, raw score of 9.95
  DOMAIN (29)..(416): Actin domain identified by PFam, accession name actin, E- value=1.4e-173, PFam score of 570.9
  misc_feature (1)...(416): Xaa = X or * as defined in Table 2
INPPPLSRRCQLSHSVLPPLRRRVSLPVAMEEEIAALVIDNGSGMCKAGFAGDDAPRAVFPSIVGRPRHQGVMVGHGPRTDSYVGDEAQRSKRGILTLKYPIEHGIVTNWDDMEKIWHHTFYNELRVAPEKHPVLLTEAPLNPKANREKMTQILCFETFNTPGHVPWPIQAVLSLXSLWAQPIGIVMDSGDGVTHTVPILRGATTLLHAILRLGPGLARDLTDYLMKILTERGYSFTTHGPSGKTFRNIKGEACATSPLDFEQEMGTAASSSSLEKSYELPDGQVITIGNERFRCPEALFQPSFLGMESCGIHETTFNSIMKCDVDIRKDLYANTALSGGTTMDPGIADKIAEGRSTALAAPAPXKIRIIAPPERKYSVWIGGSILASLSTFPARFWISKQEYDESGPSIVHRKCF

SEQ ID NO: 8606 - protein, 92 aa, Homo sapiens
  DOMAIN (61)..(83): ATP synthase delta (OSCP) subunit proteins domain identified by eMATRIX, accession number BL00389B, p-value=6.211e-13, raw score of 17.02
  DOMAIN (21)..(92): ATP synthase delta (OSCP) subunit domain identified by PFam, accession name OSCP, E-value=4.6e-18, PFam score of 64.7
  misc_feature (1)...(92): Xaa = X or * as defined in Table 2
XTSVVRPFAKLVRPPVQVYGIEGRYATALYSVLNPYVKRSIKVKSLNDITAKERFSPLTTNLINLLAENGRLSNTQGVVSAFSTMMSVHRGE

SEQ ID NO: 8607 - protein, 256 aa, Homo sapiens
  DOMAIN (224)..(243): ATP SYNTHASE DELTA SUBUNIT SIGNATURE domain identified by eMATRIX, accession number PR00125E, p-value=9.250e-16, raw score of 13.56
  DOMAIN (68)..(256): ATP synthase delta (OSCP) subunit domain identified by PFam, accession name OSCP, E-value=1.3e-14, PFam score of 53.0
  misc_feature (1)...(256): Xaa = X or * as defined in Table 2
FRRQRARAPLRVFLFPLGFDLQPPGRRWAAPAVSGLSRKVRCFSTSVVRHFAKLVGPSVQVYGIEGRYATALYSAASKQNKLEQLEKELLRVAQNPEGNPKVAASVLNPYVKRSIKSEKALNDITSKKRRFSPPSTTQPWIKFALPENGSDXSKYPQGSPFPALFPTHDEVSHPRGGYPCTVDLWHLLLEGSQTPPGIXKLSLKSLPXVKGQVLKLEAKTDPSILGGMIVRIGEKYVDMSVKTKIQKLGRAMREIV

SEQ ID NO: 8608 - protein, 733 aa, Homo sapiens
  DOMAIN (263)..(287): Serpins proteins domain identified by eMATRIX, accession number BL00284A, p-value=3.739e-18, raw score of 15.64
  DOMAIN (236)..(658): Serpins (serine protease inhibitors) domain identified by PFam, accession name serpin, E-value=1.1e-168, PFam score of 572.8
MAQFSIVGMCLGLFNQSPTDGSGVQLFVIMNQVMAANLAETHAALCPTLSSGTSARFRGKNQFSGGLPQITLSPLAQPCGRLAAMYSNVIGTVTSGKSLPSTSPLVPLLLSGFAPLFLKGLQNWTQTTQEGKSPSAAPASSQPQACPTDHVRESALGACLSLPGEDGKIQKVYLLSLLLIGFWDCVTCHGSPVDICTAKPRDIPMNPMCIYRSPEKKATEDEGSEQKIPEATNRRVWELSKANSRFATTFYQHLADSKNDNDNIFLSPLSISTAFAMTKLGACNDTLQQLMEVFKFDTISEKTSDQIHFFFAKLNCRLYRKANKSSKLVSANRLFGDKSLTFNETYQDISELVYGAKLQPLDFKENAEQSRAAINKWVSNKTEGRITDVIPSEAINELTVLVLVNTIYFKVLRMALERPQGLPLALQLTPFFFKWRDRSPERANGLPKATQGLWKSKFSPENTRKELFYKADGESCSASMMYQEGKFRYRRVAEGTQVLELPFKGDDITMVLILPKPEKSLAKVEKELTPEVLQEWLDELEEMMLVVHMPRFRIEDGFSLKEQLQDMGLVDLFSPEKSKLPGIVAEGRDDLYVSDAFHKAFLEVNEEGSEAAASTAVVIAGRSLNPNRVTFKANRPFLVFIREVPLNTIIFMGRVANPCVNLSEALAVLVVNLTTLMKRTHGESLDFMERKRRPAESILLVSPPKCQRTKTGQGLTVRMNIDRFEELAGYGGD

SEQ ID NO: 8609 - protein, 527 aa, Homo sapiens
  DOMAIN (259)..(280): Serpins proteins domain identified by eMATRIX, accession number BL00284B, p-value=5.050e-10, raw score of 17.99
  DOMAIN (179)..(524): Serpins (serine protease inhibitors) domain identified by PFam, accession name serpin, E-value=3.8e-23, PFam score of 80.9
  misc_feature (1)...(527): Xaa = X or * as defined in Table 2
PALCPTLSSGTSARFRGKNQFSGGLPQITLSPLAQPCGRLAAMYSNVIGTVTSGKRKVYLLSLLLDSFGDCVTCHGSPVDICTAKPRDIPMNPMCIYRSPEKKATEDEGSEQKIPEATNNRRVWELSKANSRFCLPLSYSAPGQNSKDXHXLTFFCSPLSIFQGFLLWTKVGACNDTLQQLMEVFKFDTISEKTFXSRSHFFFAKLNCRLYRKANKSSKLVSANRLFGDKSLTFNETYQDISELVYGAKLRPLDFKENAEQSRAAINKWVSNKTEGRIHRCSFPSGRPFNELTVLGGGFNTIYFQGACWKSKFSPENTRKELFYKADGESCSASMDVTREGKFRYSGAWLEGTQVLVVCPFKGDDITMVLILPKPXEGAWAKVEKELTPEVLAKSGWDXFWREMMLVVHMPRFRIEDGLQVXREQLQRHGPLSDLFSPXKSPKLLPGIVAEGRDDLYVSDAFHKAFLEVNEEGSEAAASTAVVIAGRSLNPNRVTFQGQQLFPGFLLREVPLNTIYLHGAELANPCV

SEQ ID NO: 8610 - protein, 120 aa, Homo sapiens
  DOMAIN (27)..(82): Helicases conserved C-terminal domain identified by PFam, accession name helicase_C, E-value=0.0019, PFam score of 19.5
  misc_feature (1)...(120): Xaa = X or * as defined in Table 2
ELDTLCDLYEPXPSPSIIFINTRRKVDWLTEKMHARDFTVSAMHGDMDQKERDVIMREFRSGSSRVLITTDLRIGRGGRFGRKGVAINMVTEEDKRTLRDIETFYNTSIEEMPLNVADLI

SEQ ID NO: 8611 - protein, 149 aa, Homo sapiens
  DOMAIN (34)..(80): DEAD-box subfamily ATP-dependent helicases proteins domain identified by eMATRIX, accession number BL00039D, p-value=6.625e- 14, raw score of 21.67
  misc_feature (1)...(149): Xaa = X or * as defined in Table 2
GPCGHGRVFPLPSLAAHMDAXGLLLRDRVSSVHMLKRLSFLTXARGIDVQQVSLVINYDLPTNRENYIHRXAXIWNTPLPLHTWPSLGLKLLIFLIPFLVFQIGRGGRFGRKGVAINMVTEEDKRTLRDIETFYNTSIEEMPLNVADLI

SEQ ID NO: 8612 - protein, 83 aa, Homo sapiens
  misc_feature (1)...(83): Xaa = X or * as defined in Table 2
SKLAAEMTANRLAESLLALSQQEELADFPKDYLLSQSQDEGDNDGERKHHKLLEAISSLDGKNRRKLAEMSDVILMMXEFVVA

SEQ ID NO: 8613 - protein, 551 aa, Homo sapiens
  DOMAIN (300)..(324): DEAD-box subfamily ATP-dependent helicases proteins domain identified by eMATRIX, accession number BL00039C, p-value=7.750e- 18, raw score of 15.63
  DOMAIN (49)..(380): DEAD/DEAH box helicase domain identified by PFam, accession name DEAD, E-value=1.5e-19, PFam score of 64.7
  misc_feature (1)...(551): Xaa = X or * as defined in Table 2
GSTISSASQDSRSRDNGLDGIEPEGVIESNWNEIVDSFDDMNLSESLLRGIYAYGFEKPSAIQQRAILPCIKGETSQSQKTLWTVPDLGRVASGWXCPSHISQGQSNLLVHPSLAFDPCPCLVHALDTXVSFKEVVLXPAYICIYSHVSSPAWCAILDELITGPCFXSGSHCVTVLIGKVVCEPXNAWFIGCLLTSLTXDLNIPKGMLFTTFNSXFICLGYDVIAQAQSGTGKTATFAISILQQIQKVVMALGDYMGASCHACIRGAPTCVAEVQKLQMEAPHIHRGVPPGRVFXYALPEDTLSPKYIKMFVLDEADEMLSRGFKGQIYGHIQKAQAAPPRVVLLSATMPFDVLEVTKKFMRGPPFRILVQKGELTLEGIRQFYINVEPEEFNLDTLCDLYENLDHHPRPVIFHQPPGGKVDWPHPRRMHAADFTLYSAMHWRFWTQKERRTXLXREFRSWLLARIFDTQLDLLGQRALMCQQVSLVIQTYDPFPPTRGKLLIHRIGSRVDRFGRKGVPINMLTEEKTKRNLEDIETFYNTSIEEMPLNVA

SEQ ID NO: 8614 - protein, 200 aa, Homo sapiens
  misc_feature (1)...(200): Xaa = X or * as defined in Table 2
FCPRGQEFGEGNKLLSPRRPWVISQRRTKATITSLWGKVKCGKNAGKEETPGKGSLVVLHPWTPRGSFEQLWQTCPSALCPSMGNPQSQGTMAKKVLTSLGRCPXSTLDDLKGHLLPKPEVNLHLLTSLHVGSXRTFKLPGEMLLVTLFWAIPFSAKEFHPLKVAGFPGQKDGXLGVGQCPCSFQIPLKPLGPXIQSFQG

SEQ ID NO: 8615 - protein, 136 aa, Homo sapiens
  DOMAIN (70)..(82): Globins profile domain identified by eMATRIX, accession number BL01033B, p-value=1.000e-15, raw score of 13.81
  DOMAIN (42)..(115): Globin domain identified by PFam, accession name globin, E- value=5.9e-23, PFam score of 84.5
KTPGKGSLVVLHPWTQRFFDSFGNLSSASAHHGQPPKSKAHGKKVLTSLGDAIKHLDDLKGTFAQLSELHCDKLHVDPENFKLLGNVLVTVLAIHFGKEFTPEVQASWQKMVTCSGQCPVLQIPLSLLPMIQSFQG

SEQ ID NO: 8616 - protein, 118 aa, Homo sapiens
  DOMAIN (36)..(53): BETA HAEMOGLOBIN SIGNATURE domain identified by eMATRIX, accession number PR00814A, p-value=1.000e-22, raw score of 12.94
  DOMAIN (9)..(96): Globin domain identified by PFam, accession name globin, E- value=1.6e-31, PFam score of 114.3
  misc_feature (1)...(118): Xaa = X or * as defined in Table 2
APSPDAMGHFTEEDKATITSLWGKVNVEDAGGETLGRLLVVYPWTQRFFDSFGNLSSASAIMGNPKVKAHGKKVLTSLGDAIKHLDDLKGTFAQLEXTCPLPLPSWATPKSRHMARRC

SEQ ID NO: 8617 - protein, 110 aa, Homo sapiens
  misc_feature (1)...(110): Xaa = X or * as defined in Table 2
SQTPMGHFTEEDKATITSLWGKGEMWKKCWKEKTPGKGSLVVLHPWTPRGSFDSFGKPVPLPSAHPWATPKVKAPWPRRCLTSLGEMPIKHLGLIFKGTFCPSLKXTCTC

SEQ ID NO: 8618 - protein, 145 aa, Homo sapiens
NPRVRGALTMELSESVQKGFQMLADPRSFDSNAFTLLLRAAFQSLLDAQADEAVLDNKNSLEILLGSIGRSLPHITDVSWRLEYQIKTNQLHRMYRPAYLVTLSVQNTDSPSYPEISSSCSMEQLQDLGGKLKDASKSLGKSTQL

SEQ ID NO: 8619 - protein, 151 aa, Homo sapiens
RKGSKMLADPASFDSNAFTFSSGAAFQSLLNASPDEPRVSTYLEDCNFDRERIELFCTEYQNNKNSLEILLGSIGRSLPHITDVSWRLEYQIKTNQLHRMYRPAYLVTLSVQNTDPPSYPEISFSCSMEQLQDLVGKLKDASKSLERATQL

SEQ ID NO: 8620 - protein, 155 aa, Homo sapiens
VSRGVRVEGHGALTMELSESVQKGFQMLADPRSFDSNAFTLLLRAAFQSLLDAQADEAVLGKPLGSARSWIRRGGGALGEEEPAEREGESPGKRKSPGFALRSGRSVGDVALPGLGADSEHCFGPTWHLHRANSTFLARFPSQSLCSFVKPVFKS

SEQ ID NO: 8621 - protein, 276 aa, Homo sapiens
  misc_feature (1)...(276): Xaa = X or * as defined in Table 2
THASDGALTMELSESVQKGFQMLADPRSFDSNAFTLLLRAAFQSLLDAQADEAVLDHPDLKHIDPVVLKHCHAAAATYILEAGKHRADKSTLSTYLEDCKILTEKRIELFFAREYQNNKNSLEILLGKYXGRSLPSYNRVFSWALWIIQVKDQSTFHRMYRPAYLGDLKVVQNTGIPPSYPRELVFSCQPWNQLQDLVGETLKDASKKPWKRATSVVTLGKVNRSPPSSRRKTQKPPLPFSWNHRLCRAGCPFSVEKNFSLLNLYPFIHFGHFKNV

SEQ ID NO: 8622 - protein, 60 aa, Homo sapiens
  DOMAIN (31)..(45): PMP-22 / EMP / MP20 family proteins domain identified by eMATRIX, accession number BL01221B, p-value=8.636e-12, raw score of 13.29
  misc_feature (1)...(60): Xaa = X or * as defined in Table 2
ENESRFSDRNQASAGLGYLSDSLXQWIVGNGHATDLWQNCSTSSSGNVHHCFSSSPNGSG

SEQ ID NO: 8623 - protein, 253 aa, Homo sapiens
  DOMAIN (55)..(66): GTP-BINDING ELONGATION FACTOR SIGNATURE domain identified by eMATRIX, accession number PR00315C, p-value=3.625e-12, raw score of 13.85
  DOMAIN (33)..(208): Elongation factor Tu family domain identified by PFam, accession name GTP_EFTU, E-value=1.6e-33, PFam score of 115.6
VVQTQISKTADELISYWGTSFPPPFAASLTLYELEYCITIDISLWKFETSKYYATVIDAPGHRDFIKNMITGTSQADCAVLIFAAGVGEFEAVTFAPVNVTTEVKSVEMHHEVLSEALPGDNVDFDVKNVSVKEVHHGNVAGQISAGCAPVLDCHMAHIACKFAKLKKKTGSTSGKKLEDGPTFLKSGDAAIVDMVPGKPMCVESFSVYPPLSRFAVCDMRQTVAVGVIEAMDKKAAGAGKVTKSTQKAQKAK

SEQ ID NO: 8624 - protein, 168 aa, Homo sapiens
  DOMAIN (7)..(35): PMP-22 / EMP / MP20 family proteins domain identified by eMATRIX, accession number BL01221A, p-value=2.250e-22, raw score of 17.26
  DOMAIN (7)..(168): PMP-22/EMP/MP20/Claudin family domain identified by PFam, accession name PMP22_Claudin, E-value=5.4e-44, PFam score of 159.6
  misc_feature (1)...(168): Xaa = X or * as defined in Table 2
AELAARMLLLLLSIIVLHVAALVLLFVSTIVSQWIVGNGHATDLWQNCSTSSSGNVHHCFSSSPNEWLQSCSRGTMDPVDSSFSILSLFLFFCQLFTLTKGGRFYITGIFQILAGLCVMSAAAIYTVRHPEWNLNSGYSXRFAXILAWVAFPLALLSGVIYVILRKRE

SEQ ID NO: 8625 - protein, 161 aa, Homo sapiens
PPKLYNKVEPLRKKARAPEAQFEMPYVVRLHNSTQLSAPKSCFTFSHPNRDPMIDNNRYCTLEFPVEVNTVLHGFAGYFETVLYQDITLSIRPETHSPGMFSWFPILFPIKQPITAAHIPLASSPACQVSRALEAASGSAPVVQKGSSHQSMKTSGQGVRN

SEQ ID NO: 8626 - protein, 152 aa, Homo sapiens
SARRKMAAMAVGGAGGSRVSSGRDLNCVPEIADTLGAVAKQGFDFLCMPVFHPRFKREFIQEPAKNRPGPQTRSDLLLSGRAFLLPLNQEDNTNLARVLTNHIHTGHHSSMFWMRVPLVAPEDLRDDIIENAPTTHTEEYSGEEKTWMWWHN

SEQ ID NO: 8627 - protein, 927 aa, Homo sapiens
  DOMAIN (675)..(694): Eukaryotic  RNA-binding region RNP-1 proteins domain identified by eMATRIX, accession number BL00030A, p-value=6.294e- 11, raw score of 14.39
  DOMAIN (578)..(746): RNA recognition motif. domain identified by PFam, accession name rrm, E-value=2.1e-40, PFam score of 147.7
MAAMAVGGAGGSRVSSGRDLNCVPEIADTLGAVAKQGFDFLCMPVFHPRFKREFIQEPAKNRPGPQTRSDLLLSGRALEIGADLPSNHVIDRWLGEPIKAAILPTSIFLTNKKGFPVLSKMHQRLIFRLLKLEVQFIITGTNHHSEKEFCSYLQYLEYLSQNRPPPNAYELFAKGYEDYLQSPLQPLMDNLESQTYEVFEKDPIKYSQYQQAIYKCLLDRVPEEEKDTNVQVLMVLGAGRGPLVNASLRAAKQADRRIKLYAVEKNPNAVVTLENWQFEEWGSQVTVVSSDMREWVAPEKADIIVSELLGSFADNELSPECLDGAQHFLKDDGVSIPGEYTSFLAPISSSKLYNEVRACREKDRDPEAQFEMPYVVRLHNFHQLSAPQPCFTFSHPNRDPMIDNNRYCTLEFPVEVNTVLHGFAGYFETVLYQDITLNSRNYPSSTPHNILKGTERTGTPCGDPELDEQQRKEVKKDYPSNTTSSTSNSGNETSGSSTIGETSNRSRDRDRYRRRNSRSRSPGRQCRHRSRSWDRRHGSESRSRDHRREDRVHYRSPPLATGEPVDNLSPEERDARTVFCMQLAARIRPRDLEDFFSAVGKVRDVRIISDRNSRRSKGIAYVEFCEIQSVPLAIGLTGQRLLGVPIIVQASQAEKNRLAAMANNLQKGNGGPMRLYVGSLHFNITEDMLRGIFEPFGKIDNIVLMKDSDTGRSKGYGFITFSDSECARRALEQLNGFELAGRPMRVGHVTERLDGGTDITFPDGDQELDLGSAGGRFQLMAKLAEGAGIQLPSTAAAAAAAAAQAAALQLNGAVPLGALNPAALTGKSVAQYTASLCLWILPLHIYSSMAPFLHFVDQAILRAWTLSLRKLGPPLRYQEKLLPMVPLEMDSAEQSHQLKRTESTPALNTCFSMCIVSEITFLPFPTP

SEQ ID NO: 8628 - protein, 202 aa, Homo sapiens
FGPRDFLCMPVFHPRFKREFIQEPAKNRPGPQTRSDLLLSGRDWNTLIVGKLSPWIRPDSKVEKIRRNSEALEVQFIITGTNHHSEKEFCSYLQYLEYLSQNRPPPNAYELFAKGYEDYLQSPLQPLMDNLESQTYEVFEKDPIKYSQYQQAIYKCLLDRVPEEEKDTNVQVLMVLGAGRGPLVNASLRAAKQADRRIKLYA

SEQ ID NO: 8629 - protein, 69 aa, Homo sapiens
PETHSPGMFSWFPILSAIKQPITVREGQTICVRFWRCSNSKKVWYEWAVTAPVCSAIHNPTGRSYTIGL

SEQ ID NO: 8630 - protein, 173 aa, Homo sapiens
LSCCADDGVSIPGEYTSFLAPIFSPKLYNKVRACRKKARDLKAQFEMPIVVRLHNSNQLSAPQPCSTFSHPNRDPMIDNNRYCTLEFPVEVNTVLQCFAGYFETVLYQDITLSIRPETHSPGMFSWFPILFPIKQPITVREGQTICVRFWRCSNSKKGSSHQSMKTSGQGVRN

SEQ ID NO: 8631 - protein, 737 aa, Homo sapiens
  misc_feature (1)...(737): Xaa = X or * as defined in Table 2
LCDWLLVSRNPGVDSARRKMAAMAVGGAGGSRVSSGRDLNCVPEIADTLGAVAKQGFDFLCMPVFHPRFKREFIQEPAKNRPGPQTRSDLLLSGRDWNTLIVGKLSPWDFVPDSKVEKIRRNSEGGPCLQELNFGAYLGLPAFLLPLNQEDNTNLARVLTNQIHTGHDFYMFWRRIHLKKPEDLRDDIIENAPTTHTEEYSGEEKTWMWWHNFRTLCDYSKRIAVALEIGADLPSNHVIDRWLGEPIKAAILPTSIFLTNKKGFPVLSKMHQRLIFRLLKLEVQFIITGTNHHSEKEFCSYLQYLEYLSQNRPPPNAYELFAKGYEDYLQSPLQPLMDNLESQTYEVFEKDPIKYSQYQQAIYKCLLDRVPEEEKDTNVQVLMVLGAGRGPLVNASLRAAKQADRGIKLYAVEKNPNAVVTLENWQFEEWGSQVTVVSSDMREWVAPEKADIIVSELLGLICXPIELSPXVPWIGAQHFPXKMIGVKHPPGSYTSFLAPISSSKLYNEVRACREKDRDPEAQFEMPYVVRLHNFRQLSAPQPCFTFSHRNRDPMIDNNRYCTLGFPVEVNTVLHGFAGYFETVLYQDITLSIRPETHSPGMFSWFPIPLPYXGSPLTVRERAKPFCVRFWRCRQFPRKVWVWSGGCXQAPVCSCLIQKPPKGPPQYTHWPLLSPCRAPSVPEALGKPAFRFLPPCSNSKVPVTSYGAVIPPWPIQRREHFQSCFPCPYIQGGPRDYN

SEQ ID NO: 8632 - protein, 55 aa, Homo sapiens
LSGGLELSGFDRAGPETLPPLPSVSVREAGSCHSHSGSEWLELLVCVQVQDTTNW

SEQ ID NO: 8633 - protein, 87 aa, Homo sapiens
  misc_feature (1)...(87): Xaa = X or * as defined in Table 2
YPALEHILKAQAIQSRCGCDSCLPPSAPWDHPGPTTPSPGRRAAADPWHLSPIDGREHLRXVPVLPVTPPSPTLGHWVTDPSPGVGG

SEQ ID NO: 8634 - protein, 307 aa, Homo sapiens; identical to SEQ ID NO: 8355
  DOMAIN (12)..(44): GTP-binding elongation factors proteins domain identified by eMATRIX, accession number BL00301B, p-value=5.500e-31, raw score of 20.09
  DOMAIN (1)..(251): Elongation factor Tu family domain identified by PFam, accession name GTP_EFTU, E-value=2.2e-67, PFam score of 229.8

SEQ ID NO: 8635 - protein, 68 aa, Homo sapiens
GTGHFYGRTPSDTNCQEQYTHRKLCQIKSKADLVLMKNSKSLTRVIRNILAPQDQNHQQNPLNSQFLQ

SEQ ID NO: 8636 - protein, 444 aa, Homo sapiens
  DOMAIN (115)..(130): TYPE I ANTIFREEZE PROTEIN SIGNATURE domain identified by eMATRIX, accession number PR00308A, p-value=8.835e-09, raw score of 5.90
  DOMAIN (158)..(444): Mov34/MPN/PAD-1 family domain identified by PFam, accession name Mov34, E-value=4.8e-08, PFam score of 15.8
  misc_feature (1)...(444): Xaa = X or * as defined in Table 2
VLLGPKAERTNSRRNYQRRDYFSAPRSITSNQSAKSSSSRGVYSAYQAPDIHECCHFRSASFFLDKMATPAVPVSAPPATPTPVPAAVPASAPASVPAPTPAPAAAPVPAAAPASSSDPAAASATTAAPGQTPASAQAPAQTPAPALPGPALPGPFPGGRVVRLHPVILASIVDSYERRNEGACPSXSGTLFGKLVDKHSVEVTNCFSVPHNESEDEVAVDMEFAKNMYETGIKKVSPNKLILGWYATGHDITEHSVLIHEYYSREAPNPIHLTVDTSLPGTGRMSIKAYVSTLMGIPLGRTLWGVMFTPLTVKYAYYDTERIRRLTLIMKTCFXPPTRVIWTSQVDLQQEGGGIQLRNPGMPLSTSVANMPEGCTCLGKVSADNTIRKVGHFLMSLVNQVPENRKPMTFETMLNSNINDLFMVTYLANLTQSRIALNEELVNL

SEQ ID NO: 8637 - protein, 1133 aa, Homo sapiens
MLVGQGAGPLGPAVVTAAVVLLLSGVGPAHGSEDIVVGCGGFVKSDVEINYSLIEIKLYTKHGTLKYQTDCAPNNGYFMIPLYDKDHLAMSRDVFVVTSVAVRYSHPGDFILKIEPPLGWSFEPTTVELHVDGVSDICTKGGDINFVFTGFSVNGKVLSKGQPLGPAGVQVSLRNTGTEAKIQSTVTQPGGNSCLSPLSNPVECSVTGPCCATRIGFMPEILEIKGDVSTPLSDQHMEHPSWHTASTTVRVTNSNANAASPLIVAGYNVSGSVRSDGEPMKGVKFLLFSSLVTKEPQDESLVYLCYTVSREDGSFSFYSLPSGGYTVIPFYRGERITFDVAPSRLDFTVEHDSLKIEPVFHVMGFSVTGRVLNGPEGDGVPEAVVTLNNQIKVKTKADGSFRLENITTGTYTIHAQKEHLYFETVTIKIAPNTPQLADIVATGFSVCGQISIIRFPDTVKQMNKYKVVLSSQDKDKSLVTVETDAHGSFCFKANPGTYKVQVMVPEAETRAGLTLKPQTFPLTVTDRPVMDVAFVQFLASVSGKVSCLDTCGDLLVTLQSLSRQGEKRSLQLSGKVNAMTFTFDNVLPGKYKISIMHEDWCWKNKSLEVEVLEDDVSAVEFRQTGYMLRCSLSHAITLEFYQDGNGRENVGIYNLSKGVNRFCLSKPGVYKVTPRSCHRFEQAFYTYDTSSPSILTLTAIRHHVLGTITTDKMMDVTVTIKSSIDSEPALVLGPLKSVQELRREQQLAEIEARRQEREKNGKEEGEERMTKPPVQEMVDELQGPFSYDFSYWARVLCFVGTGPAKLKYINYFRSGEKITVTPSSKELLFYPPSMEAVVSGESCPGKLIEIHGKAGLFLEGQIHPELEGVEIVISEKGASSPLITVFTDDKGAYSVGPLHSDLEYTVTSQKEGYVLTAVEGTIGDFKAYALAGSPGQYYFKPMMKEFRFEPSSQMIEVQEGQNLKITITGYRTAYSCYGTVSSLNGEPEQGVAMEAVGQNDCSIYGEDTVTDEEGKFRLRGLLVGNNDIDDVNIIVFRQINQFDLSGNVITSSEYLPTLWVKLYKSENLDNPIQTVSLGQSLFFHFPPLLRDGENYVVLLDSTLPRSQYDYILPQVSFTAVGYHKHFTLIFNPT

SEQ ID NO: 8638 - protein, 1042 aa, Homo sapiens
  DOMAIN (512)..(533): POLYCYSTIC KIDNEY DISEASE PROTEIN SIGNATURE domain identified by eMATRIX, accession number PR00500B, p-value=1.153e-29, raw score of 7.74
  DOMAIN (566)..(647): WSC domain identified by PFam, accession name WSC, E-value= 1.2e-33, PFam score of 125.2
MASTTVRVTNSNANAASPLIVAGYNVSGSVRSDGEPMKGVKFLLFSSLVTKEPQDESLVYLCYTVSREDGSFSFYSLPSGGYTVPVFHVMGFSVTGRVLNGPEGDGVPEAVVTLNNQIKVKTKADGSFRLENITTGTYTIHAQKEHLYFETVTIKIAPNTPQLADIVATGFSVCGRISIIRFPDTVKQMNKYKVVLSSQDKDKSLVTVETDAHGSFCFKAKPGTYKVQVMVPEAETRAGLTLKPQTFPLTVTDRPVMDVAFVQFLASVSGKVSCLDTCGDLLVTLQSLSRQGEKRSLQLSGKVNAMTFTFDNVLPGKYKISIMHEDWCWKNKSLEVEVLEDDVSAVEFRQTGYMLRCSLSHAITLLLRCLCSPYLLSLSSSLTYSGLILIVSLIRGYCLLVLIYRCFDDSFNADRALVLGFGGGGPWGLVACPSLSWQDSECQAPQVCNRAQGDLVGRDVSHNLLRALDVGLLANLSALAELDISNNKISTLEEGIFANLFNLSEINLSGNPFECDCGLAWLPRWAEEQQVRVVQPEAATCAGPGSLAGQPLLGIPLLDSGCGEEYVACLPDNSSGTVAAVSFSAAHEGLLQPEACSAFCFSTGQGLAALSEQGWCLCGSAQPSSASFACLSLCSGPPPPPAPTCRGPTLLQHVFPASPGATLVGPHGPLASGQLAAFHIAAPLPVTATRWDFGDGSPEVDAAGPAASHRYVLPGRYHVTAVLALGTGSALLGTDVQVEAAPAALELVCPSSVQSDESLDLSIQNRGGSGLEAAYSIVALGEEPARAVHPLCPSDTEIFSGNGHCYRLVVEKAAWLQAQEQCRAWAGATLAMVDSPAVQRFLVSRVTRSLDMWIGFSTVQGVEVGPAPQGEAFSLESCQNWLPGEPHPATAEHCVRLGPTGWCNTDLCSAPHSYVCELRPGGPVQDAENLLVMVFPGLRLSREAFLTTAEFGTQELRRPAQLRLQVYRLLSTAGTPENGSEPESRSPDNRTQLAPACMPGGRWCAGANICLPLTPPATPGLRQCCTEVTISTPLEKEEEKIP

SEQ ID NO: 8639 - protein, 78 aa, Homo sapiens
EFNLALVSPSHPQIKAEDDQPLPGVLLSLSGGLFRSNLLTQDNGILTFSNLVTCSAIYHLPVFPEREPGCSMRDLRVA

SEQ ID NO: 8640 - protein, 170 aa, Homo sapiens
FHFTPLFRDGETYVVMLDSTLPRSQYAYILPQVSFTAVGYHKHITLIFNPARKLPEQDIAQGSYIALPLTLLVLLAGYNHDKLIPLLLQLTSRLQGVGALGQAASDNSGPEDAKRQAKKQKTRRTLRLQEEFQLMWCLVPWRGTLGIHLFSSLPFASEILLETTATCIHY

SEQ ID NO: 8641 - protein, 296 aa, Homo sapiens
MASLIMMSLPAMRTLAWAMAVSGNCIPEGQFSALSCADFGISPKLIGIEQFRAQRTLIIGNRVGTVTGQREFEIYTDERRPDKTRERRIRQSALLPDAGVNALSGLRRVREFVGLIRRASVASGSRYHCRMRRKRLIRPTEGAGIRRPDKTRKRRIRQSAPMPELPGPPVIETSTRNFKENWEENFCYLEFTIAKLGTTRKRIQENCKGQPLGPAGVQVSLRNTGTEAKIQSTVTQPGGKPKVDKTTKMGKKQSRKTGNSKKQSTSPPPKEHSSSPATEQSWMEDDFDKLRKEGFR

SEQ ID NO: 8642 - protein, 1570 aa, Homo sapiens
  DOMAIN (1206)..(1244): Lysyl oxidase  copper-binding region proteins domain identified by eMATRIX, accession number BL00926B, p-value=7.570e- 10, raw score of 13.84
  DOMAIN (799)..(1079): REJ domain identified by PFam, accession name REJ, E-value= 1.9e-131, PFam score of 450.1
MGSTGVYKVTPRSCHRFEQAFYTYDTSSPSILTLTAIRHHVLGTITTDKMMDVTVTIKSSIDSEPALVLGPLKSVQELRREQQLAEIEARRQEREKNGNEEGEERMTKPPVQEMVDELQGPFSYDFSYWARVLCFVGTGPAKLKYINYFRSGEKITVTPSSKELLFYPPSMEAVVSGESCPGKLIEIHGKAGLFLEGQIHPELEGVEIVISEKGASSPLITVFTDDKGAYSVGPLHSDLEYTVTSQKEGYVLTAVEGTIGDFKAYALAGVTLHSQDVLMLPGDLVGLQHDAGPGALLHCSPAPGHPGPQAPYLSANASSWLPHLPAQLEGTWACPACALRLLAATEQLTVLLGLRPNPGLRLPGRYEVRAEVGNGVSRHNLSCSFDVVSPVAGLRVIYPAPRDGRLYVPTNGSASVLQVDSGASATATARWPGGSVSARFENACPALVATFVPSCPWETNDTLFSVVALPWLGEGEHVMDVVVENSASRANLSLRVTAEEPICGLRATPSPEARVLQGVPVVLLAGSSGYLVGFKFLESHGSDSGSANSFHRLISRNEFKTPLPDLTRVPRYSPVVEAGSDMVFRWTINDKQSLTFQNVVFNVIYQSAAVFKLSLTASNHVSNVTVNYNITVERMNRMQGLRVSTVPAVLSPNATLALTAGVLVDSAVEVAFLWTFGDGEQALHQFQPPYNESFPVPDPSVAQVLVEHNVTHTYAAPAALGGGAVLTRQPSVLLHLCSVPHVAWEPGTLKAGPQVSTVLTVLASNAFENRTQQVPVSVCASLPSVSVCASLTGACWYPRVLIRSGRVPIVSLECVSCKAQAVYEVSRSSYVYLEGRCLNCSSGSKRGGYTFTLTVLGRSGEEEGCASIPLSPNRPPLGGSCRLFPLGAVHALTTKVHFECMGWHDAEDAGAPLVYALLLQRCRQGHCEEFCVYKGSLSGYGAVLPPGFRPQFEVGLAVVVQDQLGAAVVALNRSLAITLPEPNGSAMGLTVWLHGLTASVLPGLLRQADPQLVIEYSLALVTVLNEYERALDVAAEPKHERQRRAQIRKNITETLVSLRVHTVDDIQQIAAALAQCMRKLPEQDIAQGSYIALPLTLLVLLAGYNHDKLIPLLLQLTSRLQGVGALGQAASDNSGPEDAKRQAKKQKTRRTLATSINTSREPSTDDQLPAHNQTMPQRHARRSAPPRAYDRKTRQEENPHQTRSHAAAKRRERPPHDLQKQATTRLIPAGPRRRDGTSPRRTQPPPNTRRPAAAGHLARFRRAAPGARGARPPTARRGREELDPAHIYAAAPGLPTPPRAGRTPPTPERRDRNTRRRRTREEGEGEFRPVSFLKTIFPSQNGHDGSTDVQQRARRSNCRRQEGIKIVLEDIFTLWRQVETKVRAKIRKMKVTTKVNRHDKINGKRKTAKEHFSTEKLRPDDDICRRSTSKHYRKFTKGSTEVLSKWQPLGPAGVQVSLRNTGTEAKIQSTVTQPGGNSCLSPLSNPVECSVTGPCCAARIGFMPEILEIKGDVSTPLSDQHMEHPSWHTVPSLFPKPSSKSLKKNRQFEFAKTLDMHRTFTTFSCFRQQR

SEQ ID NO: 8643 - protein, 1202 aa, Homo sapiens
  misc_feature (1)...(1202): Xaa = X or * as defined in Table 2
LGLGLSMLVGQGAGPLGPAVVTAAVVLLLSGVGPAHGSEDIVVGCGGFVKSDVEINYSLIEIKLYTKHGTLKYQTDCAPNNGYFMIPLYDKGDFILKIEPPLGWSFEPTTVELHVDGVSDICTKGGDINFVFTGFSVNGKVLSKGQPLGPAGVQVSLRNTGTEAKIQATATQPGGKFAFFKVLPGDYEILATHPTWALKEASTTVSVTNSNANAASPLIVAGYNVSGSVRSDGEPMKGVKFLLFSSLVTKEDALGCNVSPVPGFQPPIREVWCNLCYTVSREDGSFSFYSLPSGGYTVIPFYRGERITFDVAPSRLDFTVEHDSLKIEPVFHVMGFSVTGRVLNGPEGDGVPEAVVTLNNQIKVKTKAXWAHSRLENITTGTYTIHAQKEHLYFETVTIKIAPNTPQLADIVATGFSVCGRISIIRFPDTVKQMNKYKVVLSSQDKDKSLVTVETDAHGSFCFKAKPGTYKVQVMVPEAETRAGLTLKPQTFPLTVTNRPMMDVAFVQFLASVSGKVSCLDTCGDLLVTLQSLSRQGEKRSLQLSGKVNAMTFTFDNVLPGKYKISIMHEDWCWKNKSLEVEVLEDDMSAVEFRQTGYMLRCSLSHAITLEFYQDGNGRENVGIYNLSKGVNRFCLSKPGVYKVTPRSCHRFEQAFYTYDTSSPSILTLTAIRHHVLGTITTDKMMDVTVTIKSSIDSEPALVLGPLKSVQELRREQQLAEIEARRQESVYYGKEEGEERMTKPPVQEMVDELQGPFSYDFSYWARSGEKITVTPSSKELASFIPLSMEAVVQWEKACPGKLIEIHGKAGLFLEGQIHPELEGVEIVISEKGASSPLDITVFTDDKGGLQCLGPLHSDREYTVTSQKEGYVLTAVEGTMGDFKAYALAGVSFEIKAEDDQPLPGSPFYPXTGGLFRSNLLTQGQRAFLTFSNLKPLASIYFKPMMKEFRFEPSSQMIEVQEGQNLKITITGYRPAYSCYGTVSSLNREPEQGVAMEAVGQNDCKHFTEKTPVTDEEGKFRLRGLLPGCVYHVQLKAEGNDHIERALPHHRVIEVGNNDIDDVNIIVFRQINQFDLSGKCDSLPLEYLPTLWGSSFYKSENLDNPIQTVSLGQSLFFHFPPLLRDGRELCLCFWDSTLPRSQYDYILPQVFFSPQLGLTIKHITLDFYFPRREAAWNRDIRTKDPYIALAIDRCWFCWAGYNP

SEQ ID NO: 8644 - protein, 158 aa, Homo sapiens
  DOMAIN (5)..(144): SNAP-25 family domain identified by PFam, accession name SNAP -25, E-value=1.4e-60, PFam score of 214.7
MDNLSSEEIQQRAHQITDESLESTRRILGLAIESQDAGIKTITMLDEQKEQLNRIEEGLDQINKDMRETEKTLTELNKCCGLCVCPCNSITNDAREDEMEENLTQVGSILGNLKDMALNIGNEIDAQNPQIKRITDKADTNRDRIDIANARAKKLIDS

SEQ ID NO: 8645 - protein, 141 aa, Homo sapiens
  DOMAIN (57)..(89): GTP-binding elongation factors proteins domain identified by eMATRIX, accession number BL00301B, p-value=8.071e-30, raw score of 20.09
  DOMAIN (33)..(140): Elongation factor Tu family domain identified by PFam, accession name GTP_EFTU, E-value=3.7e-26, PFam score of 90.8
VVQTQISKTADELISYWGTSFPPPFAASLTLYELEYCITIDISLWKFETSKYYATVIDAPGHRDFIKNMITGTSQADCAVLIFAAGVGEFEAVTFAPVNVTTEVKSVEMHHEVLSEALPGDNVDFDVKNVSVKEVHHGNVA

SEQ ID NO: 8646 - protein, 518 aa, Homo sapiens
  DOMAIN (42)..(237): SNAP-25 family domain identified by PFam, accession name SNAP -25, E-value=3.7e-85, PFam score of 296.3
MLSCYKQKFPLAADALVTMDVDFYQAKENAELKNAINQPHHLAQVVTIKQLQTLPDSWGQICNKNQSLSVSLTSQDAGIKTITMLDEQKEQLNRIEEGLDQINKDMRETEKTLTELNKCCGLCVCPCNRTKNFESGKAYKTTWGDGGENSPCNVVSKQPGPVTNGQLQQPTTGAASGGYIKRITNDAREDEMEENLTQVGSILGNLKDMALNIGNEIDAQNPQIKRITDKSHLGQPSVLKLKDTSFLRRFHMSAERTVSHPSAAAQVPAGRKRCCHRPVHPVGLPAGAPAPALNSRRSLAPGARPKSDKEESEEHTARPPSPAAFAALRRPGASGSLRKIREPRTRLPPLSCRKAPQEMLNMSKKTVSCFVNFTRLQQITNIQAEIYQKNLEIELLKLEKDTADVVHPFFLGKNPTDAYLDATMNEAPGPINFTMFGEKLNGTDPEDVIRNASACFDEEATGTIQEDYLRELMTTMGDQFTDEEVDELHREAPIDKKGNFNYIEFTSILKHGVKDKDD

SEQ ID NO: 8647 - protein, 215 aa, Homo sapiens
  DOMAIN (7)..(209): SNAP-25 family domain identified by PFam, accession name SNAP -25, E-value=1.2e-76, PFam score of 268.1
  misc_feature (1)...(215): Xaa = X or * as defined in Table 2
FIMDNLSSEEIQQRAHQITDESLESTRRILGLAIESQDAGIKTITMLDEQKEQLNRIEEAWAQIIKDMRETEKTLTELNKCCGLCVCPCNRTKELLSLGQGFIKTTWGRWWEKTSPWQCXYSKQPGPVWTNGQLQQPTTGAASGGYIKRITNDAREDEMEENLTQVGSILGNLKDMALNIGNEIDAQNPQIKRITDKADTNRRFVLDYCPMPEQK

SEQ ID NO: 8648 - protein, 87 aa, Homo sapiens
FSHIYSLFILFQPLEIRGPYDVANLGLLFGLSESDAKAAVSTNCRAALLHGETRKTAFGIISTVKKPRPSEGDEDCLPASKKAKCEG

SEQ ID NO: 8649 - protein, 59 aa, Homo sapiens
YVKPPHFKLCLNFKHSGFPVCFTETRKTAFGIISTVKKPRPSEGDEDCLPASKKAKCEG

SEQ ID NO: 8650 - protein, 133 aa, Homo sapiens
ISSALNLMQICKGKNVIISSAAERPLEIRGPYDVANLGLLFGLSESDAKAAVSTNCRAALLHGETRKTAFGIISTVKKPRPSEGDEDCLPASKKAKWSHSVTQAGVQWHNLGSLQPLPLGLQAIPPTFSLPRN

SEQ ID NO: 8651 - protein, 287 aa, Homo sapiens
  misc_feature (1)...(287): Xaa = X or * as defined in Table 2
EFGTRWDFSMAVFADLDLRAGSDLKALRGLVETAAHLGYSVVAINHIVDFKEKKQEIEKPVAVSELFTTLPIVQGKSRPIKILTRLQIMLSDHSPAKVLKNTLKRGAGLXDVGAGFPKAEKAFFILLCTHLDVDLVCITVTEKLPFYFKRPPINVAIDRGLAFDLALIPLLSKDSTMRRYTISPVPLQFXCKSCKGKNVIISSACKKRPFXKIRGPILTWANLGLPVWGFSESERQGFGCPPNCRAALLHGETRKTAFGIISTVKKPRPSEGDEDCLPASKKAKCEG

SEQ ID NO: 8652 - protein, 178 aa, Homo sapiens
  DOMAIN (34)..(51): BETA HAEMOGLOBIN SIGNATURE domain identified by eMATRIX, accession number PR00814A, p-value=1.000e-22, raw score of 12.94
  DOMAIN (30)..(94): Globin domain identified by PFam, accession name globin, E- value=7e-08, PFam score of 31.9
  misc_feature (1)...(178): Xaa = X or * as defined in Table 2
SRRPWVISQRRTRLLSTSLWCKVNVEDAGGETLGRLLVVYPWTQRFFDSFGNLSSASAIHGQTPKVKAHGKKVLTFLGEMPLKHLDDLQGAPFAQAXSELALVDKPAMWDPXGTSKLPGEILLVTRFGQSLFRQKNFTPGGARVSWGRKMGDLELASALVPSRLPLSSLAHECRAFQG

SEQ ID NO: 8653 - protein, 89 aa, Homo sapiens
  DOMAIN (32)..(60): !!!! PROTEIN ALU SUBFAMILY WARNING ENTRY NUCLEAR PHOSPHO domain identified by eMATRIX, accession number PD02454B, p-value= 4.804e-09, raw score of 11.61
  misc_feature (1)...(89): Xaa = X or * as defined in Table 2
GNFNSLRLSKTQLCAHCLYPHTFGRQRWVDHLRLGVRDXPGQHGETPSLLKNNNNNTKISWAWWHEPVIPAMGEAEAGESLEPGRRRLQ

SEQ ID NO: 8654 - protein, 169 aa, Homo sapiens
  DOMAIN (4)..(47): Ribosomal protein L19e proteins domain identified by eMATRIX, accession number BL00526A, p-value=9.514e-36, raw score of 19.50
  DOMAIN (2)..(122): Ribosomal protein L19e domain identified by PFam, accession name Ribosomal_L19e, E-value=7.8e-55, PFam score of 195.6
MSMLRLQKRLASSVLRCGKKKVWLDPNKTNEIANANSHQQIWKLIKDGLIIRKPVTVHSRARCQKNTLAHWKGRHIGIDKRYCESKKIDRHMYHSLYLKVQGNVFTNKPILMEHSHKLKADKAHKKLLADQAEARRPKTKEARKRSEERLQAKKEEIIKTLFKEEDTKK

SEQ ID NO: 8655 - protein, 129 aa, Homo sapiens
  DOMAIN (4)..(47): Ribosomal protein L19e proteins domain identified by eMATRIX, accession number BL00526A, p-value=1.000e-40, raw score of 19.50
  DOMAIN (2)..(129): Ribosomal protein L19e domain identified by PFam, accession name Ribosomal_L19e, E-value=1.8e-64, PFam score of 227.6
MSMLRLQKRLASSVLRCGKKKVWLDPNETNEIANANSRQQIRKLIKDGLIIRKPVTVHSRARCRKNTLARRKVRHMGIGKRKGTANARMPEKVTWMRRMEILRHLLTRYRECETINRAMHHLLNLKVMS

SEQ ID NO: 8656 - protein, 455 aa, Homo sapiens
  DOMAIN (80)..(118): Initiation factor 2 proteins domain identified by eMATRIX, accession number BL01176B, p-value=5.547e-12, raw score of 8.74
  DOMAIN (1)..(412): Elongation factor Tu family domain identified by PFam, accession name GTP_EFTU, E-value=4.7e-146, PFam score of 494.9
INIVVIGHVDSGKSTTTGHLIYKCGGIDKRTIEKFEKEAAEMGKGSFKYAWVLDKLKAERERGITIDISLWKFETSKYYVTIIDAPGHRDFIKNMITGTSQADCAVLIVAAGVGEFEAGISKNGQTREHALLAYTLGVKQLIVGVTKMDSTEPPYSQKRYEEIVKEVSTYIKKIGYNPDTVAFVPISGWNGDNMLEPSANMPWFKGWKVTRKDGNASGTTLLEALDCILPPTRPTDKPLGLPLQDVYKIGGIGTVPVGRVETGVLKPGMVVTFGPVNVTTEVKSVEMHHEALGEALPGDNVGFNVKNVSVKDVRRGNVAGDSKNDPPMEAAGFPAQVIILNHPGQISAGYAPVLDCHTAHIACKFAELKEKIDRRSGKKLEDGPKFLKSGDAAIVDMVPGKPMCVESFSDYPPLGCFAVRDMRQTVAVGVIKAVDKKAAGAGKVTKSAQKAQKAK

SEQ ID NO: 8657 - protein, 230 aa, Homo sapiens
  DOMAIN (20)..(63): Ribosomal protein L19e proteins domain identified by eMATRIX, accession number BL00526A, p-value=1.000e-40, raw score of 19.50
  DOMAIN (18)..(181): Ribosomal protein L19e domain identified by PFam, accession name Ribosomal_L19e, E-value=2.4e-24, PFam score of 94.3
  misc_feature (1)...(230): Xaa = X or * as defined in Table 2
INPPPPAFLSLLRPQPCSMLRLQKRLASSVLRCGKKKVWLDPNETNEIANANSRQQIRKLIKDGLIIRKPVXRVHSRARCRKNTLARRKGTAHCGIGKREGYSPMPRMPTRKVTWMKENEGFWRRLASERYRXNLKKIRFATLLSQALYPEGXRGNVVSKTRRVFHGNTFHKLEGRQRPRKKAPWLDQAXGRRRSXDQGKHGKRREERLPGQRKEEINQRLYSKEEETKK

SEQ ID NO: 8658 - protein, 139 aa, Homo sapiens
  DOMAIN (11)..(50): Tryptophan pentad repeat proteins (IRF family) proteins domain identified by eMATRIX, accession number BL00601A, p-value= 3.045e-29, raw score of 20.29
  DOMAIN (5)..(103): Interferon regulatory factor transcription f domain identified by PFam, accession name IRF, E-value=8.7e-67, PFam score of 235.3
MASGRARCTSNLRNWVVEQVESGQFPGVCWDDTAKTMFRIPWKHAGWAIFKGKYKEGDTGGPAVWKTRLRCALNKSSEFKEVPERGRMDVAEPYKVYQLLPPGIVSGQPGTQKVPSKRQHSSVFSERKEEEDAIANCTL

SEQ ID NO: 8659 - protein, 137 aa, Homo sapiens
  DOMAIN (26)..(55): Tryptophan pentad repeat proteins (IRF family) proteins domain identified by eMATRIX, accession number BL00601B, p-value= 9.735e-25, raw score of 20.92
  DOMAIN (5)..(70): Interferon regulatory factor transcription f domain identified by PFam, accession name IRF, E-value=3.9e-21, PFam score of 83.6
GRLSPATAWTATQAWAIFKGKYKEGDTGGPAVWKTRLRCALNKSSEFKEVPERGRMDVAEPYKVYQLLPPGIVSGQPGTQNVPSKRQHSSVSSERKEEEDAMQNCTLSPSVLQDSLNNEEEGASGGAVHSDIGSSSS

SEQ ID NO: 8660 - protein, 98 aa, Homo sapiens
FQVLLTLQLLLWQDPLLPLSIMGSSLLPPCLWPSLFFLFFEPLTLSLSDLVRYFQGLGPPPKFQVTLNFWEESHGSSHTPQNLITVKMEQAFARYLLE

SEQ ID NO: 8661 - protein, 54 aa, Homo sapiens
  misc_feature (1)...(54): Xaa = X or * as defined in Table 2
PHSSTTCPPAPMLVFXKRDPPSLGPHDALVPPCPVPVEILRSSAKTRCGKKASS

SEQ ID NO: 8662 - protein, 64 aa, Homo sapiens
  misc_feature (1)...(64): Xaa = X or * as defined in Table 2
SRRRFPMGSGTKLVXGXGEMESLEEQAKGKGTESCALHPVDLFSSPGPLFNSLCLSKPMAPPTL

SEQ ID NO: 8663 - protein, 535 aa, Homo sapiens
  DOMAIN (150)..(189): Tryptophan pentad repeat proteins (IRF family) proteins domain identified by eMATRIX, accession number BL00601A, p-value= 4.000e-37, raw score of 20.29
  DOMAIN (145)..(258): Interferon regulatory factor transcription f domain identified by PFam, accession name IRF, E-value=2.4e-82, PFam score of 287.0
  misc_feature (1)...(535): Xaa = X or * as defined in Table 2
GGRAGDGPLSATCTYAPSLWLDEGSPCLPGPLVTEADRRGTLGTEYPPQAEVAEGKGPDEGPMACSLRNSSSTNKEASYHPGFLVVLLPEFDWYLKSPNMYQVGTVGECRCTGVHSSPEVPGLTPGNWPPWGSHGVTQRMASGRARCTRKLRNWVVEQVESGQFPGVCWDDTAKTMFRIPWKHAGKQDFREDQDAAFFKAWAIFKGKYKEGDTGGPAVWKTSLCCALNKSFDFKEVPERGRMDVAEPYKVYQLLPPGILSGHPGTQKVPSKRQHSSVSSERKEEKDAMQNCTLSPSVLQDSLNNEEEGGSGGAVHSDIGSSSSSSSPETTRKITDTTEAPFQGDQRSLEFLLPPEPDXSLLLTFIYNGRVVGEAQVQSLDCRLVAEPSGSESSMEQVLFPKPGPLEPTQRLLSQLRRGILVASTPQGLFRCSAFCPIPIFWGIAPQAPPGPGPHLLPSNECVELFRTAYFCRDLVRYFQGLGPPPKFQVTLNFWEESHGSSHTPQNLITVKMEQAFARYLLEQTPEQQAAILSLV

SEQ ID NO: 8664 - protein, 82 aa, Homo sapiens
  DOMAIN (3)..(44): Phosphatidylethanolamine-binding protein family proteins domain identified by eMATRIX, accession number BL01220B, p-value= 6.774e-23, raw score of 16.65
  misc_feature (1)...(82): Xaa = X or * as defined in Table 2
MSLIQEALHLVLTDPDAPAGDDPKYREWHHFLVVNMKGNDISNGTVLSDYXCAAPPKAPSHVPQFSVACIIDFSSSCPPWHG

SEQ ID NO: 8665 - protein, 75 aa, Homo sapiens
ISMFPQQKNPPPSWFFQGWFFKGPEGHFYAFLGILNALCWGLTPNPPFGFFGEGPPPKIPLGSLLGSGFQRQRPP

SEQ ID NO: 8666 - protein, 30 aa, Homo sapiens
  misc_feature (1)...(30): Xaa = X or * as defined in Table 2
TSHQSHCSTFLTVSKWXXLKTAYCLYHYHS

SEQ ID NO: 8667 - protein, 230 aa, Homo sapiens
  DOMAIN (58)..(89): Phosphatidylethanolamine-binding protein family proteins domain identified by eMATRIX, accession number BL01220A, p-value= 5.500e-13, raw score of 22.62
  DOMAIN (36)..(217): Phosphatidylethanolamine-binding protein domain identified by PFam, accession name PBP, E-value=2.8e-14, PFam score of 60.9
  misc_feature (1)...(230): Xaa = X or * as defined in Table 2
VEFFSSQRAELYATPLTPAPGPNGGIPGWTLWLALPRPGNLRKGPGPLSLQEVDEQPQHPLHVTYAGAAVDDELGKVLTPTQVKNRPTSISWDGLDSKGKLYTLVLTDPDAPKQGKDPKYREWHHFLGWSTLKGQMTSATGTVLSDYVGLGGLPKGTGLHRYVWLVYEQDRPLKCDEPHPSATRSGDHRGKIQRWASLPVKKXXSSRAPGGWAPCYPQPEVGMNQCAPKL

SEQ ID NO: 8668 - protein, 218 aa, Homo sapiens
  misc_feature (1)...(218): Xaa = X or * as defined in Table 2
APSCLVSEHSAPGPQRELPQPLLTFQAYEQILGITCGSCPAQGWGAWSSDAVPQLLARRPPLPHGLPACGEWGRGELGVKPSGLPSHAGPAWGHQVRTVCATAHPQDCISPEGAVEEEIVGGXGCTEGQSQRVLQIWPSQGVSSLSALVPLNMFTELLIEYYEKIFSTPEAPGEHGLAPWEQGSRAAPLQEAVPRTQATGLTKPTLPPSPLMAARRRL

SEQ ID NO: 8669 - protein, 84 aa, Homo sapiens
  DOMAIN (2)..(42): Ribosomal protein L37e domain identified by PFam, accession name Ribosomal_L37e, E-value=1.1e-14, PFam score of 62.2
STISLCRRCGSKAYHLQKSTCGKCGYPAKRKRKYNWSAKAKRRNTTGTGRMRHLKIVYRRFRHGFREGTTPKPKRAAVAASSSS

SEQ ID NO: 8670 - protein, 101 aa, Homo sapiens
  DOMAIN (7)..(54): Ribosomal protein L37e proteins domain identified by eMATRIX, accession number BL01077, p-value=1.000e-40, raw score of 16.34
  DOMAIN (6)..(59): Ribosomal protein L37e domain identified by PFam, accession name Ribosomal_L37e, E-value=2.1e-31, PFam score of 117.7
RTSEMTKGTSFFGKRRNKTHTLCRRCGSKAYHLQKSTCGKCGYPAKRKRKYNWSAKAKRRNTTGTGRMRHLKIVYRRFRHGFREGTTPKPKRAAVAASSSS

SEQ ID NO: 8671 - protein, 125 aa, Homo sapiens
  DOMAIN (28)..(75): Ribosomal protein L37e proteins domain identified by eMATRIX, accession number BL01077, p-value=7.000e-34, raw score of 16.34
  DOMAIN (31)..(84): Ribosomal protein L37e domain identified by PFam, accession name Ribosomal_L37e, E-value=9.7e-15, PFam score of 62.4
  misc_feature (1)...(125): Xaa = X or * as defined in Table 2
IPTPLIGNFGPRGPRIRHERPQKRDDRREPSSFGKRRQXDGTLLCRRCGSKAYHLQKSTCGKCGYPAKRKRKYNWSAKAKRRNTTGTGRMRHLKIVYRRFRAWDFREGTTPKPKXGSLLQHSSSS

SEQ ID NO: 8672 - protein, 163 aa, Homo sapiens
  DOMAIN (38)..(55): BETA HAEMOGLOBIN SIGNATURE domain identified by eMATRIX, accession number PR00814A, p-value=6.250e-16, raw score of 12.94
  misc_feature (1)...(163): Xaa = X or * as defined in Table 2
APSPRRPWGHFTEEDKATITSLWGKVNVEDAGGETPGKGSLVVYPWTQRFFDSFGNLSSAFAHHGQTPKVKAHGKKVLTSLGDAIKHLDDLKGTFAQAXVNLHLXQSCNVDPENFQAPGEMLLVTRVLAIHFGKEFTPGGCKASWAEDGXLAVGQWPCSSRYH

SEQ ID NO: 8673 - protein, 54 aa, Homo sapiens
ILETYIKTLQRYADGSYKSEKVKSVGPRGGAIEKEKNCLTVPFQEKSLGSGIVV

SEQ ID NO: 8674 - protein, 125 aa, Homo sapiens
  DOMAIN (39)..(48): Zinc finger C3HC4 type (RING finger), proteins. domain identified by eMATRIX, accession number BL00518, p-value=5.714e-10, raw score of 12.23
  DOMAIN (24)..(62): Zinc finger, C3HC4 type (RING finger) domain identified by PFam, accession name zf-C3HC4, E-value=1.3e-11, PFam score of 41.9
  misc_feature (1)...(125): Xaa = X or * as defined in Table 2
SLHXPRMATQRKHLVKDFNPYITCYICKGYLIKPTTVTECLHTFCKTCIVQHFEDSNDCPRCGNQVHETNPLEMLRLDNTLEEIIFKLVPGLREQELERESEFWKENKPQGNGQDDTFKSLTNRK

SEQ ID NO: 8675 - protein, 568 aa, Homo sapiens
  DOMAIN (72)..(122): Chaperonins TCP-1 proteins domain identified by eMATRIX, accession number BL00750B, p-value=1.000e-40, raw score of 16.17
  DOMAIN (35)..(560): TCP-1/cpn60 chaperonin family domain identified by PFam, accession name cpn60_TCP1, E-value=2e-173, PFam score of 589.5
  misc_feature (1)...(568): Xaa = X or * as defined in Table 2
TCIAAVKMEGPLSVFGDRSTGETIRSQNVMAAASIANIVKSSLGPVGLDKMLVDDIGDVTITNDGATILKLLEVEHPAAKVLCELADLQDKEVGDGTTSVVIIAAELLKNADELVKQKIHPTSVISGYRLACKEAVRYINENLIVNTDELGRDCLINAAKTSMSSKIIGINGDFFANMVVDAVLAIKYTDIRGQPRYPVNSVNILKAHGRSQMESMLISGYALNCVVGSQGMPKRIVNAKIACLDFSLQKTKMKLGVQVVITDPEKLDQIRQRESDITKERIQKILATGANVILTTGGIDDMCLKYFVEAGAMAVRRVLKRDLKRIAKASGATILSTLANVEGXERFEGAMWDQAEEVVQERICDDELILIKSTKARTSASIISRVPIDSMCDEMERSLHDALCVVKRVLESKSVVPRGGAVEAALSIYLENYATSMGSREQLAIAEFARSLSGYSPIPLAVNAAQDSTDLVGKNXRRLFHNEAPGLTPERKNLKWIGLDLSNGKPRDNKQAGVFEPTPIVKVKSLKFATEAAITILRIDDLIKLHPRKXRXKHGSYEDAVHSGALND

SEQ ID NO: 8676 - protein, 168 aa, Homo sapiens
  DOMAIN (89)..(114): Mitochondrial energy transfer proteins domain identified by eMATRIX, accession number BL00215A, p-value=3.368e-13, raw score of 15.82
  DOMAIN (85)..(168): Mitochondrial carrier proteins domain identified by PFam, accession name mito_carr, E-value=8e-13, PFam score of 46.9
PRVRNLSREWLCDRHLREKMFSSVAHLARANPFDTPHLQLVHDGLGDLRSSSPGPTGQPRRPRNLAAAAVEEQYSCDYGSGRFFILCGLGGIISCGTTHTALVPLDLVKCRMKVDPQKYKGIFNGFSVTLKEDGVRGLAKGWAPTFLGYSMQGLLQVLAFYEVFKVLY

SEQ ID NO: 8677 - protein, 425 aa, Homo sapiens
  DOMAIN (92)..(117): Mitochondrial energy transfer proteins domain identified by eMATRIX, accession number BL00215A, p-value=6.250e-17, raw score of 15.82
  DOMAIN (86)..(263): Mitochondrial carrier proteins domain identified by PFam, accession name mito_carr, E-value=3.8e-42, PFam score of 147.4
  misc_feature (1)...(425): Xaa = X or * as defined in Table 2
ALCEPQPFQGSGCVIAILGRKMFSSVAHLARANPFNTPHLQLVHDGLGDLRSSSPGPTGKPRRPSQHMAAAPVEEQYSCDYGSGRFFILCGLGGIISCGTTHTALVPLDLVKCRMQVDPQKYKGIFNGFSVTLKEDGVRGLAKGWAPTFLGYSMQGLCKFGFYEVFKSLYSNMLGEENTYLXRTSLYLAASASAEFFADIALAPMEAAKVRIQTQPGYANTXEGISFPKCIKEEGLTSILQGGLLPLWMRQIPYTMNXSSPCLERTVEALYKFVVPKPRREXFKRQSRLVVTIWXQVTIARVFCANCFSPLPEFLGXPVLDXGKKVSQCFLWVLQRDLGFKGVWKGLFARIIMIGTLTALQWFIYYSVKGYFRLPRPPPPEMQESLKKKLGVNSVVRIKANCGLNLLVDPVFEESAKGTFIYLTV

SEQ ID NO: 8678 - protein, 102 aa, Homo sapiens
  DOMAIN (49)..(66): LMW PHOSPHOTYROSINE PROTEIN PHOSPHATASE SIGNATURE domain identified by eMATRIX, accession number PR00719B, p-value=1.346e- 15, raw score of 14.32
  DOMAIN (6)..(101): Low molecular weight phosphotyrosine protein domain identified by PFam, accession name LMWPc, E-value=6.2e-08, PFam score of 31.4
RPLESWIGLVRCNICRSPIAEAVFRKLVTDQNISKNWRVDSAATSGYEIGNPPDYRGQSCMKRHGIPMSHVARQDLNRKSNRVKTCKAKIELLGSYDPQKQL

SEQ ID NO: 8679 - protein, 177 aa, Homo sapiens
  DOMAIN (142)..(164): MAMMALIAN LMW PHOSPHOTYROSINE PROTEIN PHOSPHATASE SIGNATURE domain identified by eMATRIX, accession number PR00720E, p-value= 1.429e-30, raw score of 10.01
  DOMAIN (14)..(163): Low molecular weight phosphotyrosine protein domain identified by PFam, accession name LMWPc, E-value=5e-71, PFam score of 249.4
QRGGIRKMAEQATKSVLFVCLGNICRSPIAEAVFRKLVTDQNISENWVIDSGAVSDWNVGRSPDPRAVSCLRNHGIHTAHKARQITKEDFATFDYILCMDESNLRDLNRKSNQVKTCKAKIELLGSYDPQKQLIIEDPYYGNDSDFETVYQQCVRCCRAFLEKAHLGRFVPCCGQPD

SEQ ID NO: 8680 - protein, 246 aa, Homo sapiens
  DOMAIN (84)..(102): LMW PHOSPHOTYROSINE PROTEIN PHOSPHATASE SIGNATURE domain identified by eMATRIX, accession number PR00719A, p-value=3.000e- 23, raw score of 14.49
  DOMAIN (82)..(246): Low molecular weight phosphotyrosine protein domain identified by PFam, accession name LMWPc, E-value=4.1e-33, PFam score of 123.4
  misc_feature (1)...(246): Xaa = X or * as defined in Table 2
PADPPRPSYYRHRTPPQAHWSRLRRSRLRRRGSHTRCPVGVGAGLRRRAGARLAVRLRASACGTPRCLGASARGKMAEQATKSVLFVCLGNICRSPIAEAVFRKLVTDQNISKNWEGRQRGNFRWVIDSGAVSDWNVGRSPDPRAVSCLRNHGIHTAHKARQITKEVFPTFDYILCMDESNLRDLNRKSNRVKTCKSXKFELPWELXSPQKQLIIEDPYYGEXLWTLETVYQQCVRCCRAFLEKAH

SEQ ID NO: 8681 - protein, 413 aa, Homo sapiens
MERAEFVFTGIDAYSRYGFAYPACNASAKTTSVDSWNALSTVMVFHTALPLTKALTLRLKKLVTVSLVDSTVVLWLWQLQTQLKVAKDRAFSPCPSVGEENPPYESLQISPDVPLRRTRSRCQVHNYTKCPAWGQVPAHAEVRGEWADGQLPQPILDQSTPMILTRVLWPYSKGGKKVSLPLSAPGEKGGPCRQGSKSGAAVGGVLQALLWRKSCCPEWRQGWMWVDNQLIGTTQPFMLYVTPLSNENEVIETGPAVQVNAVKFPSKSALTNIYKHLMITAQRFTVQIEEKLLLKLLSFFGYDQAESEVEKYDENLHEKTAEQGGTPIRYYFENLKISIPQIKLSVFTSNKLPLDLKELLSQAARILGSVDFLGNPMGLLNDVSEGVTGLIKYGNVGGLIRNVTHGVSNSAAK

SEQ ID NO: 8682 - protein, 37 aa, Homo sapiens
SILRCSVISYFSFSVSKISPSWCLGFRSFFFLKRTRG

SEQ ID NO: 8683 - protein, 50 aa, Homo sapiens
  misc_feature (1)...(50): Xaa = X or * as defined in Table 2
MRCEIILVLIPYVYFYSNKLLCSRLXXXXXGGAVLKNPWGGQSLPGLARX

SEQ ID NO: 8684 - protein, 52 aa, Homo sapiens
  misc_feature (1)...(52): Xaa = X or * as defined in Table 2
RDDPRVRPPPNSHTXPQQEPGLXLIKCTSPPQAPAPRTVHGPYFYMRLIKMF

SEQ ID NO: 8685 - protein, 59 aa, Homo sapiens
  DOMAIN (26)..(49): Zinc finger, C3HC4 type (RING finger) domain identified by PFam, accession name zf-C3HC4, E-value=0.00019, PFam score of 18.7
  misc_feature (1)...(59): Xaa = X or * as defined in Table 2
RECLHXPRMATQRKHLVIDFNAYITCYICKGYLIKPTTVTECLHTFCRCMEAFPSLLLA

SEQ ID NO: 8686 - protein, 427 aa, Homo sapiens
  DOMAIN (370)..(390): BACTERIOFERRITIN SIGNATURE domain identified by eMATRIX, accession number PR00601A, p-value=3.744e-09, raw score of 14.26
CFSFVFVRHSSRHCREYETLITADFPPEASYLMSLCSWSVTTMVAFLAQSRPSGSAGAHRHSRVRSSTALGHSKRLADTDLALMKPAWTPAFQHCMQHPNQPCEEKRYEQMVTQQSDTHTQKATCRGSTCWALGQPQLLVSHVIMKREQILYSGPCCQMTSPSCQLILSCDKTEFYVLFIPALMDETAFLVKFAGTLSDGLGKTMDNRHQSEREYIRYHAATSGEHLVAGIHGLAHGKSWVTSGSAAAGPQRRLCINLIAAIKKERLQQPLSFSLGIIGGLTSVITSTVEGVKTEGGVSGFISGLGKGLVGTVTKPVAGALDFASETAQAVRDTATLSGPRLKYFQVPLLVGVRWHSKRQPPNFPLKFPGNPIVLRKADEALKSQLGALGLRLRGPYCGMIKWGPADSGLLLRGAKLNGDERGDLKL

SEQ ID NO: 8687 - protein, 1154 aa, Homo sapiens
  misc_feature (1)...(1154): Xaa = X or * as defined in Table 2
QPGHTIYLLPTVVICNLLPCELDFYVKGMPINGTLKPGKEAALHTADTSQNIELGVSLENFPLCKELLIPPGTQNYMVRMRLYDVNRRQLNLTIRIVCRAEGSLKIFISAPYWLINKTGLPLIFRQDNAKTDAAGQFEEHELARSLSPLLFCYADKEQPNLCTMRIGRGIHPEGMPGWCQGFSLDGGSGVRALKVIQQGNRPGLIYNIGIDVKKGRGRYIDTCMVIFAPRYLLDNKSSHKLAFAQREFARGQGTANPEGYISTLPGSSVVFHWPRNDYDQLLCVRLMDVPNCIWSGGFEVNKNNSFHINMRDSLGKCFFLRVEITLRGATYRISFSDTDQLPPPFRIDNFSKVPVVFTQHGVAEPRLRTEVKPMTSLDYAWDEPTLPPFITLTVKGAGSSEINCNMNDFQDNRQLYYENFIYIAATYTFSGLQEGTGRPVASNKAITCAELVLDVSPKTQRVILKKKEPGKRSQLWRMTGTGMLAHEGSSVPHNPNKPSAARSTEGSAILDIAGLAAVTDNRYEPLMLRKPDRRRSTTQTWSFREGKLTCGLHGLVVQAKGGLSGLFDGAEVVLGPDTSMELLGPVPPEQQFINQKMRPGSGMLSIRVIPDGPTRALQITDFCHRKSSRSYEVDELPVTEQELQKLKNPDTEQELEVLVRLEGGIGLSLINKVPEELVFASLTGINVHYTQLATSHMLELSIQDVQVDNQLIGTTQPFMLYVTPLSNENEVIETGPAVQVNAVKFPSKSALTNIYKHLMITAQRFTVQIEEKLLLKLLSFFGYDQAESEVEKYDENLHEKTADQGGTPIRYYFENLKISIPQIKLSVFTSNKLPLDLKALKSTLGFPLIRFEDAVINLDPFTRVHPYETKEFIINDILKHFQEELLSQAARILGSVDFLGNPMGLLNDVSEGVTGLIKYGNVGGLIRNVTHGVSNSAAKFAGTLSDGLGKTMDNRHQSEREYIRYHAATSGEHLVAGIHGPGLMGIIGVGLTSVITSTSGRVXKQKGGVSGFISGLGKGLVGTVTKPVAGALDFASETAQAVRDTATLSGPRTQAQRVRKPRCCTGPQGLLPRYSESQAEGQEQLFKLTDNIQDEFFIAVENIDSYCVALISSKAVYFLKSGDYVDREAIFLEVKYDDLYHCLVSKDHGKVMCR

SEQ ID NO: 8688 - protein, 85 aa, Homo sapiens
  misc_feature (1)...(85): Xaa = X or * as defined in Table 2
MMFPLAFSLPLKNAFHISVCRVCPGYTGFAKRALTALNLDTSLSANCCNTPPAEXPNVHNPCYMGLSKPARXSKLGSMCKGSSXH

SEQ ID NO: 8689 - protein, 310 aa, Homo sapiens
MAMDALAYTQMFLLLMNGGDWVIALANLNTLINHSLQLVSQDANSREIQLRFTANDTLPEIQADPDRLTQWGVVEGQIIKKYICKNIIGVGAVEKKMSEWNRKCFKERLQEVKECALRRSAVAASLAEEAAEARLLRLQQACTSLSQFPNSIAGVRWERTLGAIVRQKNHPMTPEAVKANWKKICDFENASKPQSIQVYSYSEKELICHNQFSLFLVGSGGFGGKRTSDKVKDHRSSPAIEQSWTKNDFDKLTEVGFRRLVITNFSELKEHVRTYRKEAKNLEKRLDEWLTRINSVEKTLNDLMEPKTMA

SEQ ID NO: 8690 - protein, 44 aa, Homo sapiens
SRVDDFVSLQALFMGSPLRFDGRVVLVTGAVAGEHAKVGGRAPC

SEQ ID NO: 8691 - protein, 814 aa, Homo sapiens
  DOMAIN (441)..(486): PROTEIN STEROL CARRIER LIPID-TRAN domain identified by eMATRIX, accession number PD02796A, p-value=3.596e-25, raw score of 24.02
  DOMAIN (39)..(230): short chain dehydrogenase domain identified by PFam, accession name adh_short, E-value=4.2e-46, PFam score of 166.6
  misc_feature (1)...(814): Xaa = X or * as defined in Table 2
HASVCPAVGVQRLCLFPCVSLQALFMGSPLRFDGRFFLVTGAGAGLGRAYALAFAERGALVVVNDLGGDFKGVGKGSLAADKVVEEIRRRGGKAVANYDSVEEGDKVVKTALDAFGRIDVVVNNAGILRDINSFARISDEDWDIIHRVHLRGSFQVTPAAWEHMKKQKYGRSIMTSSASGIYGNFGQANYSAAKLGLLGLANSLAIEGRKSNIHWNTIAPNAGSRMTQTVMPEDLVEALKPKYVAPLVLWLCHQSCEENGGLFEVGAGRIGKLRWERTLGAIVRQKNHPMTPEAVKANWKKICDFENASKPQSIQESTGSIIEVLSKTDSEGGVSANYTSRATSTATSGFAGAIGQKLPPFSYAYTELEAIMYALGVGASIKDPKDLKFIYEGSSDFSCLPTFGVIIGQKSMMGGGLAEIPGLSINFAKVLHGEQYLELYKPLPRAGKLKCEAVVADVLDKGSGVVIIMDVYSYSEKELICHNQFSLFLVGSGGFGGKRTSDKVKVAVAIPNRPPDAVLTDTTSLNQAALYRLSGDWNPLHIDPNFASLAGFDKPILHGLCTFGIFCQGVLLQQFCRXMDVVQGFKGNXRARFAKPVYPGANFYQTXECWKEGNRNSFFKPKVQGNLETLVISKWHMWDLGTQHSGYFSLRTPSEGPGSFRVPLVFEEIGRRLKDIGPEVVKKVNAVFEWHITKGGNIGAKWTIDLKSGSWEKLYQGPSKKGAADTTIHILSDEDFLWEVVLGQAXPSRKAFFSGPGXRPQGGTSMAXAQKLSDGFLKDYAKLLKGTPTLLIKMESIKIPPPHPQICLDYSAKS

SEQ ID NO: 8692 - protein, 95 aa, Homo sapiens
  DOMAIN (60)..(79): SELECTIN SUPERFAMILY COMPLEMENT-BINDING REPEAT SIGNATURE domain identified by eMATRIX, accession number PR00343C, p-value= 5.585e-12, raw score of 16.85
  DOMAIN (29)..(84): Sushi domain (SCR repeat) domain identified by PFam, accession name sushi, E-value=2.9e-16, PFam score of 67.5
QHAMFGNDTITCTTHGNWTKLPECREVKCPFPSRPDNGFVNYPAKPTLYYKDKATFGCHDGYSLDGPEEIECTKLGNWSAMPSCKEHEFSGFLEN

SEQ ID NO: 8693 - protein, 132 aa, Homo sapiens
  DOMAIN (72)..(91): SELECTIN SUPERFAMILY COMPLEMENT-BINDING REPEAT SIGNATURE domain identified by eMATRIX, accession number PR00343C, p-value= 5.585e-12, raw score of 16.85
  DOMAIN (41)..(96): Sushi domain (SCR repeat) domain identified by PFam, accession name sushi, E-value=2.9e-16, PFam score of 67.5
PTRPRTRGVCLPFHAMFGNDTITCTTHGNWTKLPECREVKCPFPSRPDNGFVNYPAKPTLYYKDKATFGCHDGYSLDGPEEIECTKLGNWSAMPSCKASCKVPVKKATVVYQGERVKIQEKFKNGMLHGDKS

SEQ ID NO: 8694 - protein, 136 aa, Homo sapiens
  DOMAIN (46)..(58): Sushi domain proteins (SCR repeat proteins domain identified by eMATRIX, accession number PF00084B, p-value=3.813e-10, raw score of 9.45
  DOMAIN (25)..(82): Sushi domain (SCR repeat) domain identified by PFam, accession name sushi, E-value=1.4e-10, PFam score of 48.6
STMISPVLILFSSFLCHVAIAGRTCPKPDDLPFSTVVPLKTFYEPGEEITYSCKPGYVSRGGMRKFICPLTGLWPINTLKCTPRVCPFAGNLRKMGAVRLITDFLNYSPTRFSFSLLTWGFILEWALDSAKCIEGG

SEQ ID NO: 8695 - protein, 394 aa, Homo sapiens
  DOMAIN (52)..(64): Sushi domain proteins (SCR repeat proteins domain identified by eMATRIX, accession number PF00084B, p-value=3.813e-10, raw score of 9.45
  DOMAIN (31)..(236): Sushi domain (SCR repeat) domain identified by PFam, accession name sushi, E-value=0.0013, PFam score of 25.4
  misc_feature (1)...(394): Xaa = X or * as defined in Table 2
CQCDSSTMIFSRCSSLFSSFLCHVAIAGRTCPKPDDLPFSTVVPLKTFYEPGEEITYSCKPGYVSRGGIEESLSCPLTGTVGPFNTSGNVTPRVCPFAGIFRKMGGRTLITTFXNYPNTDPVFSLLTLGFXFWNGALDFWPSCTGGKGKWSPELPGLVAPIICPPPSIPTGFATLHVLLRPFRLGNNSPPIGDTAVFECLAHNMAMFGNDTITCTTHGKLDLNYPECRGSKMPPFPHQDPDNGIWXTYPCQNPNTLFTRVKAPHLGLPHDGIFSGMGPRKEIECXPQTWGKPGSWPLAPSWXKPSLVKGTPVKKRPTVVYPQGERVKDSREKFKEWECLHGXXKFLSFCKNKEKKCSYTEDAQCIDGTIEVPKCFKEHSSLAFWKTDASDVKPC

SEQ ID NO: 8696 - protein, 47 aa, Homo sapiens
  misc_feature (1)...(47): Xaa = X or * as defined in Table 2
SSSSSDFAGQTLXSTQTVQNXFKKVLKPGRLYPVPIATMGIKEPLIS

SEQ ID NO: 8697 - protein, 276 aa, Homo sapiens
  DOMAIN (29)..(72): kw TRANSCRIPTASE REVERSE II ORF2 domain identified by eMATRIX, accession number DM01354T, p-value=4.545e-13, raw score of 9.48
  misc_feature (1)...(276): Xaa = X or * as defined in Table 2
WIERDLLNCIKRLKPTTNNMLNDEIVNISPKIIKIRQGYLLSMILFGIVQKDLTRKLMQGRETKGIEIRKEVKLXKRKRIXISICRCHEXIWXVPCIKVMQKAFYDIPAKNMENEILKKQCHFKDPSSAXREKMRLICFEELYPENKITKEERDRIRRTISKLLLFPKFHLQPXNPRQVSLMLNXQANFXEFICIFQKSKIVKAILXNGQRGLKFLNIKTCYKAIEIMKVLIWHKDKKLDXWNSIQVSKVDPRVYHHLSFEKGDIEVXWGKGCSFQ

SEQ ID NO: 8698 - protein, 94 aa, Homo sapiens
  DOMAIN (64)..(94): HMG14 and HMG17 proteins domain identified by eMATRIX, accession number BL00355, p-value=5.075e-25, raw score of 5.97
RCGSQQLGRREEWQRQGSPVSRRLSARRGPQAPGTRLPRRHPARAFPAATMPKRKVSSAEGAAKEEPKRRSARLSAKPPAKVEAKPKKAAAKCR

SEQ ID NO: 8699 - protein, 150 aa, Homo sapiens
  DOMAIN (63)..(94): HMG14 and HMG17 proteins domain identified by eMATRIX, accession number BL00355, p-value=4.738e-20, raw score of 5.97
  DOMAIN (52)..(149): HMG14 and HMG17 domain identified by PFam, accession name HMG14_17, E-value=4.4e-37, PFam score of 136.6
  misc_feature (1)...(150): Xaa = X or * as defined in Table 2
EFGSQQLGRREEWQRQGSPVSRRLSARRGPQAPGTRLPRRHPARAFPAATMPKRKVSSAEGAAXLEPNSRSARLSAKPPAKGEAKPKKAAAKDKSSDKKVQTKGKRGAKGKQAEVANQETKEDLPAENGETKTEESPASDEAGEKEAKSD

SEQ ID NO: 8700 - protein, 223 aa, Homo sapiens
  DOMAIN (153)..(174): HIGH MOBILITY GROUP (HMG1/HMG2) PROTEIN SIGNATURE domain identified by eMATRIX, accession number PR00886E, p-value=9.182e- 26, raw score of 8.85
  DOMAIN (7)..(178): HMG (high mobility group) box domain identified by PFam, accession name HMG_box, E-value=8e-06, PFam score of 27.5
  misc_feature (1)...(223): Xaa = X or * as defined in Table 2
TWGKGDPKKPRGKMSSYAFFVQTCREEHKKKHPDASVNFSESFSKKCSERWKTMSAXREKGKFEDMAKADKARYEREMKTYIPPQRGRQKRKFKDSQLHPRGPPSGLLSSSCSEYRPKIKGEHPGLSIGDVAKKLGRDVGINTAADDKQPYEKKAAKLKEKYEKDIAAYRAKGKPDAAKKGVVKAEKSKKKKEEEEDEEEGDEEDEEEEEDEEDEEDEEEDER

SEQ ID NO: 8701 - protein, 74 aa, Homo sapiens
  DOMAIN (25)..(35): Fibrinogen beta and gamma chains C-terminal domain proteins domain identified by eMATRIX, accession number BL00514A, p-value= 6.885e-12, raw score of 11.68
PIRTSRVDPRVRVATRDNCCILDERFGSYCPTTCGIADFLSTYQTKVDKDLQSLEDILHQVENKTSEAKQAGDV

SEQ ID NO: 8702 - protein, 133 aa, Homo sapiens
  DOMAIN (31)..(61): Fibrinogen beta and gamma chains C-terminal domain proteins domain identified by eMATRIX, accession number BL00514G, p-value= 1.947e-37, raw score of 15.98
  DOMAIN (1)..(95): Fibrinogen beta and gamma chains, C-term domain identified by PFam, accession name fibrinogen_C, E-value=3.5e-59, PFam score of 206.7
FADDPSDKFFTSNNGMQFSTGHNDNDKFEGNCAEQDGSGWWMNKCHAGHLNGVYYQGGTYSKASTPNGYDNGIIWATWKTRWYSMKKTTMKIIPFNRLTIGEGQQHHLGGAKQVRPEHPAETEYDSLYPEDDL

SEQ ID NO: 8703 - protein, 116 aa, Homo sapiens
  misc_feature (1)...(116): Xaa = X or * as defined in Table 2
NILIKVYFNSKNDFKIFHELFFKQNYMKNMYKSVINVIDIFMNKFQSEKYPIIDKGSLNKXMLTILALKSNTTVRLIRDTAFYYVREHIINVSSKRARYWVCVGFIXASCXQPPLF

SEQ ID NO: 8704 - protein, 470 aa, Homo sapiens
  DOMAIN (217)..(254): Fibrinogen beta and gamma chains C-terminal domain proteins domain identified by eMATRIX, accession number BL00514C, p-value= 1.375e-40, raw score of 17.41
  DOMAIN (198)..(468): Fibrinogen beta and gamma chains, C-term domain identified by PFam, accession name fibrinogen_C, E-value=1.8e-48, PFam score of 169.9
  misc_feature (1)...(470): Xaa = X or * as defined in Table 2
HYKARSSGHSDIMSWSLHARNLILYFYALLFLSSTCVAYVATRDNCCILYERFGCYCPTTCGIADFLSTYQTRVDXDLQSLEDILHQVENKTSEVKQLIKAIQLTYNPDESSKPNMIDAATLKSRKMLEEIMKYEASILTHDSSIRYLQEIIXFQIIQKIVNLKEKVAQLEAQCQEPCKDTVQIHDITGKDCQDIANKGAKQSGLYFIKPLKANQQFLVYCEIDGSGNGWTVFQKRLDGSVDFKKNWIPYKEGFGHLSPTGTTEFLAGEMRKIHFDXGTQSAIPYGIXGVGTGKTWEWARNQYCRSMPLFKVVHEVDKYRFTYAYFAGGDAEDAFDGYDFGDDPSDKFFHIPIMAMQFTYLGTMDNDKVXKANCAXQQGWDPGWWDGNKCHAGHSSMGVLFTQGWALYFQKASYLPNGLWIMGIIWATWKTRWVFRXRKPTMKIIPFNRLTIGEGQQHHLGGSQTGLETF

SEQ ID NO: 8705 - protein, 175 aa, Homo sapiens
  DOMAIN (18)..(161): eIF-6 family domain identified by PFam, accession name eIF6, E-value=5.7e-54, PFam score of 192.7
GTVAACGACYWLLGLMAVRASFENNCEIGCFAKLTNTYCLVAIGGSENFYSVFEGELSDTIPVVHASIAGCRIIGRMCVGTEEILADVLKVEVFRQTVADQVLVGSYCVFSNQGGLVHPKTSIEDQDELSSLLQVPLVAGTVNRGSEVIAAGMVVNDWCAFCGLDTTSTELSVVE

SEQ ID NO: 8706 - protein, 285 aa, Homo sapiens
  DOMAIN (21)..(243): eIF-6 family domain identified by PFam, accession name eIF6, E-value=2.4e-10, PFam score of 47.2
  misc_feature (1)...(285): Xaa = X or * as defined in Table 2
GVQGTVAACGACYWLLGLMAVRASFENNCEIGCFAKLTNTYCLVAIGGSENFYSVFEGELSDTIPVVHASIAGCRIIGRMCVGNRHGLLVPNNTTDQELQHISATGLPRHSGRFRAGWKERFLSLWGNFFNHLAIDYVGLGSNQDLDKGRQEEISGQMLFKGWEVFRQTVADQVLVESYCVFSNPGRAWVPSPRPFQXRPRNELSSISFKVPLVAGTCXTKGSEVICLLGMGGEMNWCAFCGPGTPNPAQSCQVVEECLQSXNEAPALAPIANRACGNSLIDSLT

SEQ ID NO: 8707 - protein, 82 aa, Homo sapiens
  misc_feature (1)...(82): Xaa = X or * as defined in Table 2
GPLIWEWPASPEPPPLPWGKPRMQSGXYGXTPXIPKIRFPKKPFPPFPQALEPQQKGPNXAHPXEPTPAKKYSPQRVQKVPK

SEQ ID NO: 8708 - protein, 195 aa, Homo sapiens
  misc_feature (1)...(195): Xaa = X or * as defined in Table 2
SLTSDKRQWALGSMDKFKKHWICHPIKMLHLGVGPKGLSVTQQFSSQNXFPVCAFQSSQYIPLPAQKLMYSQXPVQNRCQSNQTIPVAHPMSGHQVSHHRPANNPGKEEVPGQEGKNXNKDVNNFXTGQPWTKGNLEISTWPERNLILALKVPIKAELKRSWASSNCKQTXLRHPQCDDVFISMKEQSMEKCRNF

SEQ ID NO: 8709 - protein, 368 aa, Homo sapiens
  DOMAIN (240)..(253): Glutamine synthetase proteins domain identified by eMATRIX, accession number BL00180F, p-value=6.211e-17, raw score of 10.05
  DOMAIN (17)..(366): Glutamine synthetase domain identified by PFam, accession name gln-synt, E-value=6.6e-106, PFam score of 334.2
  misc_feature (1)...(368): Xaa = X or * as defined in Table 2
NKRHPSRVYMSLPQGEKVQAMYIWIDGTGEGLRCKTRTLDSEPKCVEELPEWNFDGSSTLQSEGFQTVNMYLVPAAMFRDPFRKDPNKLVLCEVFRYNRRPAETNLRHTCKRIMDMVSNQHPWFGMEQEYTLMGTDGHPFGWPSKGFPGPQGQYLLGVGGDRSLGRDIREAHYRACFYAGTRIPGTKAGVSPLQWEFQIGPCEGIKQGGHIFWVARFILHRVCEDLGVIATFDPXRPLLGNWNGAGCHTNFSTKAMRKENGLKYIEKAIXKLTNRHKSHIRAYDPKRGLDNARRLTGFHETSNINDFSVGVANRSASIRIPRTVGQEKKGYFEDRRPSANCDPFSVTEALIRTCLLNETGDEPFQYKN

SEQ ID NO: 8710 - protein, 350 aa, Homo sapiens
  DOMAIN (172)..(239): RNA recognition motif. domain identified by PFam, accession name rrm, E-value=1.7e-07, PFam score of 38.3
APPSPPSSGCSPQPQLSALTPGTRVLAPSFASFLPSFFLPPLAPALPLQVALPGPDCLGSPLPARALPRLSLALPESPAAAVADSPREPQPNPSPTATAPAPAPAPQPAAPARGSPGARGRLQWASAPSPSPAPQPCPARRGRTGKMNNGGKAEKENTPSEANLQEEEVRTLFVSGLPLDIKPRELYLLFRPFKGYEGSLIKLTSKQPVGFVSFDSRSEAEAAKNALNGIRFDPEIPQTLRLEFAKANTKMAKNKLVGTPNPSTPLPNTVPQFIAREPYELTVPALYPSSPEVWAPYPLYPAELAPALPPPAFTYPASLHAQLCEGQTVRRSHPLSAPSPDSASLAWFPV

SEQ ID NO: 8711 - protein, 117 aa, Homo sapiens
FGTRSFDSRSEAEAAKNALNGIRFDPEIPQTLRLEFAKANTKMAKNKLVGTPNPSTPLPNTVPQFIAREPYELTVPALYPSSPEVWAPYPLYPAELAPALPPPAFTYPASLHAQETL

SEQ ID NO: 8712 - protein, 368 aa, Homo sapiens
  DOMAIN (172)..(239): RNA recognition motif. domain identified by PFam, accession name rrm, E-value=1.7e-07, PFam score of 38.3
APPSPPSSGCSPQPQLSALTPGTRVLAPSFASFLPSFFLPPLAPALPLQVALPGPDCLGSPLPARALPRLSLALPESPAAAVADSPREPQPNPSPTATAPAPAPAPQPAAPARGSPGARGRLQWASAPSPSPAPQPCPARRGRTGKMNNGGKAEKENTPSEANLQEEEVRTLFVSGLPLDIKPRELYLLFRPFKGYEGSLIKLTSKQPVGFVSFDSRSEAEAAKNALNGIRFDPEIPQTLRLEFAKANTKMAKNKLVGTPNPSTPLPNTVPQFIAREPYELTVPALYPSSPEVWAPYPLLPRRELGACFYLPPGSFTYPASLAWPRCAGSLPPRLLLRAGSPVSSAEYYTLQQWLLEGRTIALLWKYG

SEQ ID NO: 8713 - protein, 334 aa, Homo sapiens
  DOMAIN (202)..(224): Calsequestrin proteins domain identified by eMATRIX, accession number BL00863C, p-value=1.716e-09, raw score of 13.93
  DOMAIN (172)..(240): RNA recognition motif. domain identified by PFam, accession name rrm, E-value=0.039, PFam score of 17.4
  misc_feature (1)...(334): Xaa = X or * as defined in Table 2
APPSPPSSGCSPQPQLSALTPGTRVLAPSFASFLPSFFLPPLAPALPLQVALPGPDCLGSPLPARALPRLSLALPESPAAAVADSPREPQPNPSPTATAPAPAPAPQPAAPARGSPGARGRLQWASAPSPSPAPQPCPARRGRTGKMNNGGKAEKENTPSEANLQEEEVRTLFVSGLPLDIKPRELYLLFRPFKGYEGSLXKLTSKQLXGFVSFDSRSEAEAAKNALNGIRFDPEIPQTLRLEFAKANTKMAKNKLVGTPNPSTPLPNTVPQFIAREPYELTVPALYPSSPEVWAPYPLYPAELGPALPPPAFTYPASLRCPGNPVEKEIQDSV

SEQ ID NO: 8714 - protein, 223 aa, Homo sapiens
MRWLVSPIEDTGHKALLFACLALHRACVSGHCLSPKCVGVDGRSHEMVAPGLFLDWLLDGTGVWDGTSTNVEGAQEHAVLILLIITDGVISDMEETGMPWCRLPSCPCPSSSGRGQCGLRCHGVPGWGRRMLRSHTGEEAARDIVSSFPFESSATMSEEVYDPRSLYERLQEQRTGSSRTARQEAVVGSKVTVSQPGHRQETTVLEHLVQYVGFSICCKELMV

SEQ ID NO: 8715 - protein, 262 aa, Homo sapiens
  misc_feature (1)...(262): Xaa = X or * as defined in Table 2
GRTMMFGAKRRQEEWEKVRKPEDPEECPEEVYDPRSLYERLQEQKDRKQQELRGTVSNCKNMVRGLDEDETTFLDEVSRQQELIEKQPKREELERTXRNTEITSRRLEFSQENKKEVEKKLTCEVLXKPRTKFSQANVLGQELXSMKSSESGHQCEKTXNRTPEPDXQESRALILAKSLGNNLPLSGPFHPLAPSAASMYRHPPRPGWPTLGAATPSPASDSEGTIQCHRKDCSPPCFRTNTFLRGPLSFFRSLHREAPPQG

SEQ ID NO: 8716 - protein, 209 aa, Homo sapiens
  DOMAIN (44)..(66): Globins profile domain identified by eMATRIX, accession number BL01033A, p-value=2.929e-17, raw score of 16.94
  DOMAIN (22)..(96): Globin domain identified by PFam, accession name globin, E- value=2.6e-09, PFam score of 36.9
  misc_feature (1)...(209): Xaa = X or * as defined in Table 2
DTRFLERLRLSISSYVQTPMGHFTEEDKATITSLWCKVNVEDAGGETLGRLLVVYPWTQRFFDSFGNLSSASAIMGNPKVKAHGKKVLTSFGRLPXKHLDDLKGTFAQAXSELHCDKAALLDPENFKLPGEILLVTRFGQFHFRAKNFTPEGCQASWQERWVTWSWPVPCSSRLPLKLNCPXMQSFSRIRLLFLQAITNNKSISAKRSP

SEQ ID NO: 8717 - protein, 64 aa, Homo sapiens
  DOMAIN (11)..(32): MITOCHONDRIAL CARRIER PROTEIN SIGNATURE domain identified by eMATRIX, accession number PR00926C, p-value=1.750e-24, raw score of 16.07
  DOMAIN (1)..(56): Mitochondrial carrier proteins domain identified by PFam, accession name mito_carr, E-value=2e-15, PFam score of 55.8
KEQGVLSFWRGNLANVIRYFPTQALNFAFKDKYKQIFLGGVDKHTQFWRYFAGNLLPVDGRGRL

SEQ ID NO: 8718 - protein, 371 aa, Homo sapiens
  DOMAIN (268)..(309): kw TRANSCRIPTASE REVERSE II ORF2 domain identified by eMATRIX, accession number DM01354I, p-value=6.170e-34, raw score of 15.55
  DOMAIN (46)..(254): AP endonuclease family 1 domain identified by PFam, accession name AP_endonucleas1, E-value=1.8e-24, PFam score of 94.7
  misc_feature (1)...(371): Xaa = X or * as defined in Table 2
LNQWQEQTGNPERTHRPSEGSGLLLQDPGDFSNTLSAPTAEVEKGDPLPKIPPLEELKETHLTHKDSHKLKIKGWKKAFLANGHQKQTGEAILIPDKTKFKATAVKRDKEGDYIMVKGLVPQENITILNTYASNTEAPKFIKQLLIDLRNEIDSNIVIVGNFNTPVTAIDRSSKPKVNKETMDLNYTLEQMDLTDIYRTFHPTTAEYTFYSTVHETISKIDHMIGHKMSINTFKKIEIMSSTLTDHSGIKLKINSERNLQNHANTWKLNNLLLNEHWVKNEIKMEIIQLFELNNNNDTTYQNLWDTAKVVLRGKFIALNAYIKKTERAKKTIYSHTSGIXKQEQTKPKPSRRKEIIKIRAELNEIETKKTI

SEQ ID NO: 8719 - protein, 343 aa, Homo sapiens
  DOMAIN (38)..(63): Mitochondrial energy transfer proteins domain identified by eMATRIX, accession number BL00215A, p-value=7.632e-19, raw score of 15.82
  DOMAIN (32)..(119): Mitochondrial carrier proteins domain identified by PFam, accession name mito_carr, E-value=9.1e-21, PFam score of 74.1
  misc_feature (1)...(343): Xaa = X or * as defined in Table 2
ASDAFHSLSAPGLRLGSRSAARPATMTEQAISFAKDFLAGGIAAAISKTAVAPIERVKLLLQVQHASKQIAADKQYKGIVDCIVRIPKGAGGVLSFLEGQPLPTVIRYFPTQAFNFRPFKDKSYKQIFPGGAWDKHTQFWRXFGGANWASGVAAGADHPSCFVYPLDFARTGLGKGRWKSQAQSASFRGLGDCLVKIHQVQTASRGLYQGLPVSPFTATIIYPAAYYGVYDTAKGHASPTPSNTHILLSRMNRARTVTARGAVGCPNPLKTVRRRMIDAIRGAKGADIMYTGTLVDCXRKNLSEDEGGQRPFFKGCVVQTLLRGHGGRPSVLVPVRTSSRRVI

SEQ ID NO: 8720 - protein, 99 aa, Homo sapiens
  misc_feature (1)...(99): Xaa = X or * as defined in Table 2
VQWNDFGSLQNPPPGVSPFFWLSLPNNLGFKGSSSRPGPFLKFXXKPEVFRVNPDGFPFPAPXFGPPGPPKSWGFPPXPPPGVSPFFWLSLPNNLGFKG

SEQ ID NO: 8721 - protein, 575 aa, Homo sapiens
  DOMAIN (477)..(530): S-adenosyl-L-homocysteine hydrolase proteins domain identified by eMATRIX, accession number BL00738H, p-value=2.301e- 17, raw score of 23.08
  DOMAIN (54)..(458): Zinc finger, C2H2 type domain identified by PFam, accession name zf-C2H2, E-value=3.7e-56, PFam score of 200.0
GDRTDGVWWWLGLSRRYAIPFNSLEPSSLGSCPLSIGTHKALHALELTTTDIQCGKAFNSSSSFRYHERTHTGEKPYECKQCGKAFRSASLLQTHGRTHTGEKPYACKECGKPFSNFSFFQIHERMHREEKPYECKGYGKTFSLPSLFHRHERTHTGGKTYECKQCGRSFNCSSSFRYHGRTHTGEKPYECKQCGKAFRSASQLQIHGRTHTGEKPYECKQCGKAFGSASHLQMHGRTHTGEKPYECKQCGKSFGWASRLQMHGRTHTGEKPYKCKQCGKAFGWPSNLRRHGRTHTGEKPYKCNQCGKKWKDQNIEYEYQNPRRNFRSLIEGNVNEIKEDSHCGETFTQVPDDRLNFQEKKASPEAKSCDNFVCGEVGIGNSSFNMNIRGDIGHKAYEYQDYAPKPYKCQQPKKAFRYHPSFRTQERNHTGEKPYACKECGKTFISHSGIRRRMVMHSGDGPYKSSFLRSHPKVPGHGRRFAMNPTLLNKEDERGNKNVVTREHLDRMKNSCIVCNMGHSNTEIDVNVVMGNYERLERDARMTIRKKRKRYSDIRFRIMGRYTVRVEVLTAVNSE

SEQ ID NO: 8722 - protein, 1375 aa, Homo sapiens
  DOMAIN (140)..(179): PROTEIN ZINC FINGER ZINC-FINGER METAL-BINDING NU domain identified by eMATRIX, accession number PD01066, p-value=6.553e-29, raw score of 19.43
  DOMAIN (309)..(1217): Zinc finger, C2H2 type domain identified by PFam, accession name zf-C2H2, E-value=2.4e-172, PFam score of 586.0
  misc_feature (1)...(1375): Xaa = X or * as defined in Table 2
KPGNGACAGREWCDGGGAAWNWRDPGLPVGDSGVWDRVLLELLGPRSPRPLDVGGPAAGTPGVLSRPCPSTAALAPKPFCAAPRPQPDAPACAGATGGSCADFDSGVDFVRRRSSGLWGPQPPLSPVKNYTEMFQDPVAFKDVAVNFTQEEWALLDISQKNLYREVMLDTFWNLTSIGKKWKDQNIEYEYQNPRRNFRSVTEEKVNEIKEDSHCGETFTPVPDDRLNFQKKKASLKXNHVTALCVQKLAXVTHLCNMSIRGDTGHKAYEYQEYGPKPYKCQQPKNKKAFRYRPSIRTQERDHTGEKPYACKVCGKTFIFHSSIRRHMVMHSGDGTYKCKFCGKAFHSFSLYLIHERTHTGEKPYECKQCGKSFTYSATLQIHERTHTGEKPYECSKCDKAFHSSSSYHRHERSHMGEKPYQCKECGKAFAYTSSLRRHERTHSGKKPYECKQYRGRAYHMLLGLQPHKRMNSGERPYKCKICGKGFYYAKSFQTHERTLTGERRYKCKQCGKAFNLSSSFRYHERIHAGEKPYECKQCGKAFRSASQLRVHGGTHTGEKPYECKECGKAFRSTSHLRVHGRTHTGEKPYECKECGKAFRYVKPLQIHERTEKHIRMPSGERPYKCSICEKGFYSAKSFQTHKKTHTGEKPYECNQCGKAFRCCNSLRYHERTHTGEKPYECKQCGKAFRSASHLRMHERTHTGEKPYECKQCGKAFSCASNLRKHGRTHTGEKPYECKQCGKAFRSASNLQMHERTHTGEKPYECKECEKAFCKFSSFQIHERKHRGEKPYECKHCGNGFTSAKILQIHARTHIGEKHYEFLFDIMKGLTLGRNPINIHERAHTGEKPYECRECGKAFKWPISVRRHERTHSRKKPYECKHRGKVLSYLTSFQNHLGMHTGEISHKCKICGKGFYSPRSLQRHEKTHTAEKPYECKQCGKAFSSSSSFWYHERTHTGEKPYECKQCGKAFRSASILQMHAGTHPEEKPYECKQCGKAFRSAPHLRIHGRTHTGEKPYECKECGKAFRSAKNLRIHERTQTHVRMHSVERPYKCKICGKGFYSAKTHTGEKPYECKQCGKTFRSTSHLRKHGRTHTGEKPYECQECGKAFRSMKNLQSHERTQTHVRIHSGERPYKCKLCGKGFYCPKSLQRHEKTHTGEKLYECKQRCSSSFSSSSSFXYHERTHTGEKPYKCEQCGKAFRAVSILXMHGRTHPEEKPYESTRPPAMQGHKLCYAIDYVTYHCMITFILLLWPPIAQSSSRRSADSEKLKSPGKQKTHMHTQARTMAQACPTCQHVPGVIPVEGCNPQGLAPNEIWQMDVTHIAAFGCEKAIATCMPAGLLEGLPRQLMDCLIRQLMACWCASAYQCALLLACSS

SEQ ID NO: 8723 - protein, 217 aa, Homo sapiens
  misc_feature (1)...(217): Xaa = X or * as defined in Table 2
APTPTGQRVVRATPAQSAPVRLRRRSYDVNNPIPSNLKSEAKKAAKILREFTEITSRNGPDKIIPGSTVIAKAKGLANSCLLNQSPGSLVTFQRGGPGVLVARLPDGKWSSPFSALGIAGFGGGFEIGIXGIQTLVIILEFDDPCCXEAFAKGGNLTLGGNLTVAVGPLGRNLEGNVALRSSAAVFTYCKSRGLFAGVSLEGSCLIERKETNRKFYC

SEQ ID NO: 8724 - protein, 389 aa, Homo sapiens
  DOMAIN (333)..(354): NEUTROPHIL CYTOSOL FACTOR 2 SIGNATURE domain identified by eMATRIX, accession number PR00499D, p-value=6.329e-11, raw score of 10.18
  DOMAIN (333)..(389): SH3 domain identified by PFam, accession name SH3, E-value= 1.5e-19, PFam score of 78.4
  misc_feature (1)...(389): Xaa = X or * as defined in Table 2
FHVNNPIPSNLKSEAKKAAKILREFTEITSRNGPDKIIPAHVIAKAKGLAILSVIKAGFLVTARGGSGIVVARLPDGKWSAPSAIGIAGLGGGFEIGIEDTFTATYSLXALPWLPSISVECHSSFLRLPSAXHIFLHPFTVNLMVSDLVIILNYDRAVEAFAKGGNLTLGGNLTVAVGPLGRNLEGNVALRSSAAVFTYCKSRGLFAGVSLEGSCLIERKETNRKFYCQDIRAYDILFGDTPRPAQAEDLYENLDSFTEKYENEGQRINARKAAREQRKSSAKELPPKPLSRPQQSSAPVQLNSGSQSNRNEYKLYPGLSSYHERVGNFYQPIDLTALYSFEGQQPGDLNFQAGDRITVISKTDSHFDWWEGKLRGQTGIFPANYVTMN

SEQ ID NO: 8725 - protein, 78 aa, Homo sapiens
KYSLPRVTSSLWDLPTHVHSQATSPLPSWPFCPYPTHSPTLPPLGKMEQVFGKLPHPPLPLLTLSESWGETEAVFLAP

SEQ ID NO: 8726 - protein, 60 aa, Homo sapiens
  misc_feature (1)...(60): Xaa = X or * as defined in Table 2
VRVGEKLKPCFWPPEANPDPXCYLHLWILDSQTKSKPVLTSPXRPPNGILGTSVCFCTFY

SEQ ID NO: 8727 - protein, 69 aa, Homo sapiens
  DOMAIN (20)..(53): PROLINE-RICH PROTEIN 3 domain identified by eMATRIX, accession number DM00215, p-value=8.932e-09, raw score of 19.43
  misc_feature (1)...(69): Xaa = X or * as defined in Table 2
SGCKPLTFPPPXSDSPVKEDPCRSPPSHPRLPPHSLPALPFPTPNPPPPKIYTAVSRIWEMKDRCNIPI

SEQ ID NO: 8728 - protein, 398 aa, Homo sapiens
  misc_feature (1)...(398): Xaa = X or * as defined in Table 2
GNTLVTNMTEFWLISAPGEKTCQQTWEKLHAATSKNNNLAVTSKFNIPDFKGWARWDVLVGLSDELAKLGCILXEGSWLKESRLQLHGLDVLEDSKDKVQENLLANGSGLGLPYITKVPSGDMAKYPIKQSLKNISEIIAKGVTQIDNDLKSRASAYNNLKGNLQNLERKNAGSLLTRSLAEIVKKDDFVLDSEYLVTLLVVVPKLNHNDWIKQYETLAEMVVPRSSNVLSEDQDSYLCNVTLFRRRAVDDFQDTKPGENKFIVRDFQYNEEEMKADKKEMDRASTDKKKQFGPLVRWLKVNFSEAFIAWIHVKALRVFVESVLRYGLPVNLQHMIFHRNNNPFKPLRQVLHESYIHLDSSAAAIIDAPMDIPGLNLSQQEYYPYVYYKIDCNLLKFK

SEQ ID NO: 8729 - protein, 364 aa, Homo sapiens
  DOMAIN (276)..(317): kw TRANSCRIPTASE REVERSE II ORF2 domain identified by eMATRIX, accession number DM01354I, p-value=9.250e-33, raw score of 15.55
  DOMAIN (31)..(265): AP endonuclease family 1 domain identified by PFam, accession name AP_endonucleas1, E-value=4.5e-65, PFam score of 229.6
  misc_feature (1)...(364): Xaa = X or * as defined in Table 2
HRTYKTKIHLKKQKQSTQATKSRMNAVVPHISILTLNVNGLNVPLKRYRVAXWIRIYQQTICCLQETHLTPNTKDSHKLKVKGWKKAFHANGHQKQAGVAILTSDKTNFKATAVKKDKEGHYIMVKGLDQQENITILNIYAPNTGAPKFMKQLLIDVRNEIDSNTIIAGDFNTPLTALDRSSIQKVNKETMDLNYTLEQMDLKDIYRTLHPTTAEYTIYSTVHGTFSKIDYMTGHKTSLNKFKKSEIISSSLSDHSGIKLEIDSKRNHQNHANTWKLNNLLLNEHWVKNKIKMEIKTFFELNDNNGTAYQNLWDTAKAVLRGKFTALNAYIKKYERAQTDNLRSHLKELEKQQTKPKSSRRKKK

SEQ ID NO: 8730 - protein, 161 aa, Homo sapiens
PLESRRLARSSGGWAGITGTPMNIFTGPDPGPSERSAQPRVWDSTCCLKSNCWFRKVKATTPPMSSMMRQIPRMYMNAWEKVQVVTEGRQHTNEGDHEHDDAQEDEDDGWSQEGTFKGFIFLPLNLCIDAHRQDQGPNQTCNPSTLGGRGGQITRPGDRDH

SEQ ID NO: 8731 - protein, 198 aa, Homo sapiens
MGTDSRAAKALLARARTLHLQTGNLLNWGRLRKKCPSTHSEELHDCIQKTLNEWSSQINPDLVREFPDVLECTVSHAVEKINPDEREEMKVSACSVLGVAQLDSVIIASPPIEDGVNLSLEHLQPYWEELENLVQSKKIVAIGTSDLDKTQLEQLYQWAQVKPNSNQVNLASCCVMPPDLTAFAKQFDIQLLTHNDPK

SEQ ID NO: 8732 - protein, 371 aa, Homo sapiens
  misc_feature (1)...(371): Xaa = X or * as defined in Table 2
ARGCGRSSRSRSRSHRCLPFPPPPSRRPASLGPERRPGSSRAAPAASRSLSGLSRASGTASCGRPPACPPARSPLPAGPWAARAMGTDSRAAKALLARARTLHLQTGNLLNWGRLRKKCPSTHSEELHDCIQKTLNEWSSQINPDLVREFPDDLECTVSHAVEKINPDEREEMKVSAKLFIVESNSSSSTRKVQLTWACSVLGSVAQLGFLWIHWLSPPIXKDGGLIFPWEHLQPYWEGIXKNLVQRQKGLLPXGTSDLDKTQLEQLYQWAQVKPNSNQVNLASCCVMPPDLTAFAKQFDIQLLTHNDPKELAFWKASFQGRLFQGKAFPDISSGTEWGAAVGLLRYSVIVKSRGIIKSKGYILQAKRRGS

SEQ ID NO: 8733 - protein, 132 aa, Homo sapiens
SLENTVSTAISKAQNGAPSWGGYPSIHAAYQLPGTVKPLPAAVQSVQVQPSYAGGVKSLSSAEHNALLHSPGSLTPPPHKSNVSAMEELVEKVTGKVNIKKEERPPEKEKSSLAKAASPIAKENKDFPKTEE

SEQ ID NO: 8734 - protein, 763 aa, Homo sapiens
  DOMAIN (12)..(706): Zinc finger, C2H2 type domain identified by PFam, accession name zf-C2H2, E-value=1.1e-08, PFam score of 42.2
  misc_feature (1)...(763): Xaa = X or * as defined in Table 2
EMEGKEDAQKVLKCMYCGHSFESLQDLSVHMIKTKHYQKVPLKEPVPAITKLVPSTKKRALQDLAPPCSPEPAGMAAEVALSESAKDQKAANPYVTPNNRYGYQNGASYTWQFEARKAQILKCMECGSSHDTLQELTAHMMVTGHFLKVTTSASKKGKQLVLDPVVEEKIQSIPLPPTTHTRLPASSIKKQPDSPAGSTTSEEKKEPEKEKPPVAGDAEKIKEDSEDSLEKFEPSTLYPYLREEDLDDSPKGGLDILKSLENTVSTVINKAQNGAPSWGGYPSIHAAYQLPGTVKPLPAAVQSVQVQTSYAGGVKSLSSAEHNALLHSPGSLTPPPHKSNVSAMEELVEKVTGKVNIKKEERPPEKEKSSLAKAASPIAKENKDFPKTEEVSGKPQKKGPEAETWEAKKEGPLDVHTPNGTEPLKAKVTNGCNNLGIIMDHSPEPSFINPLSALQSIMNTHLGKVSKPVSPSLDPLAMLYKISNSMLDKPVYPATPVKQADAIDRYYYENSDQPIDLTKSKNKPLVSSVADSVASPLRESALMDISDMVKNLTGRLTPKSSTPSTVSEKSDADGSSFEEALDELSPVHKRKGRQSNWNPQHLLILQAQFASSLSETTEGKYIMSDLGPQERVHISKFTGLSMTTISHWLANVEVTSLRRTGGTKFLKEPGTQGHPVFFCNDCASQFRTASTYISHLETHLGFSLKDLSKLPLNQIQRQQNVXKVLTNKTLGPLGATEEDLGSTFQCKLCNRTFAKQARSQTAP

SEQ ID NO: 8735 - protein, 121 aa, Homo sapiens
  DOMAIN (37)..(65): !!!! PROTEIN ALU SUBFAMILY WARNING ENTRY NUCLEAR PHOSPHO domain identified by eMATRIX, accession number PD02454B, p-value= 4.064e-26, raw score of 11.61
  misc_feature (1)...(121): Xaa = X or * as defined in Table 2
YNTVNYKSHPEGQSMCWSMPVITATFGNPRRVDQPLRSGVQDQPGQHGKIPSLLKIQKLAGHGGACLXSQLLGRLRKENCLNSPGGGGCSEPSSRHCIPAWAIAXDTIXKIKKXKPPKMRN

SEQ ID NO: 8736 - protein, 1217 aa, Homo sapiens
  DOMAIN (574)..(591): Zinc finger C2H2 type, domain proteins. domain identified by eMATRIX, accession number BL00028, p-value=2.286e-09, raw score of 16.07
  DOMAIN (572)..(1103): Zinc finger, C2H2 type domain identified by PFam, accession name zf-C2H2, E-value=7.1e-10, PFam score of 46.2
MGDQQLYKTNHVAHGSENLFYQQPPLGVHSGLNHNYGNAVTGGGMDAPQASPISPHFPQDTRDGLGLPVGSKNLGQMDTSRQGGWGSHAGPGNHVQLRGNLANSNMMWGAPAQAEPTDGYQYTYSQASEIRTQKLTSGVLHKLDSFTQVFANQNLRIQVNNMAQVLHTQSAVMDGAPDSALRQLLSQKPMEPPAPAIPSRYQQVPQQPHPGFTGGLSKPALQVGQHPTQGHLYYDYQQPLAQVPVQGGQPLQAPQMLSQHMQQMQQHQYYPPQQQQQAGQQRISMQEIQTQPQQIRPSQPQPPPQQQQPQQLQLQQRQGSMQIPQYYQPQPMMQHLQEQQQQQMHLQPPSYHRDPHQYTPEQAHTVQLIPLGSMSQYYYQEPQQPYSHPLYQQSHLSQHQQREDSQLKTYSSDRQAQAMLSSHGDLGPPDTGMGDPASSDLTRVSSTLPHRPLLSPSGIHLNNMGPQHQQLSPSAMWPQYLLSAYCVPSIELGFENAAVNSTDLLPHPMGMVNKDLAKPDKLLKRAVRRLPQELAQMSLSGEAFGGAGLRLTLEGGQPKGAFGEQFDAKNKLTCSICLKEFKNLPALNGHMRSHGGMRASPNLKQLPPEAESLTPMVMPVSVPVKLLPPKPSSQGFTNSTVAAPSARDKPASSMSDDEMPVLTPLLEARMAPWKAEKLREKQKGAEPEALEGEEPRAEEPMGQEIPRKHQPSVPKAEEPLKTVQEKKKFRHRPEPLFIPPPPSYNPNPAASYSGATLYQSQLRSPRVLGDHLLLDPTHELPPYTPPPMLSPVRQGSGLFSNVLISGHGPGAHPQLPLTPLTPTPRVLLCRSNSIDGSNVTVTPGPGEQTVDVEPRINIGLRFQAEIPELQDISALAQDTHKATLVALEMLLLRKPVRLKCHPLANYHYADGPGSYITSGVASGKQFGNMKGHASQKSTGLGTEHCFWGQKSGSDKWTSLERKLFNKALATYSKDFIFVQKMVKSKTVAQCVEYYYTWKKIMRLGRKHRTRLAEIIDDCVTSEEEEELEEEEEEDPEEDRKSTKEEESEVPKSPEPPPVPVLAPTEGPPLQALGQPSGSFICEMPNCGAVFSSRQALNGHARIHGGTNQVTKARGAIPSGKQKPGGHPEWHEKEYYLGEMLPKWFLKLYHENIPSYISKARVFFKIKSRNAHMKTHRQQEEQQRQKAQKAAFAAEMAATIERTTGARGGAGAAVPWTS

SEQ ID NO: 8737 - protein, 56 aa, Homo sapiens
  misc_feature (1)...(56): Xaa = X or * as defined in Table 2
FFFFFLINKTKRLFTPXALQWGYPSGSCGSVSQSCKCILRGRSRATISIEAEMVDL

SEQ ID NO: 8738 - protein, 165 aa, Homo sapiens
  DOMAIN (80)..(111): Protein kinases ATP-binding region proteins domain identified by eMATRIX, accession number BL00107A, p-value=1.947e-18, raw score of 18.39
  DOMAIN (26)..(165): Eukaryotic protein kinase domain identified by PFam, accession name pkinase, E-value=2.8e-35, PFam score of 130.6
NKVLPPAASEHSDCQISKHQVQLCPPNIITLADIVKDPVSRTPALVFEHVNNTDFKQLYQTLTDYDIRFYMYEILKALDYCHSMGIMHRDVKPHNVMIDHEHRKLRLIDWGLAEFYHPGQEYNVRVASRYFKGPELLVDYQMYDYSLDTWRMGCMLASMIIQKEP

SEQ ID NO: 8739 - protein, 611 aa, Homo sapiens
  DOMAIN (217)..(248): Protein kinases ATP-binding region proteins domain identified by eMATRIX, accession number BL00107A, p-value=1.947e-18, raw score of 18.39
  DOMAIN (127)..(395): Eukaryotic protein kinase domain identified by PFam, accession name pkinase, E-value=1.2e-77, PFam score of 271.3
MRRTQPAVTGGDQIESVRRGMQAASSRKGQSQLTTSKEVGTQSYSCKELNSANSLNECGSKFSPEFPAGNPPTGYPHLALRVIASGVKFHIVTLFCLYGVVKRCIDDDYIVRDSTGIPISLRNQDDYQLVRKLGRGKYSEVFEAINITNNEKVVVKILKPVKKKKIKREIKILENLRGGPNIITLADIVKDPVQLYQTLTDYDIRFYMYEILKALDYCHSMGIMHRDVKPHNVMIDHEHRKLRLIDWGLAEFYHPGQEYNVRVASRYFKGPELLVDYQMYDYSLDMWSLGCMLASMIFRKEPFFHGHDNYDQLVRIAKVLGTEDLYDYIDKYNIELDPRFNDILGRHSRKRWERFVHSENQHLVSPEALDFLDKLLRYDHQSRLTAREAMEHPYFYTVVKDQARMGSSSMPGGSTPVSSANMMSGGWYLVLFSRDYKNVASQGRQEERKEGKKEGRTQSIGAVDCLLVAYITLLHKRFSGVILVALVEVCLSYIKMLKIYPKCRQILKTSVHCDWFRSGYTGRGLLEKVFWRAEIRRQSTGFKSKERQAQNGRDDMGTGYLVNTSGHWTQPGTRNEGNVPAGPTALDDAASSDDTSPRHYLGDAEEDNSGG

SEQ ID NO: 8740 - protein, 60 aa, Homo sapiens
LFCLGDTSLEAILGYLPTRLVETRSGEPQSDDIEASRMKRAAAKHLIERYYHQLTEGLWK

SEQ ID NO: 8741 - protein, 142 aa, Homo sapiens
GWYLVLFSRDYKNVASQGRQEERKEGKKEGRTQSIGAVDCLLVAYITLLHKRFSGVILVALVEVCLSYIKMLKIYPKCRQILKTSVHCDWFRSGYTGRGLLEKVFWRAEIRRQSTGFKSKERQAQNGRDDMGTGYLVNTSGH

SEQ ID NO: 8742 - protein, 407 aa, Homo sapiens
  DOMAIN (196)..(227): Protein kinases ATP-binding region proteins domain identified by eMATRIX, accession number BL00107A, p-value=3.000e-19, raw score of 18.39
  DOMAIN (91)..(387): Eukaryotic protein kinase domain identified by PFam, accession name pkinase, E-value=9.2e-51, PFam score of 182.1
  misc_feature (1)...(407): Xaa = X or * as defined in Table 2
FHISLFEENRVLKQGSLPPPAAFLNTVTAQISQTSKSQALSRQPCSDHVGDPVPKAGHRVYTDVNTHRPREYWEYESHVVEWGNQDDYQLVRKLGRGKYSEVFEAINITNNEKVVVKILKPVKKKKIKREIKILGGIWRGGPNIITLADIVKDPVSRTPALVFEHVNNTDFKQLYQTLTDYDIRFYMYEILKALDYCHSRGIMHRDVKPHNVMIDHEHRKLXLIDWGLAEFYHPGQEYNVRVASRYFKGPELLVDYQMYDYSLDMWSLGCMLASMIFRKEPFFHGHDNYDQFVCRMAKVLGTEDLYDYIDKYNIELDPRFNGYLGRHSRKPMGTALSNSENQHLLSSPEALDFLDKLLRYDPPSHGLLAREAMEHPYFLHCCEGPRPRNGFHLAMPGCSTPVQQRPI

SEQ ID NO: 8743 - protein, 102 aa, Homo sapiens
  DOMAIN (49)..(77): !!!! PROTEIN ALU SUBFAMILY WARNING ENTRY NUCLEAR PHOSPHO domain identified by eMATRIX, accession number PD02454B, p-value= 5.286e-19, raw score of 11.61
  misc_feature (1)...(102): Xaa = X or * as defined in Table 2
TPMLEQLGNRYLQNIACYPFRNMCTYQLGCSGSRLXSQHFGRPRQVDHLRSGVRDQPGQQGETPSLLKVQKFSWAWWRTPVISATWEAEAGEVLEPGRRRLK

SEQ ID NO: 8744 - protein, 165 aa, Homo sapiens
  DOMAIN (31)..(53): Globins profile domain identified by eMATRIX, accession number BL01033A, p-value=2.929e-17, raw score of 16.94
  DOMAIN (9)..(148): Globin domain identified by PFam, accession name globin, E- value=1e-54, PFam score of 195.2
APSPDAMGHFTEEDKATITSLWGKVNVEDAGGETLGRLLVVYPWTQRFFDSFGNLSSASAIMGNPKVKAHGKKVLTSLGDAIKHLDDLKGTFAQLSELHCDKLHVDPENFKLLGNVLVTVLAIHFGKEFTPEVQASWQTIVTGLGNALCFTKHLDFMCMMQSFKE

SEQ ID NO: 8745 - protein, 161 aa, Homo sapiens
  DOMAIN (116)..(128): Globins profile domain identified by eMATRIX, accession number BL01033B, p-value=1.000e-15, raw score of 13.81
  misc_feature (1)...(161): Xaa = X or * as defined in Table 2
SQTPMGHFTEEDQGLLSKSLWGKVLNVEKMLGRKKTPLGKGSPLVVPTPWDPKRFLXTSFGKTLSPPALLPHQWANPPKVKGHHGKEGCLTFPWEDAHKAPLDDPQRAPFAPAXSELHCDKLHVDPENFKLLGNVLVTVLAIHFGKEFTPGGCRASWAEDG

SEQ ID NO: 8746 - protein, 113 aa, Homo sapiens
RETGLPALGTCAVPLARAAPILQRLQQSPRTSLKARPKTRITGALPMDHTEGSPAEEPPAHAPSPGKFGERPPPKRLTREAMRNYLKERGDQTVLILHAKVAQKSYGNEKRFF

SEQ ID NO: 8747 - protein, 88 aa, Homo sapiens
  misc_feature (1)...(88): Xaa = X or * as defined in Table 2
MYLCLSQERIIQFQLNGRWGRRQCLNLQGQNFTSKFTECGFGGCRKAGNYVTGVGGGVWLLCSSPDISGISEEGWEMGSRXTSSGVPV

SEQ ID NO: 8748 - protein, 66 aa, Homo sapiens
CIASGTKVALFNRLRSQTVSTRYLHVEGVDDDESEGEEFTVRDGYIHYGQTVKLVCSVTGMALPRL

SEQ ID NO: 8749 - protein, 212 aa, Homo sapiens
MRSAARGPRQSCSAFNRFRAANSSSPGFGAPCGRQCWIWESLGKERAKEGKDGGLQSPRTSLKERPKTRITGALPMDHTEGLPAEEPPAHAPSPGKFGERPPPKRLTREAMRNYLKERGDQTVLILHAKVAQKSYGNEKRFFCPPPCVYLMGSGWKKKKEQMERDGCSEQESQPGAFIGIGNSDQEMQQLNTLEGKNYCTAKTLYISDSDKR

SEQ ID NO: 8750 - protein, 210 aa, Homo sapiens
GKREGAGERDQGRRRGESREGWSFGESLWKMAPVVTGKFGERPPPKRLTREAMRNYLKERGDQTVLILHAKVAQKSYGNEKRFFCPPPCVYLMGSGWKKKKEQMERDGCSEQESQPCAFIGIGNSDQEMQQLNLEGKNYCTAKTLYISDSDKRKHFMLSVKMFYGPTSDDIGVFLSKRIKVISKPSKKKQSLKNADLCIASGTKVALFNR

SEQ ID NO: 8751 - protein, 38 aa, Homo sapiens
  misc_feature (1)...(38): Xaa = X or * as defined in Table 2
NWQEKCTFQIIGGRKRMSFRIILINFFHNXDRTVCYVP

SEQ ID NO: 8752 - protein, 171 aa, Homo sapiens
IISTDKAEYTFYEGMGPVFTPVTPVPVVESLQLNAGGDVAMLELTGQNFTPNLRVWFGDVEAETMYRCEQSMLCVVPDISGFREGWRWVRQPVQVPVTLVRNDGIIYSTSLTFTYTPEPGPRPHCSAAGAILRANSSQVPPNESNTNSEGSYTNASTNSTSVTSSTATVVS

SEQ ID NO: 8753 - protein, 491 aa, Homo sapiens
  DOMAIN (232)..(288): Immunoglobulin domain identified by PFam, accession name ig, E-value=0.021, PFam score of 12.8
  misc_feature (1)...(491): Xaa = X or * as defined in Table 2
STMAWIKRKFGERPPPKRLTREAMRNYLKERGDQTVLILHAKVAQKSYGNEKRFFCPPPCVYLMGSGWKKIKLQMKCDGCSEQGSQPCAFIGIGNSDQEMQQLNLEGKNYCTAKTLYISDLDKQKHFMLSVKVFYGNSDDIGVFLSKSSKPSKKKQSLKNADLCIASGKERWALFNRLLSQTVSTRYLHVEKEGNFHASSQQWGAFFIHLLDDDGSEGEEFTVXDGYIHYGQTVKLVCSVTGMALPRLIIRKVDKQTTLLDADDPVSQLHKCAFDLEDTERKYLCLSQERIIQFQATPCPKEPNKEKINDGASWAIISTHKAKHTFYRESGPLSLAPVSCPPALSVESLKLNGGGDEPSLKLNRTEFQLPKFYKVWFGDVEAEAMYRCGESMLRVVPDVSAFXEGWRYSQQPIQVSVTLVRNDGIIYSTSLTFTYTPEAGPRPHCSVAGAILKASSSHVPPNELNTNSDGSYTNASTNSTSVTSSTPTVVS

SEQ ID NO: 8754 - protein, 103 aa, Homo sapiens
  misc_feature (1)...(103): Xaa = X or * as defined in Table 2
FFXDRAXLCPPGWSARSQHTVVSTFLGSSKFSHLGPPELPGDHRHAPPCPANFFYFSXRWGLPMLLVSNSQAQAILLPSPFQKGWDYRAWGHHTWGSYLNFNE

SEQ ID NO: 8755 - protein, 775 aa, Homo sapiens
  DOMAIN (693)..(718): Ubiquitin carboxyl-terminal hydrolases family 2 proteins domain identified by eMATRIX, accession number BL00972D, p-value= 7.677e-16, raw score of 22.55
  DOMAIN (690)..(773): Ubiquitin carboxyl-terminal hydrolase family domain identified by PFam, accession name UCH-2, E-value=8.1e-20, PFam score of 79.3
MGKKRTKGKTVPIDDSSETLEPVCRHIRKGLEQGNLKKALVNVEWNICQDCKTDNKVKDKAEEETEEKPSVWLCLKCGHQGCGRNSQEQHALKHYLTPRSEPHCLVLSLDNWSVWCYVCDNEVQYCSSNQLGQVVDYVRKQASITTPKPAEKDNGNIELENKKLEKESKNEQEREKKENMAKENPPMNSPCQITVKGLSNLGNTCFFNAVMQNLSQTPVLRELLKEVKMSGTIVKIEPPDLALTEPLEINLEPPGPLTLAMSQFLNEMQETKKGVVTPKELFSQVCKKAVRFKGYQQQDSQELLRYLLDGMRAEEHQRVSKGILKAFGNSTEKLDEELKNKVKDYEKKKSMPSFVDRIFGGELTSMIMCDQCRTSGKKSVNDKNLKKTVEDEDQDSEEEKDNDSYIKERSDIPSGTSKHLQKKAKKQAKKQAKNQRRQQKIQGKVLHLNDICTIDHPEDSEYEAEMSLQGEVNIKSNHISQEGVMHKEYCVNQKDLNGQAKMIESVTDNQKSTEEVDMKNINMDNDLEVLTSSPTRNLNGAYLTEGSNGEVDISNGFKNLNLNAALHPDEINIEILNDSHTPGTKVYEVVNEDPETAFCTLANREVFNTDECSIQHCLYQFTRNEKLRDANKLLCEVCTRRQCNGPKANIKGERKHVYTNAKKQMLISLAPPVLTLHLKRFQQNVAEENTRVLYSLYGVVEHSGTMRSGHYTAYAKARTANSHLSNLVLHGDIPQDFEMESKGQWFHISDTHVQAVPTTKVLNSQAYLLFYERIL

SEQ ID NO: 8756 - protein, 41 aa, Homo sapiens
ATSHNAAFRKLLLSRGHSGVIRRSQFVTRRKTELAAQPKGP

SEQ ID NO: 8757 - protein, 827 aa, Homo sapiens
  DOMAIN (744)..(769): Ubiquitin carboxyl-terminal hydrolases family 2 proteins domain identified by eMATRIX, accession number BL00972D, p-value= 7.677e-16, raw score of 22.55
  DOMAIN (752)..(827): Ubiquitin carboxyl-terminal hydrolase family domain identified by PFam, accession name UCH-2, E-value=2.3e-15, PFam score of 64.5
  misc_feature (1)...(827): Xaa = X or * as defined in Table 2
SANMGKKRTKGKTVPIDDSSETLEPVCRHIRKGLEQGNLKKALVNVEWNICQDCKTDNKVKDKAEEETENKPSVWLCLKCGPQGFGRNFSREQHALKHYLTPRSEPHCLVLSLDNWSVWCYVCDNEVQYCSSNQLGQVVDYVRKQASITTPKPAEKDNGNIELENKKLEKESKNEQEREKKENMAKENPPMNSPCQITVKGLSNLGNTCFFNAVMQNLSQTPVLRELLKEVKMSGTIVKIEPPDLALTEPLEINLEPPGPLTLAMSQFLNEMQETKKGVVTPKELFSQVCKKAVRFKGYQQQDSQELLRYLLDGMRAEEHQRVSKGILKAFGNSTEKLDEELKNKVKDYEKKKSMPSFVDRIFGGELTSMIMCDQCRTVSLVHESFLDLSLPVLDDQSGKKSANDTPLTKTVTYAECYSEEKYHTDCCIYXRSDISSGTRKHLQKKATKQAKKQAKNQRRQQKISGPALHLNDIRTIDHPEDSEYEAEMSLQGEVNITSNHISQEGVMHKEYCVNQKDLNGQAKMIESVTDNQKSTEEVDMKNINMDNDLEVLTSSPTRNLNGAYLTEGSNGEVDISNGFKNLNLNAALHPDEINIEILNDSHTPGTKVYEVVNEDPETAFCTLANREVFNTGECQIQHCLYQFTRNEKLRDANKLLCEVCTRRQCNGPKANIKGERKHVYTNAKKQMLISLAPPVLTLHLKRFQQAGFNLRKVNKHIKFPEILDLAPFCTLKCKNVAEENTRVLYSLYGVVEHSGTMRSGHYTAYAKARTANSHLSNLVLHGDIPQDFEMESKGQWFHISDTHVQAVPTTKVLNSQAYLLFYERIL

SEQ ID NO: 8758 - protein, 288 aa, Homo sapiens
  DOMAIN (24)..(35): Aldehyde ferredoxin oxidoreductase domain identified by eMATRIX, accession number PF01314G, p-value=8.579e-09, raw score of 7.97
  misc_feature (1)...(288): Xaa = X or * as defined in Table 2
GIWRNVHRQPQLESCEPTPACSGRACACCPVSCGWSHGQDWMVPVAGRCTRAQRCCTGGASLPTVHKSTLSSCSAPPADSAACVFIYFIIIFXRQSLNSVAQAGVQWRNLKLLQPLPPAFKAFSCLSLLCNWDYRRVPPGLANFCIFSRDGGFTMLVVRLVSNSXPCDLPASASQSAGITALSHHAWLLFFETESRSVVQAGVQWCDLGSLQAPPPGFTPFSCLSLQSSWDYRRPPPRPANFCVFLVETGFHCXPGWSRSPDLMIPPGLSLPKCWDCRRDTKHPASKF

SEQ ID NO: 8759 - protein, 446 aa, Homo sapiens
  DOMAIN (411)..(436): Serpins proteins domain identified by eMATRIX, accession number BL00284E, p-value=9.654e-18, raw score of 19.15
  DOMAIN (440)..(446): Serpins (serine protease inhibitors) domain identified by PFam, accession name serpin, E-value=0.015, PFam score of 11.3
  misc_feature (1)...(446): Xaa = X or * as defined in Table 2
SPRMHALVLLLCIGALLGHSSCQNPASPPEEGSPDPDSTGALVEEEDPFFKVPVNKLAAAVSQTSAYDLYRVRIQAXAPRPNVLPVSLFKCGPTALSALSLGKRSKRNKNPIIHRALYYDLIKQAPDIHGYLIRKLPXHGHFPPQKNLKSASRIVFEKKLRIKSSFVAPLEKSYGTRPRVLTGNPRLDLQEINNWVQAQMKGKLARSTKEIPDEISIVLLGVXAHFKGQWETKFDSRKTSLEGFLLGMKERTREGPPXLSDPKGCFYAMGLGFRFSACKICPACPLTGSMSIIFFLPLKVTQNLTLIEESLTLRSXFMTIDPRTXKTVAGGPSLSPKLKLSYEGEEHPKFLAGRXSLQSLVXFHPDFSKITGKPIKLDFRVEHPRLAFEWNEDGAGNHPPSPRGLQPAHLTFPLDYHLNQPFIFLLRDTDTGALLFIGKILDPRGP

SEQ ID NO: 8760 - protein, 38 aa, Homo sapiens
  misc_feature (1)...(38): Xaa = X or * as defined in Table 2
NWQEKCSFQIIGGRKRMSFRIILINFFHNXDRTVCYVP

SEQ ID NO: 8761 - protein, 112 aa, Homo sapiens
  DOMAIN (25)..(48): Extracellular link domain identified by PFam, accession name Xlink, E-value=2.2e-05, PFam score of 13.8
DLDLRGGQPVCRGGTQRPCYKVIYFHDTSRRLNFEEAKEACRRDGGQLVSIESEDEQKLIEKFIENLLPSDGDFWIGLRRREEKQSNSTACQDLYAWTDGSISQFRETSSSF

SEQ ID NO: 8762 - protein, 166 aa, Homo sapiens
  misc_feature (1)...(166): Xaa = X or * as defined in Table 2
GKPDPSTKKQHTIWPSPHQGNSPDLEVYNVIRKQSDVSLAETRPDLKNISFRVCSGEATPDDMSCDYDNMAVNPSESGFVTLVSVENEIYGYXDIXKTETDNNGKEMISKILLFSIRKIHRRSMNKLRSGPVDEHVVPTTSCWTPTFWLYPLSQPVIQLDLMRRYL

SEQ ID NO: 8763 - protein, 16 aa, Homo sapiens
GRSKESGWVENEIYGY

SEQ ID NO: 8764 - protein, 50 aa, Homo sapiens; identical to SEQ ID NO: 8683
  misc_feature (1)...(50): Xaa = X or * as defined in Table 2

SEQ ID NO: 8765 - protein, 25 aa, Homo sapiens
GPWTVLGAGACGGEVHFISYRPGSC

SEQ ID NO: 8766 - protein, 56 aa, Homo sapiens
  misc_feature (1)...(56): Xaa = X or * as defined in Table 2
GGAVLKNPWGGPSLPGLARXXFFPYRGAYXNLPGNFWKEPLFLGGDILGQPPFGNL

SEQ ID NO: 8767 - protein, 55 aa, Homo sapiens
  misc_feature (1)...(55): Xaa = X or * as defined in Table 2
GGAVLKDPWGGQSLPGLARKXFFPYGGPNXNLPGNFWKGPLLWGGDILGQPPYRN

SEQ ID NO: 8768 - protein, 24 aa, Homo sapiens
FFPYGEPYYNQPGDFWEGTLFLGG

SEQ ID NO: 8769 - protein, 76 aa, Homo sapiens
  misc_feature (1)...(76): Xaa = X or * as defined in Table 2
ALKQPTPQTKEERAFDPRVHAEXIPYVFEIHIRSTXKTTXNGNPTAPLPVRAPTPARVRTWPNPGHSCAGSHHSSR

SEQ ID NO: 8770 - protein, 389 aa, Homo sapiens
  DOMAIN (177)..(191): C-type lectin domain proteins domain identified by eMATRIX, accession number BL00615B, p-value=9.400e-12, raw score of 12.25
  DOMAIN (76)..(191): Lectin C-type domain identified by PFam, accession name lectin_c, E-value=1.4e-15, PFam score of 65.2
  misc_feature (1)...(389): Xaa = X or * as defined in Table 2
ERLEIGKELQLVWDEPHLTPGNDSLLPSSCCVTAASDLDLRGGQPVCRGGTQRPCYKVIYFHDTSRRLNFEEVKFSCRRDGGQLGSIESEDEQKLIEKFIENLLPSDGDFWIGLRRREEKQSNSTACQDLYAWTDGSISQFRNWYVDEPSCGSEVCVVMYHQPSAPAGIGGPYMFQWNDDRCNMKNNFICKYSDEKPAVPSRRSXGEETELTTPVLPEETQEEDAKKTFKESREAALNLAYILIPSIPLLLLLVVTTSVCWVWICRKRKREQPDPSTKKQHTIWPSPHQGNSPDLEVYNVSKKTNAKSFLSETRPDLRNISFRVCSEESPPDDMSCDYDNMAVNPSESGFVTLVSVESGFVTNDIYEFSPDQMGRSKESGWVENEIYGY

SEQ ID NO: 8771 - protein, 337 aa, Homo sapiens
  misc_feature (1)...(337): Xaa = X or * as defined in Table 2
AEALVESFWKAKQHTKEELKSLQAKDEEKNENEKAKAACSAAAMEEDSEASSSSTGDSSQGDNNLQKLGPDDVSVDTDSIRRVYTRLLSNEKIEIAFLNALVYLSPNVECDLMYHKVYSQDPNYLNLFIIVMENRNLHSPEYLEMALPLFCKAMSKLPLAAQGKLIRLWSKYNADQIRRMMETVQQLITYKVISNEFNSQNLVNDDDAIVAASKCLKMIYYANAYAVTKNLGLYYDNRIRMYSERRITVLYSLVQGQQLNPYLRLIVRCDHIIDDALVRLEMITMENPADLKQFYRGIXRRTRWVAAFWDRASEPKANSIGFGGSQLWMPTPVASYT

SEQ ID NO: 8772 - protein, 222 aa, Homo sapiens
  DOMAIN (168)..(182): F-box domain proteins domain identified by eMATRIX, accession number PF00646A, p-value=3.893e-10, raw score of 14.37
  misc_feature (1)...(222): Xaa = X or * as defined in Table 2
SPPPPPPAREMNFVRAANRRPRRVSRPRPVQQQQQQPPQQPPPQPPQQQPPHQQPSSPPQXQQQQHPPASSPPPPPLPQERNNVGERDDDVPADMVAEESGPGAQNSPYQLRRKTLLPKRTACPTKNSLEGASTSTTENFGHRAKRARVSGKSQDLSAAPAEQYLQEKLPDEVVLKIFSYLLEQDLCRAACVCKRFSELANDPNLWKRLYMEVFEYTRPMMH

SEQ ID NO: 8773 - protein, 52 aa, Homo sapiens
  DOMAIN (6)..(28): TRANSFORMING PROTEIN P21 RAS SIGNATURE domain identified by eMATRIX, accession number PR00449A, p-value=3.045e-17, raw score of 13.20
MAAIRKKLVIVGDGACGKTCLLIVFSKDQFPEVYVPTVFENYVADIEVDGKQ

SEQ ID NO: 8774 - protein, 236 aa, Homo sapiens
  DOMAIN (7)..(29): TRANSFORMING PROTEIN P21 RAS SIGNATURE domain identified by eMATRIX, accession number PR00449A, p-value=3.045e-17, raw score of 13.20
  DOMAIN (8)..(218): Ras family domain identified by PFam, accession name ras, E- value=5.5e-14, PFam score of 22.3
  misc_feature (1)...(236): Xaa = X or * as defined in Table 2
AMAAIRKKLVIVGDGACGKTCLLIVFSKDQFPEVYVPTVFENYVADIEVDGKAGRSLACGDTAGQEDYDRLRPLSXPDTDVILMCFSIDSPDSLENIPRKSWTPEVKHFCPNGGPSILVGELRRVLSGIDGATQGRGLRPRLKAGSPVETXRKGRDMGKQGLALFGYIGSCSSQRPKDWEVEEEVFXKWATESLLWQAXTLGKKKSGVPLSLVKPLLQAQPLMRLIFEVLFINLSV

SEQ ID NO: 8775 - protein, 237 aa, Homo sapiens
  DOMAIN (38)..(78): Eukaryotic DNA topoisomerase I proteins domain identified by eMATRIX, accession number BL00176D, p-value=1.931e-35, raw score of 22.74
  DOMAIN (2)..(235): Eukaryotic DNA topoisomerase I domain identified by PFam, accession name Topoisomerase_I, E-value=0.00021, PFam score of - 420.9
MREEARSRELWAGASRHVPVPVYKNLQLFMENKDPRDDLFDRLTTTSLNKHLQELMDGLTAKVFRTYNASITLQEQLRALTRGLPGGGAEAGCSGALTLGMCFACTRGPQRPVLCCPGDNLGAGAALGLWDAEELAGIQVRAPGEETPPPLREAEDSGPCLSAEDSIAAKILSYNRANRVVAILCNHQRATPSTFEKSMQNLQTKIQAKKEQVAEARAELRRARAEHKAQGDGKSRR

SEQ ID NO: 8776 - protein, 880 aa, Homo sapiens
  DOMAIN (459)..(509): Eukaryotic DNA topoisomerase I proteins domain identified by eMATRIX, accession number BL00176A, p-value=1.000e-40, raw score of 28.37
  DOMAIN (246)..(880): Eukaryotic DNA topoisomerase I domain identified by PFam, accession name Topoisomerase_I, E-value=0, PFam score of 1082.4
  misc_feature (1)...(880): Xaa = X or * as defined in Table 2
MGVTSAASGLVGSAPQCVALPSEGWTLAVWPVAACTCSGVGSSPKLTPGSFVHCPWFLLLTEATRAEIKRPFSKAELKASVRPMEGSHCWGGEARRTSQGHTEQKGELRARRQAQNEDEDVKEVWVGKTKKEESDKLGCQGAWVPPRVPSWIGRFELWVVGYWEQPAVSWQMRVVRLLRLRAALTLLGEVPRRPASRGVPGSRRTQKGSGARTDSAWRRALTVISTSPGTSRMDPVALVAVGGPRRFPGGHTLQRLPVALRTLIPADQAHQAPNSTTWLGSRAGLLALAAGLGGIRDSAAHGPLQVGGMGGYTGMGSEVRWEKEKHEDGVKWRQLEHKGPYFAPPYEPLPDGVRFFYEGRPVRLSVAAEEVATFYGRMLDHEYTTKEVFRKNFFNDWRKEMAVEEREVIKSLDKCDFTEIHRYFVDKAAARKVLSREEKQKLKEEAEKLQQEFGYCILDGHQEKIGNFKIEPPGLFRGRGDHPKMGMLKRRITPEDVVINCSRDSKIPEPPAGHQWKEVRSDNTVTWLAAWTESVQNSIKYIMLNPCSKLKGETAWQKFETARRLRGFVDEIRSQYRADWKSREMKTRQRAVALYFIDKLALRAGNEKEDGEAADTVGCCSLRVEHVQLHPEADGCQHVVEFDFLGKDCIRYYNKVPGEKPVYXNLQLFMENKDPRDDLFDRLTTTSLNKHLQELMDGLTAKVFRTYNASITLQEQLRALTRAEDSIAAKILSYNRANRVVAILCNHQRATPSTFEKSMQNLQTKIQAKKEQVAEARAELRRARAEHKAQGDGKSRSVLEKKRRLLXKLQEHLAHLSVQATDKEENKQVALGTSQLNYLDPRISIAWCKRFRVPVEKIYSKTQRERFAWALAMAGEDFEF

SEQ ID NO: 8777 - protein, 53 aa, Homo sapiens
  misc_feature (1)...(53): Xaa = X or * as defined in Table 2
KGDFTKLPCLCXSVPAFYXRSLKICCSIYLVXYMSVSVIESICYKYTVFCSRG

SEQ ID NO: 8778 - protein, 142 aa, Homo sapiens
SAAEVNIQQVSQKEAKHKITSADGHIESSALLKEKQRHRLHKFLCLTVGKPMRKTFVSQASATMQQYAQRDKKHEYWFAVPQERTDHLYAFFIQWSPEIYAEDTGEYTREPGFIVVKKIEESETIEDSSNQAAAREWEVVSV

SEQ ID NO: 8779 - protein, 212 aa, Homo sapiens
  misc_feature (1)...(212): Xaa = X or * as defined in Table 2
ISYQEGTSAIQRKXQEVTLRKXTQESESAGNDSASTAPRSTEESLSEDVFTESELSPIREELVSSDELRQDKSSGASSESVQTVNQAEVESLTVKSESTGTPGHLRSDTEHSTNEVGTLCHKTDLNNLEMAIKEDQIADNFQGISGPKEDSTSIKGNSDQDSFLHENSLHQEESQKENMPCGETAEFKQKQSVNKGKQGKEQNQDFTGQRAG

SEQ ID NO: 8780 - protein, 122 aa, Homo sapiens
  misc_feature (1)...(122): Xaa = X or * as defined in Table 2
VKNGGNEVIICHFHLTFGIYLLFFETEFCSCRPRLECNGAILAHCNLRLPGFKRFSCFSLPCCXDYRHLPPRPVKFFVVLVETGFHYLGQAGLKLLTPGDLPPPLGLPKCVSHCAQPRVSTF

SEQ ID NO: 8781 - protein, 212 aa, Homo sapiens
  DOMAIN (8)..(46): Ribosomal protein L6 proteins 2 domain identified by eMATRIX, accession number BL00700A, p-value=1.529e-10, raw score of 19.34
  misc_feature (1)...(212): Xaa = X or * as defined in Table 2
RLFSSNQTVDHSQKNVDITLKGTPQXSCKGPRGTLRRDFNHIKCGTSALLGKEKKRGFRVDKWWGSRRELGYPFGTICSHVQDHDPRGVTTGASRYQDEGPVYASPSPHPTVGLSQENGSSLLKSRNFFGVKKYIPQGFRMRPGCLLVSVSQGPRKEXINPLKGNDIXALLQIPAALIPASPTRLKTKGIRKFFGWVSMSLEKGTVQPGLIE

SEQ ID NO: 8782 - protein, 735 aa, Homo sapiens
  DOMAIN (697)..(729): HECT-domain (ubiquitin-transferase) domain identified by eMATRIX, accession number PF00632C, p-value=5.000e-22, raw score of 20.66
  DOMAIN (436)..(735): HECT-domain (ubiquitin-transferase) domain identified by PFam, accession name HECT, E-value=9.8e-78, PFam score of 271.7
SVLLEEFLSSAEALVQSFRKVKQHTKEELKSLQAKDEDKDEDEKEKAACSAAAMEEDSEASSSRIGDSSQGDNNLQKLGPDDVSVDIDAIRRVYTRLLSNEKIETAFLNALVYLSPNVECDLTYHNVYSRDPNYLNLFIIGMENRNLHSPEYLEMALPLFCKAMSKLPLAAQGKLIRLWSKYNADQIRRMMETFQQLITYKVISNEFNSRNLVNEFNSRNLVNDDDAIVAASKCLKMVYYANVVGGEVDTNHNEEDDEEPIPESSELTLQELLGEERRNKKGLRVDPLETELGVKTLDCRKPLIPFEEFINEPLNEVLEMDKDYTFFKVETENKFSFMTCPFILNAVTKNLGLYYDNRIRMYSERRITVLYSLVQGQQLNPYLRLKVRRDHIIDDALVRLEMIAMENPADLKKQLYVEFEGEQGVDEGGVSKEFFQLVVEEIFNPDIGMFTYDESTKLFWFNPSSFETEGQFTLIGIVLGLAIYNNCILDVHFPMVVYRKLMGKKGLFVDLGDSHPVLYQSLKDLLEYVGNVEDDMMITFQISQTNLFGNPMMYDLKENGDKIPITNENRKEFVNLYSDYILNKSVEKQFKAFRRGFHMVTNESPLKYLFRPEEIELLICGSRNLDFQALEETTEYDGGYTRDSVLIREFWEIVHSFTDEQKRLFLQFTTGTDRAPVGGLGKLKMIIAKNGPDTERLPTSHTCFNVLLLPEYSSKEKLKERLLKAITYAKGFGML

SEQ ID NO: 8783 - protein, 63 aa, Homo sapiens
  misc_feature (1)...(63): Xaa = X or * as defined in Table 2
MLMADIRKEERNHLCRSSRRTWTILDRAEYSDHVVLQGAGVGWGTSXSPFLYSFEIPYGAQVA

SEQ ID NO: 8784 - protein, 313 aa, Homo sapiens
HPQIFVPGQESFNDRILKQPVEGLVVLREHERHSPSLRLHLEATQRLRHPGLLRLRGELLLWLIIRFIQTLPLPFAAKGPTRGAGIYPRGKQPVEGLVVLREHERHSPSLRLHLEATQRLCHPGLLRLRGELLLWLIIRFIQTLPLPFAAKGPTWGAGIYPRGKQPVEGLVVLREHERHSPSLRLHLEATQRLCHPGLLRLRGELLLWLIIRFIQTLPLPFAAKGPTWGAGIYPRGKQPVEGLVVLREHERHSPSLRLHLEATQRLCHPGLPQAQGRAPSLAHHQIHPNTPSSFCSQGTYAGGWDLPQGQAAC

SEQ ID NO: 8785 - protein, 10 aa, Homo sapiens
MGLWLFEHIY

SEQ ID NO: 8786 - protein, 65 aa, Homo sapiens
PSVPVMPLLEPEGQEEPLSDSPVPETSVPVLLFHERQGLGFPGGVGGEHRTQGRCGFSAGTLFQC

SEQ ID NO: 8787 - protein, 34 aa, Homo sapiens
  misc_feature (1)...(34): Xaa = X or * as defined in Table 2
VFFLFGGDGVSLCHPGWSAVAXTQEAEEPFVQII

SEQ ID NO: 8788 - protein, 111 aa, Homo sapiens
  misc_feature (1)...(111): Xaa = X or * as defined in Table 2
CSQDGGLRWDLVRHPQTFVPGQESFNDRILKQPVEGLVVLREHERHSPSLPASSXGHTASPPPRSPQAQGRAPSVAPPPTTPQICPTTPSSFSSKRTYAGGWDLPQGQADC

SEQ ID NO: 8789 - protein, 803 aa, Homo sapiens
  misc_feature (1)...(803): Xaa = X or * as defined in Table 2
MNDDIRDSDLPDWRDRTPCVQKKAMDRTKTRFRKRGQITGKITTSRQPHPQNEQSLQRSTSGYPLQEVVDDEVLGPSAPGVDPSPPCRSLGWKRKKEWSDESEEEPEKELAPEPEETWVVEMLCGLKMKLKQQRVSPILPEHHKDFNSQLAPGVDPSPPHRSFCWKRKREWWDESEESLEEEPRKVLAPEPEEIWVAEMLCGLKMKLKRRRVSLVLPEHHEAFNRLLEDPVIKRFLAWDKDLRVSDKIPSEPTIHGSITQNPSSGFSDLHPTFEYPSIPQFPNEYSHPNTEGGCQSXARDSPLPSVSGKLTSAGGLSWWCPXAPTXFLSSATWPMTWRRTTRTPNKTSSTSCMGRPALAYPWSVTVGSSYAVAXTPCVQKKAMDRTKTRFRKRGQITGKITTSRQPHPQNEQSLQRSTSGYPLQEVVDDEVLGPSAPGVDPSPPCRSLGWKRKKEWSDESEEEPEKELAPEPEETWVVEMLCGLKMKLKQQRVSPILPEHHKDFNSQLAPGVDPSPPHRSFCWKRKREWWDESEESLEEEPRKVLAPEPEEIWVAEMLCGLKMKLKRRRVSLVLPEHHEAFNRLLEDPVIKRFLAWDKDLRVSDKIPSEPTILGASPKTLPLASQICIRPSNTPPSRNFQMSTVTPTLRVGASPELGTVPYLPLWEADLSRRPLLVVPLSTNLISVLSYLANDMEEDDEDPKQNIFYFLYGKTRSRIPLVRNRRFQLCRCLNPRARKNRSQIALFQKLRFQFFCSMSGRAWVSREELEENTGPRGDVDFQQELYSNANGRQQERGEEPFVQII

SEQ ID NO: 8790 - protein, 168 aa, Homo sapiens
  misc_feature (1)...(168): Xaa = X or * as defined in Table 2
LEPTLTEQGYARAVLPIQEVEDVLFGVLVVLLHVIGQVESQEEMNALVLPGGEAGPAEIRYDHSQEILVRHPQIFVPGQESFNDRILKQPVEGLVVLREHERHSPSLPASSXGHTASPPPRSPQAQGRAPSVAPPPTTPQIGPTTPSSFSSKRTYAGGWDLPQGQADC

SEQ ID NO: 8791 - protein, 622 aa, Homo sapiens
MDSPTPHDPAAPLLVTVLESVQKKTKDRTETSFGEIGQILGKIMTSHQPQPQEEQSPQRSTSGYPLQEVVDDEVSGPSAPGVDPSPPRRSLGCKRKRECLDESDDEPEKELAPEPEETWVAETLCGLKMKAKRRRVSLVLPEYYEAFNRLLAPGVDPSPPRRSLGCKRKRECLDESDDEPEKELAPEPEETWVAETLCGLKMKAKRRRVSLVLPEYYEAFNRLLAPGVDPSPPRRSLGCKRKRECLDESDDEPEKELAPEPEETWVAETLCGLKMKAKRRRVSLVLPEYYEAFNRLLAPGVDPSPPRRSLGCKRKRECLDESDDEPEKELAPEPEETWVAETLCGLKMKAKRRRVSLVLPEYYEAFNRLLAPGVDPSPPRRSLGCKRKRECLDESDDEPEKELAPEPEETWVAETLCGLKMKAKRRRVSLVLPEYYEAFNRLLEDPVIKRFLAWDKDLRVSDKIPSEPTILGASPKTLPPASRICIRPSNTPPPRNFHMSTVTPMLSYLANDMEEDDEAPKQKIFYFLYGKTHSHIPLRPKHWFQLCRPMNPRARKNCSQIALFQKRRFQFFCSMRCRAWVSPEELEENTGPRGDVDFQQELYSSANGRHQEGGEEPFVQII

SEQ ID NO: 8792 - protein, 269 aa, Homo sapiens
  misc_feature (1)...(269): Xaa = X or * as defined in Table 2
WTDFRSIGLMALAGSVLEFSARSKDATPDPPLGTGKVPSTAPTGAPPPGLPTAAFDVVLHPFRAGRKKYFPSLLFAXWLCQRSSPXRGADPVIGLYLVHRGGACQTPTLGNRQTPRLGIHARPRRRATTSLLTLLLAFGKNAVRCALIGPGSLTSRTRPLTEPLGEKERREVFFPPRPERVEHNVESSRWEPRRRGACGSRGGNFPSPRGGSGVASLERAENSSTEPAKAIKPIDRKSVHQICSGPVVPSLRPNAVKELVENSLDAGAH

SEQ ID NO: 8793 - protein, 728 aa, Homo sapiens
MAGKASESWRKVKDTSCMAVTRENEKDAKAETPDKTIRSRETYYHKNSMWETAPMIQIISQGVTPTTHENYGSTIQDEIWCLTNFCLDDMLSFVLESCTNHCAYCLNVWYRKRAAAKHLIERYYHQLTEGCGNEACTNEFCASCPTFLRMDNNAAAIKALELYKINAKLCDPHPSKKGASSAYLENSKGAPNNSCSEIKMNKKGARIDFKDVTYLTEEKVYEILELCREREDYSPLIRVIGRVFSSAEALVQSFRKVKQHTKEELKSLQAKDEDKDEDEKEKAACSAAAMEEDSEASSSRIGDSSQGDNNLQKLGPDDVSVDIDAIRRVYTRLLSNEKIETAFLNALVYLSPNVECDLTYHNVYSRDPNYLNLFIIVMENRNLHSPEYLEMALPLFCKAMSKLPLAAQGKLIRLWSKYNADQIRRMMETFQQLITYKVISNEFNSRNLVNDDDAIVAASKCLKMVYYANVVGGEVDTNHNEEDDEEPIPESSELTLQELLGEERRNKKGPRVDPLETELGVKTLDCRKPLIPFEEFINEPLNEVLEMDKDYTFFKVETENKFSFMTCPFILNAVTKNLGLYYDNRIRMYSERRITVLYSLVQGQQLNPYLRLKVRRDHIIDDALVRLEMIAMENPADLKKQLYVEFEGEQGVDEGGVSKEFFQLVVEEIFNPDIGMFTYDESTKLFWFNPSSFETEGQFTPIGIVLGLAIYNNCILDVHFPHGLSTGS

SEQ ID NO: 8794 - protein, 155 aa, Homo sapiens
  misc_feature (1)...(155): Xaa = X or * as defined in Table 2
RKTIEEKADPKLQGFFVCLFVLETESCSASQAGMEWPNLNSLQPPPPGFTQFLCSQPPEXLGLTGVPPHQAHFCIFSRDGASPCXPGWSPTPGLKRSTCFSLLKCWDYRHEPPRLAYFLLFNRDEGLAMLPRPVSNSWPQVILLLWPPSVLGFQA

SEQ ID NO: 8795 - protein, 99 aa, Homo sapiens
LLPPPPMPLRCPFQTLRASRVKEANSLPTGPAGVGRPNCPGSPTQTMTLLPVQSRPRQGPGMEHMLRAMGVRAKATEQDAEEPRLGPVLPEHEPLGAGA

SEQ ID NO: 8796 - protein, 120 aa, Homo sapiens
  DOMAIN (14)..(42): !!!! PROTEIN ALU SUBFAMILY WARNING ENTRY NUCLEAR PHOSPHO domain identified by eMATRIX, accession number PD02454B, p-value= 1.563e-25, raw score of 11.61
  misc_feature (1)...(120): Xaa = X or * as defined in Table 2
SQHFGKLRQEDHLRSGVREQPGQHGKTPYLLKIQKLAGHGGMCLYSQLLMRLRQENGVNPGGGACNEPRLRHCTPAWVTEQDSVSKKKTVHKKKLNWGSHVRGETXRTSPCVALDTAHPL

SEQ ID NO: 8797 - protein, 183 aa, Homo sapiens
  misc_feature (1)...(183): Xaa = X or * as defined in Table 2
IFFFFFFKMESCSVAQAGVQWRDLGSLQAPPRGFTPFSCLSLPSSWDYRRPLPRPANFFYFXXRRGFTVLATMVSISXPHDLPTLASQNAGITGVSHHTQPVYALFFSFETEFCSVAQAGGQWRDLGSPQPPPPRFKQFSHLSLPSSWDYRHAPPSLANFFCIFSRDRVSPSWSGWSRTPDLR

SEQ ID NO: 8798 - protein, 257 aa, Homo sapiens
  DOMAIN (92)..(126): IMMUNOGLOBULIN V REGION domain identified by eMATRIX, accession number DM00031B, p-value=1.570e-09, raw score of 15.41
  DOMAIN (48)..(129): Immunoglobulin domain identified by PFam, accession name ig, E-value=5.2e-05, PFam score of 21.2
  misc_feature (1)...(257): Xaa = X or * as defined in Table 2
CWGLRRQRSQDVTTMAWALLILTLLTQGTGSWAQSALTQPPSASGSLGQSVTFSCSGTSSDIGNYNYVSWYRQHPGKAPKLMIYEVTKRPSGVPERFSGSKSGNTASLTVSGLQSEDEGDYYCCSMARHHSVGWVFGGGTQVDPSLGQPKRAALGSLCFPPSLGEASSQPRPTLVCVISDFLPGKPXTVAXKADSSPVKAGVETTPTPSKQSNNNYAATSYLTLTPEPLKVPQEATACRVTPEGGTLEKTVAPTECS

SEQ ID NO: 8799 - protein, 143 aa, Homo sapiens
NETQPKACREQNMEGDFSVCRNCKRHTVSANFTLHEAYCLRFLVLCPECEEPVPKETMEEHCKLEHQQAYGSGIGKRFWFQERLAVLLRSVKRGCEKGRSWKAVRWSPVSRLSMSIPPGAPDLSLWRYSSSGSRCQHKTGLTT

SEQ ID NO: 8800 - protein, 347 aa, Homo sapiens
  DOMAIN (53)..(130): TRAF-type zinc finger domain identified by PFam, accession name zf-TRAF, E-value=3.7e-24, PFam score of 93.7
  misc_feature (1)...(347): Xaa = X or * as defined in Table 2
SCGLGHRKTFSFVSLPARNETQPKACREQNMEGDFSVCRNCXRHVVSANFTLHEAYCLRFLVLCPECEEPVPKETMEEHCKLEHQQVGCTMCQQIMHKSSLEFHKANECQERPVECKFCKLDMQLSKLELHESYCGSRTELCQGCGQFIMHRMLAQRRDVCRSEQAQLGKGERISAPEREIYCHYCNQMIPENKYFHHMGKCCPDSEFKKHFPVGNPEILPSSLPSQAAENQTSTMEKDVRPKTRSINRFPLHSESSSKKAPRSKNKTLDPLLMSEPKPRTSSPRGDKAAYDILRRCSQCGILLPLPILNQHQEKCRWLASSKRKTSEKFQLDLEKERYYKFKRFHF

SEQ ID NO: 8801 - protein, 81 aa, Homo sapiens
  misc_feature (1)...(81): Xaa = X or * as defined in Table 2
KQQKTSFSSLPRRVNCNSHLVLLRCDFKNCNLAFETKICQFIIKSTXEYMFGFIFLCFFLLYNIPFHICGPRVKSSFCYRH

SEQ ID NO: 8802 - protein, 48 aa, Homo sapiens
HYNDSILQIDMVHRNKSEGFFLDASRHILEAPQHGLERRHLEANQNVH

SEQ ID NO: 8803 - protein, 129 aa, Homo sapiens
WEEIQELNEVARHRPRSTLVMGIQQENRQIRELQQENKELRTSLEEHQSALELIMSKYREQMFRLLMASKKDDPGIIMKLKEQHSKELQAHVDQITEMAAVMRKPLKLTSNRVARNKNEYFNLNKKTKA

SEQ ID NO: 8804 - protein, 83 aa, Homo sapiens
  misc_feature (1)...(83): Xaa = X or * as defined in Table 2
FCGLLLLHPVSADFXPAELINTQEPQERCQLDTGESSRVQHTLPSCPVQCGGTAELSRNVMIGASELKCLHPSPKLEYILPGN

SEQ ID NO: 8805 - protein, 76 aa, Homo sapiens
  misc_feature (1)...(76): Xaa = X or * as defined in Table 2
MHFLKAGRGGSRLXSQHFGRPRWADHERSGDRDNRGXHGETPSLLKNTKKNXPGTVAGALVASTREAEAGEWREPG

SEQ ID NO: 8806 - protein, 132 aa, Homo sapiens
  misc_feature (1)...(132): Xaa = X or * as defined in Table 2
NSIMEEIQELNEVARHRPRSTLVMGIQQENRQIRELQQENKELRTSLEEHQSGLGNLXXAKYREQMLRLLMASKKDDPGIIMKLKEQHSYDXHWYIVTSPKDSSLMHLDTSLKHLNMDWREGTWKQIRMYTK

SEQ ID NO: 8807 - protein, 69 aa, Homo sapiens
  misc_feature (1)...(69): Xaa = X or * as defined in Table 2
CPPPLFFFETEFRSCCPGWSNSSLHRPPPGFKQFILNFLGXKPSYPYLFAQSCARMCVCVCVCIIFTET

SEQ ID NO: 8808 - protein, 122 aa, Homo sapiens
RDNTSPISVILVSSGSRGNKLLFRYPFQRSQEHPASQTRFSDVILATILATKSEMCGQKFELKIDNVRFVGHPTLLQHALGQISKTDPSPKREAPTMILFNVVFALRANADPSVINCLHNLS

SEQ ID NO: 8809 - protein, 151 aa, Homo sapiens
  DOMAIN (32)..(63): 5 kw T4 5510 METHYLCYTOSINE TRANSCRIPTASE. domain identified by eMATRIX, accession number DM01235, p-value=6.932e-09, raw score of 20.29
RCQYSTREAKLILALQDEVSAMADGNEGPQSPFHHILPKCKLARDLKEAYDSLCTSGVVRLHINSWLEVSFCLPHKIHYAASSLIPPEAIERSLKAIRPYHALLLLSDEKSLLGELPIDCSPALVRVIKTTSAVKNLQQLAQDALLPPRLP

SEQ ID NO: 8810 - protein, 156 aa, Homo sapiens
LSPNASVCLYSPLAEQFSHQFPSHDLPSVLAKFSLPVSLSEFRNPLAPAVQETQLIQMVVWMLQRRLLIQLHTYVCLMASPSEEEPRPREDDVPSMDNSSAELLPSGDSPLNQRMTENLLASLSEHERAAILSVPAAQNPEDLRMFARLLHYFRGR

SEQ ID NO: 8811 - protein, 38 aa, Homo sapiens
NENTRRSQLLMLFDKFRSVLVVTTHEDPVIAVFQALLP

SEQ ID NO: 8812 - protein, 224 aa, Homo sapiens
  misc_feature (1)...(224): Xaa = X or * as defined in Table 2
DADSRFSEVFLATILATQFEMCGQKFELKIDNVRFVGHPTLHRHALGQISKTDPSPKREAPTMILFNVGFALRANADPSVINCLHNLSRRIATVLQHEERRCQYLTREAKLILALQDEVSAMADGNEGPQSPFHHILPKCKLARDPQLWLPNQQRXHDPHQPQHGQLQRRATSQRGLATEPEDDGEPAGQPVGAXTRSHPQCTRSPEPXGPPHVCQAPSLLPRP

SEQ ID NO: 8813 - protein, 38 aa, Homo sapiens
TWALKDAASPRDRSPGRPPSSVEMPTRAARTGGKRRNT

SEQ ID NO: 8814 - protein, 99 aa, Homo sapiens
LEHSVYGPLLVASLAFNNQLLFRLVAKSEVNSQQCFFNKGLKRFMYNENTRRSKLLMLFDKFRSVLVVTTHEDPVIAVFKALLPWAPGGGRKAARPGNH

SEQ ID NO: 8815 - protein, 50 aa, Homo sapiens
  misc_feature (1)...(50): Xaa = X or * as defined in Table 2
GRHHLEEEIMYNENTRGSQLLMLFXQSFAACWMVTTHEDPVIAVFQALLP

SEQ ID NO: 8816 - protein, 140 aa, Homo sapiens
  DOMAIN (31)..(76): Heat shock hsp90 proteins family proteins domain identified by eMATRIX, accession number BL00298A, p-value=6.360e-14, raw score of 10.97
  DOMAIN (31)..(140): Hsp90 protein domain identified by PFam, accession name HSP90, E-value=4.5e-27, PFam score of 103.4
  misc_feature (1)...(140): Xaa = X or * as defined in Table 2
PAWLSRFTCAATYIKMPEEXETHYQPMEEEEADTFTYEAKMAPLMLXIINTFYSSKEISLRELISNSSDAKXLINPQSDFGFRVNLLGVLNAXINIFCXQALDKIRYESLTDPIKLDSGKELHINLIPNKQDRTLTIVDT

SEQ ID NO: 8817 - protein, 618 aa, Homo sapiens
  DOMAIN (229)..(260): 5 kw T4 5510 METHYLCYTOSINE TRANSCRIPTASE. domain identified by eMATRIX, accession number DM01235, p-value=6.932e-09, raw score of 20.29
  misc_feature (1)...(618): Xaa = X or * as defined in Table 2
FRGTWAPSASGSVLLRLPPPPAPSSSGPLRPRPRPHGGMRDNTSPISVILVSSGSRGNKLLFRYPFQRSQEHPASQTSKPRSRYAASNTGDHADEQDGDSRFSDVILATILATKSEMCGQKFELKIDNVRFVGHPTLLQHALGQISKTDPSPDEGKAPTMILFXCWLFALRANADPSVINCLHNLSRRIATVLQHEERRCQYLTREAKLILALQDEVSAMADGNEDPKPPFHHILPKCKLARDLKEAYDSLCTSGVVRLHINSWLEVSFCLPHKIHYAASSLIPPEAIERSLKAIRPYHALLLLSDEKSLLGELPIDCSPALVRVIKTTSACERTCRQLAQDADLALLQVFQLAAHLVYWGKAIIIYPLCENNVYMLSPNASVCLYSPAGPSSSSHQFPFSWTWPSVLAKFSLPVFLCQNFRNPLAPRCARRTQLHIQMVVWMLQRRLLIQLHTYVCLMASPSEEEPRPREDDVPFTARVGGRSLSTPNALSFGSPTSSDDMTLTKPQAWTTPSAELLPSGDSPLNQRMTENLFAPSLSEHERAAILSVPAAQNPEDKNMFARGILHYFRGRHHLEEIMYNENTRRSQLLMLFDKFRSVLVVTTHEDPVIAVFQALLP

SEQ ID NO: 8818 - protein, 202 aa, Homo sapiens
  misc_feature (1)...(202): Xaa = X or * as defined in Table 2
PLKRSDGCNDGRPTRPPTRPDTTVFTSNLKQTRMVHLTPVEKSAVTALWGQAXTWMKVGGKALGKRCWVVLPWDPKRSFEVLWGNLSQLPDAVNGANPXRXKASMAKEKVLGCPLSEWPLAHLDNLKGHPLPHTEVNLNCDKLHRGSLKNFRLLGQTCLVCVPGPINFWQKNSTPTSCKACLIKKSWLAWCWLNALGPTSIT

SEQ ID NO: 8819 - protein, 108 aa, Homo sapiens
  DOMAIN (15)..(43): !!!! PROTEIN ALU SUBFAMILY WARNING ENTRY NUCLEAR PHOSPHO domain identified by eMATRIX, accession number PD02454B, p-value= 9.250e-25, raw score of 11.61
  misc_feature (1)...(108): Xaa = X or * as defined in Table 2
SPALWEAYDGWITLRSGVQDQSGQHGEMPSLLKIQKLAGHDGECLXSQLLRRLRRENHLNLGGRGCSELRSRYCIPAWAPEIAPLHSSLGDLNKTLSQKKTKTVSFYI

SEQ ID NO: 8820 - protein, 117 aa, Homo sapiens
  misc_feature (1)...(117): Xaa = X or * as defined in Table 2
SPPPPPRTTRWWPLRRPRLSLGTRAASLRFSSRKPCQNKPDYGLRSEKFRXSRKAXGRQRPPREKFPLPFPKKPIEPGEAKPGEIVNGSVRPPNMPLYIPTSIALPYFTFLLAVLTL

SEQ ID NO: 8821 - protein, 121 aa, Homo sapiens
  misc_feature (1)...(121): Xaa = X or * as defined in Table 2
NSYIYMCIYSYINTIYIHIYLESNISLPLNIYISTPTHIYXRHTVXVHTKAYVHMLXHVYIHFCLCVHKSFKGTIYRDASFLESCSKVNTECHKLRKVKRKYSRIHHTGIHQSSFIMRKMS

SEQ ID NO: 8822 - protein, 482 aa, Homo sapiens
  DOMAIN (67)..(94): Insulinase family zinc-binding region proteins. domain identified by eMATRIX, accession number BL00143A, p-value=7.120e- 13, raw score of 20.91
  DOMAIN (50)..(214): Insulinase (Peptidase family M16) domain identified by PFam, accession name Peptidase_M16, E-value=0.0038, PFam score of -6.2
  misc_feature (1)...(482): Xaa = X or * as defined in Table 2
IMKHTNPEPGSFSRFYSLKVAPKVKATAAPAGAPPQPQDLEFTKLPNGLVIASLENYSPVSRIGLFIKAGSRYEDFSNLGTTHLLRLYIQSXRTKGASSFQDNPVGIGRQLGGQIKCXPQQGENMGLYWWECLRGDVDILMEFLLIVTTAPEFRSLGKXVNLQPQLKIDKAVAFQNPQTHAIGNLHAAAYTGNALANPLYCPDYRIGKVTSEELHYFVQNHFTSARMALIGLGVSHPVLKQVAEQFLNMRGGVGLSGWQRANYRGGEIREQNGDSLVHAAFVAKSAVAGSAKPNAFSVLQHVLGAGATMSRGAATTTSHLHQAVSQATQQPFDVSAFNARYSDLGLFGIYTISQGHQLAGDCIKAAYNQVKPIRSKKPFFPTQGVSAAKNKGXKAGIPLMVQWKSFLKCSPGRKSGSPGLLVGLVPYMPTHPTVPSSQMDSSGLMLDIINARAKKFVFWARSSMGSKFGKFGDITPFCLMEL

SEQ ID NO: 8823 - protein, 122 aa, Homo sapiens
  DOMAIN (39)..(72): Sulfotransferase proteins domain identified by eMATRIX, accession number PF00685A, p-value=8.200e-11, raw score of 19.12
  DOMAIN (19)..(122): Sulfotransferase proteins domain identified by PFam, accession name Sulfotransfer, E-value=1.3e-05, PFam score of -99.0
DTMALTSDLGKQIKLKEVEGTLLQPATVDNWSQIQSFEAKPDDLLICTYPKAASGTTWIQEIVDMIEQNGDVEKCQRAIIQHRHPFIEWARPPQPSVLVLRRCFLLSYFKGVEKAKAMPSPR

SEQ ID NO: 8824 - protein, 89 aa, Homo sapiens
CSAGGPWRAPQPRRFHRRRRPAQLPPPLPLPPLPASPRIHNRTFPRPSQRTPPPAALGCPEPGSRSQGRGHARPPGSGEGDPTVSSPGY

SEQ ID NO: 8825 - protein, 420 aa, Homo sapiens
  DOMAIN (277)..(323): Sulfotransferase proteins domain identified by eMATRIX, accession number PF00685C, p-value=2.125e-36, raw score of 26.03
  DOMAIN (17)..(408): Sulfotransferase proteins domain identified by PFam, accession name Sulfotransfer, E-value=5.3e-166, PFam score of 564.9
MALTSDLGKQIKLKEVEGTLLQPATVDNWSQIQSFEAKPDDLLICTYPKAGTTWIQEIVDMIEQNGDVEKCQRAIIQHRHPFIEWARPPQPSAPLAPLAFEEEKMVTSYCPMEETNADDITTSMEGYWQGEGNMANEPFLELVGLGMGPAAWAVSCTLSTLCFSTLSLSNHRGIPGGICRCVINRKDLHNVQATMSPAVKVLGETLEECFLLSYFKGVEKAKAMPSPRILKTHLSTQLLPPSFWENNCKFLYVARNAKDCMVSYYHFQRMNHMLPDPGTWEEYFETFINGKVVWGSWFDHVKGWWEMKDRHQILFLFYEDIKRDPKHEIRKVMQFMGKKVDETVLDKIVQETSFEKMKENPMTNRSTVSKSILDQSISSFMRKGTVGDWKNHFTVAQNERFDEIYRRKMEGTSINFCMEL

SEQ ID NO: 8826 - protein, 303 aa, Homo sapiens
  DOMAIN (158)..(204): Sulfotransferase proteins domain identified by eMATRIX, accession number PF00685C, p-value=4.892e-33, raw score of 26.03
  DOMAIN (20)..(303): Sulfotransferase proteins domain identified by PFam, accession name Sulfotransfer, E-value=3.1e-79, PFam score of 276.6
  misc_feature (1)...(303): Xaa = X or * as defined in Table 2
DTMALTSDLGKQIKLEREVEGTLLQPATVDNWSQIQSFEAKPDDLLICTYPKAGTTWIQEIVDMIEQNGDVEKCQRAIIQHRHPFIEWARPPQPSGVEKAKAMPSPRILKTSPFHFSWLPPSFWENNCKFLFMLASEIAKDCMVSXYHFQRMNHMLPDPVTWKEYFETFINGKVFWGSWFDHVKGWWEMKDRHQILFLFYEDIKRDPKHEIRKVMQFMGKKVEXTVLDKIVQETSFEKIKENPMTNRSTVSKSILDQSIFPPFMRKGTVGDWENHFTVAQNERFDEIYRRKMEGTSINFCMEL

SEQ ID NO: 8827 - protein, 214 aa, Homo sapiens
  DOMAIN (85)..(137): Tubulin subunits alpha beta, and gamma proteins. domain identified by eMATRIX, accession number BL00227C, p-value=1.000e- 40, raw score of 25.48
  DOMAIN (1)..(196): Tubulin/FtsZ family domain identified by PFam, accession name tubulin, E-value=1e-96, PFam score of 334.7
  misc_feature (1)...(214): Xaa = X or * as defined in Table 2
HGIQAHGQIPSYKTIGGRDDSFHTFFSETGAGKHVPRLLLXNWKPTVMDEVRTGTYCQLFHLEQFITARKIAANNYARGHYTIGKEIIDLVLDRIRKLADQCTGLQGFLVFHSFGGGTGSGFTSLLMERLSVDYGKKSKLEFSIYPAPQVSTAVVEPYNSILTTHTTLEHSDCAFMEEGEFSEAREDMAALEKDYEEVGVDSVEGEGEEEGEEY

SEQ ID NO: 8828 - protein, 477 aa, Homo sapiens
  DOMAIN (57)..(112): Tubulin subunits alpha beta, and gamma proteins. domain identified by eMATRIX, accession number BL00227B, p-value=1.000e- 40, raw score of 19.29
  DOMAIN (5)..(463): Tubulin/FtsZ family domain identified by PFam, accession name tubulin, E-value=6.4e-168, PFam score of 571.3
  misc_feature (1)...(477): Xaa = X or * as defined in Table 2
SLATMRECISIHVGQAGVQIGNACWELYCLEHGIQPDGQMTQVTRPLGGGDDSFNTFFSETGAGKHVPRAVFVDLEPTVIDEVRTGTYRQLFHPEQLITGKEDAANNYARGNYTIGKEIIDLVLDRIRKLADQCTGLQGFLVFHSFGGGTGSGFTSLLMERLSVDYCKKSKLEFSIYPAPQVCTAVVEPYNYILTDHTTLEHSDCAFMVDNEAIYDICRRNLDIERPTYTNLNRLISQIVSSITASLRFDGALNFTLTNFGTKLVPFPRIPLPFCPIMPPVHFAXERPPMNSFSVREITQMLCFEPSPTRLVKCDPRPWVKSWPCCLVATGGDVVPKRCQMLPIAHPSKPKRTIQFVDWCPTGFKVGINYQPPHWVPGGNLAKVTREAVCMLSKHHSPFAEAWARPGPTSFDLMLCQACPFVHWYLGEGMEEGEFSEGRERXGCPFRKDYEKVGVDSVEGEGEEEGKGILIIHSLFG

SEQ ID NO: 8829 - protein, 489 aa, Homo sapiens
  DOMAIN (73)..(128): Tubulin subunits alpha beta, and gamma proteins. domain identified by eMATRIX, accession number BL00227B, p-value=1.000e- 40, raw score of 19.29
  DOMAIN (21)..(481): Tubulin/FtsZ family domain identified by PFam, accession name tubulin, E-value=3.6e-187, PFam score of 635.2
  misc_feature (1)...(489): Xaa = X or * as defined in Table 2
EATTSPLRLRHQLGSREAATMRECISIHVGQAGVQIGNACWELYCLEHGIQPDGQMPSDRKPLGEGDDSFNTFFSETGAGKHVPRAVFVDLEPTVIDEVRTGTYRQLFHPEQLITGKEDAANNYARGHYTIGKEIIDLVLDRIRKLADQCTGLQGFLVFHSLGGGNWVLVPPPPCLQLGGGGAGKRLSVDYGQEVPSWEFSIYPGAPRFPQPVVEPYNFHPTNPTPTLGALXLCPSWVDNEAIYDICRRNLDIERPTYTNLNRLIGQIVSSITASLRFDGALNVDLTEFQTNLVPYPRIHFPLGHIMPPVIFAEKAYHEPAFLXQRSQMLCFEPANQMVKCDPRPGKYMLCCLLYPGDVVPQRISFLPLPTIKTQRLTIHFLDWSPTDFKLVINYQPPTVVPGGDLTKVQRAVCMLSNTTAIAEAWARLDHKFDLMYAKRAFVHWYVGEGMEEGEFSEAREDMAALEKDYEEVGVDSVEGEGEEEGEEY

SEQ ID NO: 8830 - protein, 75 aa, Homo sapiens
  misc_feature (1)...(75): Xaa = X or * as defined in Table 2
EEYKTQNRFELRSPRLDCSGAISAHCNLCLPGSSNSHASASKXAGITGMHHHAWDNFCILFSRRWGFCHVGQGWP

SEQ ID NO: 8831 - protein, 103 aa, Homo sapiens
  misc_feature (1)...(103): Xaa = X or * as defined in Table 2
IFSSEPLEGRPGRPGGARAACGQEGAGKAGAAGDXPSPPGXGHAAAPKCREFGHNQIDAGWNQRPGKPGLVPMWEPCPQPSCPLELSEFPPGAHSSWTSNSIY

SEQ ID NO: 8832 - protein, 845 aa, Homo sapiens
  DOMAIN (795)..(810): RIBOSOMAL PROTEIN P2 SIGNATURE domain identified by eMATRIX, accession number PR00456E, p-value=9.813e-10, raw score of 3.06
  misc_feature (1)...(845): Xaa = X or * as defined in Table 2
DSRGQEGXRTGAPHMGDKGPGVSGPPGFQASIKFGCGQNFSPITLGPGPGPWGGCGQALSPSGVPGLEGVSPTRAKGWRFPPKAPETLNERQIYPNAPPSXAGXGHADTEGQDRTPHLLGANSSGHLCGQLPFXSASIGGAGRDSQGLSRAFSSASKHSVPASAGTFXHSFSKGXVSKTTTTNAGNALFPMPGSSKTKKPNSHQRGQMGSXGRNPPSLGRAPAPLPEREAPIPAPQLGPSAAGTSRQVGQKSSTSPPPGRGGNIEPXTQEERRKEKMKKATGLSKHQPAGFIQNEXNLKGAGEFGPSGLAGSQNPPSSKLQGLGGKCXEQRLXXGAGPDCSPLGKHTPXRSPSPLPRTGDASRGSXGFSGKEASFGPGQPQSTCLSGIRPSLGSXPLGQXRTLPCSNLPAGKRNCLGPPGLGRGHGRCSDLSQHGSQTXAGANWRKRQPPVPAGLLDPGPLTAQQAVTRSPWEGAQGRGGEGPVGLCWGXACAKCRLQGSGRTFAGGRQGSRSGVWVGSEVMAPRKRPPAGPPGHKEGTAEAVSSQTVTGGRIPEAVWPHHHQGKGTTEQEPCCXDVTKASAPGVSGDTGMRGPLQPQASPNIXGAAACPFSQRAGSSLQQRRSLPAPSCPQAARGPPGLPGLPSSGSEENIHSGAWALVGQEGPSMDGRGNGMMLRGVWTGVHGGGMDEMWRRGDLKGKVPHGMIQVWTPGDKQDSSPARTPAPQWLSITTGSXTPEGDPGGKLDAAQRGRAIAAHEQPEVAVLGVAGHLXSPGSARSSPRWHPHRSACRPPRSGGSPPSPSSAXKSDRTDAGAGVAAAASPGAGAPAHCPQGPPRSCQGPQRR

SEQ ID NO: 8833 - protein, 217 aa, Homo sapiens
  misc_feature (1)...(217): Xaa = X or * as defined in Table 2
ELFPPTSTSIALAQLRALTQAGQPLTQVNQGAFSMPLWVLDPRERGDLKIKPSFLLLWGWAHLGFQHEALWALGCAFIEERGGEREAFLGPEMFSWGGFAHPCPXTHQFWPGEPQEVXGGRHCGKAPREKWPALAPTFQKEKPVVPVTPEAIPVCQEGAPPGTAKSIHCPPEIHTKEACPVPGKEENVPGKRKIWSKKRDRQGRAQESRIQGSEEIP

SEQ ID NO: 8834 - protein, 209 aa, Homo sapiens
  misc_feature (1)...(209): Xaa = X or * as defined in Table 2
QKLFFLAENIIRSFSRTVKTLSFVLNQMMCFISVFDVFSFFSPGFTSFVISLCFGFAANLIGLGLAAKALDSGAFFSFVVLSPSFPLPSCPHHFTLLKVIMNTRSEIPFLAPSTLGFFEMESHCVTQCSGAISAHCSLHLPGXSNFPVSASXVAGTTGASHDNWLIFLFLVETGFHHADQGGLKFXPQIIHPLGLPKWLGLQCEPCGWL

SEQ ID NO: 8835 - protein, 71 aa, Homo sapiens
FDWWWQIQRAEPEFFPPFLAQLGSGKAPLSGLKIAARPDGSDAACLRPRLSAPGPQCSADGPWRAPQPRRF

SEQ ID NO: 8836 - protein, 102 aa, Homo sapiens
  misc_feature (1)...(102): Xaa = X or * as defined in Table 2
TGAGHGGLMPVIPSHFGRPWRADHLRSGVRDQPGQHGXNPVSTKNTKIGWAXWRAPVIPATXEGLRQGESLEPGRAEGARRCHYIPAGGDRVRLCLKKKKLN

SEQ ID NO: 8837 - protein, 387 aa, Homo sapiens
  DOMAIN (69)..(112): kw TRANSCRIPTASE REVERSE II ORF2 domain identified by eMATRIX, accession number DM01354T, p-value=1.000e-40, raw score of 9.48
  DOMAIN (1)..(191): Reverse transcriptase domain identified by PFam, accession name rvt, E-value=4.6e-19, PFam score of 76.8
MSSFEKCLFMSFAHFLMDAEKAFDKIQQPFMLETLNKLGIDGTYFKIIRAIYDKPTANIMLNGQKLEAFPLKTGTRQGCPLSPLLFNIVLEVLARAIRQEKEIKGIQLGKEEVKLSLFADDMIVYLENPIVSAQNLLRLISNFSKVSGYKINVQKSQAFLYTNNRQTESQIMNELPLTIASKRIKYLGIQLTRDVKDLFKENYKPLLKEIKEDTNKWKNIPCSWVGRINIVKMAILPKVIYRFNAIPIKLPMPFFTELEKTTLKFIWNQKRAHIAKSILSQKNKAGGITLPDFKLYYKATVTKTAWYWYQNRDIDQWNRTKDMNRHFSKEDIHAAKKHMKKCSSSLAIREMDIKTTMRYHLTPVRMAIIKKSGNNRCWRGCGEIGTL

SEQ ID NO: 8838 - protein, 459 aa, Homo sapiens
  DOMAIN (144)..(191): kw TRANSCRIPTASE REVERSE II ORF2 domain identified by eMATRIX, accession number DM01354V, p-value=1.000e-40, raw score of 12.97
  DOMAIN (1)..(157): Reverse transcriptase domain identified by PFam, accession name rvt, E-value=0.00057, PFam score of -13.2
MDKFLDTYTLPRINQEELESLNRPITASEIVAIINSLSSKKSPGPDGFTAEFYWSVGSAGQAIRQEKEIKGIQLGKEEVKLSLFADDMIVYLENPIVSAPNLLKLISNFSKVSGYKINVQKSQAFLYTNNRQTESQIMSELPFTIASKRIKYLGIQLIRDVKDLFKENYKPLLKEIKEDTNKWKNIPCSWVGRINIVKMAILPKVIYRFNAIPIKLPMTFFTILEKNTLKFIWNQKRARIAKSILNQKNKAGGITLPDFKLYYKATVTKTTWYWHQNRDIDQWNRTEPSEITPHIYNYLIFDKPEKNKQWGKDSLFNKWCWENWLAICRKLKLDLFLTPYTKINSRWIKDLKVRPKTIKTLEENLGITIQHIGMGKDFMSKTPKAMATKAKIDKWDLIKLKSFCTAKETTIRVNREPTEWEKIFATYSSDKGLISRIYNELKQIYKKKQTTPSKSGRRT

SEQ ID NO: 8839 - protein, 97 aa, Homo sapiens
  DOMAIN (6)..(36): kw TRANSCRIPTASE REVERSE II ORF2 domain identified by eMATRIX, accession number DM01354R, p-value=5.714e-31, raw score of 8.50
MIISIDAEKAFDKIQQPFMLKTLNKLGIDGTYFKIIRAIYDKPTANIILNGQKLEAFPLKTGTRQGCPLSLCTSFHCQLGRASERRNISIGMHEETF

SEQ ID NO: 8840 - protein, 395 aa, Homo sapiens
  DOMAIN (34)..(79): kw TRANSCRIPTASE REVERSE II ORF2 domain identified by eMATRIX, accession number DM01354N, p-value=1.000e-40, raw score of 13.17
  DOMAIN (118)..(298): Reverse transcriptase domain identified by PFam, accession name rvt, E-value=5.1e-13, PFam score of 56.7
MKLKRNNEMSGKALDPREGFCDASYEIQTTIREYYKHLYANKLENLEEMDTFLDTYTLPRLNQEEVESLNRPITGAEIVAIINSLPTKKSPGPDGFTAEFYQRYKEELVPFLLKLFQSIEKEGILPNSFYEASIILIPKPGRDTTKKENFRPISLMNTDAKILNKILANRIQQHIKKLIHHDQVGFIPGMQGWFNIRKSINVIQHINRAKDKNHLIISIDAEKAFDKIQQPFMLKTLNKLGIDGTYFKIYRDRHFSKEDIYAAKKHMKKCSLSLAIREMQIKTTMRYHLTPVRMAIIKKSGNNRCWRGCGEIGTLLHWCWDCKLVQPLWKSVWRFLRDLELEIPFDPAIPLLGVYPKDYKSCCYKDTCHIMFIVALFTIAKTWNQPKCPTMIDWI

SEQ ID NO: 8841 - protein, 442 aa, Homo sapiens
  DOMAIN (45)..(90): kw TRANSCRIPTASE REVERSE II ORF2 domain identified by eMATRIX, accession number DM01354N, p-value=1.000e-40, raw score of 13.17
  DOMAIN (73)..(339): Reverse transcriptase domain identified by PFam, accession name rvt, E-value=8.8e-67, PFam score of 235.3
  misc_feature (1)...(442): Xaa = X or * as defined in Table 2
QVLLSFGTPLVLTTKREKNQIDAIKNDKGDITTDPTEIQITSIEYYKHLYANKLENLEEMDKLLDTYTLPRLNQEGVESLNRPITGSEIEAIINSLRPISLMNIHAKILNKILGNXIQQHIKKLIHHDQVGFIPGMQGWFNIRKSINVIEHINRTKDKNHMIILIDAEKAFDKIQQPFMLKTLNKLGIDGTYLKIIRAIYGKPTVNIILNRQKLEAFPLKTGTRQGCPLSPLLFNIVLEVLAKAIRQEKEIKGIQLGKEEVKLSLFADDMIVYLENPIISAQNLLKLTGNFSKVSGYKINVQKSQAFLYTNNRQTESQIMSELPFTIASKRIKYLGIQLTRDVKDLVKENYKPLLKEIKEDTNKWKNIPCSWVGRINILKMAILPKVIYRFNAIPIKLPMTFFTELEKTTLKFIWNQKRACIAKSILSQKNKAGGITLPDFK

SEQ ID NO: 8842 - protein, 144 aa, Homo sapiens
  DOMAIN (7)..(54): kw TRANSCRIPTASE REVERSE II ORF2 domain identified by eMATRIX, accession number DM01354V, p-value=1.000e-40, raw score of 12.97
MSELPFTIASKRIKYLGIQLTRDVKDLFKENYKPLLKEIKEDTNKWKNIPCPWVGRINIVKMAILPKVATITVLTLQVRFRDLCNMPKVTQLDTAEPRFKSAQLSVLHVYVVWPLKEFVFEALGKWLGKDQLQATMRVCLISST

SEQ ID NO: 8843 - protein, 137 aa, Homo sapiens
  DOMAIN (7)..(54): kw TRANSCRIPTASE REVERSE II ORF2 domain identified by eMATRIX, accession number DM01354V, p-value=1.000e-40, raw score of 12.97
MSELPFTIASKRIKYLGIQLTRDVKDLFKENYKPLLKEIKEDTKKWKNIPCSWVGRINIVKMAILPKIIYRFSAIPIKLPMTFFTELEKTTLKFIWNQKRACIAKSILSQKNKAGGITLPDFKLYHKATVTKTAWYW

SEQ ID NO: 8844 - protein, 467 aa, Homo sapiens
  DOMAIN (232)..(279): kw TRANSCRIPTASE REVERSE II ORF2 domain identified by eMATRIX, accession number DM01354V, p-value=1.000e-40, raw score of 12.97
  DOMAIN (31)..(245): Reverse transcriptase domain identified by PFam, accession name rvt, E-value=0.014, PFam score of -32.7
MGQHDKQQYLEVQSNKIIAIWISDDHEDIISELGCLHIPERQKMSILFPSSATSGWARAQRDFRVGAGSARPALLSGRLAPPALGSERLSTRASSCGGLPRATPRGRAPPPATRHPVPSTAQRLRSAAARQRLAGSSARGRDALGKASWAPESVLEVLARAVRQEKEIKGILLGKEEVKLSLFAGDMIVYLENPIISAQNLLNKINVQKSQAFLYTSNRQTESQILSELPFTIASKRIKYLGIQLTRDVKDLFKENYKPLLKEIKEDTNKWKNIPCSWVGRINIVKMAILPKVIYRFNAIPIKLPMPFFTELEKTTLKFIRNQKRARIAKSILIQKNKAGGITLPDFKLYYKATVTKTAWYWYQNRDIDQWNTTEPSKIMPHIYNYLIFDEPEKNKQWGKDSLFNKWYWENWLAICRKLKLDPFLTPFTKINSRWIKDLNVRPKTIKTLEENLGITIQDIGMGKDFM

SEQ ID NO: 8845 - protein, 169 aa, Homo sapiens
  DOMAIN (69)..(116): kw TRANSCRIPTASE REVERSE II ORF2 domain identified by eMATRIX, accession number DM01354V, p-value=1.000e-40, raw score of 12.97
  misc_feature (1)...(169): Xaa = X or * as defined in Table 2
MLEVLAWAVRQEKEIKGIQLGKEEVKLSLXLMSNFSKVSGYKISVQKSHAFVYTNNRQSESQIMSELPFTVATKRIKYLGIQLTRDVKDLFKENYKPLLNEIQEDTNKWKNIPCSWVGRINIVKMAILPKVIYRFNAIPIKLPMTFFTELEKTKFIWNQKRAHIAKTIL

SEQ ID NO: 8846 - protein, 63 aa, Homo sapiens
LLWQELLARQPSSSIPAIPFPPFPFFKTALQLWGLQPASGFLTLLVPSFRRGKAVEQLLHSWQ

SEQ ID NO: 8847 - protein, 684 aa, Homo sapiens
  DOMAIN (57)..(100): kw TRANSCRIPTASE REVERSE II ORF2 domain identified by eMATRIX, accession number DM01354T, p-value=1.000e-40, raw score of 9.48
  DOMAIN (1)..(179): Reverse transcriptase domain identified by PFam, accession name rvt, E-value=2.6e-16, PFam score of 67.6
MIISIGAEKAFDKVQQPFMLKTLNKLGIDGTYFKIIRAIYDKPTANIILNGQKLEAFPLKTGTRQGCPLSPLLFNIVLEVLARAIRQEKEIKGIQLGKEEVKLSLFADDMIVYLENPIVSAQNLLKLISNFSKVSGYKINVQKSQAFLYTNNRQTESQIMSELPFTIASKRIKYLGIQLTRDVKDLFKENYKPLLKEIKEDTNKWKNIPCSWVGRINIVKMAILPKVIYRFNAIPIKLPMTFFTELEKTTLKFIWNQKRARIAKSILSQKSKAGGITLPDFKLADNMTVYLENPIVSAQNLLKLISNFSKVSGYKVSGQKSQALLYTNNRQTESQIMSELPFTIASKRIKYLGIHLTRDVKDLFKENYKPLLKEIKKDTNKWKNIPCSWVGRINIVKMAILPKDIIQENFPNLARQANIQIQEIRKTPQRYSSRRATPRHIIVRFTKVEMKEKMLRAAREKASHHTYSKIDPILGSKPLLSKCKRTEIITNYLSDHSAIKLEFRIKNLTQNCSTTWKPNNLLLNDYWVHNEMKAEIKMFFETNENKDTTYQNLWDTFKAVCRGKFIATNAHKRKQERSKVDTLTSQLKELEKQEQTHSKASRRQEITKIRAELKEIETQKTLQKINESRSWFFERINKLDRPLARLVKKKREKNQIDAIKNDKGDITTNPTEIQTTIRDYYKHL

SEQ ID NO: 8848 - protein, 253 aa, Homo sapiens
  DOMAIN (10)..(65): kw TRANSCRIPTASE REVERSE II ORF2 domain identified by eMATRIX, accession number DM01354Q, p-value=1.000e-40, raw score of 9.23
  DOMAIN (1)..(167): Reverse transcriptase domain identified by PFam, accession name rvt, E-value=1.8e-06, PFam score of 22.3
MNIDAKILNKILAKQIQQHIKKLIHHDQVGFIPGMQGWFNIRKSINVIQHINRTEDKNHMIISIDAEKAFDKIQQPFMLKPLNKLGIDGTYFKIIRAIYDKSTPNIILNGQKLELMSNFSKVSGYKISVQKSHAFVYTNNRQSESQIMSELPFTVATKRIKYLGIQLTRDVKDLFKENYKPLLNEIQEDTNKWKNIPCSWVGRINIVKMAILPKVIYRFNAIPIKLPMTFFTELEKTKFIWNQKRAHIAKTIL

SEQ ID NO: 8849 - protein, 352 aa, Homo sapiens
  DOMAIN (162)..(205): kw TRANSCRIPTASE REVERSE II ORF2 domain identified by eMATRIX, accession number DM01354T, p-value=1.000e-40, raw score of 9.48
  DOMAIN (32)..(284): Reverse transcriptase domain identified by PFam, accession name rvt, E-value=1.3e-49, PFam score of 178.2
ATATSLPTSSENFSGEALCSLKPLPKQLPKRLIRKVQHENGQELSKVLRPYPIIGVRVWGKGLRNPQDFANLNSTNCLYGYTFQQKPRNAPFPWKHINRAKDKNHMIISIDAEKAFDKIQQPFMLKTLNKLGIDGTYFKIIRAIYDKPTANIILNGQKLEAFPLKTGTRQGCLLSPLLFNIVLEVLARAIRQEKEIKGIHLGKEEVKLSLFADDMIVYLENPIISAQNLLKLISNFSKVSGYKINVQKSQAFLYTNDRQTESQIMSELPFTIASKRIKYLGIQVTRDVKHLFKENYKPLLKEIKEDTNKWKNIPCSWVGRINIMKMAILPKVIYGFNAIPISFNWYGVQPGH

SEQ ID NO: 8850 - protein, 460 aa, Homo sapiens
  DOMAIN (110)..(151): kw TRANSCRIPTASE REVERSE II ORF2 domain identified by eMATRIX, accession number DM01354I, p-value=1.000e-40, raw score of 15.55
  DOMAIN (204)..(385): Reverse transcriptase domain identified by PFam, accession name rvt, E-value=5.1e-21, PFam score of 83.3
MGDFNTPLSTLDRSTRQKVNKDTQELNSALHQADLIDIYRTLHPKSTEYTFFSAPHHTYSKIDHIVGSKALLSKCKRTEIITNYLSDHSAIKLELRIKNLTQNRSTTWKLNNLLLNDYWVHNEMKAEIKMFFETNENKDTTYQNLWDAFKAIIESLIFHNRAEIVAIIDSLPTKKSPGPDGFTADFYQRYKEELVPFLLKLFQSIEKEGILPNSFYEASIILIPKPGRDTTKKENFRPISLINIDAKILNKILAKRIQQHIKKLIHHDQVGFIPGMQGWFNIRKSINVIQHINRAKDKNHMIISIDAEKAFDKIQQPFMLKTLNKLAQNLLKLISNFSKVSGYKINVQNSQAFLYTNNRQTESQIMSELPFTIASKKIKYLGIQLTRDVKDLFKENYKPLLKEIKEDTNKWKNIPCSWVGRINIVKMAILPKAMLCLDVAYPTDDTRWYKLYTQKWTHFS

SEQ ID NO: 8851 - protein, 564 aa, Homo sapiens
  DOMAIN (37)..(83): kw TRANSCRIPTASE REVERSE II ORF2 domain identified by eMATRIX, accession number DM01354O, p-value=1.000e-40, raw score of 8.73
  DOMAIN (70)..(564): Reverse transcriptase domain identified by PFam, accession name rvt, E-value=1.9e-103, PFam score of 357.1
  misc_feature (1)...(564): Xaa = X or * as defined in Table 2
MDTFLNTYTLPRLNQEEVESLNRPITGSEIVAIINSLPSKKSPGPDGFTAKFYQRYKEELVPFLLKLFQSIEKEGILPNSFYEGSIILIPKPGRDPPKKENFRPTSLMNIDAKILNKILATRIQQHIKKLIHHDQVGIIPGMQGWFNIPKSINVIQHINRAKDKNHMIISIDAEKAFDKIQQPFMLKTLNKLGIDGTYFKIIRAIYDKPTANIILNGQKLEAFPLKTGTRQGCPLSPLLFNIVVEVLARAIRQEKKIKGIQLRKEEVKLSLFADDMIVYLENPIVSAXRLNQEEVESLNRPITGSEIVAIINSLPSKKSPGPDGFTAKFYQRYKEELVPFLLKLFQSIEKEGILPNSFYEGSIILIPKPGRDPPKKENFRPTSLMNIDAKILNKILATRIQQHIKKLIHHDQVGIIPGMQGWFNIPKSINVIQHINRAKDKNHMIISIDAEKAFDKIQQPFMLKTLNKLGIDGTYFKIIRAIYDKPTANIILNGQKLEAFPLKTGTRQGCPLSPLLFNIVVEVLARAIRQEKKIKGIQLRKEEVKLSLFADDMIVYLENPIVSA

SEQ ID NO: 8852 - protein, 517 aa, Homo sapiens
  DOMAIN (162)..(205): kw TRANSCRIPTASE REVERSE II ORF2 domain identified by eMATRIX, accession number DM01354T, p-value=1.000e-40, raw score of 9.48
  DOMAIN (32)..(284): Reverse transcriptase domain identified by PFam, accession name rvt, E-value=1.3e-49, PFam score of 178.2
ATATSLPTSSENFSGEALCSLKPLPKQLPKRLIRKVQHENGQELSKVLRPYPIIGVRVWGKGLRNPQDFANLNSTNCLYGYTFQQKPRNAPFPWKHINRAKDKNHMIISIDAEKAFDKIQQPFMLKTLNKLGIDGTYFKIIRAIYDKPTANIILNGQKLEAFPLKTGTRQGCLLSPLLFNIVLEVLARAIRQEKEIKGIHLGKEEVKLSLFADDMIVYLENPIISAQNLLKLISNFSKVSGYKINVQKSQAFLYTNDRQTESQIMSELPFTIASKRIKYLGIQVTRDVKHLFKENYKPLLKEIKEDTNKWKNIPCSWVGRINIMKMAILPKVIYGFNAIPIQNLLKLISNFSKVSGYKINVQKSQAFLYTNNRQTESQIMSELPFTIASKRIKYLGIHLTRDVKDLFKENYKPLLKEIKEDTNKWKNIPCSWVGRINIVKMAILPKVIYRFNAIPIKLTMTFFTELEKSTLKFIWNQKGARIAKSILSQKNKAGGITLPDFKLYYKATVTKTAWYWY

SEQ ID NO: 8853 - protein, 315 aa, Homo sapiens
  DOMAIN (37)..(83): kw TRANSCRIPTASE REVERSE II ORF2 domain identified by eMATRIX, accession number DM01354O, p-value=1.000e-40, raw score of 8.73
  DOMAIN (70)..(315): Reverse transcriptase domain identified by PFam, accession name rvt, E-value=1.9e-52, PFam score of 187.7
MDTFLNTYTLPRLNQEEVESLNRPITGSEIVAIINSLPSKKSPGPDGFTAKFYQRYKEELVPFLLKLFQSIEKEGILPNSFYEGSIILIPKPGRDPPKKENFRPTSLMNIDAKILNKILATRIQQHIKKLIHHDQVGIIPGMQGWFNIPKSINVIQHINRAKDKNHMIISIDAEKAFDKIQQPFMLKTLNKLGIDGTYFKIIRAIYDKPTANIILNGQKLEAFPLKTGTRQGCPLSPLLFNIVVEVLARAIRQEKKIKGIQLRKEEVKLSLFADDMIVYLENPIVSAPAAFLQSLWSSTMAGTLEKGEPLSGKEQ

SEQ ID NO: 8854 - protein, 236 aa, Homo sapiens
  DOMAIN (105)..(145): kw TRANSCRIPTASE REVERSE II ORF2 domain identified by eMATRIX, accession number DM01354Y, p-value=1.000e-40, raw score of 10.69
LLKRDVKDLFKENYIPLLNEIKEDTNKWKNIPCSWVGRINIVKMAILPKVIYRFNAISIKLPMTFFTELEKTTLKFTWNQKRAHIAKTILSQKNKAGGIMLPDFKLYYKATVTQTAWYWYQNRDIDQWNRTEPSEIIPHIYNHLIFDKPDKNKKWGKDSLFNKWCWENWLAICRKLKLNPFLTPYTKINSRRIKDLNVRPKTIKTLEENLGNTIQDIGMGKDFMSLLNDMSFTECK

SEQ ID NO: 8855 - protein, 358 aa, Homo sapiens
MDKFLDTYTLPRLNQEEVESLNRPITGAEIVAIINSLWNRTEPSKIMPHIYNYLIFDKPDKNRKWGKDSLFNKWCWENWLAIYRKLKLDPFLTPYTKINSRWIKDLNIRSKTIKTLEENLGNTIQDIGMGKDFMSKTPKPMATKAKIDKWDLIKLKSFCTAKETHSSWRPACLCRLHLWGQRTGKQKDSSNLCRLKCPCLTALKRAVVLPACSWRSEKGQTASSKQSWTENDFDELREEGFRRSNYSELREDIQTKGKEVENFEKNLEECITRITNTEKCLKELMELKTKARELREECRSLRSRCDELEERVSAMEDEMNEMKREGKFREKRIKRNEQSLQEIWDYVKRPNLRLIGVP

SEQ ID NO: 8856 - protein, 353 aa, Homo sapiens
  DOMAIN (99)..(124): 7 kw REVERSE TRANSCRIPTASE RNA POLYMERASE domain identified by eMATRIX, accession number DM00895E, p-value=4.103e-10, raw score of 15.72
  DOMAIN (70)..(274): Reverse transcriptase domain identified by PFam, accession name rvt, E-value=3.5e-14, PFam score of 60.5
  misc_feature (1)...(353): Xaa = X or * as defined in Table 2
MDTFLDTYTLQRLNQEEVESLNRPITGSEIVAIINSLPTKKSPGPDGFTAEFYQRYMEELVPFLLKLFQSIEKEGILPNSFYEASIILIPKLGRDTTKKENFRPISLMNIDAKILNKILAKRIQQHIKKLIHHDQVGFIPGMQGWFNICKSINVIQHINRAKDKNHMIISIDAEKAFDKIQQRFMLKTLNKLGIDGTYFKWKNIPCSWIGRINIVKMAILHKALYRFNAIPIKLPMTFFTELEKTTLKFIWNQKRACIAKSILSQKNKAGGITLPDFKLHYKATVTKTAWGPYDRDIDSWNQTDLMCAVLPSRYVTLQDSSILXKMRXVKKLQKKSLQLADLVQGLRKDVSIT

SEQ ID NO: 8857 - protein, 161 aa, Homo sapiens
  DOMAIN (26)..(62): Synapsins proteins domain identified by eMATRIX, accession number BL00415Q, p-value=9.027e-09, raw score of 2.23
  misc_feature (1)...(161): Xaa = X or * as defined in Table 2
EVEKHLCQGXELLRAQHNXAAACRRPRPPAPGPQCSAGGPMARAPAPQVPPPPPPCSAPPPLPLPPLPASHAHPQPHFRHGRRSALLPRPPWAVRSRGALAGPRTRAAAGLRGGAGAAPAPADARFPASSPAEXPKFPQNSARALTGFPRCTDPTVSSPGY

SEQ ID NO: 8858 - protein, 467 aa, Homo sapiens
  DOMAIN (7)..(54): kw TRANSCRIPTASE REVERSE II ORF2 domain identified by eMATRIX, accession number DM01354V, p-value=1.000e-40, raw score of 12.97
MSELPFTIASKRIKYLGIQLTRDVKDLFKENYKPLLKEIKEDTNKWKNIPCSWVGRINIVKMAIMPKVIYRFNAIPIKLPMPFFTELEKTTLKFIWNQKRARIAKAILSQKNKAGGITLPDFKLYYKATVTKTAWYWYQNRDIDQWNRTEPSKITPHIYNYLIFDRPEKNKQWGKDSLFNKWCWENWLAICRKLKLDPFLTPYTKINSRWIKDLNVRSKTIKTLEENLGNTIQDTGMGKDFMSKTPTAMATKDKIDKWDLIKLKSFCTAKETTIRVNRQPTKWEKIFATYSSDKGLISRIYNELQQIYKKKTNNPIKKWARDMNRHFSKEDIYAAKKHMKKCSLSLAIREMQIKTTMRYHLTPVRMAIIKKSGNNRCWRGCGEIGTLLHCCWDCKLVQPLWKSVWRFLRDLELEIPFDPAIPLLGVYPKDYKSCCYKDTCTRMFIVALFTIAKTWNQPKCPTMIDWI

SEQ ID NO: 8859 - protein, 470 aa, Homo sapiens
  DOMAIN (7)..(54): kw TRANSCRIPTASE REVERSE II ORF2 domain identified by eMATRIX, accession number DM01354V, p-value=1.000e-40, raw score of 12.97
MSELPFTIASKRIKYLGIQLTRDVKDLFKENYKPLLKEIKEDTNKWKNIPCSWVGRINIVKMAILPKVIYRFNAIPIKLPMPFFTELEKTTLKFIWNQKRARIAKSILSQKNKAGGITLPDFKLYYKATVTKTAWYWYQNRDIDQWNRTEPSEITPHIYNYLIFDKPEKNKQWGKDSLFNKWCWENWLAICRKLKLDPFLTPYTKINSRWIKDLNVRPKTIKTLEENLGNTIQDIGMGKDFMSKTPKAMATEDKIDKLDLIKLKSFCTAKETTIRVNRQPTKWEKIFATYSSDKGLISRIYNELKEIYKKKTNNPIKKWAKDMNRHFSKEDIYAAKKHMKKCSSSLAIREMQIKTTMRYHLTPVRMAIIKNSGNNSCLRNTFRSVPSDSAVIAQGTGTHPRGDTPSHKAGVLVVGMSFPEEPVLQDRSDDFSLAHGSKQGNSVLCVGQWKTQGPCSRNEQYRPITGPGSH

SEQ ID NO: 8860 - protein, 519 aa, Homo sapiens
  DOMAIN (37)..(83): kw TRANSCRIPTASE REVERSE II ORF2 domain identified by eMATRIX, accession number DM01354O, p-value=1.000e-40, raw score of 8.73
  DOMAIN (70)..(345): Reverse transcriptase domain identified by PFam, accession name rvt, E-value=1.3e-82, PFam score of 287.9
  misc_feature (1)...(519): Xaa = X or * as defined in Table 2
MDTFLDTYTLPRLNQEEVESLNRPITGSEIVAIINSLPTKKSPGPDGFTAEFYQRYKEELVPFLLKLFQSIEKEGILPNSFYEASIILIPKPGRDTTKKENFRPISLMNIDAKILNKILANQIQQHIKKLIHHDQVGFIPGMQGWFNIRKSINVIQHINRAKDKNHMIISIDAEKAFDKIQQRFMLKTLIKLGIDGTYFKIIRAIYDKPTANIILNGQKLEAFPLKTGTRQGCPLSPLLFNIVLEVLARAIRQEKEIKGIQLGKEEVKLSLFADNMIVYLENPIVSAQNLLKLISNFSKVSGYKINVQKSQAFLYTNNRQTESQIMSELPFTIASKRIKYLGIQLTRDVKDLFTSVISQVWVGSLDTSLILQLWVGSLDISVILQLWVGSLDTSVISQLWVRSLDTSVISQLWDIAFLSHVPGMLSXKSQVSLATLMQRMSSHGLGQLQPCGSAGYSSHGCFHRLALNACGSSSAQCKLLVDLPFWGLDGGLLLTAARGHSPGALCVRVPTPHFPSMLP

SEQ ID NO: 8861 - protein, 525 aa, Homo sapiens
  DOMAIN (10)..(65): kw TRANSCRIPTASE REVERSE II ORF2 domain identified by eMATRIX, accession number DM01354Q, p-value=1.000e-40, raw score of 9.23
  DOMAIN (1)..(199): Reverse transcriptase domain identified by PFam, accession name rvt, E-value=4e-07, PFam score of 31.4
  misc_feature (1)...(525): Xaa = X or * as defined in Table 2
MNTDAKILNKILANRIQQHIKKLIHHDQVGFIPGMQGWFNIRKSINVIQHINRTKDKNHMIVSTDAEKTFDKIQQPFMLKTLNKLGIDGTYLKIIRAIYDKPTANIILNGQKLEAFPLKTGTRQGCPLSPLHKFLDTYTLPRLNQEEVESLSSPITGSEIVAIISSFTNEKESRTRWIHSRILPEVXGGTRIKYLGIQLTRDVKDLFKESYKPLLKEIKEDTNKWKNIPCXWVGRINIVKMAILPKELEKTTLKFIWNQKRACIAKSILIQKSKAGGITLPDFKLYYKATVTKTAWYWYQNRDIDQWNSTEPSEIMPHIYNYLIFDKPEKNKQWGKDSLFNKWCWENWLAICRKLKLDPFLTPYTKISSRWIKDLNVRPKTIKTLEENLGNTIQDIGMGKDFMSKTPKAMATKANIDKWDPIKLKSFCTAKETTIRVNRQPTKWEKIFATYSSDKGLISRIYNELKQIYKKKTNNPIKKWAKDMNRHSSKEDIYAAKKHMKKCSSSLAIREMQIKTTMRYHLTPV

SEQ ID NO: 8862 - protein, 1204 aa, Homo sapiens
  DOMAIN (123)..(166): kw TRANSCRIPTASE REVERSE II ORF2 domain identified by eMATRIX, accession number DM01354T, p-value=1.000e-40, raw score of 9.48
  DOMAIN (11)..(246): Reverse transcriptase domain identified by PFam, accession name rvt, E-value=7.5e-44, PFam score of 159.1
RVRSGTDSIASGPRVLCSTRTERRRRRSYLVHRRCVPCGPAVDGVFNLTNIDRWFLHINRAKDKNHMIISIDAEKAFDKIQQPFMLKTLNKLGIDGTYFRIIRAIYDKPTANIILNGQKLEAFPLKTGTRQGCPLSPLLFNIVLEVLARAIRQEKEIKGIQLGKEEVKLSLFADDMIVYLENPIVSAQNLLKLISDFSKVSGYKINVQKSQTFLYTNNRQTESQIMSELPFTIASRRIKYLGIQLTRDVKDLFKENYKPLLKEIKEDTNKWKNIPCSWVGRINIVKMAILPKVFYRFNAIPIKLPMTFFTASCFSAKSVEQYYGWNIGKRRAAEWQRAMTMRKVLQEILEKNPRFHHLTPLKTKHIAHWCRCHGYTPPDPESLRNDGDSIEDVLTQIDSEPDHGSLGDGKSSSVGPTAVVTLLACHLECPSSFSSADNLCRKLEDLQQFQKREPENEEEVDILSLSEPVKINIKKEQEEKQEEVKFYLPPTPGSEFIGDVTQKGGMLVWREAVSKAAIRTNGFLLLFQIGITLQPVALHRNVYASVVEDMILKATEQLVNDILRQALAVGYQTASHNRYYYLCSLWCEAYTSFLTVELPMKVFYTYINPVGDGGSKTCDTMVFNHPAIKKFLESPSRSSSPANQRAETPSANHSESDSLSQHNDFLSDKDNNSNMDIEERLSNNMEQRPSRNTGRDTSRITGSHKTEQRNADLTDETSRLFVKKTIVVGNVSKYIPPDKREENDQSTHKWMVYVRGSRREPSINHFVKKVWFFLHPSYKPNDLVEVRYKIVVTRYVLGSGRDKGTVKMSTGPWLWETKKVFLPLRIKYLGIQLTRDVKDLFKENYKPLLKEIKEDTNKWKNIPCSWVGRINIVKMAILPKTERGEEASEEKYEASRCWFVRFKEGCRLHNIQLQGEAASADGEAAASYPEDPAKIIDEGGYTKQHIFTVYVVGGYDGQNRLSSVECYDSFSNRWTEVAPLKEAVSSPAVTSCVGKLFVIGGGPDDNTCSDKVQSYDPETNSWLLRAAIPIAKRCITAVSLNNLIYVAGGLTKAIYCYDPVEDYWMHVQNTFSRQRGELGVFVVPSAGFPASTEAERHTPFYALPSSLERTPTKMTTSQKVTFCSHGNSAFQPIASSCKIVPQSQVPNPESPGKSFQPITMSCKIVSVLLSSVMFNKRKFITVDWQSCHKAKTKLIHTEMNGGDK

SEQ ID NO: 8863 - protein, 959 aa, Homo sapiens
  DOMAIN (37)..(83): kw TRANSCRIPTASE REVERSE II ORF2 domain identified by eMATRIX, accession number DM01354O, p-value=1.000e-40, raw score of 8.73
  DOMAIN (70)..(345): Reverse transcriptase domain identified by PFam, accession name rvt, E-value=1.7e-74, PFam score of 260.9
  misc_feature (1)...(959): Xaa = X or * as defined in Table 2
MDKFLDTYTLPRLNQEEVESLNRSITGSEIVAIINSLPTKKSPGPDGFTAEFYQRYKEELVLLLLKLFQSIEKEATLPNSFYEASIILIPKPGRDTTKKENFRPISLMNIDAKILSKILANQIQQHIKKFVHHDEVGFIPRMQGWFNIHKSKNVIQYINRTKDKNYMIISIDAEKAFDKIQQLFMLKTLSKLGIDGTYLKIIRAIYDKPTVKIILNGQKLEEFPLKTGTRQGCPLSPLLFNIVLEVLARAIRQEKEIKGILLGKEEVKLSLFADDMIVYLENPIVSAQNLLKLISNFSKVSGYKINVQKSQAFLYTNNRQTESQIMSELPFTIASKRIKYLGIQFTRDVKDLFKENYKPLLNEIKEDTNKWKNIPCSWVGRINIVKMAILPKPPLLIPRQTGSGVDLQQTPTDLQLSVLTVRRKINKQKGHPHQYLIWTSPSSKTKGRQLLASNRTTNGKEIRPEDXKGEVSSCCWRRIXYTAENKIPRNPTYKGCEGPLQGELQTTAQGNKRGYKQTEEHSMLMGRKNQYRENGHTAQVIYRFNAIPIKLPMTFFTELEKTTLKFIWNQKRARIAKSILSQKNKAGGITLPDFKLYYKATVTKTAWYWYQNRDIDQWNRTEPSEITPHIYNYLIFDKPEKNKQWGKDSLFNKWTWENWLAICRKLKLDPFLTPYTKINSRWIKDLNVRPKTTKTLEENLGITIQDIGMGKDSMSKTPKAMATKDKIDKWDLIKLKSFCTAKDTTIRVNRQPTKWEKIFATYSSDKGLISRIYNELKQIYKKKTNNPIKKWVRDMNRHFSKEDIYAAKKHMKKCSPSLAIRETQIKTTMRYHLTPVRMAIIKKSGNNRDIDEGVNHHSQQTITRTENQSLHVLTHTWEFNNENTWTQGGEHHTLGPVMGYVFISSVKMDQYTKLVSEEWGVAENQATNAFLHRIGKNYFKVHMEPKKSPHCQVNPKPKE

SEQ ID NO: 8864 - protein, 581 aa, Homo sapiens
  DOMAIN (57)..(100): kw TRANSCRIPTASE REVERSE II ORF2 domain identified by eMATRIX, accession number DM01354T, p-value=1.000e-40, raw score of 9.48
  DOMAIN (1)..(179): Reverse transcriptase domain identified by PFam, accession name rvt, E-value=1.6e-16, PFam score of 68.4
MIISVDAEKAFDKIQQPFMLKTLNKLGIDGMYFKIIRAIYDKPTANIILNGQKLEAFPLKTGTRQGCPLSPLLFNIVLEVLARAIRQEKEIKGIHLGKEEIKLSLFADDMIVYLENPIVSAQNLLKLISNFSKVSGYKINAQKSQAFLYTNNRQTESQIMSELPFTIASKRIKYLGIQLTRDVKDLFKENYNPLLNEIKEDTNKWKNIPCSWVGRINIVKMAILPKNWKKTTLKFIWNQKRACIAKSILSQKNKAGGITLPDFKLYYKATVTKTAWYWYQNRDIDQWNRTEPSEIMPPIYNYLIFDKPEKNKQWGKDSLFNKWCWENWLAICRKLKLDPFLTPYTKINSRWIKDLNVRPKTIKTLEENLGITIQDIGLGKDFMSKTPKAMATKAKIDKWDLIKLKSFCAEKETTIRVNRQPTKWEKIFATYSSDKGLISRIYNELKQIYKKKTNNPIKKWVKDMNRHFSKEDIYAAKKHMKKCSSSLAIREMQIKTTMRYHFTPVRMAIIKKSGNNRDMDEIGNHHSQQTIAMTKNQTPHVLTHRWELNNENTWTQEGEHHTLGPVVGNLKLLRKPKISLS

SEQ ID NO: 8865 - protein, 955 aa, Homo sapiens
  DOMAIN (327)..(352): 7 kw REVERSE TRANSCRIPTASE RNA POLYMERASE domain identified by eMATRIX, accession number DM00895E, p-value=4.103e-10, raw score of 15.72
  DOMAIN (1)..(575): Reverse transcriptase domain identified by PFam, accession name rvt, E-value=2.4e-128, PFam score of 439.8
MDIDAKILNKILAKRIQQHIKKLIHRDQVGFILGMQDWFNIQKSINVIHHINRTKDKNHMIISVDAEKAFDKIQQPFMLKTLNKLGIDGTYLKVTRAIYDKPTANIILNGQKLEAFLLKTGTRQGRPLSPLLFNIVLEVLARAIRQEKKIKGIQLGKEEVKLSLFADDMTVYLENPIISDQNLLRLINNFSKVSGYKINVQKSQAFLNTNNRQTESQIMSELPLTVASKRIKYLGIQMLNQEEVESLNRPITGAEIVAIINSLPTKKSPGPDGFTAEFYQRNSVEEELVPFLLKLFQSIEKEGILPNSFYEASIILIPKPGRDTTKKENFRPISLMNIDAKILNKILAKRIQQHIKKLIHHDQVGFIPGMQGWFNIRKSINVIQHINRAKDKNHMIISIDAEKVFDKIQQPFMLKTLNKLGIDGTYFKIIRAIYDKPTANIILNGQKLEAFPLKTGTKQGCPLSPLLFNIVLEVLARAIRQEKEIKGIQLGKEEVKLSLFADDMIVYLENPIVSAQNLLKLISNFSKVSGYKKKINVQKSQAFLYTNNRQTESQIMSKLPFTIASKRIKYLGIQLTRDVKDLFKENYKPLLKEIKEDTNKWKNIPCSWVGRINIVKMAILPKIGYCVQDTTSANTTLVHQTTPSHVMPPNHHQLAFNYQELEHLQTVKNISPLQILPPSGDSEQLSDGITVMHPSGDSDTTMLESECQAPVQKDIKIKNADSWKSLGKPVKPSGVMKSSDELFNQFRKAAIEKEVKARTQELIRKHLEQNTKELKASQETHRDLGNGLTVESFSNKIQNKCSGEEQKEHQQSSEAQDKSKLWLLKDRDLARQKEQERRRREAEGQWAPPPPPNGEAAGLPAPPDAHAPVPALLVPGLLLLRALRLHPPAQTFVEPRQGAGADLPAARPGSTLPACLSDPSLGTHCYVRIKDSGLRFHYVDGAGICLASGEASGSF

SEQ ID NO: 8866 - protein, 1497 aa, Homo sapiens
  DOMAIN (540)..(565): 7 kw REVERSE TRANSCRIPTASE RNA POLYMERASE domain identified by eMATRIX, accession number DM00895E, p-value=6.069e-10, raw score of 15.72
  DOMAIN (512)..(788): Reverse transcriptase domain identified by PFam, accession name rvt, E-value=7.5e-80, PFam score of 278.7
  misc_feature (1)...(1497): Xaa = X or * as defined in Table 2
MLEVLAWAVRQEKEIKGIQLGKEEVKLSLFADNMTVYLENPIVSAQNLLKLISNFSKVSGYKVSGQKSQALLYTNNRQTESQIMSELPFTIASKRIKYLGIHLTRDVKDLFKENYKPLLKEIKKDTNKWKNIPCSWVGRINIVKMAILPKDIIQENFPNLARQANIQIQEIRKTPQRYSSRRATPRHIIVRFTKVEMKEKMLRAAREKASHHTYSKIDPILGSKPLLSKCKRTEIITNYLSDHSAIKLEFRIKNLTQNCSTTWKPNNLLLNDYWVHNEMKAEIKMFFETNENKDTTYQNLWDTFKAVCRGKFIATNAHKRKQERSKVDTLTSQLKELEKQEQTHSKASRRQEITKIRAELKEIETQKTLQKINESRSWFFERINKLDRPLARLVKKKREKNQIDAIKNDKGDITTDPTEIHTTIREYYKNLYAKKLENLEEMDKFLETYTLPRPNQEEVESLNRPITGSEIVAIINSLPTKKSPGPDGFTAEFYQRYKEELVPFLLKLFQSIEKEGILPNSFDEASIILIPKLGRDTTKKENFRPIPLMNTDAKILNKILANRIQQHIKKLIHHDQVGFIPGMQGWFNICKSINVIQHINRTKGKNHMIISIDAEKAFDKIQQPFLLKTLNKLGIDGTYLKIIRAIYDKPIANIILNGQKLEAFPLKTGTRQGCPLSPLLFNIVLEVLARAIRQEKEIKGIQLQKEEVKLSLFADDMIVYLENPTVSAQNLLKLISNFSKVSGYKISVQKSQAFFYTNNRQTESQIMSELPFTIASKRIKYLGIQLTRDVKDLFKENYKPLLKEIKEDTNKWKNIPCSWVGRINIVKMAILPKPPLLIPRQTGSGVDLQQTPTDLQLSVLTVRRKINKQKGHPHQYLIWTSPSSKTKGGSSSPATELYYKATVTKTAWYGYQNRDIDQWNRTEPSEIMPLTYNYLIFDKPEKNKQWGKDSLFNKWCWENWLAICRKLKLDPFLTPYTKINSRWIKDLNVRPKTIKTLEENLGITIQDIGVGKDFMSKTPKAMATKAKIDKWDLIKLKSFCTAKETTIRVNKQPTTGEKIFTTYSSDKGLISRIYNELKQIXKEIKGIQLGKEEVKLSLFADNMTVYLENPIVSAQNLLKLISNFSKVSGYKVSGQKSQALLYTNNRQTESQIMSELPFTIASKRIKYLGIHLTRDVKDLFKENYKPLLKEIKKDTNKWKNIPCSWVGRINIVKMAILPKDIIQENFPNLARQANIQIQEIRKTPQRYSSRRATPRHIIVRFTKVEMKEKMLRAAREKASHHTYSKIDPILGSKPLLSKCKRTEIITNYLSDHSAIKLEFRIKNLTQNCSTTWKPNNLLLNDYWVHNEMKAEIKMFFETNENKDTTYQNLWDTFKAVCRGKFIATNAHKRKQERSKVDTLTSQLKELEKQEQTHSKASRRQEITKIRAELKEIETQKTLQKINESRSWFFERINKLDRPLARLVKKKREKNQIDAIKNDKGDITNRSHRNTHYHQRIL

SEQ ID NO: 8867 - protein, 77 aa, Homo sapiens
PPSASCVQTGPPCHSLAFPPSAPGQEQEGHQLPSHVIPCHLALGTAFPQPAAMAGWGVSQATYCQELEPQFPPVSSS

SEQ ID NO: 8868 - protein, 236 aa, Homo sapiens
  DOMAIN (170)..(236): Transposase domain identified by PFam, accession name Transposase_1, E-value=0.00023, PFam score of 18.8
  misc_feature (1)...(236): Xaa = X or * as defined in Table 2
FEALRMIGHLFAKSPYHGKINSAKIVARTNIKLMVKVVMWKNGEIIDTLQIVYGDNAPKKSVAVYKCITSLRRSKVLDEACSSRPVTSICKGKINLVYANISIGSAYTILMEKLNLSKLSTHWMPQPVHPDQLKTRAKLSMEILNKWDQDPKGFLXKIVTRDRTWLYXYTFEDKAQSKQWLPRGGSGPVKAKAGWSRAKVKATTGFWNAQIVLLVDFLEGQRTITSAYESILLKKK

SEQ ID NO: 8869 - protein, 84 aa, Homo sapiens
  misc_feature (1)...(84): Xaa = X or * as defined in Table 2
CHSQKPQVPPPKPWGSLERPPNTXVPACVLPAPAPAQRPGQIARQXPWVAPGTSGQSRVGRTPGVSSGHGQTLTCPMALLQPLL

SEQ ID NO: 8870 - protein, 135 aa, Homo sapiens
  DOMAIN (34)..(67): PROLINE-RICH PROTEIN 3 domain identified by eMATRIX, accession number DM00215, p-value=8.554e-10, raw score of 19.43
  misc_feature (1)...(135): Xaa = X or * as defined in Table 2
WGNTGSQVMTTVLNTALLPPKPSPMLPIKHYAIPPPSYSPHPXPPIPSPTANLESAPPASAPPPPLPPPAQLGEAHAPPEXYAIPPPSYSHTRSHPSPAQQQTLSQRHQPLHLSSSASTLPSWGKLMHHLNNIPQ

SEQ ID NO: 8871 - protein, 59 aa, Homo sapiens
  misc_feature (1)...(59): Xaa = X or * as defined in Table 2
SFLEDLTGLSNQPATAGANWITRLCTGSPXNVXPPWHMSSGHPEAVSRVCIFNLVGFGI

SEQ ID NO: 8872 - protein, 66 aa, Homo sapiens
MGADRQTHPQDRWFSLHLIKLLRRSYRIEQPASHSRGRLDNTSLHRLSLCPCHPPLFLTLFLGIMF

SEQ ID NO: 8873 - protein, 177 aa, Homo sapiens
  misc_feature (1)...(177): Xaa = X or * as defined in Table 2
SFYSALMLSDRKNGRERGRHGLSRRIKRQRKLVEAEAASQACLAGKPGPTPASHPPGDGLPCPLSAPTLSPATALPLPSPXRSPNHSANPNPLSPTSSVKHSRCSSPHSALPLSTPKATPPSPNHRAGLFSSLPLAPMSTSXLLQKNCVLVRAPAPTSYIPVFFMTPAQCPVFLSAQ

SEQ ID NO: 8874 - protein, 452 aa, Homo sapiens
  DOMAIN (294)..(315): Carboxylesterases type-B serine proteins domain identified by eMATRIX, accession number BL00122A, p-value=9.471e-10, raw score of 12.04
  DOMAIN (285)..(417): Carboxylesterases domain identified by PFam, accession name COesterase, E-value=8.2e-08, PFam score of 29.1
MGIKNSKRGSLPLAAPALLKPDTLWSCIFGEGDLGEEDMPPDPQAPSPAILPPNHAFGLWPFRYTQTHPQEAAADPAAAYHPEPPPLILAGVRFRSNPALPENGKGAWRGDGVAEGHAALWVLGLRCERSVTAALAARTREHDGRWREGAEKGPRRRWVVRAIQTPRLGKALIHCWTTRGSLWVNSSVSAGSERDQRADHAAAQTSCAAGAVACGLLLLLVRGQAWVKKQNLSPETRTKELVVSLMPLPHPGQGHNLASRAKARTQPVPSGPTHGAGAGESCPCEGRQAGVQTFLGIPFAKPPLVRCDLHPLSPLNLGVVWGWNHPSGHIYTPAHSHEGSNLPHWRQARNRQLGYLDQVAALRWVQQNIPTLEATLTVSPFLASLRWHECVFACCVPHIPRTFHGAIMESGVALLPGLLPAQLMSSPRFPGPCVFYEFQHQPSWLKNIRPRT

SEQ ID NO: 8875 - protein, 197 aa, Homo sapiens
  DOMAIN (129)..(140): Carboxylesterases type-B serine proteins domain identified by eMATRIX, accession number BL00122G, p-value=3.700e-14, raw score of 11.67
  DOMAIN (41)..(176): Carboxylesterases domain identified by PFam, accession name COesterase, E-value=2.1e-22, PFam score of 79.2
RWLIPKVMRIYDTQKKMDREASQAALQKMLTLLMLPPTFGDLLREEYIGDNGDPQTLQAQFQEMMADSMFVIPALQVAHFQCSRAPVYFYEFQHQPSWLKNIRPPHMKADHVKFTEEEEQLSRKMMKYWANFARNGNPNGEGLPHWPLFDQEEQYLQLNLQPAVGRALKAHRLQLWKKALPQKIQELEEPEERHTEL

SEQ ID NO: 8876 - protein, 612 aa, Homo sapiens
  DOMAIN (235)..(276): Carboxylesterases type-B serine proteins domain identified by eMATRIX, accession number BL00122E, p-value=1.000e-40, raw score of 22.02
  DOMAIN (49)..(581): Carboxylesterases domain identified by PFam, accession name COesterase, E-value=3.7e-99, PFam score of 342.8
  misc_feature (1)...(612): Xaa = X or * as defined in Table 2
IHPSAPRLGKALIHCCSFPGQPLGEQQRVRRQRTETSEPTMRLHRLRARLSAGACGLLLLLVRGQGQDSASPIRTTHTGQVLGSLVHVKGANAGVQTFLGIPFAKPPLGPLRFAPPXSPLESWSGVRDGTTHPAMCLQDLTAVESEFLSQFNMTFPSDSMSEDCLYLSIYTPAHSHEGSNLPVMVWIHGGALVFGMASLYDGSMLAALENVVVVIIQLPPGGVLGFFSTGDKHATGNWGYLDQVAALRWVQQNIAHFGGNPDRVTIFGESAGGTSVSSLVVSPISQGLFHGAIMESGVALLLPGLIASSADVISTVVANLSACDQVDSEALVGCLRGKSKEEILCNXTSLFKMIPGVGGMGVFLAQGTPRELLASADFQPVPSIVGVNNNEFGWLIPKVIEDLIDNPEGKLGQERASQGVLQKMLTLLMLPPTFGDLLREVYIGDNGDPQTLPKRKFQKMMADSMFVIPALQVAHFQCSRAPVYLPTSSQHQPSWLKNIRPPHMKADHGDELPFVFRSFFGGNYIKFTEEEEQLSRKMMKYWANFARNGNPNGEGLPHWPLFDQGGAITLQLNLQPAVGPGLXKAHRLQFWKKALPQKIQELEEPEERHTEL

SEQ ID NO: 8877 - protein, 95 aa, Homo sapiens
  DOMAIN (83)..(94): LYSOZYME SIGNATURE domain identified by eMATRIX, accession number PR00137C, p-value=7.341e-09, raw score of 11.74
  misc_feature (1)...(95): Xaa = X or * as defined in Table 2
CPNSSPGSASEVGCARSGQSSLLRSLPRCDGWPWAEAGAMCAGRNLTSCSVGRYYSSRXQDEESXTARHLLCAPQTGHQRRRPCRGQRNFCHIPC

SEQ ID NO: 8878 - protein, 148 aa, Homo sapiens
  misc_feature (1)...(148): Xaa = X or * as defined in Table 2
PRGPWSQGEPKWLLARQAAGCCPPGACLWGHSPAGACSPLCAAKGSRYSRVPASSGTPAGKGWQLLAREGEQEAGLCIEASQIGVPNSSPRKRPQRXDVPDRGSPVCXEVFPRCDGWPWAEAGASVQGGTSPPVSFNRMTSASTPNIW

SEQ ID NO: 8879 - protein, 50 aa, Homo sapiens
  misc_feature (1)...(50): Xaa = X or * as defined in Table 2
PGAMAVLLETTLSDVVIDLYTEERPRGEAXAPLTCRRGPRACLPTFPSLR

SEQ ID NO: 8880 - protein, 885 aa, Homo sapiens
  DOMAIN (468)..(520): ELEMENT TRANSPOSABLE INSERTION PROTEIN TRANSPOSITION DNA domain identified by eMATRIX, accession number PD02455C, p-value= 1.000e-40, raw score of 29.23
  DOMAIN (7)..(594): Phosphoglycerate mutase family domain identified by PFam, accession name PGAM, E-value=2.6e-58, PFam score of 207.1
  misc_feature (1)...(885): Xaa = X or * as defined in Table 2
MAAYKLVLIQHGESMWNPENRFSSWYNTDLSPAGHKEAKCGRQHSGGLIGLNKAETAAKHGEAQVKIWRHSYDVPPPLMEPDHPFYNISKDRRFANLTEDQLPSCESLKDTIAKALPFWNEEIVPQIKEGKQPKYPFEKRLEVVNHYFTTDDGYRIISARFGVPRTQVRTWVALYEKHGEKGLIPKPKGVSADPELRIKVVKAVIEQHMSLNQAAAHFMLAGSGSVARWLKVYEERGEAGLRALKIGTKRNIAISVDPEKAASALELSKDRRIEDLERQVRFLETRLMYLKKLKALAHPTKKAAEIPRSTFYYHLKALSKPDKYADVKKRISEIYHENRGRYGYRRVTLSLHREGKQINHKAVQRLMGTLSLKAAIKVKRYRSYRGEVGQTAPNVLQRDFKATRPNEKWVTDVTEFAVNGRKLYLSPVIDLFNNEVISYSLSERPVMNMVENMLDQAFKKLNPHEHPVLHSDQGWQYRMRRYQNILKEHGIKQSMSRKGNCLDNAVVECFFGTLKSECFYLDEFSNISELKDAVTEYIEYYNSRRISLKLKDLYASCLTVQLFGVSTLEGLSEEAIMELNLPTGIPVVYELDKNLKPIQFLGDEETMRKAMEAVAAQVEDEYNLYGDVTTVSSLTPEKLAPEVKENVPERLNILLQVGGRSRTNLNRVRVPIHKHPSIRDPNSQASLNKLTDKMDSLWLKSKNRPKGPWKGEGAVKLFVSLENAAKPVFLQPSQRRVPGNNGSWEFPSXSRKSGISIGAVKRPTHXGSXKASSISXNAAYVSKKAESLSSSHEKGCGDTAQYVLLSSKGSQQAXQVCGRXKAYXXDLSREXRPIRIPXGNAVSSSRRETDXPXSCSAPDGNPLTXSSDXGQAIPLLQRRGRANRP

SEQ ID NO: 8881 - protein, 63 aa, Homo sapiens
  misc_feature (1)...(63): Xaa = X or * as defined in Table 2
DRLDPHSAAHXGAKSSPLAATSDQWHLALSRGSGSLYKCTEVKQMSNSXPASRSACPPPSPPR

SEQ ID NO: 8882 - protein, 295 aa, Homo sapiens
  misc_feature (1)...(295): Xaa = X or * as defined in Table 2
FMPLHLDGGYCSPAEGFSSRYEHGLMKDLSRGSLSPGGERACEGVPSAPQNPPQRKKVSLLEYRKRKQEAKENSAGGGGDSAQSKSKSAGAGQGSSNSVSDTGAHGVQGSSARTPSSPHTKFFPSHSSMSHLEAVSPSDSRGTSSSHCRPQENISSRWMGSHISRTTPSKEGASPRSSEAAXGSAQKGEPSPTWESNITEKDSDPADGEGPETLSSALSXRSNSFTALSRYSYQTPLAPFTGTPGYFSSQPHSGNSTGSNLPRRSCPSSAASPTLQGPSDSPTSDSVSQSSTGTL

SEQ ID NO: 8883 - protein, 324 aa, Homo sapiens
  misc_feature (1)...(324): Xaa = X or * as defined in Table 2
GTRHLEAVSPSDSRGTFLSHCRPQENISSRWMVPTSVERLREGGSIPKVLRSSVRVAQKGEPSPTWESNITEKDSDPADGEGPETLSSALSKGATVYSPSRSATSSCSVIVLGQNHKASFSRVPPPSEDIPTQSPGYSYRTTALRPGNPPSHGSSESSLSSTSYSSPAHPVSTDSLAPFTGTPGYFSSQPHSGNSTGSNLPRRSCPSSAASPTLQGPSDSPTSVFSFSVPAQELXASTSSSSEIPRSSLAIRLTDXSVCPVLGQSAGYQGLQGICGFQFTALPHTVGVGFSTQYRIPSPLQGSRSQDSRRGLFLGLLGFGGKQN

SEQ ID NO: 8884 - protein, 137 aa, Homo sapiens
  DOMAIN (107)..(123): PRION PROTEIN SIGNATURE domain identified by eMATRIX, accession number PR00341D, p-value=9.890e-09, raw score of 0.26
  misc_feature (1)...(137): Xaa = X or * as defined in Table 2
AENTILSLMFSGKSWGSLSSECGALLPGTPTATRLQSLTRRSSLKRGTXGPQIPAARPREGSRIGTCTSSXPGLRTEAHRSLRNRQAGVSSPFQLSPALKPRKSPSQATGQRPGXGQWGQKGSGSALLPTNTTHVEA

SEQ ID NO: 8885 - protein, 152 aa, Homo sapiens
  misc_feature (1)...(152): Xaa = X or * as defined in Table 2
ENTILSLMFSGKSWGSLSSECGALLPGTPTATRLQSLTRRSSLKRGTXGPQIPAARPREGSRISQNQVGDGGKENRYRGFGGPPGTKSDPGHQHGXGGEGLWGSWRSKSGPAIATGAIASPATQLLRVNPDTGDWDVYFLLTLVSGLRLTGA

SEQ ID NO: 8886 - protein, 463 aa, Homo sapiens
  misc_feature (1)...(463): Xaa = X or * as defined in Table 2
HSMGWKEHVDRGGHTKGMVFVSLQPACWLPRERPFQLRLCLIEDPLLRLCGQGRGRGQETTSGLILLSHVGTFLRDRWTLTSLWPCPRALLVFLSHSCEVMGAGAPGVSLPEGQLSPLPWLQVGRSSRRAPDSGQGPLGPPGLADVSMRGRAPGTSMCGSRSTPVPPQSPGGXVSMPATPGIGFLCRLPHKSAPEGPGGFGFLFFIKHLKQHCSLPSPRGLSITASTCVVLVGSKADPDPFCPHCPHPGPLTSSLRGAFSRPSEQGRAGRGLESSRLSVSQGSCEASVLRPESRGSTHPISPVSGFTLRSWVAGEAIAPVAIAGPAGAGLRGLRGALRPAHGHPRLXSPGNPISPSSTSPPCLMPQGHSCLPAGPPNPRCLSSFPPSPTLVLTNPASLSGPGCRDLGSLKSLSLKNFCGSDSEAELLVGVPGSRAPHSLLKLPQLFPENIKLRIVFSAKKKKK

SEQ ID NO: 8887 - protein, 183 aa, Homo sapiens
  misc_feature (1)...(183): Xaa = X or * as defined in Table 2
LSPPKPQKQSQEQNPFCQRWALGKQLGPPQGGQEGQGPPDSLVLPGVPPVPLFVGGNLPHPPPPPQPQRNKGRQTEGSCSPPFKGQHNSPCGPQPSXAHPLRHGSGDQAQPTSAPPPCRPESXPQADEMPTPCCHNTGKALGPPSQEGMEPGGPQPGPSRSTQSSVAHLTSGTAVRPGLGSPP

SEQ ID NO: 8888 - protein, 86 aa, Homo sapiens
  misc_feature (1)...(86): Xaa = X or * as defined in Table 2
KRCPINRFPLECLPLPHLMGIPPEGHFHHPLMGEXXNPPCSIQDPHCVTYFETPPVNLCPSTRPPEVGWEGGPSSPPAFEAPGLKG

SEQ ID NO: 8889 - protein, 151 aa, Homo sapiens
  misc_feature (1)...(151): Xaa = X or * as defined in Table 2
MVELLVTFFPFSQLQLYFQLTYASFTELLKVPLMVLFYGMPMKKHFLKPTVSDQWENNRKLKRRISRXFSCRKVXVXIAHCHKFCLVLREAHMHWLILCAKKRFPPLKKLTWLGMVSHTCNPSTLGGXGRXTAXTQEFKTSLDNMVKPHLF

SEQ ID NO: 8890 - protein, 325 aa, Homo sapiens
  DOMAIN (95)..(111): CYCLOPHILIN PEPTIDYL-PROLYL CIS-TRANS ISOMERASE SIGNATURE domain identified by eMATRIX, accession number PR00153E, p-value= 2.385e-15, raw score of 9.10
  DOMAIN (61)..(137): Cyclophilin type peptidyl-prolyl cis-tr domain identified by PFam, accession name pro_isomerase, E-value=1.4e-20, PFam score of 74.5
RHSHAVQKKPLSGGGAGAMAVLLETTLGDVVIDLYTEERPRCQLYGDQASFFEAEKVPRIKHKKKGTVSMVNNGSDQHGSQFLITTGENLDYLDGVHTVFGEVTEGMDIIKKINETFVDKDFVPYQDIRINHTVILDDPFDDPPDLLIPDRSPEPTREQLDSGRIGADEEIDDFKGRSAEEVEEIKAEKEAKTQAILLEMVGDLPDADIKPPENVLFVCKLNPVTTDEDLEIIFSRFGPIRSCEVIRDWKTGESLCYAFIEFEKGGGAYGKTPATRPFYGSWPFAGLLLTCSFLRYPLILWITVLPPLSELIPLAAAERPSAASQ

SEQ ID NO: 8891 - protein, 227 aa, Homo sapiens
  DOMAIN (145)..(164): BETA-1 ADRENERGIC RECEPTOR SIGNATURE domain identified by eMATRIX, accession number PR00561C, p-value=5.990e-09, raw score of 11.00
  misc_feature (1)...(227): Xaa = X or * as defined in Table 2
WAKLGKGPAKRXPQALGASAPSALYPRHVAPARAPGRTKGAGSSCRNSPRQVRPQPWQWGGGAQSDVSPXGQTPRGGSFERSSSCSGHTGLVGKERRPLSLEGPXSPEDPPRARHGGPQGCREHPPWFSRPLCPEAGPEPRAPAWTSDSIGERSTGGPSRPASKGPVPSAQRAGQTPGNPEAAGSLSLPCRALPQGREAPQPQPPPYLPLKLERGILVFALSKIFKN

SEQ ID NO: 8892 - protein, 33 aa, Homo sapiens
GLCLGQEVGQEDLVMQTLPYGVLGLDRDEEVTG

SEQ ID NO: 8893 - protein, 518 aa, Homo sapiens
  DOMAIN (339)..(359): GLUCOSE-6-PHOSPHATE ISOMERASE SIGNATURE domain identified by eMATRIX, accession number PR00662A, p-value=9.182e-24, raw score of 12.76
  DOMAIN (241)..(440): Phosphoglucose isomerase domain identified by PFam, accession name PGI, E-value=4.5e-122, PFam score of 419.0
KHSSGEQDTSTLPSPPLLTTVEDVNQDNKTKTWPPKAPWQHPSPLPSTLPSPSAPLYAVTSPGSQWNDTMQMLQSPVWAATNDCSAAAFSYVQTPPQPPPPPAHKAAPKGFKAFPGKAMYNGENVFKHLAKDSRGSGNEAPKRQDWIAQGRANTRDKPPASWGRAVSRVPGGRERTLDKTVAVESPAMAALTRDPQFQKLQQWYREHRSELNLRRLFDANKDRFNHFSLTLNTNHGHILVDYSKNLVTEDVMRMLVDLAKSRGVEAARERMFNGEKINYTEGRAVLHVALRNRSNTPILVDGKDVMPEVNKVLDKMKSFCQRVRSGDWKGYTGKTITDVINIGIGGSDLGPLMVTEALKPYSSGGPRVWYVSNIDGTHIAKTLAQLNPESSLFIIASKTFTTQETITNAETAKEWFLQAAKDTKVKEFGIDPQNMFEFWDVSTSTSALGELSVLCQVMAVERPMRSGLAPQFMAPFTETQAENLRVILDSSYLTHTPLPIPHQLLPHFVQLSAHQKPH

SEQ ID NO: 8894 - protein, 633 aa, Homo sapiens
  DOMAIN (299)..(318): GLUCOSE-6-PHOSPHATE ISOMERASE SIGNATURE domain identified by eMATRIX, accession number PR00662B, p-value=1.000e-24, raw score of 10.19
  DOMAIN (83)..(618): Phosphoglucose isomerase domain identified by PFam, accession name PGI, E-value=4.9e-146, PFam score of 498.5
  misc_feature (1)...(633): Xaa = X or * as defined in Table 2
ARGAPRLLRAAGAPSSSARVSLSVPSSPAMAALTRDPQFQKLQQWYREHRSELNLRRLFDANKDRFNHFSLTLNTNHGHILVDYSKNLLVTEDVMRMLVGLWPKSRGVEAARERMFNGEKINYTEGRAVLHVALRETGFKTHPILGXNGKDVMPEVNKVLDKMKSFCQRVRSGNLKGYTGQRPFTDVINIWIGGSDLGPLMVTEALKPYSSGGPRVWYVSNIDGTHIAKTLAQLNPESSLFIIASKTFTTQETITNAETAKEWFLQAAKDPSAVGEDFLFALSTNTTKVKEFGIDPQNMFEFWDWVGGRYSLWSAIGLTSIALHVGFDNFEQLLSLAHWMDQLFRTDAPGRKNAPVLLALLGIWYINCFGCETHAMLPYDQYLHALLRTSSRATWSPMGNTSPNLEPVWTTRQAPLCGGSQGPMASMLFTSCIHQGTKMIPCDFLIPVQTQHPIRKGLHHKILLANFLAQDRGPXXGGKSTEEGPKGASRVAGKSPEDFERLLPHKGLXKGNRPTNFYVFTKVTPIQLGAWSPMYEHKILRFRVIIWDINSFXPSGELELGKQPGLRKLEPELDGSAQVTFQDVSTNGLINFIKAAARGPRVPINSVLICSLLCDSHFFFSSLFSPKPELIVP

SEQ ID NO: 8895 - protein, 102 aa, Homo sapiens; identical to SEQ ID NO: 8380
  DOMAIN (12)..(85): 60s Acidic ribosomal protein domain identified by PFam, accession name 60s_ribosomal, E-value=7.1e-10, PFam score of 34.6
  misc_feature (1)...(102): Xaa = X or * as defined in Table 2

SEQ ID NO: 8896 - protein, 347 aa, Homo sapiens
  DOMAIN (331)..(343): RIBOSOMAL PROTEIN P2 SIGNATURE domain identified by eMATRIX, accession number PR00456F, p-value=1.000e-10, raw score of 5.86
  DOMAIN (9)..(111): Ribosomal protein L10 domain identified by PFam, accession name Ribosomal_L10, E-value=1.5e-19, PFam score of 78.4
  misc_feature (1)...(347): Xaa = X or * as defined in Table 2
RTAVMPREDRATWKSNYFLKIIQLLDDYPKCFIVGADNVGSKQMQQIRMSLRGKAVVLMGKNTMHAQAPFEGTLXNNPSLWRKLLPHIRGEFGLLFHPGRTLTEIRDMLLAQXGCPAAARPGAICPHVKVTVASPRTLGLGPEKTSFFPGLXVSPTKNLQGAPIENPEVNVPAESRTGDQSGEPSESHGWLNMLNISPFFLWGWVIPARCSTNGQHSTKPLKVLGLFTGGKLLQFSAFLGGVSRKCLPSVCLPELAYPNCCNQYPDSIINGYKRVLALSCGDGITPFPLAEKVKAFLADPSAFVCCCNLWVAATTACFAAAAAAPAKVEAKEESEESDEDMGFGLFD

SEQ ID NO: 8897 - protein, 117 aa, Homo sapiens
  DOMAIN (74)..(95): KRINGLE DOMAIN SIGNATURE domain identified by eMATRIX, accession number PR00018C, p-value=6.447e-17, raw score of 14.30
  DOMAIN (36)..(113): Kringle domain identified by PFam, accession name kringle, E- value=1.2e-05, PFam score of 12.2
RSITCKTKEARMLLAWVQAFLVSNMLLAEAYGSGGCFWDNGHLYREDQTSPAPGLRCLNWLDAQSGLASAPVSGAGNHSYCRNPDEDPRGPWCYVSGEAGVPEKRPCEDLRCPGGRI

SEQ ID NO: 8898 - protein, 257 aa, Homo sapiens
  DOMAIN (57)..(78): KRINGLE DOMAIN SIGNATURE domain identified by eMATRIX, accession number PR00018C, p-value=5.235e-13, raw score of 14.30
  DOMAIN (25)..(96): Kringle domain identified by PFam, accession name kringle, E- value=1.9e-05, PFam score of 10.1
MLLAWVQAFLVSNMLLAEAYGSGGCFWDNGHLYREDQTSPAPGLRCLNWLDAQSGLASAPVGYCRNPDEDPRGPWCYVSGEAGVPEKRPCEDLRCPETTSQALPAFTTEIQEASEGPGADEVQVFAPANALPARSEAAAVQPVIGISQRVRMNSKEKKDLGTLGYVLGITMMVIIIAIGAGIILGYSYKRGKDLKEQHDQKVCEREMQRITLPLSAFTNPTCEIVDEKTVVVHTSQTPVDPQEGTTPLMGQAGTPGA

SEQ ID NO: 8899 - protein, 108 aa, Homo sapiens
  misc_feature (1)...(108): Xaa = X or * as defined in Table 2
KGLIKPFGHRTPERKKXLAQGRKQATGMARAQLPDGAQHFSTALCXQLSRASNLXCHTQEALAAPSHKASFSEPFHLPMGRRVNGAFYGAIWFGDLNLKWSSCGNDAG

SEQ ID NO: 8900 - protein, 295 aa, Homo sapiens
  DOMAIN (94)..(115): KRINGLE DOMAIN SIGNATURE domain identified by eMATRIX, accession number PR00018C, p-value=6.447e-17, raw score of 14.30
  DOMAIN (56)..(136): Kringle domain identified by PFam, accession name kringle, E- value=4.4e-07, PFam score of 25.6
  misc_feature (1)...(295): Xaa = X or * as defined in Table 2
LQGWDWEAEPPPRGPRLNTGRSITCKTKEARMLLAWVQAFLVSNMLLAEAYGSGGCFWDNGHLYREDQTSPAPGLRCLNWLDAQAGLASAPVSGAGNHSYCRNPDEDPRGPWCYVSGEGGVPEKRPCEDLRCPETTSKALPAFTTEIQGNVLKGPSADEVQVFAPANALPARSEAAAVQPVIGISQRVRMNSKEKKDLGTLGYVLGITMMVIIIAIGDGIILGYSYKRGKDLKEQHDQKVCEREMQRITLPXSAFTSPTCEIVNEKTVVVHTSQTPVDPQEGSTPLMGQAGTPGA

SEQ ID NO: 8901 - protein, 163 aa, Homo sapiens
  DOMAIN (126)..(142): CYCLOPHILIN PEPTIDYL-PROLYL CIS-TRANS ISOMERASE SIGNATURE domain identified by eMATRIX, accession number PR00153E, p-value= 2.385e-15, raw score of 9.10
  DOMAIN (21)..(163): Cyclophilin type peptidyl-prolyl cis-tr domain identified by PFam, accession name pro_isomerase, E-value=2.4e-24, PFam score of 87.3
  misc_feature (1)...(163): Xaa = X or * as defined in Table 2
GGGAGAMAVLLETTLFYVAIFLYTEKRPRACGNFLKLCRIKYYNYCLIHNVQRDFIIQTVDTTGTGRGXESIFGQLYGDQASFFEAEKVPRIKHKKKGTVSMVNNGSDQHGSQFLITTGENLDYLDGVHTVFGEVTEGMDIIKNINETFVDKDFVPYQDIRIN

SEQ ID NO: 8902 - protein, 660 aa, Homo sapiens
  DOMAIN (108)..(120): 4Fe-4S ferredoxins iron-sulfur binding region proteins. domain identified by eMATRIX, accession number BL00198, p-value= 1.857e-11, raw score of 10.43
  DOMAIN (157)..(347): ABC transporter domain identified by PFam, accession name ABC_tran, E-value=4.1e-16, PFam score of 67.0
  misc_feature (1)...(660): Xaa = X or * as defined in Table 2
LGRPTRPAPTFWAVAVRTRCLAEKRRQELMGALCYPPQGDRFLQKSWIFFRPVMADKLTRIAIGNHDKCKPKKRRQECKKSCPVVRMGKLCIEVTPQSKIAWISETLCIGCGICIKKCPFGALSIVNLPSNLEKETTHRYCANAFKLHRLPIPRPGEVLGLVGTNGIGKSTALKILAGKQKPNLGKYDDPPDWQEILTYFRGSELQNYFTKILEDDLEAIIKPQYVDQIPKAAKGTVGSILDRKDETKTQAIVCQQLDLTHLKERNVEDLSGGELQRFACAVVCIQKADIFMFDEPSSYLDVKQRLKAAITIRSLINPDRYIIVVEHDLSVLDYLSDFICCLYGVPSAYGVVTMPFSVREGINIFLDGYVPTENLRFRDASLVFKVAETANEEEVKKMCMYKYPGMKKKMGEFELAIVAGEFTDSEIMVMMLGENGMGKTTFIRMLAGSLKPDEGGEVPVLNVSYKPQKISPKSTGSVRQLLHEKIRDAYTHPQFVTRLXXKPLQIENIIDQEVQTLSGGELQRVTLALXLGQNLPDVYLIDEPPAYLDSEQRLMAARVVKRFIPHAKKTAFVVGTWTFIMATYLADRVIVFDGVPSTKNTVANSPQTLLGWAXINFWSSAWKFTFQEELQTNYWPRINKLISLEDVDQKKSGNYFFLDD

SEQ ID NO: 8903 - protein, 539 aa, Homo sapiens
  DOMAIN (300)..(311): Zinc finger C-x8-C-x5-C-x3-H type (and similar) domain identified by eMATRIX, accession number PF00642, p-value=3.700e-16, raw score of 11.59
  DOMAIN (247)..(314): Zinc finger C-x8-C-x5-C-x3-H type domain identified by PFam, accession name zf-CCCH, E-value=2.7e-29, PFam score of 107.6
GARSEAAEFQQSASCRRLRGGGGPGTPGRGGALLASLLPPCRTPPDPPDGSCRCTRPLLSPLGKLSAPPRPRPLFVVAQAGHAPQGLLPTSRPAAPATAGSRNMSTTLLSAFYDVDFLCKTEKSLANLNLNNMLDKKAVGTPVAAAPSSGFAPGFLRRHSASNLHALAHPAPSPGSCSPKFPGAANGSSCGSAAAGGAVGGRRTALLNKENKFRDRSFSENGDRSQHLLHLQQQQKGGGGSQINSTRYKTELCRPFEESGTCKYGEKCQFAHGFHELRSLTRHPKYKTELCRTFHTIGFCPYGPRCHFIHNADERRPAPSGGASGDLRPTSRTPPPPSCSSASSCSSSASSCSSASAASTPSGAPTCCASAPAAAAAALLYGTGGAEDLLAPGAPCAACSSASCANNAFAFGPELSSLITPLAIQTHNFAAVAAAAYYRSQQQQQQQGLAPPRAPAPPSATLPAGAAAPPSPPFSFQLPRRLSDSPVFDAPPSPPDSLSDRDSYLSGSLSSGSLSGSESPSLDPGRRLPIFSRLSISDD

SEQ ID NO: 8904 - protein, 601 aa, Homo sapiens
  DOMAIN (313)..(324): Zinc finger C-x8-C-x5-C-x3-H type (and similar) domain identified by eMATRIX, accession number PF00642, p-value=3.700e-16, raw score of 11.59
  DOMAIN (262)..(335): Zinc finger C-x8-C-x5-C-x3-H type domain identified by PFam, accession name zf-CCCH, E-value=6e-11, PFam score of 44.0
  misc_feature (1)...(601): Xaa = X or * as defined in Table 2
GARSEAAEFQQSASCRRLRGGGGPGTPGRGGALLASLLPPCRTPPDPPDGSCRCTRPLLSPLGKLSDPPRPSPVIRGGSSPATPPQGLLPTSRPAAPATAGSRNMWTTLVSAFYDVDFLCKTEKYLANLNLNNMLDKKAVGTPVAAAPSSGFAPGFLRRHSASNLHALAHPAPSPGSCSPKFPGAANGSSCGSAAAGGPTSYGTLKEPSGGGGTALLNKENKFRDRSFSENGDRSQHLLHLQQQQKGGGGSPDQIPTRYKTELCRPFEEERARAQYGEKCQFAHGFHELRSLTRHPEVQDRSCAAPFHTIGFCPYGPRCHFIHNADERRPAPSGGASGDLRAFGTRDALHLGFPREPRPKLHHSLSFSGFPSGHHQPPGGLESPLLLDSPTSRTPPPPSCSSASSCSSSASSCSSASAASTPSGAPTCCASAAAALRLLYGTGGAXDLLAPGAPCAACSSASCANNAFAFGPELSSLITPLAIQTHNFAAVAAAAYYRSQQQQQQQQQGLAPPAQPPAPPSATLPAGAAAPPSPPFSFQLPRRLSDSPVFDAPPSPPDSLSDRDSYLSGSLSSGSLSGSESPSFDPGRRLPIFSRLSISDD

SEQ ID NO: 8905 - protein, 85 aa, Homo sapiens
RKLDVYFEYEEKIMSKTTLDKSLLDIISDPDAGTPEDKMRVFLIYYISTQQAPSEAFTKMASAPASYGSTTTKPMGLLSRVMNTG

SEQ ID NO: 8906 - protein, 62 aa, Homo sapiens
  misc_feature (1)...(62): Xaa = X or * as defined in Table 2
MXVXCNQIKXLVSYRAINRPDITDTEMETVMDTIVDSLFCFFVTLGAVPIIRCSRGNSSKKW

SEQ ID NO: 8907 - protein, 161 aa, Homo sapiens
  misc_feature (1)...(161): Xaa = X or * as defined in Table 2
SSIMTFLESSAVPPHWTGQDGRVCWTGWIPQCQAGSAPERSXVFINSAGQKSADTGWSSSKPQNXQLSSTGAALPLASLSRERAWVDDGKHRLTTPMTVPQRAVQQLXETSGXXDWRQKVQIFQQAVVGMIQPSHSQFLQREDVIMLRPFGLHLSWEENGS

SEQ ID NO: 8908 - protein, 149 aa, Homo sapiens
  misc_feature (1)...(149): Xaa = X or * as defined in Table 2
MGFRHVGQAGLELLTSGDLPASAYQSAGITDVSHCAQPASPLSYFLQALKHEFVVRHLTPGHLDTQTPDTKKPGHPDTQTLDTQTPSHLTSRHPDTQTADTQTPDTQNLTPGPPDTXHPDTWHLTPDTQTPGHPTLRHPDTQIPRHPET

SEQ ID NO: 8909 - protein, 676 aa, Homo sapiens
  DOMAIN (79)..(126): Sec1 family domain identified by eMATRIX, accession number PF00995A, p-value=8.105e-19, raw score of 20.59
  DOMAIN (136)..(676): Sec1 family domain identified by PFam, accession name Sec1, E -value=5.4e-144, PFam score of 491.8
  misc_feature (1)...(676): Xaa = X or * as defined in Table 2
PAPGLPVLPRVEVFLEEPGSGSWEPRWRRRRQRQQQQQPSFRKDSQLLSCVYCLSMCLILKTAQEHPYGRYSLMHRFGQDIFSPLLSVRELRDMGITLHLLLHSDRDPIPDVPAVYFVMPTEENIDRMCQDLRNQLYESYYLNFISAISRSKLEDIANASVRGLSAVTQVAKVWDQYLNFITLEDDMFVLCNQNKELVSYRAINRPDITDTEMETVMDTIVDSLFCFFVTLGAVPIIRCSRGTAAEMVAVKLDKKLLENLRDARNSLFYRVDTLGAGHFSFQRPLLVLVDRNIDLATPLHHTWTYXALVHDVLDFHLNRVNLEESSGVENSPAGARPKRKNKKSYDLTPVDKFWQKHKGSPFPEVAESVQQELESYRAQEDEVKRLKSIMGLEGEDEGAISMAFSDNTAKLTSAVSSLPELLEKKRLIDLHTNVATAVLEHIKARKLDVYFEYEEKIMSKTTLDKSLLDIISDPDAGTPEDKMRLFLIYYISTQQARSEADLQQYKKALTDAGCNLNRSRYIKQXRAFTKMASAXAGYGSTTTKTMGLLSRVLNTGSQFVMEGVKNLVLKQQNLPVTRILDNLMEKKSNPRKLMDYRYFDPKNACGGNDSSVPQKLKIPFPRGHSFFVGGEEGNYIEYQNLCDYIKGKQGKHILYGCSELFNATQFIKQLSQLGQK

SEQ ID NO: 8910 - protein, 131 aa, Homo sapiens
  DOMAIN (109)..(131): O-Glycosyl hydrolase family 30 domain identified by PFam, accession name Glyco_hydro_30, E-value=1.2e-10, PFam score of 45.6
AGGRAASCLQSLTARGPSLQSRPGAFAGCGGISFCLRLGLLFLFADVDPLSFRDSGTPVVFSSSNDPEGMEFSSPSREECPKPLSRVSIMAGSLTGLLLLQAVSWASGARPCIPKSFGYSSVVCVCNATYC

SEQ ID NO: 8911 - protein, 179 aa, Homo sapiens
  DOMAIN (17)..(46): GLYCOSYL HYDROLASE FAMILY 30 SIGNATURE domain identified by eMATRIX, accession number PR00843D, p-value=9.786e-29, raw score of 15.07
  DOMAIN (4)..(142): O-Glycosyl hydrolase family 30 domain identified by PFam, accession name Glyco_hydro_30, E-value=2.2e-100, PFam score of 346.9
RIYIFRVPMASCDFSIRTYTNADTPDDFQLHNFSLPEEDTKLKIPLIHRALQLAQRPVSLLASPWTSPTWLKTNGAVNGKGSLKGQPGDIYHQTWARYFVKFLDAYAEHKLQFWAVTAENEPSAGLLSGYPFQCLGFTPEHQGGSLKAAAGVPRHPDDSYGTSQEKWQLLKEKMFEPKK

SEQ ID NO: 8912 - protein, 611 aa, Homo sapiens
  DOMAIN (177)..(204): GLYCOSYL HYDROLASE FAMILY 30 SIGNATURE domain identified by eMATRIX, accession number PR00843C, p-value=8.650e-32, raw score of 18.03
  DOMAIN (73)..(580): O-Glycosyl hydrolase family 30 domain identified by PFam, accession name Glyco_hydro_30, E-value=0, PFam score of 1124.8
GRYLHPCFCLVDPLSFRDSGTPVVFSSSNDPEGMEFSSPSREECPKPLSRVSIMAGSLTGLLLLQAVSWASGARPCIPKSFGYSSVVCVCNATYCDSFDPPTFPALGTFSRYGESTRSGRTGWSLSMGPIQANHTGTGLLLTLQPEQKFQKVKGFGGAMTDAAALNILALSPPAQNLLLKSYFSEEGIGYNIIRVPMASCDFSIRTYTYADTPDDFQLHNFSLPEEDTKLQDTPGFHRALQLAQRPVSLLASPWTSPTWLKTNGAVNGKGSLKGQPGDIYHQTWARYFVKFLDAYAEHKLQFWAATAKNEPSAGLLSGYPFQCLGFTPEHQRDFIARDLSPTLANSTHHNVRLLMLDDQRLLLPHWAKVVLTDPEAAKYVHGIAVHWYLDFLAPAKATLGETHRLFPNTMLFASEACVGSKFWEQSVRLGSWDRGMQYSHSIHQQTSWYHVVGWTAGNLALNPEGGPNWVRNFVDSPIIVDITKDTFYKQPMFYHLGHFKQSSIPEGSQRVGLVASQKNDLDAVALMHPDGSAVVVVLNRSSKDVPLTIKDPAVGFLETISPGYSIHTYLWRRQLDGADYSRRHWGSAGAFKGTESAHTLSVTKEGTAGPV

SEQ ID NO: 8913 - protein, 559 aa, Homo sapiens
  DOMAIN (205)..(234): GLYCOSYL HYDROLASE FAMILY 30 SIGNATURE domain identified by eMATRIX, accession number PR00843D, p-value=6.100e-33, raw score of 15.07
  DOMAIN (79)..(559): O-Glycosyl hydrolase family 30 domain identified by PFam, accession name Glyco_hydro_30, E-value=1.1e-286, PFam score of 965.8
  misc_feature (1)...(559): Xaa = X or * as defined in Table 2
PSAYSYGRYLHPCFCLVDPLSFRDSGTPVLFSSSSDPEVMEFSSPSREECPKPSGRVSIMAGSLTGLLLLQAVSWASGGRPCIPKSFSYSSVVCVCNATYCDFDPPTFPALGAFSRYKSRSSGHWMELSTGPIQANCTGTGLLLILQPEFQKVKGFGGAVTDAGALNILALSPPAQNLLLKWYFSEEGIGYNIIWVPMASXDFSIRTYTYADTPDDFQLHNFSLPEEDTKLKIPLIHRALQLAQRPVSLLASPWTSPTRLKTRGAGNGKGPLKGQPRDIYHQTWARYIVKFLDAYAEHKLQFWAVTAENEPSAGLLSGYPFQCLGFTPEHQRDFIARDLGPTLANGTHHNVRLLMLDDQRLLLPHWAKVVLTDPEAAKYVHGIAVHWYLDFLAPAKATLRETHHLFPNTMLFASEACVGSKFWEQSVRLGSWDRGMQYSQSIIKKLPVPMWVGWEPNWITPSLXNITQATRFNKQPMFLPPLANFSKFIPEGSQRVGLVASQKNDLDAVALMHPDGSPVVVVLNRSSKDVPLTIKDPAVGFLETISPGYSIHTYLWRRQ

SEQ ID NO: 8914 - protein, 134 aa, Homo sapiens
  misc_feature (1)...(134): Xaa = X or * as defined in Table 2
ALGMAHITLFFFFLLLFCDSLALSPRLQCSGTISAHCNLVPPGFKQFSCLSLLGSWDYRCMPPCRWLTFVFLVETGFHHVGQAGLELLTSGDPPALAFPKCXDYRRDPRAWALFVFLTXFFSKLKYHKAKEKWS

SEQ ID NO: 8915 - protein, 79 aa, Homo sapiens
  misc_feature (1)...(79): Xaa = X or * as defined in Table 2
LIPCGPQLFNCLSLXPGFWAMVKFAWVQYVRSCLSSSGCLKESRSSCSESGGDHHPLSSTSLPLSLFMLCKEVLELSGR

SEQ ID NO: 8916 - protein, 45 aa, Homo sapiens
GGLPLGVETLAGEHLRPCSSPATSLPGASLSQEWWSPPDSETRRS

SEQ ID NO: 8917 - protein, 63 aa, Homo sapiens
  misc_feature (1)...(63): Xaa = X or * as defined in Table 2
CFVTSNLKCSKXGRAWWFIPVISTLWEAKVGGSLEPRSLRLQCAMIAPLYCSLGDRVRPYLLK

SEQ ID NO: 8918 - protein, 447 aa, Homo sapiens
  DOMAIN (83)..(93): Eukaryotic  RNA-binding region RNP-1 proteins domain identified by eMATRIX, accession number BL00030B, p-value=3.368e- 09, raw score of 7.03
  DOMAIN (49)..(115): RNA recognition motif. domain identified by PFam, accession name rrm, E-value=3.7e-20, PFam score of 80.4
  misc_feature (1)...(447): Xaa = X or * as defined in Table 2
GVVPPGLLAGEGVCQLLRHSSPGRCLLKSRARGSVIMSRYGRYGGETKVYVGNLGTGAGKGELERAFSYYGPLRTVWIARNPPGFAFVEFEDPRDAEDALRGLDGKVICGSRVRVELSTGMPRRSRFDRPPARRPFDPNDRCYECGEKGHYAYDCHRYSRRRRSRAENLRRXSPXQXIWLTIGAPLRFRKRNTRLTTFPTRKIFLRQSSLTWLIWLSVXSSLDXRKHLDAAIGYRYFXIVXIYXTMGQRGSTCKLARFMLNTHYSVLYYVMLSCNSAFNKSFFRXXKKKYSTTNRPRVYFQMRHXIXIVLRFDFSRGTQTLKNELLSDILFFLXLEKXSRSRSHSRSRGRRYSRSRSRSRGRRSRSASPRRSRSISLRRSRSASLRRSRSGSIKGSRYFQSPSRSRSRSRSISRPRSSRSKSRSPSPKRSRSPSGSPRRSASPERMD

SEQ ID NO: 8919 - protein, 168 aa, Homo sapiens
  misc_feature (1)...(168): Xaa = X or * as defined in Table 2
LRSRCVQIQGSPATEPVSGSHCADTGLVIRGGALSAHAIAPGQRLSHALHTASAYINSGRMWDTVHLPQKRCVRPRPQGRVRTPRTRATHNRVVGARRGTPQRYTGWGRDXEPSLSQLPQNGDLLAARRREHPACSTGCTSGARVRSRVWRAGQALVPGCAGCAYILH

SEQ ID NO: 8920 - protein, 276 aa, Homo sapiens
  DOMAIN (167)..(187): CORONAVIRUS NUCLEOCAPSID PROTEIN domain identified by eMATRIX, accession number DM01206B, p-value=1.570e-09, raw score of 10.69
  DOMAIN (48)..(115): RNA recognition motif. domain identified by PFam, accession name rrm, E-value=8.7e-13, PFam score of 55.9
  misc_feature (1)...(276): Xaa = X or * as defined in Table 2
VVPPGLLAGEGVCQLLRHSSPGRCLLKSRARGSVIMSRYGRYGGETKVYVGNLGTGAGNGELYRVIRXYGPLRTVWIARNPPGFAFVEFEDPRDAEDAVRGLDGKVICGSRVRVELSTGMPRRSRFDRPPARRSFDPNDGCYECGEKGHYAYDCHRYSRRRRSRSRFRSHSRSRGRRYSRSRSRSRGRRSRSASPRRSRSPISLRRSRSASLRRSRSGSIKGSRYFPIPRRRSRSKIPGLFHGPRSSRSKSRSPSPKRSRSPSGSPRRSASPERMD

SEQ ID NO: 8921 - protein, 223 aa, Homo sapiens
  DOMAIN (36)..(66): OSTEOPONTIN SIGNATURE domain identified by eMATRIX, accession number PR00216A, p-value=5.000e-35, raw score of 10.94
  DOMAIN (35)..(223): Osteopontin domain identified by PFam, accession name Osteopontin, E-value=2.7e-54, PFam score of 193.8
  misc_feature (1)...(223): Xaa = X or * as defined in Table 2
DHASGQSTASSGPDSVSGQLQPSQPNADQGKLTTMRIAVICFCLLGITCAIPVKQADSGSSEEKQLYNKYPDAVATWLNPDPSQKQNLLAPQNGCVLXRNQXLXTRTLPSKSNESHDHMDDMDDEGDDDHVDSQDSIDSNDSDDVDDTDDSHQSDESHHSDESDELVTGFSTDLPATEVFTPVVPTVDTYDGRGDSVVYGLRSKSKKFRRPDIKYPDATDEDI

SEQ ID NO: 8922 - protein, 354 aa, Homo sapiens
  DOMAIN (45)..(75): OSTEOPONTIN SIGNATURE domain identified by eMATRIX, accession number PR00216A, p-value=4.706e-28, raw score of 10.94
  DOMAIN (45)..(354): Osteopontin domain identified by PFam, accession name Osteopontin, E-value=5.3e-93, PFam score of 322.4
  misc_feature (1)...(354): Xaa = X or * as defined in Table 2
LIAGSTHACAHASGRAQHRRDQTRLKASCSLLSQTPTKENSLPRELPVICFCLLGITCAIPVKQADSGSSEEKQLYNKYPDAVATWLNPDPSQKQNLLAPQTLPSKSNESHDHMDDMDDEDDDDHVGTARDSIDSNDSDDVDDTDDSHQSXWSLHHSXWNLDELVTGFFPTGPCPGNRSFSIPVCSPTVDTYDGRGDSVVYGLRSKSKKFRRPDIQYPDATDEDITSHMESEELNGAYKAIPVAQDLNAPSDWANRGKDSYGTSKLDXQSAETHRHQQSRLYKRKANDESNEHSDCDWXARTFPKVSREFHSHEFSSHGDFACLXPPKSKEEDNTPLEFRYSPGIRMWHFWGSI

SEQ ID NO: 8923 - protein, 96 aa, Homo sapiens
  DOMAIN (34)..(59): ALDO-KETO REDUCTASE SIGNATURE domain identified by eMATRIX, accession number PR00069A, p-value=9.609e-24, raw score of 16.01
  DOMAIN (25)..(96): Aldo/keto reductase family domain identified by PFam, accession name aldo_ket_red, E-value=1.6e-37, PFam score of 135.5
GSLDLWRGAELSPGHSTLFTLCACAKVKAAVKYALSVGYRHIDCAAIYGNEPEIGEALKEDVGPGKAVPREELFVTSKLWNTKHHPEDVEPALRKT

SEQ ID NO: 8924 - protein, 78 aa, Homo sapiens
  DOMAIN (8)..(49): Aldo/keto reductase family domain identified by PFam, accession name aldo_ket_red, E-value=1.8e-17, PFam score of 64.9
EEAPRNSRKVISIPKSITPSRILQNIMVFDFTFSPEEMKQLNALNKNWRYIVPMLTVRMYQPPRLGECEIWGGILAQV

SEQ ID NO: 8925 - protein, 359 aa, Homo sapiens
  DOMAIN (55)..(80): Aldo/keto reductase family proteins domain identified by eMATRIX, accession number BL00798B, p-value=4.000e-16, raw score of 16.01
  DOMAIN (41)..(230): Aldo/keto reductase family domain identified by PFam, accession name aldo_ket_red, E-value=1.2e-13, PFam score of 51.6
  misc_feature (1)...(359): Xaa = X or * as defined in Table 2
AQATGPYSRICACAKGAMAASCVLLHTGQKMPLIWSWGTWKSEPGQVKAAVKVLPLALGYRHIDCGVIYGNELEIGEALKGRTVGPGKAGCLRGRKPGFVTSKLWNTKHHPEGMWSLPLRKDSGLTFQLEYLDLYLMHWPYAFERGDNPFPKKCDWNIWLDSPHYKETXRALKALVAKGLVQAVWGLSNFNSRQIDDILSVASVRPAVLQVECHPITGLKMRLIAHCQGTWAWRXTAFNPLGLPLNRAWRDPDEPVPAGGNPVVLGIGLKKYGRSPSSESCLRWPGPSGKVICIPKSITPFSNPFRTFKVFDFTFSPEEMNQLNALNKNWRYIVPMLTVDGKRVPKDAGHPLYPFNDPY

SEQ ID NO: 8926 - protein, 89 aa, Homo sapiens
  misc_feature (1)...(89): Xaa = X or * as defined in Table 2
LLTSLVNSRILILFINSKKIFAIIIFSTRGGILRITAVIWNNISVTHGNGDMALAQYSMPVPAXAIGRRILVMLYPSRTEAFEKFLIRC

SEQ ID NO: 8927 - protein, 35 aa, Homo sapiens
NFFFFSFRRPDAPVPDGESEKTVEESSDSESSFSD

SEQ ID NO: 8928 - protein, 209 aa, Homo sapiens
  misc_feature (1)...(209): Xaa = X or * as defined in Table 2
TRGPPPAEEMDEDGLPLMGSGIDLTKVPAIQQKRTVAFLNQFVVHTVQFLNRFSTVCEEKLADLSLRIQQIETTLNILDAKLSSIPGLDDVTVEVSPFKLSPSVTNGAHPXRPLSEQPQPEPVPPGLLDLQESXSIQAGNFLXLXPKDPRYARYLKMVQVGVPVMAIRNKMISEGLDPDLLERPDAPVPDGESEKTVEESSDSESSFSD

SEQ ID NO: 8929 - protein, 135 aa, Homo sapiens
  DOMAIN (70)..(92): ACUTE MYELOID LEUKEMIA 1 PROTEIN SIGNATURE domain identified by eMATRIX, accession number PR00967B, p-value=5.883e-10, raw score of 13.15
  misc_feature (1)...(135): Xaa = X or * as defined in Table 2
LKEITDEMVYRTLLHSHRIKMVSPIFPFSTNTVPFFPCYNPFFMNIQEMTKVTASRLFLFFVDLLQGVQPCFLCCCLCSIWFCNEHLDLXXASDFVMCMCVYMHIYTPIHVXYIHYIYVDTYMEVCIHLYIIXCV

SEQ ID NO: 8930 - protein, 36 aa, Homo sapiens
MLARLGSNSWTSSDPPTSASQTAGITGVSHRAGPLT

SEQ ID NO: 8931 - protein, 347 aa, Homo sapiens
  DOMAIN (181)..(196): LIM domain proteins domain identified by eMATRIX, accession number BL00478B, p-value=8.435e-14, raw score of 14.79
  DOMAIN (7)..(341): LIM domain containing proteins domain identified by PFam, accession name LIM, E-value=1e-18, PFam score of 71.2
  misc_feature (1)...(347): Xaa = X or * as defined in Table 2
MAEKFDCHYCRDPLQGKKYVQKDGHHCCLKCFDKFCANTCVECRKPIGADSKEVHYKNRFWHDTCFRCAKCLHPLANETFCGQGQQDPCNKCTTREDSPKCKGCFKAIVAGDQNVEYKGTVWHKDCFTCSNCKQVIGTGSFFPKGEDFYCVTCHETKFAKHCVKCNKAITSGGITYQDQPWHADCFVCVTCSKKLAGQRFTAVEDQYYCVDCYKNFVAKKCAGCKNPITGEKDCVKSEPPSLXSXEAPSVPRETLASHPVSQRQPPGQASGWREDLSLVGGGSLXKKSKLSSSSWPGFGKGSSVVAYEGQSWHDYCFHCKKCSVNLATKRFVFPQEQVYCPVCAKKL

SEQ ID NO: 8932 - protein, 291 aa, Homo sapiens
  DOMAIN (133)..(148): LIM domain proteins domain identified by eMATRIX, accession number BL00478B, p-value=6.500e-12, raw score of 14.79
  DOMAIN (16)..(291): LIM domain containing proteins domain identified by PFam, accession name LIM, E-value=3e-08, PFam score of 34.3
  misc_feature (1)...(291): Xaa = X or * as defined in Table 2
GPSSYKVGTMAEKFDCHYCRDPLQGKKYVQKDGHHCCLKCFDKFCANTCVECRKPIGADSKEVHYKNRFWHDTCFRCAKCLHPLANETFCGQGQQRSCATSCTTREGLPPSAKGCFKAIVAGDQNVEYKGTVWHKDCFTCSNCKQVIGTGSFFPKGKDFYCVTCHETKFAKHCVKCNKAIASWGVTYXDEPWHAEGFVCVTCSKKLAVQHFTTVEDQXYCVDCYKNFVAKKCAGCKNPITGFGKGSSVVAYEGQSWHDYCFHCKKCSVNLANKRFVFHQEQVYCPDCAKKL

SEQ ID NO: 8933 - protein, 133 aa, Homo sapiens
  misc_feature (1)...(133): Xaa = X or * as defined in Table 2
KCSSSKHFTKEDSQITNKHIEKCSSXLLVREMQIITTKSVSAIHQNGXNENTKQTCQDIDNDMQQWEFMRXEWANWXNXKTNWQXLLRLDKCVSYDPAIPFLDISPTERHIYAYHKTCIRMFKATLFKIAPNI

SEQ ID NO: 8934 - protein, 438 aa, Homo sapiens
  DOMAIN (131)..(152): DNAJ PROTEIN FAMILY SIGNATURE domain identified by eMATRIX, accession number PR00625B, p-value=1.529e-19, raw score of 13.48
  DOMAIN (90)..(156): DnaJ domain identified by PFam, accession name DnaJ, E-value= 1.6e-30, PFam score of 114.8
  misc_feature (1)...(438): Xaa = X or * as defined in Table 2
VRRRTLSSRRWHRLSHGPRWLPQVLTASPPLQARGAFRSFPHSWGEDFLASLMFKIQLEPLKLRAWTLNGFVKFRNKETSAGPVAVMGKDYYKILGIPSGANEDLIVCAYRTMALKYHPDKNKEPNAEEKFKEIAEAYDVLSDPKKRGLYDQYGEEGLKTGGGTSGGFRGFFHYTFYGDPHATFASFFGGSNPFDIFFASSRSTRPFSGFDPDDMDVDEDEDPFGALFGRFGFQWGXVGGPRRAPGTIVTLGRQGCRDPPVVHELRVSLEEIYHGSTKRMKITRRRLNPDGRTVRTEDKILHIVIKRGWKEGTKITFPKEGDATPDNIPADIVFVLKDKPHAHFRRDGTNVLYSALISLKEALCGCTVNIPLFDGRGIPLPCNDVIKPGTVKRLRGEGLPFPKVPTQRGDLIVEFKVRFPDRLTPQTRQILKQHLPCS

SEQ ID NO: 8935 - protein, 80 aa, Homo sapiens
  DOMAIN (61)..(80): UTP--glucose-1-phosphate uridylyltransferase domain identified by PFam, accession name UDPGP, E-value=0.019, PFam score of 12.8
TPPISQLLKEEEDLSKAMSQDGASQFQEVIRQELELSVKKELEKILTTASSHEFEHTKKDLDLTVQQIEHLNKTYNTDVP

SEQ ID NO: 8936 - protein, 578 aa, Homo sapiens
  DOMAIN (107)..(550): UTP--glucose-1-phosphate uridylyltransferase domain identified by PFam, accession name UDPGP, E-value=3e-143, PFam score of 489.3
  misc_feature (1)...(578): Xaa = X or * as defined in Table 2
RVDKGGLAAGLRPLGRGSRCACVREEREREGRLRGDFQPASLLSRGAINAPNFPACLKEEEDLSKAMSQDGASQFQEVIRQELELSVKKELEKILTTASSHEFEHTQKKTWMDFRKLFHRFLQRKGAFLWNLGEKFQRPPXDSIQPYEKIKARGLPDNISSVLNKLVVVKLNGGLGTSMGCKGPKSLIGVRNENTFLDLTVQQIEHLNKTYNTDVPLVLMNSFNTDEDTKKILQKYNHCRVKIYTFNQSRYPRINKESLYFPVAKDVSYSGENTEAWYPPGHGDIYASFYNSGLLDTFIGEGKEYIFVSNIDNLGATVDLYILNHLMNPPNGKRCEFVMEVTNKTRADVKGGGDNSLQYGRANLRTWWEIAQVPKAHHVDEFKSVSKFKIFNTNNLWISLAAVKRLQEQNAIDMEIIVNAKTLDGGLNVIQLETAVGAAIKSFENSLGINVPRTRFLPVKTTSDLLLVMSNLYSLNAGSLTMSEKREFPTVPLVKIRPVLFRKVQDYLKGFEKIQNRLELDHLTVSGRCDHLEKNGFIKGEPVIHPLQIHGDRMDIPTWEPVFREPRLVSGNLRILDH

SEQ ID NO: 8937 - protein, 115 aa, Homo sapiens
  DOMAIN (10)..(45): Troponin domain identified by eMATRIX, accession number PF00992A, p-value=9.839e-14, raw score of 16.67
  misc_feature (1)...(115): Xaa = X or * as defined in Table 2
GRAETMSDIEEVVEEYEEEGQEEAAVEEEEDWREDEDEQEEAAEEDSEAEAXDTRETRAEEDEXYEDASDAEDGPMEESELKPWSXRPNLVLPXVLIXFIVVYVDLHRLCMEXDE

SEQ ID NO: 8938 - protein, 93 aa, Homo sapiens
RSNVTITRGCEPGASACSRCCPQGAPALLTLDPQKPPTFTMSDEEVEQVEEQYEEEEEAQEEEEKPRPKLTAPKIPEGEKVDFDDIQKKRQNK

SEQ ID NO: 8939 - protein, 107 aa, Homo sapiens
  DOMAIN (53)..(88): Troponin domain identified by eMATRIX, accession number PF00992A, p-value=5.154e-21, raw score of 16.67
  DOMAIN (18)..(106): Troponin domain identified by PFam, accession name Troponin, E-value=0.079, PFam score of -3.2
CEKTTEGEKVDFDDIQKKRQNKDLMELQALIDSHFEARKKEEEELVALKERIEKRRAERAEQQRIRAEKERERQNRLAEEKARVQMLAKFSKKAGTPAKGKVGGRWK

SEQ ID NO: 8940 - protein, 142 aa, Homo sapiens
  DOMAIN (40)..(75): Troponin domain identified by eMATRIX, accession number PF00992B, p-value=4.000e-30, raw score of 26.31
  DOMAIN (9)..(141): Troponin domain identified by PFam, accession name Troponin, E-value=0.047, PFam score of -0.1
RAEVALKKKKALSSMRAHYSSYLAKADQKRGKKQTAREMKKKILAERRKPLNIDHLGEDKLRDKAKELWETLHQLEIDKFEFGEKLKRLKYDITTLRSRSWDSTSSSPHNPVRGSLTVLGVERPSRGVPRVCVLAAFIPWGL

SEQ ID NO: 8941 - protein, 172 aa, Homo sapiens
  DOMAIN (40)..(111): Eukaryotic protein kinase domain identified by PFam, accession name pkinase, E-value=2.5e-06, PFam score of 26.7
  misc_feature (1)...(172): Xaa = X or * as defined in Table 2
PMDQVMCRTXKGXMGGQRDVSPTASEQVSTARPGPRAVIDYSKADAWAVGAIAYEIFGLVNPFYGQGKAHLESRSYQEAQLPALPESVPPDVRQLVRALLQREASKRPSARVAANGLHLSLWGEHILALKNLKLDKMVGLAPPKIGRHFVGQTGSQEEVVVLETKNEDALFG

SEQ ID NO: 8942 - protein, 323 aa, Homo sapiens
  DOMAIN (179)..(190): PROTEIN REPEAT MUSCLE CALCIUM-BI domain identified by eMATRIX, accession number PD00301B, p-value=7.955e-10, raw score of 5.49
  DOMAIN (119)..(284): Troponin domain identified by PFam, accession name Troponin, E-value=5.7e-11, PFam score of 49.9
  misc_feature (1)...(323): Xaa = X or * as defined in Table 2
HTPATQSLANGLLGRSNVTITRGCEPGASACSRCCPQGAPALLTLDPQKPPTFTMSDEEVEQVEEQYEEEEEAQEEAAEVHEEVHEPEEVQEEEKPRPKLTAPKIPEGEKVDFDDIQKKRLNKDLMELQALIDSHFEARKKEEEELSALLERIEKRRAERAEQQRIRAEKERERQNRLAEEKARREREDATRRAEDDLKKKKALSSMGANYSSYLGPRLDQKRGKKQTAREMKKKILAERRKPLQPSIHLGERQNXGDQGQRSFWETLHQLEDLTKFEFGEKLKRQKYDITTLQEPECRCWPESTSKEGLGPPAKGKVGGRWK

SEQ ID NO: 8943 - protein, 456 aa, Homo sapiens
  DOMAIN (48)..(63): WILM'S TUMOUR PROTEIN SIGNATURE domain identified by eMATRIX, accession number PR00049D, p-value=4.966e-09, raw score of 0.00
  misc_feature (1)...(456): Xaa = X or * as defined in Table 2
PPGLEARPAPARLAGSGVCSGGRGRGAGRRSRRQSMRGAARAAWGRAGQPWPRPPAPGPPPPPLPLLLLLLAGLLGGAGAQYSSDRCSWKGSGLTHEAHRKEVEQVYLPCAAGAVEWMYPTGALIVNLRPNTFSPARHLTVCIRSFTDSSGANIYLEKTGELRLLVPDGDGRPGRVQCFGLEHGGLFVEATPQSQDIGRRTTGFQYELVRRHRASDLHELSGECPARSSSSSSSSSSSSSPPARAANSHLKWRWSQRCLDVDTLPDLALLSVRILXRWWAAFQSLSRPGCFLTLPFFSAPCRPCSDTEVLLAVCTSDFAXVSPRQLLSSSSSSSSSSSSSSPHLLPRTAVRGSIQQVTHEPERQDSAIHLRVSRLYRQKSRVFEPVPEGDGHWQGRVRTLLECGVRPGHGDFLFTGHMHFGEPRLRCAPKASRTFQRMYRDAQERGLNPLVGWQRN

SEQ ID NO: 8944 - protein, 144 aa, Homo sapiens
NNPDFKAGVMALPTLLQIQRHDDYLVMLKAIRILVQERLTQDAVAKANQTKEGLPVALDKHILGFDTGDAVLNEAAQILRLLHIEELRELQTKINEAIVAVQAIIHFWHVWKSKCHILGGGSPENWVCSRDLPPLLIAFFFNKV

SEQ ID NO: 8945 - protein, 153 aa, Homo sapiens
YLRDVDCPFKIQDRQEAIHWLLGLAVRLEYGDNVNNPDFKAGVMALANLLQIQRHDDYLVMLKAIRILVQERLTQDAVAKANQTKEGLPVALDKHILGFDTGDAVLNEAAQILRLLHIEELRELQTKINEAIVAVQAIIADPKTDHRLGKVGR

SEQ ID NO: 8946 - protein, 364 aa, Homo sapiens
  misc_feature (1)...(364): Xaa = X or * as defined in Table 2
SFRSDSAPARPLAASPVPAPPAPPRFFSPGRGPGDQSEKRWTMFRRKLTGSSTTYSPFVFNRRDETEFRNFIVWLEDQKIRHYKIEDRGNLRNIHSSDWPKVLEKYFKDVNCPFKIQDRQETIDWLLGLAVRLEYGRXWLKNTKDLVPXXFQNLLDNATKNAEPFDPFWDVNNPXFXGLVLLALGXTWLQIQRHDDFLVMLKANSGFWVQEPPXPPGMPVCLRANSNKRGAXPVAFRQTHILGFDTGDASSLMKLLEILRIACTXEELRELTDQKSTKAIVAVQAIYCXSKRQDHRLGKSLEDEHFEDLQLLTYFRYMLGNHTLLACFGKSKCHNSRGEGSPEKLGYGSRGFYHHWLIASCFFL

SEQ ID NO: 8947 - protein, 297 aa, Homo sapiens
  DOMAIN (257)..(269): Pentapeptide repeat proteins (8 copies) domain identified by eMATRIX, accession number PF00805D, p-value=3.520e-09, raw score of 7.78
  DOMAIN (201)..(285): Pentapeptide repeats (8 copies) domain identified by PFam, accession name Pentapeptide, E-value=4.1e-16, PFam score of 67.0
MYQYQNQATQQECSICLEHGMKIKSESQVLAKGRKVAKGGESEWVEGGEGREEKKHSRNIYQRPAVSQVVAVYGTLSDLLSVASSKLGIKATSVYNGKGGLIDDIALIRDDDVLFVCEGESFIDPQTDSKPPEGLLGFHTDWLTLNVGGRYFTTTRITPTRQIFAVQILNELISGSVLNCANLQGVKMLCSNAEGASLKLCNFEDPSGLKANLEGANLKGVDMEGSQMTGINLRVATLKDAKLKNCNLRGATLAGTDLENCDLSGCDLQEANLRGSNVKGAVFEEMLTPLHMSQSVR

SEQ ID NO: 8948 - protein, 328 aa, Homo sapiens
  DOMAIN (288)..(300): Pentapeptide repeat proteins (8 copies) domain identified by eMATRIX, accession number PF00805D, p-value=9.640e-09, raw score of 7.78
  DOMAIN (242)..(316): Pentapeptide repeats (8 copies) domain identified by PFam, accession name Pentapeptide, E-value=5.7e-14, PFam score of 59.8
MAAEPVEDNCINFVAMKFIDNTLYFIENLESDYFGKLESKLSVIRNLNDQVLFIDQGNRPLFEDMTDSDCRGQKGGEGRRIQVGGGGEGREEKKVGGGPGGRVVAHSGPSGGSVMRRMTLFLNGSPKNGKVVVVYGTLSDLLSVASSKLGIKATSVYNGKGGLIDDIALNRDDDVLFVCEGEPFIDPQTDSKPPEGLLGFHTEWLTLNVGGRYFTTTRSTLVNKEPDSMLAHMFKDKGVWGTNLEGVNLKGVDMEGSQMTGINLRVATLKNAKLKNCNLRGATLAGTDLDNCDLCGCDLQEANLRGSNMKGAIFEEMLTPLYMSQSVR

SEQ ID NO: 8949 - protein, 639 aa, Homo sapiens
  DOMAIN (105)..(132): Mrp family proteins domain identified by eMATRIX, accession number BL01215A, p-value=4.964e-11, raw score of 9.75
  DOMAIN (543)..(627): Pentapeptide repeats (8 copies) domain identified by PFam, accession name Pentapeptide, E-value=4.1e-16, PFam score of 67.0
MKLMETLNQCINAGHEMTKAIAIAQFNDDSPEARKITRRWRIGEAADLVGVSSQAIRDAEKAGRLPHPDMEIRGRVEQRVGYTIEQINHMRDVFGTRLRRAEDVFPPVIGVAAHKGGVYKTSVSVHLAQDLALKGLRVLLVEGNDPQGTASMYHGWVPDLHIHAEDTLLPFYLGEKDDVTYAIKPTCWPGLDIIPSCLALHRIETELMGKFDEGQLSTDPHLMLRLAIETVAHDYDVIVIDSAPNLSIGTINVSSRCTRCCIVLYVWSTALDYDSSSSSSTYYRQVTTVTDVTVTLAMALTSDPSSANDPSVRLYHVHWHPLSIYLRRPDLRSINPCALDRIELSYLAIAHKINSLGLQQCSKESLIDTRLATREKKFLLKSVPLKAQRLRFFKDNLHSRNIYQRPAVSQVVAVYGTLSDLLSVASSKLGIKATSVYNGKGGLIDDIALIRDDDVLFVCEGESFIDPQTDSKPPEGLLGFHTDWLTLNVGGRYFTTTRITPTRQIFAVQILNELISGSVLNCANLQGVKMLCSNAEGASLKLCNFEDPSGLKANLEGANLKGVDMEGSQMTGINLRVATLKDAKLKNCNLRGATLAGTDLENCDLSGCDLQEANLRGSNVKGAVFEEMLTPLHMSQSVR

SEQ ID NO: 8950 - protein, 469 aa, Homo sapiens
  DOMAIN (427)..(439): Pentapeptide repeat proteins (8 copies) domain identified by eMATRIX, accession number PF00805D, p-value=3.520e-09, raw score of 7.78
  DOMAIN (169)..(269): K+ channel tetramerisation domain identified by PFam, accession name K_tetra, E-value=3.8e-22, PFam score of 87.0
  misc_feature (1)...(469): Xaa = X or * as defined in Table 2
FVGKGPRQAEDSRCGAGRRTGRTLGEGQRACVWCVPKGRKVAKGGESEWVEGGEGREEKKVGGGPGGRVAAHSGPTGGSAMRRVTLFLNGSPNNGKAGAGYGTLSDLLSGGSSKPGIKATNVYNGKGGLIDDIALIRDDDVLFVCEGEPFIDPQTDSKPPEGLLGFHTDWLTLNVGGRYFTTTRSTLVNKEPDSMLAHMFKDKGVWGNKQDHRGAFLIDRSPEYFEPILNYLRHGQLIVNDGINLLGVLEEARFFGIDSLIEHLEVAIKNSQPPEDHSPISRKEFVRFLLATPTKSELRCQGLNFSGADLSRLDLRYINFKMAQFKPLXFAHANLCXANLERTDLYGSVLDCANLQGVKMLCSNAEGASLKLCNFEDPSGLKANLEGANLKGVDMEGSQMTGINLRVATLKNAKLKNCNLRGATLAGTDLENCDLSGCDLQEANLRGSNVKGAIFEEMLTPLHMSQSVR

SEQ ID NO: 8951 - protein, 106 aa, Homo sapiens
PRRRWALLLSESSGLGGVHVVLSLGRVRAAARVGPAVGVCSVEMGRKLEPGSSSHSLPAPAPRHHLLVGSALMPQLSLQRDLDFTIDLDFKGQLCELSCSTDYRMR

SEQ ID NO: 8952 - protein, 93 aa, Homo sapiens
  misc_feature (1)...(93): Xaa = X or * as defined in Table 2
TGFCFFSRVKCNGTILGPCNLXISGSKYFSGLSLPSKWDFRFAPPRPGNFLFFXXTRFSPVYQDGFDFLTSICPPLGLPKLLEFRGAPPLPSE

SEQ ID NO: 8953 - protein, 468 aa, Homo sapiens
  misc_feature (1)...(468): Xaa = X or * as defined in Table 2
MAAAEAANCIMELPRAFGIRPSGGSYPPSHVEEGWGRFRPGPHVAAARPPPRGPGHTPWGVIDLGPSTMWGVSWEEQCFSALYQPPSELRGHLLGYRTRFCAFWVSCGQAESSEKPNAEDMTSKDYYIXLHTHTFGIHEEMLKDEVRTLTYRNSMFHNRHLFKDKVVLDVGSGTGILCMFCCQGPWPRKVIGIECSSYSSXLWRXRCVQANKLRPRRGTSIKGKGGRKVELPVGERWDIIHQRVGWGYCLFLTESMLQHRALMPRDKWLAPDGLIFPDRAQLYVTAIRGTGRYKDSRSHLLGENVYGFDMSCIKDVPIKEPLVDVVDPKQLVTQRLAFIKEVDIYTVKVEDLTFNLPRFCPCKLKRNXLTCTALVTLLSTFEFTHCHKRTGGTGFFHQPPRSPYTHWKQTVFYMEDYLTRERRAEEIFGTIGMRPNAKEQPGTLDFTIDLDFKGQLCELSCSTDYRMR

SEQ ID NO: 8954 - protein, 15 aa, Homo sapiens
RIDYDEFLEFMKGVE

SEQ ID NO: 8955 - protein, 189 aa, Homo sapiens
  DOMAIN (162)..(175): EF-hand calcium-binding domain proteins domain identified by eMATRIX, accession number BL00018, p-value=9.250e-13, raw score of 7.41
  misc_feature (1)...(189): Xaa = X or * as defined in Table 2
GRVGGRVGCEPPAWIDIYKAAGRSSFEQEXARKMSSXAAFRTSFVLGAEDGCISTQGSWGKVMRMHGPEPHPMRELQEMIDEVDEDGSGTVDFDEFLVMMVRCMKDDSKGKFXGRSLSDLLPACFDQKMLDGYIDLDELEDXLLQATGRDPFTEDDDIEELMKDGDKNNDGRIDYDEFLEFMKGVGVDA

SEQ ID NO: 8956 - protein, 122 aa, Homo sapiens
  DOMAIN (92)..(102): INSULIN A CHAIN SIGNATURE domain identified by eMATRIX, accession number PR00276B, p-value=8.200e-12, raw score of 8.02
VKDLEHTKMITPTVKMHTMSSSHLFYLALCLLTFTSSATAGPETLSSSSSSSSSSSSSSSSSSSSSSSSSSSSSSSSSSSSSSSSSSPFRSCDLRRLEMYCAPLKPAKSARSVRAQRHTDMP

SEQ ID NO: 8957 - protein, 150 aa, Homo sapiens
  DOMAIN (111)..(121): INSULIN A CHAIN SIGNATURE domain identified by eMATRIX, accession number PR00276B, p-value=8.200e-12, raw score of 8.02
PIHFQTLSSEAMGKISSLPTQLFKCCFCDFLKVKMHTMSSSHLFYLALCLLTFTSSATAGPETLSSSSSSSSSSSSSSSSSSSSSSSSSSSSSSSSSSSSSSSSSSPFRSCDLRRLEMYCAPLKPAKSARSVRAQRHTDMPKTQKYQPPS

SEQ ID NO: 8958 - protein, 151 aa, Homo sapiens
  DOMAIN (112)..(122): INSULIN A CHAIN SIGNATURE domain identified by eMATRIX, accession number PR00276B, p-value=8.200e-12, raw score of 8.02
NHSIFRLCTSEAMGKISSLPTQLFKCCFCDFLKVKMHTMSSSHLFYLALCLLTFTSSATAGPETLSSSSSSSSSSSSSSSSSSSSSSSSSSSSSSSSSSSSSSSSSSPFRSCDLRRLEMYCAPLKPAKSARSVRAQRHTDMPKTQKYQPPS

SEQ ID NO: 8959 - protein, 226 aa, Homo sapiens
  DOMAIN (121)..(141): Insulin family proteins domain identified by eMATRIX, accession number BL00262B, p-value=2.059e-19, raw score of 16.89
  DOMAIN (82)..(140): Insulin/IGF/Relaxin family domain identified by PFam, accession name Insulin, E-value=1.2e-24, PFam score of 95.3
HCSQHLPSLWISFCFIIPANQFIFRLCTSEAMGKISSLPTQLFKCCFCDFLKVKMHTMSSSHLFYLALCLLTFTSSATAGPETLCGAELVDALQFVCGDRGFYFNKPTGYGSSSRRAPQTGIVDECCFRSCDLRRLEMYCAPLKPAKSARSVRAQRHTDMPKTQKYQPPSTNKNTKSQRRKGWPKTHPGGEQKEGTEASLQIRGKKKEQRREIGSRNAECRGKKGK

SEQ ID NO: 8960 - protein, 222 aa, Homo sapiens
  DOMAIN (124)..(144): Insulin family proteins domain identified by eMATRIX, accession number BL00262B, p-value=2.059e-19, raw score of 16.89
  DOMAIN (88)..(151): Insulin/IGF/Relaxin family domain identified by PFam, accession name Insulin, E-value=0.017, PFam score of 5.4
  misc_feature (1)...(222): Xaa = X or * as defined in Table 2
HCSQHLPSLWISFCFIIPANQFIFRLCTSEAMGKISSLPTQLFKCCFCDFLKVKMHTMSSSHLFYLALCLLTFTSSATAGTGDGSAGAELVDALQVPCVEDRGFYFNKPTGYGLPAVRRAPQTGIVDECCFRSCDLRRLEMYCAPPQACPSQLRSVRAQRHTDMPQDPERKYIXRTQVEGVQETRTTGLLEDPPGGVKSDMPPQDPLLCTSYLLNFGTPTKK

SEQ ID NO: 8961 - protein, 98 aa, Homo sapiens
  DOMAIN (14)..(42): !!!! PROTEIN ALU SUBFAMILY WARNING ENTRY NUCLEAR PHOSPHO domain identified by eMATRIX, accession number PD02454B, p-value= 5.286e-28, raw score of 11.61
  misc_feature (1)...(98): Xaa = X or * as defined in Table 2
SQHSVGPRQADRLRSGVRDQPGQHGETPSILKIQKLPGRGGACLXSQLLGSLRRENCLNPGGRGCSEPRSHHCSPAWMTEXDSISKNKXINKNEIKKK

SEQ ID NO: 8962 - protein, 99 aa, Homo sapiens
  DOMAIN (49)..(74): Mitochondrial energy transfer proteins domain identified by eMATRIX, accession number BL00215A, p-value=5.800e-15, raw score of 15.82
  DOMAIN (39)..(99): Mitochondrial carrier proteins domain identified by PFam, accession name mito_carr, E-value=6.5e-08, PFam score of 30.0
IQTFLGLGKNWWATCTDLYLINIRSMSTCYLCSISDQVDATLIPITNFSCGIFAGILASLVTQPADVIKTHMQLYPLKFQWIGQAVTLIFKDYGLRGFF

SEQ ID NO: 8963 - protein, 92 aa, Homo sapiens
  DOMAIN (13)..(26): Mitochondrial energy transfer proteins domain identified by eMATRIX, accession number BL00215B, p-value=7.600e-09, raw score of 10.44
  DOMAIN (4)..(49): Mitochondrial carrier proteins domain identified by PFam, accession name mito_carr, E-value=5.2e-07, PFam score of 27.0
MAIKSIYAALRSIYHSEGHRGLFSGLTATLLRDAPFSGIYLMFYNQTKNIVPHDQGPPLGMFLGQAIHKAQRSCKPALPGPEELPTQGKNWK

SEQ ID NO: 8964 - protein, 154 aa, Homo sapiens
  misc_feature (1)...(154): Xaa = X or * as defined in Table 2
SIFPGVVIEHLTLTFIYYHFIINRTSQGIDSQILSLFLFFFCFFETESRSVTQAGVQWRHLGSLQPPPPWFKRFSCLSLQSSWGYRHVPPHPGXFLVFLVGDGGFTMLGQGWSQNSCTSRRSTRLRLAQPLFSQFKNCFKNCKSSIGLIPLYYY

SEQ ID NO: 8965 - protein, 128 aa, Homo sapiens
  misc_feature (1)...(128): Xaa = X or * as defined in Table 2
KCINCKVYFTGVFFLIPTCQMQIHIFVCLCLVIISIHISFFYFIYFYDIISXMCNLXILLDYFNPLEITIHAFCIQFMXXLIYLCFKCILFCGFLLGCFLCFLLKIYRFXXSXFSFSLKCIYSFYSLV

SEQ ID NO: 8966 - protein, 136 aa, Homo sapiens
SCREFCLSCPRLSLRSLTAVTCTVWLAAYGLFTLCENSMILSAAIFITLLGLLGYLHFVKIDQETLLIIDSLGIQMTSSYASGKESTTFIEMGKVKDIVINEAIYMSAKPRLDCLIEVYRSCQEILAHQKATSTSP

SEQ ID NO: 8967 - protein, 106 aa, Homo sapiens
ALQRRYYSPFCREFCLSCPRLSLRSLTAVTCTVWLAAYGLFTLCEVMASRPLPALEGGGSALGGSLGSLVEPGPLVGPSYSDRTGGRELTGSGDDIPLLDSSLNDV

SEQ ID NO: 8968 - protein, 220 aa, Homo sapiens
  misc_feature (1)...(220): Xaa = X or * as defined in Table 2
SGRDDQGRRAQCSAARCGRPSGGVMEDERSFSDICGGRLALQRRYYSPSCREFCLSCPRLSLRSLTAVTCTVWLAGYGLFTLCENSMILSAGIFITLLRPLGVSPSVKNDQETLLIIDSLGIQMTSSYGSGKESTTFIEMGKVKEIFVNNEAIYMVSIXKHKAIYYLWNLFEKIPVEPHGDIPKYVPVFQSAKPRLDCLIEVYRSCQEILAHQKATSTSP

SEQ ID NO: 8969 - protein, 436 aa, Homo sapiens
  DOMAIN (264)..(275): PROTEIN REPEAT MUSCLE CALCIUM-BI domain identified by eMATRIX, accession number PD00301B, p-value=3.864e-10, raw score of 5.49
  misc_feature (1)...(436): Xaa = X or * as defined in Table 2
RTPERCLREVGKATGWPECILTXQTIIPRPYPSVGTAASDTKKKKINNGTNPETTTSGGCHSPEDAQVQTIRILTCQKTELQMALYYSQHAVKQLEGEARDLISRLHDSWKFAGELEQALSAVATQKKKADRYIEELTKERDALSLELYRNTITDEELKEKNAKLQEKLQLVESEKSEIQLNVKELKRKLERAKLLLPQQQLQAEADHLGKELQSVSAKLQAQVEENELWNRLNQQQEEKMWRQEEKIQEREEKIQEQEEKIREQEEKMRRQEEMMWEKEEKMRRQEEMMWEKEEKIRELEEKMHEQEKIREQEEKRQEEEKIREQEKRQEQEAKMWRQEEKIREQEEKIREQEKKMWRQEEKIHEQEKIREEEKRQEQEEMWRQEEKIREQEEIWRQKEKMHVRTDEISVCSIFQGFISVGFLCKFAYPFDCFTL

SEQ ID NO: 8970 - protein, 148 aa, Homo sapiens
  DOMAIN (20)..(54): Ubiquitin family domain identified by PFam, accession name ubiquitin, E-value=0.00056, PFam score of 16.8
  misc_feature (1)...(148): Xaa = X or * as defined in Table 2
VACCVRIPGPPRRSGPAMAVTITLKTLQQQTFKIRMEPDETVKVLKEKIEAEKGRDAFQNMRQVIQQNPALLPALLQQLGQENPQLLQQISRHQEQFIQMLNEPPGELADISDVEGEVGAIGKEAPQMNYIQVTPQEKEAIXRLKALG

SEQ ID NO: 8971 - protein, 147 aa, Homo sapiens
  DOMAIN (42)..(94): Ubiquitin domain proteins domain identified by eMATRIX, accession number BL00299, p-value=8.200e-23, raw score of 28.84
  DOMAIN (24)..(105): Ubiquitin family domain identified by PFam, accession name ubiquitin, E-value=1.7e-14, PFam score of 49.3
VPAEVACCVRIPGPPRRSGPAMAVTITLKTLQQQTFKIRMEPDETVKVLKEKIEAEKGRDAFPVAGQKLIYAGKILSDDVPIRDYRIDEKNFVVVMVTKTKAGQGTSAPPEASPTAAPESSPAQPAQRSWQDLEATDGPLLGSVQLS

SEQ ID NO: 8972 - protein, 399 aa, Homo sapiens
  DOMAIN (39)..(91): Ubiquitin domain proteins domain identified by eMATRIX, accession number BL00299, p-value=8.811e-17, raw score of 28.84
  DOMAIN (21)..(77): Ubiquitin family domain identified by PFam, accession name ubiquitin, E-value=2.9e-07, PFam score of 27.0
  misc_feature (1)...(399): Xaa = X or * as defined in Table 2
VAMCVEIPGPAASLGPRHWPVTITLKTLQQQTFKIRMEPDETVKVLKEKIEAEKGRDAFPVAGQKLIYAGKILSDDVPIRDLFAFDGGRNFVVRSWVTKTKAGQGYLQAPPGGPSPHSLPQSPLTSFPPCPHLQACSIPPLAGQRRHKSPSEESGPKTFPESVSGSVPSSGSGSGREEDAASTLVNGAFEYXGRWLTEIMSMGYERERVVAALRASYNNPHRAVEYLLTGIPGSPEPEHGSVQESQVSEQPATEAAGENPLEFLRDQPQFQNMRQVIQEEPLRCCPALLPASWAQENPQLLTAKSARPPRSQFIQMLERSPPGEAWADISDVEGEVGAIGEEAPQMNYIHGDARRRKEAIERXKALGFPESLVIQPYFACEKNEDLAANFSLSQNFDDE

SEQ ID NO: 8973 - protein, 135 aa, Homo sapiens
ASDRPESRATHASGKSPVFSDEDSDLDFDISKLEQQSKVQNTGHGKPREKSIIDEKFFQLSEMEAYLENREKEEERKDDNDDESVKSSRNVNNKDFFDPVESDEDIASDHDDELGSNEDDEIAEEEAEEGSISEI

SEQ ID NO: 8974 - protein, 51 aa, Homo sapiens
  misc_feature (1)...(51): Xaa = X or * as defined in Table 2
MXKTLQELRAHENEITXVRKVTFNGLNQMIVIGLPPSLTELHLGWQQNQQS

SEQ ID NO: 8975 - protein, 158 aa, Homo sapiens
  DOMAIN (66)..(80): LEUCINE-RICH REPEAT SIGNATURE domain identified by eMATRIX, accession number PR00019B, p-value=4.000e-11, raw score of 11.36
  DOMAIN (20)..(114): Leucine Rich Repeat domain identified by PFam, accession name LRR, E-value=1.3e-13, PFam score of 58.7
SYIRIADTNITSIPQGLPPSLTELHLDGNKISRVDAASLKGLNNLAKLGLSFNSISAVDNGSLANTPHLRELHLDNNKLTRVPGGLAEHKYIQVVYLHNNNISVVGSSDFCPPGHNTKKASYSGVSLFKNPQYWEIQPSTFRCVYVRSAIQLGNYKKK

SEQ ID NO: 8976 - protein, 212 aa, Homo sapiens
  DOMAIN (121)..(135): LEUCINE-RICH REPEAT SIGNATURE domain identified by eMATRIX, accession number PR00019B, p-value=4.000e-11, raw score of 11.36
  DOMAIN (75)..(169): Leucine Rich Repeat domain identified by PFam, accession name LRR, E-value=1.3e-13, PFam score of 58.7
MKATIILLLLAQVSWAGPFQQRGLFDFMLEDEASGIGPEVPDDRDFEPSLGPVCPFRCQCHLRVVQCSDLGLPPSLTELHLDGNKISRVDAASLKGLNNLAKLGLSFNSISAVDNGSLANTPHLRELHLDNNKLTRVPGGLAEHKYIQVVYLHNNNISVVGSSDFCPPGHNTKKASYSGVSLFSNPVQYWEIQPSTFRCVYVRSAIQLGNYK

SEQ ID NO: 8977 - protein, 356 aa, Homo sapiens
  DOMAIN (274)..(288): LEUCINE-RICH REPEAT SIGNATURE domain identified by eMATRIX, accession number PR00019B, p-value=4.000e-11, raw score of 11.36
  DOMAIN (94)..(308): Leucine Rich Repeat domain identified by PFam, accession name LRR, E-value=7.7e-21, PFam score of 82.7
  misc_feature (1)...(356): Xaa = X or * as defined in Table 2
IMKATIILLLLAQVSWAGPFQQRGLFDFMLEDEASGIGPEVPDDRDFEPSLGPSVCPFRCQCHLRVVQCFLILGLDKVTKGIFSPLNTTLLDLQNNKITEIKDGDFKNLKNLHALILVNNKISKVSPGAFTPLVKVEERLYLSKESAXRELPEKMPKTLQELRALEDXEFTKVRKVTFNGLNQMIVIELGTNPLKSSGIENGAFQGMKKLSYIRIADTNITSIPQGLPPSLTELHLDGNKISRVDAASLKGLNNLAKLGLSFNSISAVDNGSLANTPHLRELHLDNNKLTRVVYLHNNNISVVGSSDFCPPGHTPKRASYSGVSLFSNPVPQYWEIQHPTFRCVYVRSAIQLGNYK

SEQ ID NO: 8978 - protein, 372 aa, Homo sapiens
  DOMAIN (103)..(123): LRR REPEAT domain identified by eMATRIX, accession number DM01022C, p-value=3.571e-09, raw score of 19.84
  misc_feature (1)...(372): Xaa = X or * as defined in Table 2
IMKATIILLLLAQVSWAGPFQQRGLFDFMLXDEASGIGPEVPDDRDFEPSLGPMCPFPLQCHLRVGQGSDLCLEQMPKDLPPDTTLLDLQNNKITEIKDGDFKNLKNLHALILVNNKISKVSPGAFTPLVKLERLYLSKNQLKELPEKMPKTLQELGAHEEWDHQKWRKSXLFNGLNPMIVHRNWAPIPLKSSGIENGAFQGMKKLSYIGIADTNITSIPQGLPPSHTKLHLDGKQKSSRVDAASLKGLNNLAKLGIEFSNSISAGXTNGLSGPTRPHLRELHLGQQQALPRVPWWGWAEHXVHPRLSXPFITNQYLCRLGSSDFCPPGHNTKKASYSGVSLFSNPVQYWEIQPSTFRCVYVRSAIQLGNYK

SEQ ID NO: 8979 - protein, 514 aa, Homo sapiens
  DOMAIN (94)..(129): Glycosyl hydrolases family 1 proteins domain identified by eMATRIX, accession number BL00572C, p-value=6.400e-30, raw score of 20.73
  DOMAIN (1)..(473): Glycosyl hydrolase family 1 domain identified by PFam, accession name Glyco_hydro_1, E-value=2.8e-177, PFam score of 602.3
  misc_feature (1)...(514): Xaa = X or * as defined in Table 2
TMAFPAGFGWAAATAAYQVEGGWDADGKGPCVWDTFTHQGGERVFKNQTGDVACGSYTLWEEDLKCIKQLGLTHYRFSLSWSRLLPDGTTGFINQKGIDYYNKIIDDLLKNGVTPIVTLYHFDLPQTLEDQGGWLSEAIIESFDKYAQFCFSTFGDRVKQWITINEANVLSVMSYDLGMFPHARSHFGTGGYQAAHNLIKAHARSWHSYDSLFRKRQKGMVSLSLFPARLEPADPNSVSDQEAAKRAITFHLDLFAKPIFIDGDYPEVVKSQIASMSQKQGYPSSRLPEFTEEEKKMIKGTADFFAVQYYTTRLIKYQENKKGELGTLQDAEIEFFPDPSWKNVDWIYVVPWGVCKLLKYIKDTYNNPVIYITEDGFPQEXPSAFWMDTSTLGSIFRQTFQELFKAIQLDKVNLQVYCAWSLLDNFEWNQGYSSRFGLFHVDFEDPARPRVPYTSAKXYAKIIRNNGPXRTRGAWLLWPKGALLLAAEDPSRQLLKPWLSLQDLDGRQPLQLIK

SEQ ID NO: 8980 - protein, 290 aa, Homo sapiens
  misc_feature (1)...(290): Xaa = X or * as defined in Table 2
FQQRLYRAARRFTMVKIAFNTPTAVQKEEARQDVEALLSRTVRTQILTGKELRVCHPGKKEGSSGEMLWFTLFRAFQFILGGLYLFGGACIYKYTFMPKRHHFTVGEMCFFDSEDPANFPFGGGEPXLSCLVTXEEADIREDDNIAIIDVPVPSFSDSDPAANYFMTFEKGMTAYLDLLLGNCYLMPLQYFYLLWPPKKIWVELFGQTGRVGRYLPQTYVVREDLVAVSRKIRDVSNLGIFIYQLCNNRKSFRLRRRDLLLGFNKRAIDKCWKIRHFPNEFIVETKICQE

SEQ ID NO: 8981 - protein, 101 aa, Homo sapiens
  misc_feature (1)...(101): Xaa = X or * as defined in Table 2
DFAXVXRDRVKFKGTCFLFVXWFLKFFFKMEFLLPRLECNGKIHCNLLLMGSSNSPTSASQVAGDYRHVLIWWFLIEMEGFPMLVRAGLKLLYLEWIGSAF

SEQ ID NO: 8982 - protein, 99 aa, Homo sapiens
  misc_feature (1)...(99): Xaa = X or * as defined in Table 2
SPRCNPSPLPQAFQGSGDCPLPCTAAGLMCAWRSAREPCLLPHPCLPRVWHRRDPCSQPTSQGXTEALPILCKXKPPPWPPQEISPSQWIHQSPADPAL

SEQ ID NO: 8983 - protein, 17 aa, Homo sapiens
  misc_feature (1)...(17): Xaa = X or * as defined in Table 2
XNILSVIAVRKLFTAAX

SEQ ID NO: 8984 - protein, 664 aa, Homo sapiens
  DOMAIN (519)..(530): PROTEIN REPEAT MUSCLE CALCIUM-BI domain identified by eMATRIX, accession number PD00301B, p-value=3.455e-10, raw score of 5.49
MSKETRQSKLAEAKEQLTDHHPQTNPSVGTAASDTKKKKINNGTNPETTTSGGCHSPEDEQKASHQHQEALRRELEAQVHTIRILTCQKTELQMALYYSQHAVKQLEGEARDLISRLHDSWKFAGELEQALSAVATQKKKADRYIEELTKERDALSLELYRNTITDEELKEKNAKLQEKLQLVESEKSEIQLNVKELKRKLERAKLLLPQQQLQAEADHLGKELQSVSAKLQAQVEENELWNRLNQQQEEKMWRQEEKIQEWEEKIQEQEEKIREQEEKIREQEEKMRRQEEMMWEKEEKMRRQEEMMWEKEEKMRRLEEMMWEKEEKIRELEEKMHEQEKIREQEEKRQEEEKIREQEKRQEQEAKMWRQEEKIREQEEKIREQEKKMWRQEEKIHEQEKIREEEKRQEQEEMWRQEEKIREQEEIWRQKEKMHEQEKIRKQEEKVWRQEEKMHDQEEKIREQEEKMWRQEEKIREQEEKIREQEEKIREQEEKIREQEEMMQEQEEKMGEQEEKMQEQEKMRRQEEKIREQEEKIREQKEKIREQEEKIWEQEEKIREQEEMMQEQEEKMWEQEEKMCSRKRRCKNRRRKYVFARIIQRVYLLNHIIRNRKSVQILVLSCSDFLNSKNSHLLPDTLMLEDKAYLQIESCLIPNEEEYQYLAE

SEQ ID NO: 8985 - protein, 499 aa, Homo sapiens
  DOMAIN (48)..(497): Sugar (and other) transporter domain identified by PFam, accession name sugar_tr, E-value=0.023, PFam score of -126.7
  misc_feature (1)...(499): Xaa = X or * as defined in Table 2
PESVGGGKTLQQEEKQLQPCMQMDNRLPPKKVPGFCSFRYGLSFLVHCCNVIITAQRACLNLTMVVMVNSTDPHGLPNTSTKKLLDNIKNPMYNWSPDIQGIILSSTSYGVIIIQVPVLGYFSGIYSTKKMIGFALCLSSVLSLLIPPAAGIGVAWVVVCRAVQGAAQGIVATAQFEIYVKWAPPLERGRLTSMSTSGFLLGPFIVLLVTGVICESLGWPMVFYIFGACGCAVCLLWFVLFYDDPKDHPCISISEKEYITSSLVQQVSSSRQSLPIKAILKSLPVWAISIGSFTFFWSHNIMTLYTPMFINSMLHVNIKENGFLSSLPYLFAWDLCGNLAGQLSDFFLTRNILSVIAVRKLFTAAGFLLPAIFGVCLPYLSSTFYSIVIFLILAGATGSFCLGGVFINGLGYCSPDILGFIKACSTLTGNXXGGLIASTLTGLILKQDPESAWFXNLQSLMASPLMVTGPXFSHPYRLPTARNSRDWAKEKQHHTSPEV

SEQ ID NO: 8986 - protein, 122 aa, Homo sapiens
HFSRGYLEAFSEISNIRFVPPHSVTVVVVFGACFLCILGIWPWACLPGPGGEGSGGFGEGRGSEAGRLGSVELTPATLPLQAPEAYPVFEPVPPVPEAAQGDTEDSEGAPPLKRICPNAPDP

SEQ ID NO: 8987 - protein, 256 aa, Homo sapiens
  DOMAIN (107)..(124): MUSCARINIC M1 RECEPTOR SIGNATURE domain identified by eMATRIX, accession number PR00538E, p-value=5.755e-09, raw score of 6.80
  misc_feature (1)...(256): Xaa = X or * as defined in Table 2
PGSTISWRPGLARSLSPPDGRRPRRGLGPGPSPASMAGRTVRAETRSRAKDDIKKVMATIEKVRKWKKRWVTVAATPFRILNWVAVVDPQEEERRREAGGGAERSRGRERRGRGASPRGGGPLILLDLNDENSNQNFHSEGSLQRGTEPSPGGTPKPNRPCVTLPDPPEGGPXEGLSPPRLGQEERSPGGITVGSTYEPPMLTKEEPVPELLEAEAPEAYPVFETVPPVHETAQGDTEDSEGAPPLKRICPNAPDP

SEQ ID NO: 8988 - protein, 89 aa, Homo sapiens
  misc_feature (1)...(89): Xaa = X or * as defined in Table 2
ARSFFLITILIQRTDWRKNKFFPSNFPSNLRTNFLDQFLLKETILRKHRVGLGVLAHTCNPSTLGGRGGWSPXGQEFENSLTNMVNHFS

SEQ ID NO: 8989 - protein, 90 aa, Homo sapiens
  misc_feature (1)...(90): Xaa = X or * as defined in Table 2
GSSYMHFQGEWVIAQCFKKLHRGVCVCVCLCLYTHICIFXYITKAILMNYACIXKNSCHLAHRFVCMCIYICMYVWCGYIVLKITQXCMY

SEQ ID NO: 8990 - protein, 112 aa, Homo sapiens
  DOMAIN (13)..(41): Synaptobrevin proteins domain identified by eMATRIX, accession number BL00417A, p-value=6.040e-12, raw score of 7.74
DMEEASEGGGNDRVRNLQSEVEGVKNIMTQNVERILARGENLEHLRNKTEDLEATGQPSINVCQEGLLSCLPLQRMLLGPPTPLPEALLPRCMPQKAGIELERCQQQANEVT

SEQ ID NO: 8991 - protein, 64 aa, Homo sapiens
  DOMAIN (8)..(62): Synaptobrevin proteins domain identified by eMATRIX, accession number BL00417B, p-value=4.857e-19, raw score of 18.48
FRLARGENLEHLRNKTEDLEATSEHFKTTSQKVARKFWWKNAKMIVLVFIIILFIVLFATGAFS

SEQ ID NO: 8992 - protein, 93 aa, Homo sapiens
  DOMAIN (16)..(70): Synaptobrevin proteins domain identified by eMATRIX, accession number BL00417B, p-value=4.263e-15, raw score of 18.48
NIMTQNVERILARGENLEHLRNKTEDLEATSEHFKTTSQKVARKFWWKNVKMIVLICCHVVCPRRYLGPPEGEKKERWTVAAFLGSLEWAGET

SEQ ID NO: 8993 - protein, 132 aa, Homo sapiens
  DOMAIN (73)..(92): RIBOSOMAL PROTEIN S2 SIGNATURE domain identified by eMATRIX, accession number PR00395A, p-value=1.000e-14, raw score of 16.93
  DOMAIN (76)..(128): Ribosomal protein S2 domain identified by PFam, accession name Ribosomal_S2, E-value=7.8e-13, PFam score of 49.3
MEEASEGGGNDRVRNLQSEVEGVKNIMTQNVERILARGENLEHLRNKTEDLEATGNFYDIWSTDVLEIKEEGVLKFLAAGSHLGSTNLDFQMEQHIYKRKSNGIDIINLEKLLLAACAIENPADVSIILQEY

SEQ ID NO: 8994 - protein, 106 aa, Homo sapiens
  DOMAIN (13)..(41): Synaptobrevin proteins domain identified by eMATRIX, accession number BL00417A, p-value=6.040e-12, raw score of 7.74
  misc_feature (1)...(106): Xaa = X or * as defined in Table 2
DMEEASEGGGNDRVRNLQSEVEGVKNIMTQNVERILARGENLEHLRNKTEDLEKPTSEHFKTTSQKGGSEKFWWKNVKDDCPLICRDCFXSSSLLQLWLFATGAFS

SEQ ID NO: 8995 - protein, 311 aa, Homo sapiens
  DOMAIN (34)..(53): CHROMOSOME CONDENSATION REGULATOR RCC1 SIGNATURE domain identified by eMATRIX, accession number PR00633G, p-value=9.556e- 09, raw score of 13.71
  misc_feature (1)...(311): Xaa = X or * as defined in Table 2
RTLERCLTEVGKATGWPQCILTYARRSLAPVLLGSHHGRGLQTPGKLWSWGKSEEQECEEDGSETETGGQEDLEDLQEEEEVSDMGGDNPEVGKKARNSSKFELRKSPVFSDEDSDLDFDISKLEQQSKVQNKGQGKPREKSIVDDKFFKLSEMDLYLENIHKRXEERKDDNDDELRDSPPQTSPSVGTGATDTKKKKINNGTNPETTTSGGCHSPEDAQVHTIRILTCQKTELQTALYYSQHAARQLEGESRDLVSCLHDSWKFAGELERALSAVTTQKKKADRRQTGAESAAVGELGDTGDTVGSEHWT

SEQ ID NO: 8996 - protein, 284 aa, Homo sapiens
  DOMAIN (55)..(75): SOMATOSTATIN RECEPTOR TYPE 1 SIGNATURE domain identified by eMATRIX, accession number PR00587A, p-value=9.700e-09, raw score of 8.06
  misc_feature (1)...(284): Xaa = X or * as defined in Table 2
AARPTRHLCCGQQGQVLVCGPSAVGRLPLQWGLGLGPTMSSLGGGSQDAGGSSSSSTNGSGGSGSSGPKAGAADKSAVVAAAAPASVADDTPPPGVGTRAVSSVSPSTRACAGSRPLSHYSSFGSSGGSGGGSMMGGESAXQGHCGCSRGLPVGQWAXPGGGHGGGQKQPYLKAQKWCCGQPAEQGRAGHGAGSRGTADAAAVFAVHRDAEARGAGASPADERGGLLACLDMEAVAGAEALNGQSDFPYLGRFPHSTQGLLSLLTPAGVVSWAEKRAAHGRAWA

SEQ ID NO: 8997 - protein, 2911 aa, Homo sapiens
MPGQILVKAAQLFQQKAKSFHRMVLEQLGIYWETNKPGPFHPITHENEFEMNHRGECKTKNYKTSRRKYRRTSLTPRGQQSFLRIQKIGQRYLQYIYQAKASNPECTKNSCKPKDKQPDRNMGKKTLESDKEGLRPKAPIPAPDPVAGRTLIGKEHVPILWGGVLASGTSCSLSPAGSPVHPTTLRDHQLGPPQPLWSCLELQPHQTHNKFVGRGGAKERDRNLARACPPLSQGQWQRPGLNTTINIPAGENLNLVEGPRDPGLALDPARTPTSHQREWAGPLMGQEPGQPPTLTQLLGAGDPTLSAHPQPEQLTAEEQTALSHTASPVCPLSPNSQRPPHLEAPGYLPGGSSRTQPAVLRVAPLGSQCASPVPIAWIENDSIYTEAGKLATSAPGTLPDSSHLGTLFTVYHLTPTLSQAGQGWLSQRRTQRPSLLEWDRKETLAQSGAVMPDTALTPARAFAGAPTPATPTSQQPEGGALHSWPQRWPRKPFPDPRCSAASVVRQALEHMTEISSWCTLPNADSHGNAPHPAPGPLQTLSTCHWLCLGHPPSSDPGLAPPPGTQNRALGSRAPGGLRGLPLALRDGCVHWACPPLAKKWSQNQPQLLRSRNFASALHGAAHFQVFYTEMMGEDPLTSWVPVSGLGIVPRSTSSAPTQLGSGNVAVVGHVRVLPSFHSDGFLQPMSSSGSLAQQSVWASLGSEQQQVPMLPPASPGTPAARAGPVQFEQCLLQSPTWKPYPQLVPFRLCHEAGWSAQKLAQEASSGLAATWAAPTSSCNQGWAPDVKGRGRLGSPGRPAPRRACLLSSCPSGLCWPGGSKMQGRRELGGEPLSDLQEEAASASLRVAPERLSDDSLEWRRTCPDLLLSDGKASISMPREGGSTCTARCPDPGEHSSTWGEFEGFRESSAKSGQFSQSLELLEGPTEPQPPRTTSAPKECSSHQPCQGGPWVTGTSAVPPSEPILSYENILKCAFQEITVQQAAEDVSTIDHFLEISSEEKPGVERVHKLCNESRKLWRALQSIHTTSTSQRLWSESRCQENFFLVLGIDAAQKNLSGGQGHIMEDCDLKEPEGLLTVSSFCLQHCKALIQTKPQGQAFVPHGCGQEVAPLACESLWVRHKGSAGAEIREGRCGEAPLDCEQAQVRGQVRSTVGVQGQTGPASTKMSATSWFLVSSSGARHRLPRELIFVGREECELMLQCPCAQCKPGTELVPSEQALNDAGTWTQAGLPAVAVTPVVAQAVVQETTAWAGPDLLCPVHRAGLLRVPVAANGELGDCHWGGQEPCSCGCQLRRRNLNRVDLESRSVDKQHAVINYDQDRDEHWVKDLGSLNGHACLMKRLSLNGCTASGRSSACVDCVTHMGFERTFVNDMRIPDQKYVTLKLNDVIRFGYDILPLSVPPPGLLLSPQDHSHPVTPEAGLSLLGKRPLLCLPRWALELAHLLLGVDFSAGLLALLLCVRLNTCPHSNMYVLERVQHRVPEEALKHEKYTSQLQVSVKGLAPKRSEALPEHTPYCEASNPRPEKGDRRPGTEAASYRTPLYGQPSWWGEDDGSTLPDAQRQGEPYPERPKGPVQQDGELHGFRAPAEPQGCSFRREPSYFEIPTKETPQPSQPPEVPAHEMPTKDAEAGGGGAAPVVQSHASFTIEFDDCSPGKMKIKDHITKFSLRQRRPPGKEATPGEMVSAETKVADWLVQNDPSLLHRVGPGDDRHSTKSDLPVHTRTLKGHKHEDGTQSDSEDPLAKAASAAGVPLEASGEQVRLQRQIKRDPQELLHNQQAFVIEFFDEDTPRKKRSQSFTHSPSGDPKADKRRGPTPADRDRPSVPAPVQAGGRSSGPQRAGSLKREKTEERLGSPSPASRTPARPFGSVGRRSRLAQDFMAQCLRESSPATRPSPEKVPPVLPAPLTPHGTSPVGPPTPPPAPTDPQLTKARKQEEDDSLSDAGTYTIETEAQDTEVEEARKMIDQVFGVLESPELSRASSATFRPVIRGDRDESDDGGVAQRMALLQEFASRPLGAAPQAEHQGLPVPGSPGGQKWVSRWASLADSYSDPGLTEDGLGRRGGEPEGSLPVRMRRRLPQLPSERADSPAGPESSRRSGPGPPELDSEQPSRLFGQEELDPDSLSDASGSDGGRGPEPGVEPQDSRRRSPQEGPTWSRGRRSPRAPGEPTPASFFIGDQNGDAVLSRKPLAAPGDGEGLGQTAQPSPPARDGVYVSANGRMVIQLRPGRSPEPDGPAPAFLRQESFTKEPASGPPAPGKPPHISSHPLLQDLAATRAARMDFHSQDTHLILKETETALAALEARLLSNSVDAECEGGSTPRPPEDALSGDSDVDTASTVSLRSGKSGPSPTTPQPLRAQKEMSPSPPAAQDPGGTALVSAREQSSERQHHPLGPTDMGRGEPVRRSAIRRGHRPRGSLDWPSEERGPVLAHLPSSDVMASNHETPEATGAGRLGSRRKPAAPPPSPAAREEQSRSSASSQKGPQALTRSNSLSTPRPTRASRLRRARLGDASDTEAADGERGSLGNPEPVGRPAAEQAKKLSRLDILAMPRKRAGSFTGTSDPEAAPARTSFSGRSVELCCASRKPTMAEARAVSRKAANTATTTGPRQPFSRARSGSARYTSNTRRRQQGSDYTSTSEEEYGSRHGSPKHTRSHTSTATQTPRAGSSSRARSRAPGPRDTDDEEEEPDPYGFIVQTAEIAEIARVSSLPCPSRLAVPTCSDSSLGFLALGSHLQRQLPARPGSRFPPAASAPCPSWLAVPTCSDSSLPVLADGSHLQRQLPARPGSRFPPAASAPCASWLAVPTCSVSSLPVLADGSHLQRQLPARPGSRFPLAASAPCPSWLAVPTCSDSSLPVLADGSHLQRQLPARPGSRFPPAASAPCPSWLTVPTCSDSSLPVLALGSHLQRQLPARPG

SEQ ID NO: 8998 - protein, 29 aa, Homo sapiens
  misc_feature (1)...(29): Xaa = X or * as defined in Table 2
MVGENNTQWGRSGSRWLGFSXPRPGXQPV

SEQ ID NO: 8999 - protein, 753 aa, Homo sapiens
  DOMAIN (508)..(523): WILM'S TUMOUR PROTEIN SIGNATURE domain identified by eMATRIX, accession number PR00049D, p-value=3.288e-09, raw score of 0.00
  misc_feature (1)...(753): Xaa = X or * as defined in Table 2
KLEPCGGTPGPRAGSGPCQDPHIPPEGVGGSPDGPGAWPAPNTHSASWSWGPHPECPPPAXAADCRGTDRSESPASPVCPLSPNSQRPPHLEAPGYLPGGSSRTQPAVPTCSPPGIPAVPALCPXPGXKTTPIYTEAGKLATSAPGTPPRQLSPGNAVYCLPPDTHTQPGRAGLAESAPYPEAQPAGVGQEGDAGTEPGPSCQTQHXPPQEPLLGPPPQLPPTSQQPEGGALHSWPQRWPRKPFPDPPLPVRPVWSAKPWNTXRRSPPGAPSPTRTAMGTTTPCPRPSPDSKHVPLALPGAPVPAQILDLLPRQALRTEPSAPEPLAGYGDSPWLCGMAVSTGPVLPWLRNGPRTNHSCCRSRNFASALHGAAPSKSFIRRXWGRTPXPAGCPFPGLGIVPRSTSSAPTQLGSGNVAVVGHVRVLPSFHSDGFLQPMSSSGSLAQQSVWASLGSEQQQVPMLPPASPGTPAARAGPVQFEQCLLQSPTWKPYPPARAFQAVPXSRMVCPEAGPRSQQPAXQPPGLPPPPPATRVGPPDVKGRGRLGSPGRPAPPACMSPEQLPIGPLLAWGLQDARPAGAGGRAFEXPPGGSSQRFPPSGTXEAEXXQFVNGDGPAPTFSCPMGKPASPCPVRAVPPALPDVLTLGNTAALGGSLKAFGNLQPSLDNSPVPXLLEGPTEPQPPRTTSAPKECSSSPTMPGVGPWVTGTSGRPTFLSPFFSYEEHFKVLLFKEITVQQAAEDGFHHRPFPRNKQ

SEQ ID NO: 9000 - protein, 190 aa, Homo sapiens
  DOMAIN (119)..(173): Tubulin subunits alpha beta, and gamma proteins. domain identified by eMATRIX, accession number BL00227F, p-value=1.000e- 40, raw score of 21.16
  misc_feature (1)...(190): Xaa = X or * as defined in Table 2
LTRIPFLGAKYAPVIFAEGAYQXQRSXTEIQMACFKQATRWVKCDPRHGKYMACCLLYRGDVFPKDVNAAIATIKTKRSIQFVDWCPTGFKVGINYSPPTVVPGGDLAKVQRAVCMLSNTTAIAEAWARLDHKFDLMYAKRAFVHWYVGEGMEEGEFSEAREDMAALEKDYEEVGVDSVEGEGEEEGEEY

SEQ ID NO: 9001 - protein, 513 aa, Homo sapiens
  DOMAIN (75)..(130): Tubulin subunits alpha beta, and gamma proteins. domain identified by eMATRIX, accession number BL00227B, p-value=1.000e- 40, raw score of 19.29
  misc_feature (1)...(513): Xaa = X or * as defined in Table 2
LVGDGNPGPGVCSCRLRLLIPYPLCGECISIHVGQAGVQIGNACWELSCLXHGIQPDGQMPKXPKPLGEGDDSFNTFFSETGAGKHVPRAVFVDLEPTVIDEVRTGTYRQLFHPEQVITGKEDAANNYARGNYTIGKEIIDLVLDRIRKLADQCTGLQGFLVFHSFGGGTGSGFTSLLDERLSVDYWQESPSLEFSIYPGAPRFPQPVVEPYNSILTTHTTLEHSGLCPSWVENEAIYDICRRNLDIERPTYTNLNRLISQIVSSITASLRFDGALNVDLTEFQTNLVPLPRHSTSLRPTYAPVNPPSXEKPTHEQAFCSRRSPKCFAFEPSQPRWLKCDPSPMGKYMACCLLYRGDVVPKDVNAAIAHPSKPKRSIQFVDWCPTGFKVAINYQPPTVVPVGDLAKVQKTVCMLSNTTAIAEAWARLDHKFDLMYAKRAFVHWYLGEGMEEGEFSKAREDMAALRKDYEEVGVDSVKGEGEEEGKGILIIHSLFGPCSMSCSQNFSFSLTDRR

SEQ ID NO: 9002 - protein, 115 aa, Homo sapiens
  DOMAIN (8)..(61): Clathrin light chain proteins domain identified by eMATRIX, accession number BL00224B, p-value=1.000e-40, raw score of 16.94
  misc_feature (1)...(115): Xaa = X or * as defined in Table 2
SQVDRXQSEPESIRICREDHMERLQAFDANSRKQEAEWKEKAIKELEEWYARQDEQLQKTKANNRVAEKLSTNNPSLTXLVMSEEAFVNDIDESSPGTEWERVARLCDFNPKSLD

SEQ ID NO: 9003 - protein, 84 aa, Homo sapiens
  DOMAIN (29)..(83): Clathrin light chain proteins domain identified by eMATRIX, accession number BL00224C, p-value=1.000e-40, raw score of 16.60
AVACVARQPPGCSKGVLHKPTYFVVASRAAEEAFVNDIDESSPGTEWERVARLCDFNPKSSKQAKDVSRMRSVLISLKQAPLVH

SEQ ID NO: 9004 - protein, 297 aa, Homo sapiens
  DOMAIN (51)..(73): Clathrin light chain proteins domain identified by eMATRIX, accession number BL00224A, p-value=4.600e-25, raw score of 7.42
  misc_feature (1)...(297): Xaa = X or * as defined in Table 2
ATAVVSVGRLVFVSTGCVRAVQLPAMAELDPFGAPAGAPGGPALGNGVAGAGEEDPAAAFLAQQESEIAGIENDEAFAILDGGAPGPQPHGEPPGGPDAVDGVMNGEYYQESNGPTDSYAAISQVDRLQSEPESIRKWREEQMERLESLDANSPESKKQSWKEKAIKGAXKEWYARQDEQLQKTKANNRVADESFLQTTLRXRDWLCHKHKPSLLQPRTGQPEEALFKDLEGLSPSNEWERVARLCGLXPPSLSKQAKDVSPHGASVLISLKAGPRWGHLKSHPVETLHLQYLNPTQ

SEQ ID NO: 9005 - protein, 92 aa, Homo sapiens
  misc_feature (1)...(92): Xaa = X or * as defined in Table 2
FGGGYIPTWGKGEGILALELNHDISREFCSAPALASRPPPTPPPLLPPTPPLPAPRSPADATPRRVGGPLRXALKPRAPGPGWSRRRCRSWW

SEQ ID NO: 9006 - protein, 89 aa, Homo sapiens
  misc_feature (1)...(89): Xaa = X or * as defined in Table 2
GSGVXDQPGQHGKTPSLLKIQKLAERGGGHLXSQLLRRLRQENHLNPGGRCCSEPRLLHCTPAWVNESKTSSQTNKKISQEWWCVPIVL

SEQ ID NO: 9007 - protein, 272 aa, Homo sapiens
  DOMAIN (148)..(201): Clathrin light chain proteins domain identified by eMATRIX, accession number BL00224B, p-value=6.348e-23, raw score of 16.94
  DOMAIN (44)..(272): Clathrin light chain domain identified by PFam, accession name Clathrin_lg_ch, E-value=2.7e-50, PFam score of 180.5
  misc_feature (1)...(272): Xaa = X or * as defined in Table 2
PSRSLVRVVEFAPQRWLPGVVSVGRLVFVSPVGVRAVQLPAMAELDPFGAPAGAPGGPALGNGVAGAGEENPAAAFLAQQESEIAGIENDRAFAILDGGAPGPQPHGEPAGGPDAVDGVMNGEYYQESNGPTDSYAAISQVDRLQSQPESIRKWREEQMERFGKPFDANSRKQEAEWKEKAIKELEEWYARQDEQLPENQKANNRAQTEARPLXNDIDESSPRPLKWGNGWPRAVXTLNPPKSXAKQAQKMSPPHDASVLILPLKAGPRWCH

SEQ ID NO: 9008 - protein, 195 aa, Homo sapiens
  DOMAIN (125)..(169): Ribosomal protein L6 proteins 2 domain identified by eMATRIX, accession number BL00700D, p-value=1.243e-38, raw score of 21.51
  DOMAIN (12)..(193): Ribosomal protein L6 domain identified by PFam, accession name Ribosomal_L6, E-value=5.3e-64, PFam score of 223.7
MKTIRSNQTVDIPENVITLKGCRVIVKGPRGTLWRDFNHISIELSLLVKKKKRLRLNNTWGENMIKGVTLGFHYKMRSVYAHFPINIVTRENGSFVEIRNFLGEKYIRRVRMRPGVACSVCQTQKHELILEGNDIELVSNSAALIQQATTVKNKHIRKFLDGIYVSEKETAQHIRKFLDGIYVSEKGGSYRATRQ

SEQ ID NO: 9009 - protein, 175 aa, Homo sapiens
  DOMAIN (120)..(164): Ribosomal protein L6 proteins 2 domain identified by eMATRIX, accession number BL00700D, p-value=9.673e-28, raw score of 21.51
  DOMAIN (1)..(175): Ribosomal protein L6 domain identified by PFam, accession name Ribosomal_L6, E-value=1.3e-05, PFam score of 23.2
  misc_feature (1)...(175): Xaa = X or * as defined in Table 2
GTLRRDFNHINVELSLLVKKKKRLRVDTMLGQQKRNWPTRSGLFGSHVQDHDQGVLPLGFPLPRMRVLCMPHFPQSTVVIPGRMGSSLLKIRNFLGVKNTIRRVRMRPGCCLVQYPQAQKDELILEGNDIELVSNSAGLIQQATTVXKQGISGNFLDGIYVSEKGTCSCRLMNKI

SEQ ID NO: 9010 - protein, 112 aa, Homo sapiens
  misc_feature (1)...(112): Xaa = X or * as defined in Table 2
KCNTECFGSLMHFVVVLFIIIIIFLRQQGRSVTRLECSGAILAHCNLRLPGLSNSPASASRVAGTTGTCYRIQLIFVFLVETGFHYVGQAGHKLLTXVIHPPQPPKVLGLQV

SEQ ID NO: 9011 - protein, 52 aa, Homo sapiens
  misc_feature (1)...(52): Xaa = X or * as defined in Table 2
MYLHMPLPPGSTQXXXXXXXXXXXXXXXXHADLTRVGKIIINRMINGLGVRV

SEQ ID NO: 9012 - protein, 64 aa, Homo sapiens
  DOMAIN (37)..(47): GLYCOPROTEIN PROTEIN SPIKE E2 PRECURSOR PEPLOMER domain identified by eMATRIX, accession number PD00866L, p-value=6.471e- 11, raw score of 3.73
  misc_feature (1)...(64): Xaa = X or * as defined in Table 2
LGCYPGPFIHPVKWMIFPDPCEISVTGVCVCGGVCSCGVCGCGCGCLPGGKGICKYIXICSQIL

SEQ ID NO: 9013 - protein, 130 aa, Homo sapiens
  misc_feature (1)...(130): Xaa = X or * as defined in Table 2
SLPRSPLGRGTPSPQHLSSNLNLASLYHPHEITPWIIFSSSGSSIXTPITPSFYPSPTNCDPQIFDPQTPVSGCRLASSQGPSLSNPTSNLSGPQIPFASYPCLLLAPHPSLPASRPQSCPSPKTWAPPS

SEQ ID NO: 9014 - protein, 139 aa, Homo sapiens
TISWNTGPRARSRARGSSTGLDGCVGGGSGGNSGLPCPDLEPLGGLQSKCRLCAPTEARGLWSKVPLFRQVRHLALHACGCREAWPPPGPPPLLVALCFHLKALPSRGSRAGREAVSKHLKFAMLAGGRVCGSRRVLSM

SEQ ID NO: 9015 - protein, 146 aa, Homo sapiens
  misc_feature (1)...(146): Xaa = X or * as defined in Table 2
QCTPSSAADCPELTACYGFSSXPSXGPSPLPWRPRMCESWVLHLPPTPQCFSWDIGPSEVMVRPLGWDTLRGSMLPWXGAGERAGKPLPAPADASPHRSGTGFDRAAGGRGRRRCNRSEEGVIPFAAPRLLPPHAFWRVFPHWETT

SEQ ID NO: 9016 - protein, 197 aa, Homo sapiens
MAASGAGAEVSGRYGREPPPALPPAPCGPRRRRSPPYPAKTYRFFSLWQRGRPDRSSAPIGNSGLPCPDLEPLGGLQSKCRLCAPTEARGLWKKVPLFRQVRHLALHACGCREGLGLPQGPPPLLVLCGFHLKALPTRGSRAGREAVIKLPLSVVPQDMYRKSHAAHLREMSSKAAAQLSWNNAYFGSSKGLSCVWP

SEQ ID NO: 9017 - protein, 114 aa, Homo sapiens
  misc_feature (1)...(114): Xaa = X or * as defined in Table 2
LLFFFFFEMESCSVTRLECSGVISAHCKLCLPGFKRFSCLSLPSSWDYRRMPPRLANFLYFVEMGFHRVAQAGLKLLSSGNLPASAFPKYXNYRRDDASLAACSTFLGLGLLWV

SEQ ID NO: 9018 - protein, 50 aa, Homo sapiens
  misc_feature (1)...(50): Xaa = X or * as defined in Table 2
NYPMSVVPQDMWRKSHAAHILREMSSKTAAQLXWNNAYFGSSKGLSCVWP

SEQ ID NO: 9019 - protein, 232 aa, Homo sapiens
  misc_feature (1)...(232): Xaa = X or * as defined in Table 2
MAASGAGAEVSGRXGREPPPALPPAPCGPRRRRSPPXLPKTYRFFSLWQRGRPDRSSAPIGNSGLPCPDLEPLGRAARSKCRLCAPTEATKACWKXGPSCFRQVRHLALHACGCREGLGLPQGPPTSAGLLCAFTLKALPSRGSPCKEEKLSASTSNFSHAGCGRVCGSRRVLSMLXFSGLKLPLSVVPQDMXRKSHAAHLREMSSKACRSAFDGNNALFLEVSKGLSCVWP

SEQ ID NO: 9020 - protein, 291 aa, Homo sapiens
  DOMAIN (102)..(123): COFILIN/DESTRIN FAMILY SIGNATURE domain identified by eMATRIX, accession number PR00006B, p-value=1.391e-27, raw score of 4.38
  misc_feature (1)...(291): Xaa = X or * as defined in Table 2
GSRTKGRAVPECACAPVGAGEGRPAGVAVSDGVIKVFNDMKVRKSSTPEEVKKRKKAVLFLPXVRTKNNIILEEGKEILVGDVGQTVDDPYATFVSKMLPDKDCRYALYDATYETKESKKEDLVFIFLGPPESAPPLEQNGFMPSSQGRPSKKGSWTGDSSHEFAKPNCLPKEGQGTACTLAREAGGQVPVYSPGRAKPFVSPFWPPCLGASGSPQHLAPWGFAGCPPFLQRPGRAWGGSPAGGGEIPLNPSCPKQTPPNPPGNFPSPSNPLDGFWPFPKLLFESFDSSWG

SEQ ID NO: 9021 - protein, 467 aa, Homo sapiens
  DOMAIN (223)..(243): Orn/DAP/Arg decarboxylases family 2 pyridoxal-P attachment si domain identified by eMATRIX, accession number BL00878C, p-value= 9.400e-18, raw score of 17.74
  DOMAIN (68)..(415): Pyridoxal-dependent decarboxylase domain identified by PFam, accession name Orn_DAP_Arg_deC, E-value=1e-77, PFam score of 262.6
  misc_feature (1)...(467): Xaa = X or * as defined in Table 2
LPLPRWKVLLPRDILGPRKINEVSSSDDKDAFLCEQTSGDILKKTSEVVKSSPLGVTPLFMQSNVINSTAIVKTLAATGTGFDCASKTDIQLCAESRGVPPERIIYGKSFVKQVSQIKYAANNGVQMMTFDSEVELMKVARGTFPKAKVWVLRIATDDSKAVCRLSVKFGATLRTSRLLLERAKELNIDVVGVSFHVRSGCTDPETFVQAISDARCVFDMGAEVGFSMYLLDIGGGFPGSEDVKLKFEEITRPXSTQPLDKYFPSNSWNXKSXLEPGRYYVASTFDALQLISFAKKICIKRNQTGSXXPKIESELSRPLMYYVNDGVYGSFNCILYDHAHVKPLLQKRPKPRXRRYYSSSIWGPTCDGLDRIVERCDLPEMHVGDWMLFENMGAYTVAAASNVPMLPRGPTIYYVMSGPAWQLIQQFQNPGFPPGSRRQPGCPAPCPVFCAWESGMKRTRASPVPSG

SEQ ID NO: 9022 - protein, 114 aa, Homo sapiens
  misc_feature (1)...(114): Xaa = X or * as defined in Table 2
ARSSLVLLFIYIFRDRVLLCHSGWSAVVQSWFTAALISQAXVILKXFSHLSLPSSWDYRQVSPHPANFSYILFCRDRSFTMLPRVGWNSWAQVLLLIQPPKVLQLXAGCHGSCL

SEQ ID NO: 9023 - protein, 79 aa, Homo sapiens
  misc_feature (1)...(79): Xaa = X or * as defined in Table 2
VLFLKRPYLVQDAVLWLFTAIISHSTLELLGSSYPTTSASXVKHSNSNIMKFKVPVLNECTMQLGTKTMIIKVLVKSYF

SEQ ID NO: 9024 - protein, 185 aa, Homo sapiens
  DOMAIN (81)..(114): Ribosomal protein L24 proteins domain identified by eMATRIX, accession number BL01108A, p-value=7.188e-10, raw score of 20.33
  misc_feature (1)...(185): Xaa = X or * as defined in Table 2
SLHGISRPHLPTGRLLGPETCAGFSRFGQNESLTPFVTSDRSKNRKRHFKAPFPHFEGKIMSSPLSKELRQDVQLCGSDARSXKDDEVQVVRGHLXGSAKLAKVVQVYRKKYVIYIERVQREKANGTTVHVGHFTPSKQVVITXGXNWDQRPAKRSLRTGKPKSRQVGKGKRGKYKERTIEKMQE

SEQ ID NO: 9025 - protein, 156 aa, Homo sapiens
PLHSHARSHFLFAIMNRPAPVEISYENMRFLITHNPTNATLNKFTEELKKYGAATLVRVCDATYDKAPVEKEGIHVLDWPFDDGAPPPNQIVDDWLNLLKTKFREEPGCCVAVHCVAGLGRKRRGAFNSKQLLYLEKYRPKMRLRFRDTNGHCCVQ

SEQ ID NO: 9026 - protein, 82 aa, Homo sapiens
MNRPAPVEISYENMRFLITHNPTNATLNKFTEELKKYGVTTLVRVCDATYDKAPVEKEGIHVLKKKGSVQFQTAALFGEIPT

SEQ ID NO: 9027 - protein, 62 aa, Homo sapiens
  misc_feature (1)...(62): Xaa = X or * as defined in Table 2
SQLKNAKFNLSRPLPPNVYXDKGQYVTSQLYQNAAQPIFKQAFAETCAHHTNTIQDQAPRRI

SEQ ID NO: 9028 - protein, 149 aa, Homo sapiens
  DOMAIN (57)..(112): kw TRANSCRIPTASE REVERSE II ORF2 domain identified by eMATRIX, accession number DM01354Q, p-value=1.920e-18, raw score of 9.23
  misc_feature (1)...(149): Xaa = X or * as defined in Table 2
KEEIIPILXNLFQNIKAEGILRISFNEARITLIPKPNRAITRKINPIDQSLMDRHAEILNKISANXIRXRMKRIIPHGQVRFSXGMWGWFNIRKQINVIHHTHSLKKKNHMIISINAEKEFDKIRKLLKLRNIYKRGIXLTXXVMVRNS

SEQ ID NO: 9029 - protein, 199 aa, Homo sapiens
  misc_feature (1)...(199): Xaa = X or * as defined in Table 2
IFFFHLSPSHSHARSHFLFAIMNRPAPVEISYEDMRFLITHNPTNATLNKFTEGTXGSMGVTDFGFGVCGWLHMDKAPVWKKEGFHVLDWPFDDGSSTPLIQIVGWIGFKPVXKTKFSCKSHGCCVAVHCVGRVGEGAPVLVLALALDWNVGMKYEDAVQFIRQKRRGAFNSKQLLYLEKYRPKMRLRFRDTNGHCCVQ

SEQ ID NO: 9030 - protein, 352 aa, Homo sapiens
  misc_feature (1)...(352): Xaa = X or * as defined in Table 2
GRVGFFFAGNPGSDSFGGLLLGLTPVLRWVADGGTIPKRHELVKGPKKVEKVDKETELVAQWNYCTLSQEILRRPIVACELGRLYNKEPVIEFLLDKSAEKALGKGSISHXNALTNCXQSXKLSDNPCPGKGIKGNTKGDKHDDLQAGASFICPLVGGPGRWNGRHRFLLPSGGCGLCCFSXAEPWKEIKAEFCHTCGAGLSRRMMIIVLNGTKEDVDVLKTRMEAEKAVERSFKRISKKPKAAESVSKTQMSVEGSPRAHQKLRPGKPXRSPALDSREKKTNLAPKSTAMNESSSGKAGKASVWSHKEVHRXPVKNRKPNKSLFTTHSFRQSAPKEGVCPTGVHPTRPTCF

SEQ ID NO: 9031 - protein, 65 aa, Homo sapiens
GEIEFASCSQASLLLSFVWMPALLPVASRLLLLPRVLLTMASGSPPTQPSPASDSGSGYVPGSVS

SEQ ID NO: 9032 - protein, 47 aa, Homo sapiens
  misc_feature (1)...(47): Xaa = X or * as defined in Table 2
XFVTCPNEKVAKEIARAVVEKRLAACVNLIPQITSIYEWKGKIEEDX

SEQ ID NO: 9033 - protein, 116 aa, Homo sapiens
GSPPTQPSPASDSGSGYVPGSVSAAFVTCPNEKVAKEIARAVVEKRLAACVNLIPQITSIYEWKGKIEEDSEVLMSVHPYEVAEVIALPVEHGNFPYLQWVRQVTESVSDSITVLP

SEQ ID NO: 9034 - protein, 96 aa, Homo sapiens
DQLSCTSVCRMSGGRAPAVLLGGVASLLLSFVWMPALLPVASRLLLLPRVLLTMASGSPPTQPSPASDSGSGYVPGSVSAAFVTCPNEKVAKEIAR

SEQ ID NO: 9035 - protein, 108 aa, Homo sapiens
MSGGRAPAVLLGGVVSDRPRPAPSGPRSLDRYPHPKSQRRFAKEIARAVVEKRLAACVNLIPQITSIYEWKGKIEEDSEVLMMIKTQSSLVPALTDFVRSVHPYEVAE

SEQ ID NO: 9036 - protein, 222 aa, Homo sapiens
  misc_feature (1)...(222): Xaa = X or * as defined in Table 2
GASLLLSFVWMPALLPVGLPAFLFANPESLLTMGSLGSPSDPSPRPASDSGSGYVPGSVSAAFVTCPNEKGSPREIARAVGGRRRLAACVQPSSPQITIPSMKWKGKDSREDSXGCWMDGFKTQKFPWVPSFWTDFVRSVAPYEVAEVIALPVEQGNFPYLQWVRQVTESVSDSITILAMMSPVPAHHEDPRDTSKAFLTFQVMTWAPNKSRLWVKKKKKSR

SEQ ID NO: 9037 - protein, 64 aa, Homo sapiens
  misc_feature (1)...(64): Xaa = X or * as defined in Table 2
LLKHLINNMMVSKTTWLGVLAHTCNPSTNFLGGRGGRISXGQEFEASLGNMGRPCLYKNRQKTN

SEQ ID NO: 9038 - protein, 127 aa, Homo sapiens
  DOMAIN (25)..(53): !!!! PROTEIN ALU SUBFAMILY WARNING ENTRY NUCLEAR PHOSPHO domain identified by eMATRIX, accession number PD02454B, p-value= 6.750e-30, raw score of 11.61
  misc_feature (1)...(127): Xaa = X or * as defined in Table 2
NGGQAVAHACNPSTLGGQWRVDHLRSGVRDQPGQRGETPSLLKIQKLAGRGGARLWSQLLRRLRQENRLNLGGGGCSEPRWHHCIPAWGNKKEXNGNYAQRMGERWLTGLKHQRNGEDRTVRELSGR

SEQ ID NO: 9039 - protein, 78 aa, Homo sapiens
  misc_feature (1)...(78): Xaa = X or * as defined in Table 2
VHTWMLSSPXGPQPGVFHAQIRGCPFLSPXRCQFQVFSLFYFDLLWVFTILFFFLEAEYHFVARLECSGLISAHCNLC

SEQ ID NO: 9040 - protein, 118 aa, Homo sapiens
  misc_feature (1)...(118): Xaa = X or * as defined in Table 2
TSMLGCTVLFLRYCVYSYCNVLATVWSSLVXRSLRICLHLVSWSFVTDCKACYNTGMLFYSDYXXFVYYFXYYCFFLCSLFFSICLLMYFNIFFFCNFMFDCYILLLSFYFIILYHYF

SEQ ID NO: 9041 - protein, 215 aa, Homo sapiens
  misc_feature (1)...(215): Xaa = X or * as defined in Table 2
GLHHGCSLGMEEAAGRGDRSRSRCRAPQHHRPPPPLSCQQPRLLGEAGRGGVRGKHGSLXKQAPPPRGRAETPGLANHTLPPRVPPSEGQQHPREGQGLHGGPGEKGKPHRRKLKASVPCVSAERVNGPKGSSLQTARIHPTGGHRKPTGAVCVCACAAHTSAARGPLRPHHTACPAHVCTRRCRREHTPPSLCTRVPLSGPGGSSLLHVVLSRA

SEQ ID NO: 9042 - protein, 626 aa, Homo sapiens
  DOMAIN (489)..(511): Chromo domain proteins domain identified by eMATRIX, accession number BL00598, p-value=7.136e-21, raw score of 14.45
  DOMAIN (145)..(306): RNA recognition motif. domain identified by PFam, accession name rrm, E-value=8.1e-44, PFam score of 159.0
MVSQAHCATLHAPTPAAATLTGGRRSLGTAGRAPPGLGTRDHAPAPGRRVSGGEGSRKAAAAALAAVAAAPGPVRRCSSQSCFSSSGSSHYSARTSPVRVRPRRSLSSRSAAGNRAEATESAMEKTLETVPLERKKREKEQFRKLFIGGLSFETTEESLRNYYEQWGKLTDCVVMRDPASKRSRGFGFVTFSSMAEVDAAMAARPHSIDGRVVEPKRAVAREESGKPGAHVTVKKLFVGGIKEDTEEHHLRDYFEEYGKIDTIEIITDRQSGKKRGFGFVTFDDHDPVDKIVLQKYHTINGHNAEVRKALSRQEMQEVQSSRSGRGDGYGSGRGFGDGYNGYGGGPGGGNFGGSPGYGGGRGGYGGGGPGYGNQGGGYGGGYDNYGGGNYGSGNYNDFGNYNQQPSNYGPMKSGNFGGSRNMGGPYGGAEASQVIINKAFLGSFSGVGSKMQKMGKKQNGKSKKVEEAEPEEFVVEKVLDRRVVNGKVEYFLKWKGFTDADNTWEPEENLDCPELIEAFLNSQKAGKEKDGTKRKSLSDSESDDSKSKKKRDAADKPRGFARGLDPERIIGATDSSGELMFLMKWKDSDEADLVLAKEANMKCPQIVIAFYEERLTWHSCPEDEAQ

SEQ ID NO: 9043 - protein, 71 aa, Homo sapiens
  misc_feature (1)...(71): Xaa = X or * as defined in Table 2
LYMLIRMRLKEGRAKMVESIFRXXFILEXSVLSRIMKPGMYPVLNRWVKCGNSSSVSYPEEKVVGWLLKFI

SEQ ID NO: 9044 - protein, 55 aa, Homo sapiens
  misc_feature (1)...(55): Xaa = X or * as defined in Table 2
ARDATFVNGLDYLITLPYCGWKDCKKKCPLRQFPXPFNCCFFLVVFVRVXKHSLP

SEQ ID NO: 9045 - protein, 121 aa, Homo sapiens
PLLLPLTRRLLLQHGLACQRAGLLHGPGRLQCQLHSHGHCHLDQSGPAVAGAARPRLLCGPIADQSPSPFRSPRPLRWGLLQGWRCEDHDRRPSAEHWQEGQGGTVISRRRREKENPKGKE

SEQ ID NO: 9046 - protein, 611 aa, Homo sapiens
  DOMAIN (498)..(515): RNase H domain identified by eMATRIX, accession number PF00075A, p-value=5.600e-13, raw score of 14.44
  DOMAIN (39)..(109): RNA recognition motif. domain identified by PFam, accession name rrm, E-value=3.3e-19, PFam score of 77.2
CCHCFQDLISINGEVVEQKRAVAREESGKPGAHVTVKKLFVGGIKKNTEEHHLTDYFEEYGKIDTIEIITDRQSGKKRGFGFVTFDDHDPVDKIVLQKYHTINGHNAEVRKALSRQEMQEVQSSRSGRGDGYGSGRGFGDGYNGYGGGPGGGNFGGSPGYGGGRGGYGGGGPGYGNQGGGYGGGYDNYGGGNYGSGNYNDFGNYNQQPSNYGPMKSGNFGGSRNMGGPYGGGIWKNTSITERKKSRKLDLIQSKKGSRTKEAPQPPVASLCMHLGHWSRLMVSPGAQLTGKNSHGLSVSSVRKSNVGPRRLCAAMKATGPDNAQSQVSPPGHAPSAEDPTGSRTVSSPCTDRPHPFLSWPTWISLALLLKTDGALERMPQQLPSLHPSQGTQSIHPDPSSTSSFLLPFQPPTLKRAAFPCPPSIVNPAVWDTSTPSVAEHHTPIRITLKEPTQFLSQKQYPIPQAALVGLQPIISHLLASHLLRPTDSPFNTPILPVKKPNGTYRLVQDLRLINQAVLPRHAGLGRDLGSRRAARGPASASVAARGRLSRGCGDRPVNVAAAGQKMGKKQNGKSKKVEEAEPEEFVVEKVLDRRVVNGKVEYFLKWKGFTE

SEQ ID NO: 9047 - protein, 224 aa, Homo sapiens
  DOMAIN (91)..(121): Flocculin repeat proteins domain identified by eMATRIX, accession number PF00624I, p-value=1.071e-09, raw score of 9.10
  misc_feature (1)...(224): Xaa = X or * as defined in Table 2
SMPWQIGRSSVSAPPTITPTSSTASWTIVSSTIWSPHVPATTKVSTLHWTVVRRLLVIISKIIVISTSIISSSIVVITTSVAPTLVAISRSSTTISSSSSSITGATSKIATSRSSSSAGSRAEVLLAELFLEQRQFSLQRQDESGSCSSAEISLISLGCGKSGXSDXVRDGERKRNSSVSSLLVAXALKPQKKVXGTTTNNGESLQTVWXXGILQAKDQEDLVL

SEQ ID NO: 9048 - protein, 198 aa, Homo sapiens
  DOMAIN (54)..(76): Chromo domain proteins domain identified by eMATRIX, accession number BL00598, p-value=7.136e-21, raw score of 14.45
  DOMAIN (43)..(81): 'chromo' domain identified by PFam, accession name chromo, E- value=5.1e-11, PFam score of 42.6
  misc_feature (1)...(198): Xaa = X or * as defined in Table 2
LFKSAIKNGLQHELHCRKWEKKQNGKSKKVQEAEPVESGVEKVLDRRVVNGKVEYFLKWKGFTDADNTWEPEENLDCPELDXSRFLNFSRKAGQRKRWVPKRKSLSDSESDDSQIHRRKRDAADQPKEDFARGLDPXKKXLGAHRPASGELMFLMKWKDSDEADLVLAKEANMKCPQIVIAFYEEKPTWHSCPEDEAQ

SEQ ID NO: 9049 - protein, 65 aa, Homo sapiens
  misc_feature (1)...(65): Xaa = X or * as defined in Table 2
IDVCVCLALLLRLECSSVISAHCSLCSSGSSDPPTSASXVAGTTTACHHAQLIFGFFFFLKRWGF

SEQ ID NO: 9050 - protein, 152 aa, Homo sapiens
LPRPRSRLTALPPPPSFLQTPKSRALMAGLEVLFASAAPAITCRQDALVCFLHWEVVTHGYCGLGVGDQPGPNDKKSELLPAGWNNNKDLYVLRYEYKDGSRKLLVKAITVESSMILNVRTYKNSEELRSRIVSGIITPIHEQWEKANVSSP

SEQ ID NO: 9051 - protein, 294 aa, Homo sapiens
  misc_feature (1)...(294): Xaa = X or * as defined in Table 2
ALPPPPSFLHTPKSRALMAGLEVLFASAAPAITCRQDALVCFLHWEVVTHGYFGLGVGDQPGPNDKKSELLPAGWNNNKDLYVLRYEYXGWGPESFLVESHSPWESSIDSSMLLGIMGSQQSWQIXPLNLGXLFSMAEHLGDFHRTYKNSEELRSRIGAGILTPIHEQWEKANVSSPHREFPPATAREVDPLRIPPHHPHTSRQPPWCDPLGPFVVGGEDLDPFGPRRVGMNVDPLRSGLPRAFNDPSSGLPNRLPPGAVPQGAGFDPFGPIGTSPPGPNPDHLPPPGYDDMYL

SEQ ID NO: 9052 - protein, 276 aa, Homo sapiens
  DOMAIN (68)..(90): TRANSFORMING PROTEIN P21 RAS SIGNATURE domain identified by eMATRIX, accession number PR00449A, p-value=7.577e-16, raw score of 13.20
  DOMAIN (70)..(271): Ras family domain identified by PFam, accession name ras, E- value=1.2e-14, PFam score of 30.0
  misc_feature (1)...(276): Xaa = X or * as defined in Table 2
RKTKCVTRPAVVFQSPLTSRSSRASACEVAFPRGQPRKGPKRDNWILGTRPSWVAVCSSPRLGLSREYKLVMLGAGGVGKSAMTMQFISHRFPEDHDPTIEDAYKIRIRIDDEPANLDILDTAGQAEFTAMRDQYMRAGEGFIICXLLSRIRRSFHEVPESLNQLIYRVRRTDDTPVVLVWGNKSDLQTAXDRFTKGRKGLALAPENSSCPLFWRTSGCHTRYYIDGCFPHAPVREIRRKEKEAVLAMEKKSXAPKTSVWKEAKNHPFRKKKDSVT

SEQ ID NO: 9053 - protein, 33 aa, Homo sapiens
VTLNKQSNLLSSHFLSCNSWIKSPRSGKNQETS

SEQ ID NO: 9054 - protein, 43 aa, Homo sapiens
  misc_feature (1)...(43): Xaa = X or * as defined in Table 2
RPGAVAHSCNSSTLGGRGRWITXGLEFETCLANMVKLCLFHLY

SEQ ID NO: 9055 - protein, 124 aa, Homo sapiens
  misc_feature (1)...(124): Xaa = X or * as defined in Table 2
ITTHLYISKPLLCTPMKTYNYYLSIAKIKFXFSLLRQGLALSPRLECTSTITAHCSLNLPGFKQSSHSQPSEXLGTTDTHHHIQLVFLILAETEFCHVAQGGLNISXVQLIHLPQTSKVLGLQM

SEQ ID NO: 9056 - protein, 396 aa, Homo sapiens
  misc_feature (1)...(396): Xaa = X or * as defined in Table 2
EPESCSVTRLECSGVISAHCNFRLPGFKNFPASASQVHGTTGTPHHAQLILYFXVEEQGFPPMLAPGWILGSPXPLMDPAPSLALPQSAGDPQPXAHPHPGPSYLFLFKERENYERPKIIXLNPLPLAQGKKMEFALIWVMKHTQXIRNNHIFSKRQKCXDLXSYMVAYFWVGKKXEKNITSLTGNDTFXXKILLSFPTRMIHCKAKIIYIAKFFFWRRSLTSVTLGWSAVWHNLSSLQPPPSGLKRLSHLNLPNTWDYRPPCPANLCFVVVVVVLLFVFWXRWGFTMLARLISNSXPQCDPPTSASQSAEITGMSHPCLAMGFVFHLTLXKPPFFKDYMKSFFQFFKYLIQGXCSLVXGVRYRSSLIFFFCFFETESCLVTQAGVQWRDLGSLQS

SEQ ID NO: 9057 - protein, 122 aa, Homo sapiens
RVAHASGASQLPDYSISPPSLPPRISFHPSPTLARVAMAEPSAATQSHSISSSSFGAEPSAPGGGGSPGACPALGTKSCSSSCAGTDLGNSSDYKCHTDQLEESLLIGAVLKGLLVFGLHSI

SEQ ID NO: 9058 - protein, 106 aa, Homo sapiens
  misc_feature (1)...(106): Xaa = X or * as defined in Table 2
MLLSLAAFSVISVVSYLILALLSVTISFRIYKSVIQAVQKSEEGHPFKAYLDVDITLSSEAFHNYMNAAMVHINRALKLIIRLFLVEDLVDSLKLAVFMWLMTYVX

SEQ ID NO: 9059 - protein, 153 aa, Homo sapiens
GRIPCRRFRLGAGGVKGLERASCRIILFPLPLSRPVSLFTLLPPFARVAMAEPSEATQSHSISSSSFGAEPSAPGGGGSPGACPALGTKSCSSSCADSFVSSSSSQPVSLFSTSQVHDLIFWRDVKKTGFVFGTTLIMLLSLAAFRVISVGSY

SEQ ID NO: 9060 - protein, 357 aa, Homo sapiens
  DOMAIN (188)..(228): Peripherin / rom-1 proteins domain identified by eMATRIX, accession number BL00930A, p-value=9.449e-09, raw score of 13.84
  misc_feature (1)...(357): Xaa = X or * as defined in Table 2
RDLIEFSCRIILFPLPSLPPRISFHPSPTLARVAMAEPSAATQSHSISSSSFGAEPSAPGGGGSPGSLPRPWGPKSCSSSCAVHDLIFWRDVKKTGFVFGTTLIMLLSLAAFSVISVVSYLILALLSVTISFRIYKFVIQAVQKSEEGHPFQKPNWNVDITLSSKSFSINNMNAAILHINMFLKLIIRLFLVEDLVDSLKLAVFMWLMTYVGAVFNGITLLILAELFIFSVPIVLXRKYKTQIDHYVGIARDQTKSIVEKIPSKTPLGIAKKKGRIKYMETRNATSYLKHHLISYNVVTCTMKENTQCQLEPAFQAFFLIWCFLPSFPFNPQSSSTKIDGLIKDLFLDLRRRKNQIS

SEQ ID NO: 9061 - protein, 155 aa, Homo sapiens
  misc_feature (1)...(155): Xaa = X or * as defined in Table 2
SQTPMGHFTEEDKATITSLWGKVNVEDAGGETLGRLLVVYPMGPQRFLXPALGNLSSASAIHGQPPKSRAHGQEGCXRSLGDAIKAPGIDLQRAPFAQAXSELALVDKLAMWDSLRNFKASWGKFCLVDPFLAIPFSAKEFHPLRCQVFLGQKDG

SEQ ID NO: 9062 - protein, 249 aa, Homo sapiens
MNSLLGLIIRRTFIEHQPYTTNDVLENSANESARVHLVLANENSDPCAGPPNGAQATRYLNPGTRLQRRRSPALRARRAVLTAPRTLVSSLFSPRPSLGRAGTLAFPVPHGAAPTPDGECARGPLSEASPSAPQLPCRFSHLLRASPSQPGLLFSSPELTASPASLALRPVLSGPPFPVWIPPSPNPSLPRGGRSVGKRFRDGACQVSSDLENIDTGVNSKVKSHVTIRRTVLEEIGNRVTTRAAQVAK

SEQ ID NO: 9063 - protein, 271 aa, Homo sapiens
  DOMAIN (67)..(101): Cyclins proteins domain identified by eMATRIX, accession number BL00292A, p-value=7.000e-27, raw score of 22.87
  DOMAIN (20)..(102): Cyclin domain identified by PFam, accession name cyclin, E- value=4.1e-39, PFam score of 140.8
MKEENLCQAFSDALLCKIEDIDNEDWENPQLCSDYVKDIYQYLRQLEVGLQSINPHFLDGRDINGRMRAILVDWLVQVHSKFRLLQETLYMCVGIMDRFLQLSLPAEDREALGTSSPQHSGALGDVGYKSGFILSPHPCMSKIEPEDEKLSFLFIGPFLKNPSPRANGDPMFLCLNEDEAQQLEETKWTGCQKQLCDPLSEEVKTGEKLVQTKGERTSRIREVQFLAQNHTTRRWQSWDLGTSSLTPEPVFSLEINVREQRDEDNIQVLRG

SEQ ID NO: 9064 - protein, 457 aa, Homo sapiens
  DOMAIN (258)..(289): Cyclins proteins domain identified by eMATRIX, accession number BL00292B, p-value=9.679e-16, raw score of 20.31
  DOMAIN (174)..(390): Cyclin domain identified by PFam, accession name cyclin, E- value=2.4e-77, PFam score of 270.4
  misc_feature (1)...(457): Xaa = X or * as defined in Table 2
EATASKIPSAAGSESSPNGASYASVPPFSVRVPPWAGLALLPSPSLMALLRRPTVSSDLENIDTGVNSKVKSHVTIRRTVLEEIGNRVTTRAAQVAKESSGTPKFQVQPTKTTNVNKQLKPTASCQTQYQMGKVWLPKGPSPTPEDVSMKGRESLPKLFSDALLCKIEDIDNEDWENPRLCSDYVKDIYQYLRQLEVLQSINPHFLDGRDINGRMRAILVDWLVQVHSKFRLLQETLYMCVGIMGSDFXQVQPVSRKKLQLVGITALLLAPKYEKMFSPNIEDFVYITDNAYPSSQIREMETLILKELKFELGRPLPLHFLRRASXAGEVDVEQHTLAKYLMELTLIDYDMVHYHPFXGXPAAASCLSQKVLDKGKMELXSQQYYHKDTQENEVLEVHASTMAQECGAKXMENLNLNSIGHQRIKYAKQQTPXKISMIPQLNSKAVKDLASPLIGRS

SEQ ID NO: 9065 - protein, 103 aa, Homo sapiens
  misc_feature (1)...(103): Xaa = X or * as defined in Table 2
FNLNFTVSLRTHSPLIPFFSSNERIKPGKSTIDGPWTRRTRLXRKNLWMIQXLWDFLFVLFETDSSSVARLECSGAISVHYNFHLPGSSDSPDSRSMPIVDRQ

SEQ ID NO: 9066 - protein, 160 aa, Homo sapiens
SAWWNSWDKSSPEEALKGLVDKLQALTGNEGRVSVENIKQLLQCLVPGSTTLHSAEILAEIARILRPGGCLFLKEPVETAVDNNSKVKTASKLCSALTLSGLVEEKELQREPLTPEEVQSVREHLGHESDNLLFVQITGKKPNFEVGSSMQLKLSITKKS

SEQ ID NO: 9067 - protein, 166 aa, Homo sapiens
GHESDNLLFVQITGKKPNFEVGSSRQLKLSITKKSSPSVKPAVDPAAAKLWTLSANDMEDDSMDLIDSDELLDPEDLKKPDPASLRAASCGEGKKRKACKNCTCGLAEELEKEKSREQMSSQPKSACGNCYRGAMPSGCASCPYLGMPAFKPGEKVLLSDSNLHDA

SEQ ID NO: 9068 - protein, 412 aa, Homo sapiens
  misc_feature (1)...(412): Xaa = X or * as defined in Table 2
FPFWPAVFQVCQYCTARMADFGISAGQFVAVVWDKSSPVEALKGLVDKLQAFTPGNEGRVSVENIKAAVAILPTKNPSFGHYFVQCLVPGKAPLWHSAXDFWAGNPPGFLRPGWMFFFLKEPVETAVRXQXAKWKTASKLCSALTLSGLVEKLKELQREPLTPEEVQSVREHLGHESDNLLFVQITGKKPNFEVGSSRQLKLSITKKSSPSVKPAVDPAAAKLWTLSANDMEDDSMCIFCGCSLTHRWPLEHVVQVEIMMDQPKRRTRVDTFFTPRTPKFPSRSPASHFSFSIKQKTTRPVSLIALNTLQDLIDSDELLDPEDLKKPDPSLLRAASCGEGKKRKACKNCTCGLAEELEKEKSREQMSSQPKSACGNCYLGDAFRCASCPYLGMPAFKPGEKVLLSDSNLHDA

SEQ ID NO: 9069 - protein, 164 aa, Homo sapiens
  DOMAIN (100)..(115): CYCLIN-DEPENDENT KINASE REGULATORY SUBUNIT SIGNATURE domain identified by eMATRIX, accession number PR00296D, p-value=1.450e- 20, raw score of 8.55
  DOMAIN (9)..(122): Cyclin-dependent kinase regulatory subunit domain identified by PFam, accession name CKS, E-value=4.5e-28, PFam score of 106.7
  misc_feature (1)...(164): Xaa = X or * as defined in Table 2
LANRAIMSHKQIYYSDKYDDEEFEYRLVLAREQLATGRELWPLRAQGISNRNXGDRIGACVRDMSCCPKDIAKLVPRTHLMSESEWRNLGVQQRSQGWVHYMIHEPEPHILLFRRPLPRKPKEMKLGKLTFQPSSFYTAGPYLPNIFLDNIIYVGLLVFFTFDI

SEQ ID NO: 9070 - protein, 222 aa, Homo sapiens
  DOMAIN (19)..(44): Ribosomal protein L13 proteins domain identified by eMATRIX, accession number BL00783A, p-value=8.200e-19, raw score of 14.55
  DOMAIN (18)..(150): Ribosomal protein L13 domain identified by PFam, accession name Ribosomal_L13, E-value=0.0012, PFam score of -12.5
  misc_feature (1)...(222): Xaa = X or * as defined in Table 2
RRKAFPKRLPKMAEVQVLVLDGQGHLLGRLAAIVAKQVLLGRKGGCSYACEGIHISGNFLQNQVCSTLAFPLQARMNTNPSQGPYHFGAPSRIFWRTVRGMLPHKTKAEARPLLDRLKVFDGIPPPYDKKKRMVVPAALKVVRFEAYTESFAYLGRLAPEVGWNAIRPVTAPPGGERGKRKAKIHYRKKKXLMRLRKQAREETWRKKIDKYTEVLKTHGLLV

SEQ ID NO: 9071 - protein, 166 aa, Homo sapiens
  misc_feature (1)...(166): Xaa = X or * as defined in Table 2
KRFWSFALFYYLILKLLCIDSIVRIGTILYSTVLFFIFLKFKVXLVLITFIQIFAIFFGSETFXQVGVXFLLIPNFFSRVLLILSEGKVIXVCQLIVLLGLNFHIVFTVYGEVVGIYYSILNKAVIHFFIKVYFHVKFLFLYVLLLSYITQFLFXKSSFVEVLVKN

SEQ ID NO: 9072 - protein, 89 aa, Homo sapiens
  misc_feature (1)...(89): Xaa = X or * as defined in Table 2
MQWRDHNYCIFXXXXXXXXXXXXXXXXXXXXXXXXXXXXXXXXXXXXXXXXXXXXXXXXXXXXXXXXXXXXXXXXXXXXXXXXLARPFI

SEQ ID NO: 9073 - protein, 239 aa, Homo sapiens
  misc_feature (1)...(239): Xaa = X or * as defined in Table 2
PPPTKKEMFVPYSPEQRIETSIPPPFKGTGRPPGQGRTWERPPFSLEGKAGALPPLLSPRTTKGEDPSETLAQGSGQEGDCLNRWQHLHXSAFRPSSAEPFTRKRLEGGPAPLRYPGAGNEPGRDAEGRPXGALAGRPRWPPSHGRPPPAPCHPASRGGTARKTPGRSTKPPRFPPPPLGDATSGKAIPANGRKGGAMSPHRGAGPASPSRFFSHIKQGRAIPHVSSRLHFSPSSSGSR

SEQ ID NO: 9074 - protein, 110 aa, Homo sapiens
  misc_feature (1)...(110): Xaa = X or * as defined in Table 2
SAQMAVTTADPRVRPRVRTQLCSLASLIQTLLVHLTPEEKSAVTALWGKVNVDEVGGKALGRLLVVLPWDPKRSFQSPLGESVPTPXMKVGGKALGRLLVVLPWDPKRSF

SEQ ID NO: 9075 - protein, 55 aa, Homo sapiens
NLYISNLPLSMDEQELENMLKPFGQVISTRILRDSSGTSRGVGFARMESTEKCEG

SEQ ID NO: 9076 - protein, 72 aa, Homo sapiens
IRHKEESPRLGNPKVSATLHGMLPSSFMGKVWKQQMYPQYATYYYPQYLQAKQSLVPAHPMAPPSPRHKLQF

SEQ ID NO: 9077 - protein, 258 aa, Homo sapiens
  DOMAIN (91)..(101): Eukaryotic  RNA-binding region RNP-1 proteins domain identified by eMATRIX, accession number BL00030B, p-value=2.200e- 10, raw score of 7.03
  DOMAIN (56)..(211): RNA recognition motif. domain identified by PFam, accession name rrm, E-value=2.5e-24, PFam score of 94.2
  misc_feature (1)...(258): Xaa = X or * as defined in Table 2
HSTAKLYXHSTFAKRSHRNPQHPYVPXISKSLTSSINSSTSSNSGWDQLSKTNLYIRGLPPHTTDQDLVKLCQPYGKIVSTNAILHKTTNKCKGYGFVDFDSPVAAQKAVSALKASGVQAQMAKQQEQDPTNLYISNLPLSMDKQELENMLKPFGQVISTRILRDASGTSRGVGFARTESTEKCEAVMVQSPSWTQPQPYILQHPGAVLTPSMEHTMSLQPASMISPLAQQMSHLSLGSTGTYMPATSAMQGAYLPQY

SEQ ID NO: 9078 - protein, 466 aa, Homo sapiens
  misc_feature (1)...(466): Xaa = X or * as defined in Table 2
CLRRLHEFGTRPPPTPPLPSSPERERQESPRLGNPKVSATLHGRLPSSFMGKVWKQQMYPQYATYYYPQYLQAKQTLVPAHPMAPPSPSTTSNDNHRSISSNSRWDQLSRTNLYIRGLPPHTTDQDLVKLCQPYGKIVSTKGNFGIRTTNNCKGYGFLFDFXQPMQQLKKAVSALKASGGSSSKWAKQQGQDPTNLYISNLALSMDEQELENMLKPFGQVISTRILRDSSGTSRGVGFARMESTEKCEAVIGHFNGKFIKTPPGVSCPHRNLLCVLSFAGWEGQEKGDRTPNKYIPNGRPWAXEEGRGETLLGLTLTYTDPTTAAIQNGFYPSPYSIATNRMITQTSITPYIASTVHAFQVQSPSWMQPQPYILHDPGAVLTPSMEHTMSLQPASMISPLAQQMSHLSLCSTGTYMPATSAMQGAYLPQYAHMQTTAVPVEEASGQQQVAVETFNDHSPYTFQPNK

SEQ ID NO: 9079 - protein, 478 aa, Homo sapiens
  DOMAIN (145)..(155): Eukaryotic  RNA-binding region RNP-1 proteins domain identified by eMATRIX, accession number BL00030B, p-value=2.200e- 10, raw score of 7.03
  DOMAIN (108)..(257): RNA recognition motif. domain identified by PFam, accession name rrm, E-value=1.3e-34, PFam score of 128.4
  misc_feature (1)...(478): Xaa = X or * as defined in Table 2
NSGPSSFMGKVWKQQMYPQYATYYYPQYLQAKVWKAFGNTKXKGRVKNRKMLVGWQTLXTLLFLVGQKNQSLVPAHPMAPPSPSTTSSNNNSSSSSNSGWDQLSKTNLYIRGLPPHTTDQDLVKLCQPYGKIVSTKAILDKTTNKCKGYGFVDFDSPAAAQKAVSALKASGVQAQMAKQQEQDPTNLYISNLPLSMDEQELENMLKPFGQVISTRILRDSSGTSRGVGFARMESTEKCEAVIGHFNGKFIKTPPGVSAPTEPLLCKFADGGQKKRQNPNKYIPNGRPWHREGEVRLAGMTLTYDPTTAAIQNGFYPSPYSIATNRMITQTSITPYIASPVSAYQVAKETRENKYRGSAIKVQSPSWMQPQPIYFYQHPGAVLTPSMKHTMSLQPASMIQPFWPQQMSPSVHXGQHPEPYHALQPSSLCKGALLGPQYCTYCRLTAVPCXGRQSGQTGRLAVRGRLNDPFSIYRFNPNK

SEQ ID NO: 9080 - protein, 79 aa, Homo sapiens
  misc_feature (1)...(79): Xaa = X or * as defined in Table 2
TGQSYKKRKFKWLKQINRYLTSFLFVFKEIRSHSVAXTLEHSGAIMAHCSLKFLGLSNPPASASQVAGTSGVQYHTSLI

SEQ ID NO: 9081 - protein, 8 aa, Homo sapiens
MIDTHTPS

SEQ ID NO: 9082 - protein, 137 aa, Homo sapiens
  DOMAIN (72)..(123): INHIBITOR CALPAIN CALPASTATIN REPEAT THIOL PROT domain identified by eMATRIX, accession number PD01443B, p-value=1.000e- 40, raw score of 15.02
TFFSVLISYYPLSSWAFELYLMLLWDNVYKSSSMNPTETKAVKTEPEKKSQSTKLSVVHEKKSQEGKPKEHTEPKSLPKQASDTGSNDAHNKKAVSRSAEQQPSEKSTEPKTKPQDMISAGGESVAGITAISGKPGD

SEQ ID NO: 9083 - protein, 288 aa, Homo sapiens
MFPGKDKRASRRAAANSPQGARGQGEAHRPGRVHAQAGPRAVAEGQARAQGAQARPKRPKLEGGGRMGGVTWSGSQQGLGRNGGKPGVHTGRPWLATGTHATWGSCTRAWQVMQVTQAAPPAGAEGSAHLAPPWDVRSSVPARSRPSECEPGASNATPRALAGSPPCGSEPAGCCHGIRQWWYKTVNRSGCAWAGPEGSVLEGSVFALPFWAWDEALSGVWRGRGADRVDLLADLQRAIVGRTSPTQRRGSCNVRQGENPNIKGQKQLRSETKTLERAVEGWRKESEK

SEQ ID NO: 9084 - protein, 1418 aa, Homo sapiens
  DOMAIN (196)..(212): MEMBRANE ALANYL DIPEPTIDASE (M1) FAMILY SIGNATURE domain identified by eMATRIX, accession number PR00756D, p-value=4.000e- 19, raw score of 10.58
  DOMAIN (817)..(1348): Calpain inhibitor repeat domain identified by PFam, accession name Calpain_inhib, E-value=1.1e-228, PFam score of 773.1
SDKTSRSEAQALVHTFFVVEWSDALFVGIDENILAVQRIVRKAVETDLQTSRESIGVAAGASPKLHQQREKKRRRGEAVGCQRLQLDIGDKQPSTDSKAKRALTGTFLSGASGIAGTSLDAAMAPTEFASWWRPKALASAPAPPTCAPRPTRDLAAIPDFQSGAMENWGLTTYRESALLFDAEKSSASSKLDITMTVAHELAHQWFGNLVTMEWWNDLWLNEGFAKFMEFVSVSVTHPELKVGDYFFGKCFDAMEVDALNSSHPVSTPVENPAQIREMFDDVSYDKGACILNMLREYLSADAFKSGIVQYLQKHSYKNTKNEDLWDSMASICPTDGVKGMDGFCSRSQHSSSSSHWHQEGVDVKTMMNTWTLQKGFPLITITVRGRNVHMKQEHYMKGSDGAPDTGYLWHVPLTFITSKSDMVHRFLLKTKTDVLILPEEVEWIKFNVGMNGYYIVHYEDDGWDSLTGLLKGTHTAVSSNDRASLINNAFQLVSIGKLSIEKALDLSLYLKHETEIMPVFQGLNELIPMYKLMEKRDMNEVETQFKAFLIRLLRDLIDKQTWTDEGSVSERMLRSQLLLLACVHNYQPCVQRAEGYFRKWKESNGNLSLPVDVTLAVFAVGAQSTEGWDFLYSKYQFSLSSTEKSQIEFALCRTQNKEKLQWLLDESFKGDKIKTQEFPQILTLIGRNPVGYPLAWQFLRKNWNKLVQKFELGSSSIAHMVMGTTNQFSTRTRLEEEIKMKLNIKILIDDISGVRRPWGCKRAPLESYRIAAVKTEPEKKSQSTKPKSLPKQASDTGSNDAHNKKAVSRSAEQQPSEKSTEPKTKPQDMISAGGESVAGITAISGKPGDKKKEKKSLTPAVPVESKPDKPSGKSGMDAALDDLIDTLGGPEETEEENTTYTGPEVSDPMSSTYIEELGKREVTIPPKYRELLAKPIGPDDAIDALSSDFTCGSPTAAGKKTEKEESTEVLKAQSAGTVRSAAPPQEKKRKVEKDTMSDQALEALSASLGTRQAEPELDLRSIKEVDEAKAKEEKLEKCGEDDETIPSEYRLKPATDKDGKPLLPEPEEKPKPRSESELIDELSEDFDRSECKEKPSKPTEKTEESKAAAPAPVSEAVSRTSMCSIQSAPPEPATLKGTVPDDAVEALADSLGKKEADPEDGKPVMDKVKEKAKEEDLEKLGEKEETIPPDYRLEEGKEKDGKPLLPKESKEQLPPMSEDFLLDALSEDFSGPQNASSLKFEDAKLAAAISEVLSQTPASTTQAGAPPRDTSQSDKDLDDALDKLSDSLGQRQPDPDENKPMEDKVKEKAKAEHRDKLGERDDTIPPEYRHLLDDNGQDKPVKPPTKKSEDSKKPADDQDPIDALSGDLDSCPSTTETSQNTAKDKCKKAASSSKAPKNGGKAKDSAKTTEETSKPKDD

SEQ ID NO: 9085 - protein, 438 aa, Homo sapiens
  DOMAIN (71)..(108): INHIBITOR CALPAIN CALPASTATIN REPEAT THIOL PROT domain identified by eMATRIX, accession number PD01443I, p-value=1.000e- 40, raw score of 10.25
  DOMAIN (2)..(370): Calpain inhibitor repeat domain identified by PFam, accession name Calpain_inhib, E-value=3e-132, PFam score of 452.7
VWDCPGLRWASFYLRLSWRAHRPQCGTISFVTVNAEEQEKQFVSSRTKQKAKEEKLEKCGEDDETIPSEYRLKPATDKDGKPLLPEPEEKPKPRSESELIDELSEDFDLSECKEKPSKPTEKTEESKAAAPAPVSEAVSRTSMCSIQSAPPEPATLKGTVPDDAVEALADSLGKKEADPEDGKPVMDKVKEKAKEEDREKLGEKEETIPPDYRLEEVKDKDGKPLLPKESKEQLPPMSEDFLLDALSEDFSGPQNASSLKFEDAKLAAAISEVVSQTPASTTQAGAPPRDTSSDKDLDDALDKLSDSLEQRQPDPDENKPMEDKVKEKAKAEHRDKLGERDDTIPPEYRHLLDDNGQDKPVKPPTKKSEDSKKPADDQDPIDALSGDLDSCPSTTETSQNTAKDKCKKAASSSKAPKNGGKAKDSAKTTEETSKPKDD

SEQ ID NO: 9086 - protein, 759 aa, Homo sapiens
  DOMAIN (45)..(83): INHIBITOR CALPAIN CALPASTATIN REPEAT THIOL PROT domain identified by eMATRIX, accession number PD01443A, p-value=1.000e- 40, raw score of 6.93
  DOMAIN (142)..(712): Calpain inhibitor repeat domain identified by PFam, accession name Calpain_inhib, E-value=1.3e-178, PFam score of 606.8
  misc_feature (1)...(759): Xaa = X or * as defined in Table 2
EKKGSYEKKAASLGSSQSSRTYAGGTASVTKVSAFSGATSKSYSMNPTETKAIPVSQQMEGPHLPNKKKHKKQAVKTEPEKKSQSTKLSVVHEKKSQEGKPKEHTEPKSLPKQASDTGSNDAHNKKAVSRSAEQQPSEKSTEPKTKPQDMISAGGESVAGITAISGKPGDKKKEKKSLTPAVPVESKPDKPSGKSGMDAGLDDLIDTLGGPEETEEENTTYTGPEVSDPMSSTYIEELGKREVTIPPKYRELLAKKEGITGPPADSSKPIGPDDAIDALSSDFTCGSPTAAGKKTEKEESTEVLKAQSAGTVRSAAPPQEKKRKVEKDTMSDQALEALSASLGTRQAEPELDLRSIKEVDEAKAKEEKLEKCGEDDETIPSEYRLKPATDKDGKPLLPEPEEKPKPRSESELIDELSEDFDRSECKEKPSKPTEKTEESKAAAPAPVSEAVSRTSMCSIQSAPPEAGTLKGTVQDDAVEALADSLGKKEADPEDGKPVMDKVKEKAKEEDREKLGEKEETIPPDYRLEEVKDKDGKATPCPKSLKEQLPPMSEDFLLDALSEDFSGPQNASSLNFEDAKLAGAISEVVSQNPRFSTTTQAGAPPRDTSQSDKALGDALDKLSDSLGQRQPDPGXGTNQWEGXSXREKAKAEHRDKLGRKRWTLFPPEYRHLLDDNGQDKPVEGHLTKKSENQRNPGDDQDPIDALSEDLDSCPSTTETSQNTAKDKCKKAASSSKAPKNGGKAKDSAKATEGTSKPKDD

SEQ ID NO: 9087 - protein, 260 aa, Homo sapiens
  DOMAIN (46)..(124): Immunoglobulin domain identified by PFam, accession name ig, E-value=0.0014, PFam score of 16.6
  misc_feature (1)...(260): Xaa = X or * as defined in Table 2
EFSASIVGICTMPWALLLLTLLTHSAVSVVQAGLTQPPSVSKDLRQTATLTCTGNSDNVGYQGAAWLQHHQGHPPKLLFSRNNNRPSGIHKRFYGSNSGTTATLTISGLQAMDEGDYYCNSRDSSGNHLRVFGGGTQVDPSLRVRQGMPPWVNFVPGPSSEEASSPNKAHTGVVFISDFLTPGNPXQVAWKADSQPPFKAGVETPPHPPKQSNNKYTDSSYLSLTPXPGGSPHRSLQLARVTHXRGAPLEKTVAPTRMFH

SEQ ID NO: 9088 - protein, 58 aa, Homo sapiens
  misc_feature (1)...(58): Xaa = X or * as defined in Table 2
TSGDHWNIAVAPHENSDLLLVQGHDYKYRYFGLIVCVLXQAIVTPEEPQSIVPRLRTR

SEQ ID NO: 9089 - protein, 24 aa, Homo sapiens
  misc_feature (1)...(24): Xaa = X or * as defined in Table 2
MFYPFFNPRYFSVGFIAMNRHTDX

SEQ ID NO: 9090 - protein, 28 aa, Homo sapiens
VPRVTIMLRGVRSCIRQGSSEDPRGWKG

SEQ ID NO: 9091 - protein, 95 aa, Homo sapiens
  misc_feature (1)...(95): Xaa = X or * as defined in Table 2
YIYIYIYIYIYIYIYIYIYIYIYIYNLDQSWSFAPLLVCGPXXAQVVTSELGNRNXSEKTFTWRICMRNIGRCSLGMLQDYFKPFDFRSKVMLVV

SEQ ID NO: 9092 - protein, 36 aa, Homo sapiens
  misc_feature (1)...(36): Xaa = X or * as defined in Table 2
NKRNQGSSRVGTHLXSQLLRRLRQENHLNPEGRGCS

SEQ ID NO: 9093 - protein, 136 aa, Homo sapiens
IAEGNWCVYMPDIIWVFPPQAEAEEDCHSDTVRADDDEENESPAETDLQAQLQMFRAQWMFELAPGVSSSNLENRPCRAARGSLQKTSADTKGKQEQAKEEKLSIIDIVTNYIFFFWHMEIFTDTVSRHYNQTFGT

SEQ ID NO: 9094 - protein, 484 aa, Homo sapiens
  misc_feature (1)...(484): Xaa = X or * as defined in Table 2
GGSSAAASGVSSRADAPVLAQSPASAGNGRPSTPRVPGSRRHPSAPRSGPLPREDGCRTPGPQLLPLPGALLRPRTLLSSAAEDKARSRHPDTQHPSSGGRCRGGTESPSSAAGRPASMAEAEEDCHSDTVRADDDEENESPAETDVQALIPMIQAQWKLEPAPRVTSSRLENRPCRAARGSLQKTSADTKGKQEQAKEEKARELFLKAVEEEQNGALYEAIKFYRRAMQLVPDIEFKITFTRSPDGDGVGNSYIEDNDDDSKMADLLSYFQQQLTFQESVLKLCQPELESSQIHISVLQMEVLMYIFRWVVSSDLDLTSLEQLSLVCRGFLTSCARDPXKYARPGPALKVWGQKACIKLVSVTRPGREDVFXERPPVSRFDGVYISKTTYIRQGEQSLDGFYRAWHQVEYYRYIRFFPDGHVMMLTTPEEPQSIVPRLRTREYQGLDAIPTGVTIRLSPRHRTIRTQSIWLLITKEKRKEKPL

SEQ ID NO: 9095 - protein, 63 aa, Homo sapiens
  DOMAIN (1)..(37): Ribosomal protein S12e proteins domain identified by eMATRIX, accession number BL01189A, p-value=3.638e-25, raw score of 14.27
  DOMAIN (1)..(57): Ribosomal protein S12e domain identified by PFam, accession name Ribosomal_S12e, E-value=0.0025, PFam score of -21.2
LHFHCNLNFRRQAHLCVLASNCDEPMYVKLVEALCAEHQINLIKVRLLRIVLGLMFSDACIWG

SEQ ID NO: 9096 - protein, 101 aa, Homo sapiens
  DOMAIN (45)..(59): RIBOSOMAL PROTEIN S12E FAMILY SIGNATURE domain identified by eMATRIX, accession number PR00972A, p-value=1.474e-10, raw score of 8.01
CLLHSPRTGLAEIENSQYVCLRTASIRKQKLPRPGTAGATSFEEVVKTALIHDGLARVIREAAKALDKYVYQSQYCGFLQPEQNCHPREEGMEFMVLAQKF

SEQ ID NO: 9097 - protein, 116 aa, Homo sapiens
  DOMAIN (34)..(70): Ribosomal protein S12e proteins domain identified by eMATRIX, accession number BL01189A, p-value=4.750e-30, raw score of 14.27
  DOMAIN (1)..(116): Ribosomal protein S12e domain identified by PFam, accession name Ribosomal_S12e, E-value=2.7e-07, PFam score of 28.8
  misc_feature (1)...(116): Xaa = X or * as defined in Table 2
AKQGISPEGVMDVNTALQEVLKLALIHVWTXTRGNSRSXPKPLDKRQAHLCVLASNCDEPMYVKLVEALCAEHQINLNXGLIDNNETMGEWGXGLLLKFDRGGGKPRKSWFGCSCC

SEQ ID NO: 9098 - protein, 149 aa, Homo sapiens; identical to SEQ ID NO: 8286
  DOMAIN (33)..(55): Globins profile domain identified by eMATRIX, accession number BL01033A, p-value=3.250e-20, raw score of 16.94
  DOMAIN (9)..(149): Globin domain identified by PFam, accession name globin, E- value=4.6e-57, PFam score of 203.0

SEQ ID NO: 9099 - protein, 159 aa, Homo sapiens
  DOMAIN (42)..(64): Globins profile domain identified by eMATRIX, accession number BL01033A, p-value=4.857e-17, raw score of 16.94
  DOMAIN (16)..(67): Globin domain identified by PFam, accession name globin, E- value=3.4e-06, PFam score of 26.0
  misc_feature (1)...(159): Xaa = X or * as defined in Table 2
PTLLVPTDSERTHPWLLSPADKTTVKAPAWGKVGAHAVRSMCAEALERMFLSFPTTKTYFPHFDLSHGSAQVXGPRARKVADALTNAVAQRGTDIAQRAVPPLSDLHAHKLRVGPGSTFKLLKATGLLGXPWPGPPSPAEFNPWRLQRLPWDKVSWVSC

SEQ ID NO: 9100 - protein, 83 aa, Homo sapiens
  misc_feature (1)...(83): Xaa = X or * as defined in Table 2
SEEEECCSCLPSPAGSDQRLLCTHLPCVIVNSEWGVARYXLNVCSCXPVFFSVGPKQYPYNNLYLERGGDPSKEPERVVHYEI

SEQ ID NO: 9101 - protein, 195 aa, Homo sapiens
  DOMAIN (36)..(58): Globins profile domain identified by eMATRIX, accession number BL01033A, p-value=3.250e-20, raw score of 16.94
  DOMAIN (12)..(117): Globin domain identified by PFam, accession name globin, E- value=4.2e-22, PFam score of 81.5
  misc_feature (1)...(195): Xaa = X or * as defined in Table 2
EFHRLRENPPWCSSPADKTNVKAAWGKVGAHAGEYGAEALERMFLSFPTTKTYFPHFDLSHGSAQVKGHGKKVADALTNAVAHVDDMPNALSALSDLHAHKLRVDPVNFQSSXSQLPCLGEPWAAHLPAEFQPLAVATSSLGTKFPGLSVEAPLLTFQITFKGWKPRVGHAFFALWASPQPLLPFPAPVPPWSLK

SEQ ID NO: 9102 - protein, 60 aa, Homo sapiens
EDTAAQSSPGRGEEAEASAAEAQGGEQAYLAGLAGQYHLERYPDSYESMSEPPIAHLLRP

SEQ ID NO: 9103 - protein, 108 aa, Homo sapiens
  DOMAIN (28)..(56): !!!! PROTEIN ALU SUBFAMILY WARNING ENTRY NUCLEAR PHOSPHO domain identified by eMATRIX, accession number PD02454B, p-value= 8.714e-28, raw score of 11.61
  misc_feature (1)...(108): Xaa = X or * as defined in Table 2
KVLRVARCGGSLLSRPSTLGGQGGRLMRSGVRDQPGQHSETPSLLKMQKLAGHGGRALXSQLLGRLRQENHLNPGGRGCSELRSRHCIPSRVTVXDSISKKKRRKKVL

SEQ ID NO: 9104 - protein, 112 aa, Homo sapiens
  DOMAIN (25)..(36): Insulin-like growth factor binding proteins domain identified by eMATRIX, accession number BL00222A, p-value=4.750e-09, raw score of 11.34
  misc_feature (1)...(112): Xaa = X or * as defined in Table 2
CHVPPTLGTRGQGTHQDPFPFPHSPGAPAPCPPPALLGPPRPFPSPPVPGPGGENRKPFTSAPXAXVFPRTPLGALSRGXGSPVVGRGATPSPPTPSPACGPLKCWWHLIKN

SEQ ID NO: 9105 - protein, 89 aa, Homo sapiens
TMRWNSLVQTAAQQVAEDKFVFDLPDYESINHVVVFMLGTIPFPEGMGGSVYFSYPDSNGMPVWQLLGFVTNGKPSAIFKISGLKSGNY

SEQ ID NO: 9106 - protein, 212 aa, Homo sapiens
  misc_feature (1)...(212): Xaa = X or * as defined in Table 2
SPASGHCRLNGAAVAMFGCLVAGRLVQTAXQQVAEDKFVFDLPDYESINHVVVFMLGNNPFPEGMGGSVYFSYPDSNGMPVWKLLGSVTNGKPSAIFKISGLKSGEGSQHPFGANEYCPNLHLLLRLGISGELLDSMAQQTPVRXCCWYPQFDSFTQFTQKMLDNFYNFCSSFAVSQAQMTPSSIXKCSFRPNVVLKWYEAFSVSNIKAFYN

SEQ ID NO: 9107 - protein, 186 aa, Homo sapiens
  DOMAIN (23)..(73): Ribosomal protein S4e proteins domain identified by eMATRIX, accession number BL00528C, p-value=7.333e-11, raw score of 22.01
  DOMAIN (1)..(96): Ribosomal family S4e domain identified by PFam, accession name Ribosomal_S4e, E-value=1.4e-12, PFam score of 55.2
  misc_feature (1)...(186): Xaa = X or * as defined in Table 2
TLPAGFTDVISIHKTGENFCLICGINGRFAVHCITLEEAKYKLCKVRKIWFHDAHTIHYLDSFVKVNDTVXTGKITDFIKFDTGNLGRIGVITNRKKHRGSFDVVHVKDANGNRFAPWLSNIFVTGKCNKPWISLPRGKGIRLTIAFHSDKWFCSDISVQNLCKRFSQGDTGIKNSEARRCSNLQV

SEQ ID NO: 9108 - protein, 316 aa, Homo sapiens
  DOMAIN (20)..(53): Ribosomal protein S4e proteins domain identified by eMATRIX, accession number BL00528A, p-value=5.000e-36, raw score of 16.12
  DOMAIN (78)..(244): Ribosomal family S4e domain identified by PFam, accession name Ribosomal_S4e, E-value=0.087, PFam score of -42.6
  misc_feature (1)...(316): Xaa = X or * as defined in Table 2
GRPAPEDGGPLSLPNAAMARGPKKHLKRVAAPKHWMLDKLTGVFAPRPSTGPHKLRECLPFIIFLRNRLKYALTGDEVKKICMQRFIKIDGQVRNXYNLPLLGFMDVISIEKTGENFPFXSNXHPRGPLLLXHRITPEEAKYKVCAKMRKIFCGPTKGIPHLVTSXCPAPHPAYPRNPLIQGEMNTHSRLILETGQDITDFHSKFDHLVTLCMVTGGANLGRNWVLITQQRRGTPGSFDRWFTXKDANGNKLLATSDFSNIFWLLGKGNKPWISLPRGKGIPPHHLLEERDKRLAAKQSSWVKWGPWVTWSDLLVP

SEQ ID NO: 9109 - protein, 127 aa, Homo sapiens
  DOMAIN (48)..(62): Ribosomal protein L5 proteins domain identified by eMATRIX, accession number BL00358C, p-value=5.500e-15, raw score of 13.75
  DOMAIN (13)..(116): ribosomal L5P family C-terminus domain identified by PFam, accession name Ribosomal_L5_C, E-value=4.7e-38, PFam score of 139.8
RIRKLCLNICVGESGDRLTRAAKVLEQLTGQTPVFSKVREYELRKNNFSDTGNFGFGIQEHIDLGIKYDPSIGIYGLDFYVVLGRPGFSIADKKRRTGCIGAKHRISKEEAMRWFQQKYDGIILPGK

SEQ ID NO: 9110 - protein, 74 aa, Homo sapiens
GGRFKEPLGGPKLTRAGKEKVFSLWGADLKPGPGPCFNNAGRGKFVTWEFLERTLILGGGHIGPTSLQKLKALG

SEQ ID NO: 9111 - protein, 69 aa, Homo sapiens
CVSLVHLLLTLSWLGDCWLFLGQVLGRPGFSIADKKRRTGCIGAKHRISKEEAMRWFQQKYDGIILPGK

SEQ ID NO: 9112 - protein, 220 aa, Homo sapiens
  DOMAIN (21)..(32): Ribosomal protein L5 proteins domain identified by eMATRIX, accession number BL00358A, p-value=6.276e-11, raw score of 13.06
  DOMAIN (88)..(190): ribosomal L5P family C-terminus domain identified by PFam, accession name Ribosomal_L5_C, E-value=0.00057, PFam score of 13.8
  misc_feature (1)...(220): Xaa = X or * as defined in Table 2
IMAQDQGEKENPHAGNFAFRKLVLNICVGESGDRPTRAAQVLEPAQQGKTPCVFPKAXHTPVKSLWASRRNEKIAFPTATSSEGAKARRNLCRRGLKRFSEYGVQDNTTFSGYWETFGFGIQEHIDLGIKYDPSIGIYGPGTSYVVLGVRPGFQHPQTKKPQGQGCIGAKHRISKEEAMRWFQQKYDGIILPGQINSPFLSKKSNKKFSVNKKNNKKITL

SEQ ID NO: 9113 - protein, 65 aa, Homo sapiens
  misc_feature (1)...(65): Xaa = X or * as defined in Table 2
CSCVWNLSFHGNAFHLKTPYSRIKKAKHWMAHVYSPITLGGRGGWITXSQEFETSLSNIIKPCLY

SEQ ID NO: 9114 - protein, 93 aa, Homo sapiens
  DOMAIN (8)..(58): Ribosomal protein S6e proteins domain identified by eMATRIX, accession number BL00578D, p-value=6.294e-37, raw score of 16.68
VRGIPVTDQGELEKEREPKIQRLVTPRVLQHKRRRIALKKQRTKKNKEEAAEYAKLLAKRMKEAKEKRQEQIAKRRRLSSLRASTSKSESSQK

SEQ ID NO: 9115 - protein, 112 aa, Homo sapiens
  misc_feature (1)...(112): Xaa = X or * as defined in Table 2
IEFVIKKIFFPFSHCLICLAIDLQLQXYMGVPRMQLKTCYVRGKYRGVVLEEQNILWKXIHIPLQVREDGRPCLPLRKLGGKGGGGGEPLNQHGDPVQGNPPYFLFCHMRNP

SEQ ID NO: 9116 - protein, 105 aa, Homo sapiens
  misc_feature (1)...(105): Xaa = X or * as defined in Table 2
DPAREGHPVCCAGQRPCVDGHGQEKGFLKAALEVELGASNPSWXDTEVKPQSALPQASALTIWVSYQQGVLSATILYEILLGKATLYAVLVSALVLMAMVKRKDF

SEQ ID NO: 9117 - protein, 252 aa, Homo sapiens
  DOMAIN (100)..(123): Immunoglobulins and major histocompatibility complex proteins domain identified by eMATRIX, accession number BL00290A, p-value= 1.818e-11, raw score of 20.89
  DOMAIN (96)..(171): Immunoglobulin domain identified by PFam, accession name ig, E-value=0.00053, PFam score of 17.9
TLRGAVLRGAAGRLGGGLLVLGAGRAMGLSAVGRTRAESGTAERAAPVFVLGLQAVSTDTQMFGPGTRLTVLEDLKNVFPPEVAVFEPSEAEISHTQKATLVCLATGFFPDHVELSWWVNGKEVHSGVSTDPQPLKEQPALNDSRYCLSSRLRVSATFWQNPRNHFRCQVQFYGLSENDEWTQDRAKPVTQIVSAEAWGRADFGFTSVKSYQQGVLSATILYEILLGKATLYAVLVSALVLMAMVKRKDSRG

SEQ ID NO: 9118 - protein, 334 aa, Homo sapiens
  DOMAIN (171)..(194): Immunoglobulins and major histocompatibility complex proteins domain identified by eMATRIX, accession number BL00290A, p-value= 4.600e-10, raw score of 20.89
  DOMAIN (43)..(244): Immunoglobulin domain identified by PFam, accession name ig, E-value=4.4e-07, PFam score of 27.9
  misc_feature (1)...(334): Xaa = X or * as defined in Table 2
RYSFFKAVMGIRLLCRVAFCFLAVGLVDVKVTQSSRYLVKRTGEKVFLECVQDMDHENMFWYQRQDPGLGLRLIYFSYDVKMKEKGDIPEGYSVSREKKERFSLILESASTNQTSMYLCASSLFNSGYQETQYFGPGTRLLVLEDLKNVFPPEVAVFEPSEAEISHTQKATLVCLATGIFPDHVELSWWVNGKEVHSGVSTDPQPLKEQPALNDSRYCLSSRLRVSATFWQNPRNHFRCQVQFYGLSGNDEWTQDRAKPVTQIVSAEAWGRADCGFTSVSYQQGVLSATILYEILARGRPTLYCLCWXAPLVLMAMVKEKGFLKAALEVELGAF

SEQ ID NO: 9119 - protein, 39 aa, Homo sapiens
ITSKRWFHLKFSTQIKKRVIIAPHLLTLSALKLIFCFRT

SEQ ID NO: 9120 - protein, 343 aa, Homo sapiens
  DOMAIN (293)..(310): Zinc finger C2H2 type, domain proteins. domain identified by eMATRIX, accession number BL00028, p-value=4.600e-10, raw score of 16.07
  DOMAIN (37)..(319): Zinc finger, C2H2 type domain identified by PFam, accession name zf-C2H2, E-value=9.8e-14, PFam score of 59.1
  misc_feature (1)...(343): Xaa = X or * as defined in Table 2
QQKPGQPLFLGSISPKKSFKTRKQKSSSKAEYNLTACKCLLCKRKYSSQIMLKRHMQIRPQDNSFWNKLXKRKRPXXYCQQFRNKSXSXTSRFCRIFTPFHYPFSTECNXREQIIQMKKRTHRQHRKIKLNKTLKCPKSTSPSAAGGQQKTRKPKLSAGFDFKQLYCKLCKRQFTSKQNLTKHIELHTDGNNIYVKFYKCPLCTYETRRKRDVIRHITVVHKKSSRYLGKITASLEIRAIKKPIDFVLNKVAKRGPSRDEAKHSDSKHDGTSNSPSKKYEVADVGIEVKVTKNFSLHRCNKCGKAFAKKTYLEHHKKTHKANASNSPEGNKTKGRSTRSKALV

SEQ ID NO: 9121 - protein, 136 aa, Homo sapiens
  DOMAIN (37)..(79): Ribosomal protein L1e proteins domain identified by eMATRIX, accession number BL00939B, p-value=1.000e-40, raw score of 15.63
  DOMAIN (2)..(132): Ribosomal protein L4/L1 family domain identified by PFam, accession name Ribosomal_L4, E-value=8.3e-22, PFam score of 85.9
  misc_feature (1)...(136): Xaa = X or * as defined in Table 2
SNPRVRGGGTHRSGQGAFANMCRGGRMFAPTKTWRRWHRRVNTTQKRYAICSALAASALPALVMSKGHRIEEVPELPLVVEDKVEGYKKTKEAVLLLKKLKAWNDIKKVYASQRMRAGKGKKRCGRXERKEGCCWC

SEQ ID NO: 9122 - protein, 455 aa, Homo sapiens
  DOMAIN (168)..(198): Ribosomal protein L1e proteins domain identified by eMATRIX, accession number BL00939C, p-value=1.409e-30, raw score of 15.46
  DOMAIN (33)..(311): Ribosomal protein L4/L1 family domain identified by PFam, accession name Ribosomal_L4, E-value=4.6e-19, PFam score of 76.8
  misc_feature (1)...(455): Xaa = X or * as defined in Table 2
EERGCFSLPPLACARPLISVYSEKGESSGKNVTLPAVFKAPIRPDIVELCSNPNLRKNNRQPYAVSELAGHQTKAESWGTGRAGGSKFPEVRGGGTHRSGQGAFGNMCRGGRMFAPTKTLGRRWNRRVNTTPQKRYAICSALAASALTSNWVMSKGHRIEEVPELPLVVEDKVEGYKKTKEAVLLLKKLKAWNDIKKVYASQRLRASKGKMRNRRRIPGAGGPCIIYNEDNGIIKAFRNIPGNYSAXMXAKLNILKLAPGGHGGRFCIWTEKCFSGKLDELYGTWRXSRASPQRSNYHSFPLHKMINTDLSRILEKPQRSQRAPPGHHAKKIHRRVLKKNPTEKTLRIMLKLKPHMQKTHAAGTTHSSPRPRNHKLRVDKGKLLHQRHLQAKSDEKAAVAGKKPAVGKKGKKAPVGVKKQKKPLVGKKAAATKKPAPEKKPAEKKPTTEEKKPAA

SEQ ID NO: 9123 - protein, 146 aa, Homo sapiens
  misc_feature (1)...(146): Xaa = X or * as defined in Table 2
VGPLTPNSVLPRGSVLPTEVGLDALGEGLKGLCGPNPVVETTNQGFPMKQGVLTHGRVRXETXDQSTQDSASCYSTCPAAQTAAYCSEASSVPRKIKKRLQNMLNFWPREXRRLRRSARNKLRRDADFPLCELLLLSLNPVRNKIF

SEQ ID NO: 9124 - protein, 732 aa, Homo sapiens
  DOMAIN (27)..(45): HIV REV INTERACTING PROTEIN SIGNATURE domain identified by eMATRIX, accession number PR00405B, p-value=8.442e-12, raw score of 11.83
  DOMAIN (3)..(124): Putative GTP-ase activating protein for Arf domain identified by PFam, accession name ArfGap, E-value=6.6e-43, PFam score of 156.0
MSRKGPRAEVCADCSAPDPGWASISRGVLVCDECCSVHRSLGRHISIVKHLRHSAWPPTLLQMVHTLASNGANSIWEHSLLDPAQVQSGRRKANPQDKVHPIKSEFIRAKYQMLAFVHKLPCRDDDGVTAKDLSKQLHSSVRTGNLETCLRLLSLGAQANFFHPEKGTTPLHVAAKAGQTLQAELLVVYGADPGSPDVNGRTPIDYARQAGHHELAERLVECQYELTDRLAFYLCGRKPDHKNGHYIIPQMADSLDLSELAKAAKKKLQALSNRLFEELAMDVYDEVDRRENDAVWLATQNHSTLVTERSAVPFLPVNPEYSATRNQGRQKLARFNAREFATLIIDILSEAKRRQQGKSLSSPTDNLELSLRSQSDLDDQHDYDSVASDEDTDQEPLRSTGATRSNRARSMDSSDLSDGAVTLQEYLELKKALATSEAKVQQLMKVNSSLSDELRRLQREIHKLQAENLQLRQPPGPVPTPPLPSERAEHTPMAPGGSTHRRDRQAFSMYEPGSALKPFGGPPGDELTTRLQPFHSTELEDDAIYSVHVPAGLYRSKLSRHGSGADSDYENTQSGDPLLGLEGKRFLELGKEEDFHPELESLDGDLDPGLPSTEDVILKTEQVTKNIQELLRAAQEFKHDSFVPCSEKIHLAVTEMASLFPKRPALEPVRSSLRLLNASAYRLQSECRKTVPPEPGAPVDFQLLTQQVIQCAYDIAKAAKQLVTITTREKKQ

SEQ ID NO: 9125 - protein, 69 aa, Homo sapiens
SMDSSDLSDGAVTLQEYLELKKALATSEAKVQQLMKVNSSLSDELRRLQREELEDDAIYSVHVPAGLYR

SEQ ID NO: 9126 - protein, 354 aa, Homo sapiens
MTWQRGNRSFVFRGQDTSAVVMEIDHDRRVVYTETLALAGQDRELLLAAAQPTEEQVLSRLTAPVVTTQLDTKNISFERNKTGILGWRSEKTEMVNGYEAKTGRVDKNYPLVTGHTAPVLDIDWCPHNDNVIASASDDTTIMGAASSAEQRPEPGPKERRESNHPAAPLREPEGQQAWAQRLSPAHTLFGTASLYRGVGSEGAGPERLSQLEGKRFLELGKEEDFHPELESLDGDLDPGLPSTEDVILKTEQVTKNIQELLRAAQEFKHDSFVPCSEKIHLAVTEMASLFPKRPALEPVRSSLRLLNASAYRLQSECRKTVPPEPGAPVDFQLLTQQVIQCAYDIGKELGNNGF

SEQ ID NO: 9127 - protein, 101 aa, Homo sapiens
  misc_feature (1)...(101): Xaa = X or * as defined in Table 2
LPRFQTLRNTETEDHSCCCSGRRRFAAAVASRSQXGNPASLAGSSTTGARSCAPVARTQRCPRCAACGCWRWRTRWICSAKGWFAHSQFSARIDWLQFLEW

SEQ ID NO: 9128 - protein, 260 aa, Homo sapiens
  DOMAIN (69)..(79): Ank repeat proteins domain identified by eMATRIX, accession number PF00023B, p-value=5.091e-09, raw score of 14.20
GILDYLDNISPQQIRKLFYVLSTLAFSKQNEASSHIQQLHSSVRTGNLETCLRLLSLGAQANFFHPEKGTTPLHVAAKAGQTLQAELLVVAAKNPEKREYTTENGSPAETPTCSAGKRGTPRTKMSDISSEDLRREIQAVLKDADLATISAKRVREQVEGKLNCSLLSRKKEFDKIVMEVINEQQDEEDEDDDEGKDPDADPDDESEPSEEEDPSSSEEEAAKKKKQTPKKRPQPTKHKAPKKKRKTLNADDSGTADERL

SEQ ID NO: 9129 - protein, 533 aa, Homo sapiens
  DOMAIN (199)..(217): HIV REV INTERACTING PROTEIN SIGNATURE domain identified by eMATRIX, accession number PR00405B, p-value=8.442e-12, raw score of 11.83
  DOMAIN (175)..(279): Putative GTP-ase activating protein f domain identified by PFam, accession name ArfGap, E-value=1.2e-05, PFam score of 17.6
MGYRARIRNHVWLATQNHSTLVTERSAVPFLPVNPEYSATRNQGRQKLGRFNAREFGNLIIDILSESKRRQQARAEQPHSAAAADGVTFSVPVTPHTFRHSYAMHMLYAGIPLKVLQSLMGHKSISSTEVYTKVFALDVAARHRQPTRRKAPAVLGQCRAIATRERPGWFHVAEVRASRRGRSPTPQCADPGWASISRGVLVCDECCSVHRSLGRHISIVKHLRHSAWPPTLLQSGFPGPSRRAAPRAARGPTPRTEEAAWAAMALTFLLVLLTLATLCTRLHRNFRRGESIYWGPTADSQDTVAGSPDHGLLAFAYHRLVRFLLWVLCPGWAFFLVNSSRGGVFNPILHPCPRHGQARFAGVGRAEDVTFLYHPCAHPWLKLQLALLAYACMANPSLTPDFSLTQDRVDIEQLDPRGRTPLHLATTLGHLECARVLLAHGETWARENRSGWTVLQEAVSTQDLELVQLVLRYRDYQRVVKRLASIPVLLEKLRKQRSYLPGRPLARLRRSVNSSGAVGMIKSESMGRWFVGP

SEQ ID NO: 9130 - protein, 230 aa, Homo sapiens
  misc_feature (1)...(230): Xaa = X or * as defined in Table 2
ENRSGFQSRRRIYSISKQKKKLTFFDVKDNTXSWNAVASREECYLGVITXSRTLSGRSXTKDRLRRTXSMPCYSDSMISMQELEFRHLNTIQKMRCELIRLQHQTELTNQLEYNKRRERELRRKHVMEVRQQPKGLKSKELPNKKSSFQGYLQNSQTRQYKALRNHLLETTPKSEHKAVLKRLKEEQTRKLAILAEQYDHSINEMLSTQAVSLLFLGQNKFSAPFLPPPE

SEQ ID NO: 9131 - protein, 969 aa, Homo sapiens
  DOMAIN (178)..(207): kw REPLICATION REPB REPA INITIATION domain identified by eMATRIX, accession number DM00653A, p-value=7.207e-27, raw score of 20.40
  DOMAIN (349)..(469): Putative GTP-ase activating protein for domain identified by PFam, accession name ArfGap, E-value=7.6e-08, PFam score of 39.5
  misc_feature (1)...(969): Xaa = X or * as defined in Table 2
MDDIPQEARQYRHNQAYAYSIQGDGAEDDDERIVRFHTRVINHKKRKNSPRIVQSNDLTEAAYSLSRDQKRMLYLFVDQIRKSDGTLQEHDGICEIHVAKYAEIFGLTSAEASKDIRQALKSFAGKEVVFYRPEEDAGDEKGYESFPWFIKRAHSPSRGLYSVHINPYLIPFFIGLQNRFTQFRLSETKEITNPYAMRLYESLCQYRKPDGSGIVSLKIDWIIERYQLPQSYQRMPDFRRRFLQHIFVLRERPETVLIDLIQRTKDAVRELDNLQYRKMKKLLFQEAHNGPAVEAQEEEEEYGWNLDRAYDYVKERRTVTKPNPSFMRQLEEYQGILLARPKRTAYIYGSVYRRCGYADHKVEIKHPGWASISRGVLVCDECCSVHRSLGRHISIVKHLRHSAWPPTLLQMVHTLASNGANSIWEHSLLDPAQVQSGPALKQTPKDKVHPFKLEFHSGAKLPDCWDFVAQVFLCRDDXWELTAKDLSKANXHSSVRTGKPWKTCLRLLSLGAQANFFHPEKGTTPLHVAAKAGQTLQAELLVVYGADPGSPDVNGRTPIDYARQAGHHELAERLVECQYELTERLAFYLCGRKPDHKNGHYIIPQMADRSRQKCMSQSLDLSELAKAAKKKLQALSNRLFEELAMDVYDEVDRRENDAVWLATQNHSTLVTERSAVPFLPVNPEYSATRNQGRQKLARFNAREFATLIIDILSEAKRRQQGKSLSSPTGNLELSLRSQSDLEDQHDYYSVASDEDTEHEPLRSTGATRSNRARSMDSSDLSDGAVTLQEYLELKKALATSEAKVQQLMKVNSSLSDELRRLQREIHKLQAENLQFRQPPGPVPTLPFPSXTGREHTPLGARRGEQHRRIRQAFSMYEPGSALKPFGGPPGDELNTRLQPFHSTELEDDAIYSVHVHAGLYRPVGSEPQGVLGSVLNSGLKMIRLTWSLILVATSTLGSRRSPMKTRSPP

SEQ ID NO: 9132 - protein, 251 aa, Homo sapiens
  misc_feature (1)...(251): Xaa = X or * as defined in Table 2
LISTSDLYFLXDLXVRCKQTGVLPWFHTTTIPRSSLEVNPRFPTYHLCELSASYLTSWYLSFLIWTMGXLLHLHHTELLXGXSNKSCXVLCMEPDTVTAHSAVCTQFWSNVDKNNNVISLRKSFLFFXQSFALVTQAGVQWRDLGSLQAPPPGFTPFSCLSLPSSWDYRRPLPRPANFLYFXXRQGFPETGFHHVHHVGQADLELLTSGDPPTLASQSAGITGVSHHVQPGEGFCNCCCVVESGPFKERVG

SEQ ID NO: 9133 - protein, 100 aa, Homo sapiens
  misc_feature (1)...(100): Xaa = X or * as defined in Table 2
TNSLYGLNIYLEIDQHFRNMKIYRSNSLILILILLHLYCIFALSDLCSHXPQVAIXKEINWPGAVAHTCNPSTLGNRGRWIVXGQEFETSLVNMAKARLY

SEQ ID NO: 9134 - protein, 162 aa, Homo sapiens
  DOMAIN (77)..(127): Ribosomal protein S6e proteins domain identified by eMATRIX, accession number BL00578D, p-value=1.000e-40, raw score of 16.68
VGPNQWWNAQPRFPHKQGVLTPWPCRLLLSKGPSLSRPKETEPRRLGPKRASRVRKLFNLSKEDDVRQYVVRKPLNKEGKKPRTKAPKIQRLVTPRVLQHKRRRIALKKQRTKKNKEEAAEYAKLLAKRMKEAKEKRQEQIAKRRRLSSLRASTSKSESSQK

SEQ ID NO: 9135 - protein, 86 aa, Homo sapiens
  misc_feature (1)...(86): Xaa = X or * as defined in Table 2
SGSTHASGGLQASRWRRAGTSRCSVSSLTSTSTASLRGLPTVATGLRSGSWTSHHGVAGXGRPTRPVGSRRRDGGERVRVGALCQA

SEQ ID NO: 9136 - protein, 171 aa, Homo sapiens
  misc_feature (1)...(171): Xaa = X or * as defined in Table 2
SRWRRAGTSRCSVSSLTSTSTASLRGLPTVATGDYPPPDQASSNLTLSPPPGHTHCGNRGQPWPVLGRGGANAAASSSSRPEQGGGSSSFARLSSTHGTPGGGEGVKAVSSAXGPGGLPGTLNLVGGGDVTDASLSALTGGLEGILEKPXAGRCPITDGNPREEGREPRAG

SEQ ID NO: 9137 - protein, 341 aa, Homo sapiens
  misc_feature (1)...(341): Xaa = X or * as defined in Table 2
MPNTAMKEKRCLLMGERSGSGKNQAMRSIIFAKLPFARDTRRLGATIDVEHSHVRFLGNLVLNLWDCGGQDTFMENYFTSQRDNIFRNVGSFDFKVFDVESRELEKDMHYYQSCLEGHPPRTLPDAKIFCLVHKMDLLVQEDQRDLIFKEREEDLRRLSRPLECACFRTSIWGXGRFYKAWVQAFVYQLDFPNVSAAGRLNLRDFAQIIEADEVLLFERSTFLVISHYQCKEQRDVHRFEKISNINKQFKLSCSKLPASFQSMEVRNSNFAAFMRHLFTXNTYVMVVMSDPVDPFLGPLLINHSQCPGNHFEETGRELNGPQATVFPYGVEYCQNALSEKA

SEQ ID NO: 9138 - protein, 49 aa, Homo sapiens
HEHMLLSFLFFFFVFLVEMAFLHVGQAGLELPTSGDLPTSASLSVGITG

SEQ ID NO: 9139 - protein, 89 aa, Homo sapiens
ARGCKRPCRQIASLMLQLCILHACWALVPQLHAAPGLAIQRLCICPYLGSWPSTLGPRVPPLSPSTSPRPSPAFGASLNPPRHSSGPLR

SEQ ID NO: 9140 - protein, 59 aa, Homo sapiens
  misc_feature (1)...(59): Xaa = X or * as defined in Table 2
SGVKNGRGYVVGISGGTTNKVSPXSRVSXPMAVSACYXVKNGRGYVVGISGGTTNKVSP

SEQ ID NO: 9141 - protein, 126 aa, Homo sapiens
  misc_feature (1)...(126): Xaa = X or * as defined in Table 2
MRSSKQMKPNFPRCSSITVLSVRGMVLFLTLACPRFKMSSRTDFRFGNPQVTXGSTICSIFRLPSILSMRTTKDQGMFIWQFQGMRFHFXSSETHLVTFLPPGIMXEXFQSLKPEPFSFLLSCYCH

SEQ ID NO: 9142 - protein, 65 aa, Homo sapiens
  misc_feature (1)...(65): Xaa = X or * as defined in Table 2
WHEFTGAENHCKTLPKENFXWCLCKSHPSEPKNAAYNRTLCDLGISKSEVSLGTSFEMWTSQGQE

SEQ ID NO: 9143 - protein, 63 aa, Homo sapiens
PSRRLLGHPRWALSPHLLLPQRFCSWVSFAPASCPCDLFISRDRSSVSVGLMKHRMLGLAELL

SEQ ID NO: 9144 - protein, 190 aa, Homo sapiens
  misc_feature (1)...(190): Xaa = X or * as defined in Table 2
TSPSTSLRPAPIPSPSPSSRPPSSSQTTSAASSPSSAWPKAASRQGAXRCREXLPSWTSQSSPPLKSWGLDSAPPPPLSTCLSASTTRGAGAAATPQCSAPCLHRCDKVPGFAVAQCINQHSSPSLPHSRHPPPAGAPAAAGAPATATLEAPARPPPPPQPRVQQSGVAGKDADECSACRRPTVMAATGF

SEQ ID NO: 9145 - protein, 606 aa, Homo sapiens
  misc_feature (1)...(606): Xaa = X or * as defined in Table 2
DFFSKIDDSHLQVLFENQLLILFFPHFHLNDCSNSFLFFFSEMESRSVAQLECTGAILAHCNLRLLGSSDFPALASRVAGTTGTCHHTQLIFVFLVETGFHHVGQAGTCMQSQLIKGLRENHLNPGGGGCNEPRSRPLRSSLGNRVRLSQREKQNPXDAQVSEKGLNTLELQAKFXGVSHVFPGERVSLISQNPXPFWKKVIKQVSRLRFKKPQDPFRASQSLRIFQSHHXKSWNTYSQQRQVIILFLCLSSYVYFKSFSKQGPRTLQIQLCPWAWSTCCRSLREPCTNARVTHLPTLNPRIEDATKQDSFLHGMVPIVRQGQHRMXENAGEFFPWELGLWMRGCFAHGTIRLLSFLXPFLSSFXRXSRKXSSLKMLDKNSQNNKTHASTSLIKNLPHLAPKSMATATKSNFKELRFLQQNRXFTSSSPCLKISYXYYSSLISIXMTAAIVFCFCFSEMESRSVAQAGVHWCNLGSLQSLPPGFKRFSCLSLSSSWDYRHAPPHPAHFCIFSRDRVSPCWPGWSQSPGPHGLPAWASPKCWDYSREPPRPGQQYSFSVTRTSLSPITLRLCIAPCPNQAFTDPSRVLHLFVPASSIPPNLKVTLKY

SEQ ID NO: 9146 - protein, 190 aa, Homo sapiens
  DOMAIN (58)..(80): Globins profile domain identified by eMATRIX, accession number BL01033A, p-value=2.800e-16, raw score of 16.94
  DOMAIN (36)..(127): Globin domain identified by PFam, accession name globin, E- value=3.6e-17, PFam score of 64.3
  misc_feature (1)...(190): Xaa = X or * as defined in Table 2
PLKRSDGCNDGRPTRPPTRPDTTVFTSNLKQTRMVHLTPEEKSAVTALWGKVNVDEVGGKALGRLLVVYPWTQRFFESFGDLSTPDAVMGNPKVKAHGKKVLRGAFSDGLAHLDNLKGTFAHTEVSLHCXQACTWDPGELQGSWGNVLVCVAGPITFGKRISTPPVAGLPNQENWLAWCWLNALGPQVIT

SEQ ID NO: 9147 - protein, 118 aa, Homo sapiens
ACRIAARAYLDLLRTWVFQVGSSGSQRDVNCSVMGPQEKKVVVYLQKLDTAYDDLGNSGHFTIIYNQGFEIVLNDYKWFAFFKDVTDFISHLFMQLGTVGIYDLPHLRNKLAMNRRWG

SEQ ID NO: 9148 - protein, 375 aa, Homo sapiens
  DOMAIN (296)..(342): kw TRANSCRIPTASE REVERSE II ORF2 domain identified by eMATRIX, accession number DM01354O, p-value=1.000e-40, raw score of 8.73
MASRGVHAEDWMQDPWWHQCADEQIVTDCHWVIKGTHRSEPSSMKVKRIIPISTNWFYRIQTSSLLNKLWKDSDYEVLNCRAFEEKGPQEKKVVVYLQKLDTAYDDLGNSGHFTIIYNQGFEIVLNDYKWFAFFKYKEEGSKVTTYCNETMTGWVHDVLGRNWACFTGKKVGTASENVYVNIAHLKNSQEKYSNRLYKYDHNFVKAINAIQKSWTATTYMEYETLTLGDMIRRSGGHSRKIPSKYYKHLYAKKLENLEEMDKFLDAYTLPRLNQEEVGSLNRSITSYESEAVINSLLMKKSPGPDGFTVEFYQRYKEELIPFLLKLFQTIEKEGLLPNSFYEASIILIPKPGRDTTTKRKLQSNIPDELRRKKSQ

SEQ ID NO: 9149 - protein, 646 aa, Homo sapiens
  DOMAIN (542)..(637): Papain family cysteine protease domain identified by PFam, accession name Peptidase_C1, E-value=2.3e-25, PFam score of 94.2
MWKHLWNWVIGSGWKTLDVLEEDRKTKENLVLLRDFSSGCDQSIDRNMDSEVQADEFSDRNEEVIGNWSKGQPCYTLAKDLSALCPYPKALWKVELKSDDLGEIPLELQRLVHGGQVNLDMEDHQDQEYIKPRLRFKAFSGEGQKLGSLTPEIVSTPSSPEEEDKSILNAVVLIDDSVPTTKIQIRLADGSRLIQRFNSTHRRRAVNGPSNQLPDKPGSPSPFCLAPLITVCPAADDPSPALWLHLVAARSTSQRNGQVLCYLPRKWGAVAVCTSVEACCWVFWLLERQNDSGMQLGGPPPSAIFRWLAAPAADAPAATSGAGCLATAGGAKTRKLALAELYEDEVKCKSSKSNRPKATVFKSPRTPPQRTVKNWFQLIAPNAGEDAEQQELAFIAGGTAKWYSHFGRPFGNLLQRATWNVSRKLLRTTQISGSLRYWGFPGFQAKVAATLAKQEVIPPYLSLGRGAEFKGLSQNSLQAPLHGTSQGKKNDYPETAVLPKLPREKVSRREKRLASSRCLSLGTKCMSEEAFLVITNSSSCSCEGGFPYLIAGKYAQDFGLVEEACFPYTGTDSPCKMKEDCFRYYSSEYHYVGGFYGGCNEALMKLELVHHGPMAVAFEVYDDFLHYKKGIYHHTGLRDPFHPFEL

SEQ ID NO: 9150 - protein, 682 aa, Homo sapiens
  DOMAIN (577)..(587): Eukaryotic thiol (cysteine) proteases cysteine proteins domain identified by eMATRIX, accession number BL00139C, p-value= 3.769e-12, raw score of 9.23
  DOMAIN (413)..(665): Papain family cysteine protease domain identified by PFam, accession name Peptidase_C1, E-value=1.2e-34, PFam score of 127.4
  misc_feature (1)...(682): Xaa = X or * as defined in Table 2
MTYPENIQIKKITGVQWMVPLKYKEEGSKVTTYCNETMTGWVHDVLGRNWACFTGKKVGTASENVYVNIAHLKNSQEKYSNRLYKYDHNFVKAINAIQKSWTATTYMEYETLTLGDMIRRSGGHSRKIPSSVPLCSSAPLDVQLLVSVPAKILGLYGGRMGGMAGQKAPFLRAPVIGVSFADSFQPSRLQDSPQLFNQGQLLSAAQVGSSGSQRDVNCSVMGPQEKKVVVYLQKLDTAYDDLGNSGHFTIIYNQGFEIVLNDLQVGLPFFKYKEGGAARVTTYCNETMTGWGAXCVWGRNWACFTGKKVGTASENVYVNTAHLKNSQEKYSNRLYKYDHNFVKAINAIQKSLTATTYMEYETLTLGDMIRRKWWATSRKIPRPKPAPLTAEYSQKILLHLPTSWDWRNVHGINFVSPVRNQASCGSCYSFASMGMLEARGIRILTNNSQTPILSPQEVVSCSQYAQGCEGGFPYLIAGKYAQDFGLVEEACFPYTGTDSPCKMKEDCFRYYSSEYHYVGGFYGGCNEALMKLELVHPWGPWEVCFLEVYDDFLHYKKGDPTPHTGLKRPFSTPFELTNHAVLLVGYGTXLKPLGMEYWIVKNKLGAPAWGLRNGYFRIPRGTDECAIESIAVAATPQFLNFRGRLPSIFINGSASSCKGGIGIFTDCRLSTSIFRSLQIDFP

SEQ ID NO: 9151 - protein, 54 aa, Homo sapiens
  misc_feature (1)...(54): Xaa = X or * as defined in Table 2
IKKVRNLGPKHPRFSVLLLHVSCSTNGGVLLXRSSVPRKIKKRLQNMLNFWPRE

SEQ ID NO: 9152 - protein, 124 aa, Homo sapiens
  misc_feature (1)...(124): Xaa = X or * as defined in Table 2
MSAAMRERFDRFLHEKNCMTDLLAKLEAKTGVNRSFIALGVIGLVALYLVIWLPSLHLCGFLLWCMAPSPSNGAELLYKRIIRPFFLKHESQMDSVVKDLKDKAKETADAITKEAKKATVNLLX

SEQ ID NO: 9153 - protein, 305 aa, Homo sapiens
  DOMAIN (142)..(177): Glucokinase regulatory protein family proteins domain identified by eMATRIX, accession number BL01272B, p-value=7.840e- 29, raw score of 19.61
  DOMAIN (19)..(297): Amino acid permease domain identified by PFam, accession name aa_permeases, E-value=0.00011, PFam score of -215.4
MVDQVKVVADDQAPAEQSLRRNLTNRHIQLIAIGGAIGYFTGWTYWFCWVVTGMADVVAITAYAQFWFPDLSDWVASLAVIVLLLTLNLATVKMFGVIGLVALYLVFGYGASLLCNLIGFGYPAYISECPPTYGVKPGLVVGLIAGGEYAIQHAVEGAEDSREGGVNDLKNINLTAQDVVVGIAASGRTPYVIAGLEYARQLGCRTVGISCNPGSAVSTTAEFAITPIVGAEVVTGSSRMKAGTAQKLVLNMLSTGLMIKSGKVFGNLMVDVVATNEELHVRQVNIVKNATGCSAEQAEAALIEW

SEQ ID NO: 9154 - protein, 227 aa, Homo sapiens
  misc_feature (1)...(227): Xaa = X or * as defined in Table 2
FRAAVAAPVYPALGTAPGGETVPEMTAAMRERFERILHDKNCMTDLLAKLEAKTGVNRSFIALGVIGLEALYLVFGYGASLLCNLIGFGYPAYISIKAIESPNKEDDTQWLTYWVVYGVFSHCXNSFSDIFLSWFPFXLHGXKCGFLVGWCMAPEPLLNGGXNCSKRRIIRSFSFPGSTKSQIGQVLVKDPXRPRPKETADANHXKKPKKSLPXILLGXKKKKKGGR

SEQ ID NO: 9155 - protein, 30 aa, Homo sapiens
  misc_feature (1)...(30): Xaa = X or * as defined in Table 2
XVDPASSQAMELSDVTLIEGVGNEVMVVAX

SEQ ID NO: 9156 - protein, 83 aa, Homo sapiens
  misc_feature (1)...(83): Xaa = X or * as defined in Table 2
PWSXLGSLPTXQTAVQPAPGRYCVSRRHIRPPPGACGPPGGTANGNPEPTELPHPSEGNDEKAEEAGEGRGDSTWGGWSWGWC

SEQ ID NO: 9157 - protein, 54 aa, Homo sapiens
  misc_feature (1)...(54): Xaa = X or * as defined in Table 2
NQHHHTLPPPSPHYPHPQXGXHQRAPWPGCWQGPRCRNKGGQHQAEPEGLQPGL

SEQ ID NO: 9158 - protein, 168 aa, Homo sapiens
  misc_feature (1)...(168): Xaa = X or * as defined in Table 2
SPASQHCHHYPLMMGSSVVRGAFGLPPVGPHAPGVGRMCRLLTQXRPGAGCYRCLLRRXRAKLGPRLESAPPHLPPPSPHYPHPQXGXHQRAPWPGCWQGPRVTARXGGVPHPFSEAKVPLLDGPIPSALDWGPWAHPNRRAAWPQPPXXDQLSRPVRSRVGXGGHKP

SEQ ID NO: 9159 - protein, 198 aa, Homo sapiens
  misc_feature (1)...(198): Xaa = X or * as defined in Table 2
QPAPGQLLCHLATHPPPPGACGPPGAGQGKPEPTELPHPSEGNDEKAEEAGEGRGDSTGEAGAGGGVEPRPXASPXHPRPAQKTSRCRQQQSRGPPEIXGXHLPPSQPWPHHCAAQIPQXYRGAGCGXARGYRGCPEEQILPWTRKPDETDLPGPPATRPSPHTAFSEHYRQLCDSLPPLTPRVSCSRPLSLLGPLGH

SEQ ID NO: 9160 - protein, 182 aa, Homo sapiens
  misc_feature (1)...(182): Xaa = X or * as defined in Table 2
PGLFRRGLPHPGTGPVQSPFNFPXPPRGPEAPPPRSPAPPRSLRGVDGLXPPXPTLLLTGRDNWSYPEAGARQPFGSGGPMDPSPAPREXDHPKAEPSPQKKGAGPLLTVRSRYGQGRSQAEGQSKDPXGRTPGVLPGPSPREFPVSVPIVFVFLCRRFFSCKSWIMTLTFLPSGVSCGCDK

SEQ ID NO: 9161 - protein, 168 aa, Homo sapiens
DRDAEFYKFLQENDQSQLNFSDSDSSEEEEESFHSLPYVLEEAAFRAAVATTRGDQESAEANKFQVTDSAVFNALVVFNALVTFCIRDLTGCLQKLLIGKVAKDSSRMLQPSSSLLWGKLRVDIKAYLGSVIQLVSCVAETVVLAAVLWHISVLVPCFLTFPKQCSRE

SEQ ID NO: 9162 - protein, 54 aa, Homo sapiens; identical to SEQ ID NO: 9151
  misc_feature (1)...(54): Xaa = X or * as defined in Table 2

SEQ ID NO: 9163 - protein, 760 aa, Homo sapiens
  DOMAIN (37)..(81): XPA protein domain identified by eMATRIX, accession number BL00752B, p-value=7.309e-09, raw score of 19.17
  misc_feature (1)...(760): Xaa = X or * as defined in Table 2
VGCTLRVGVMAAAGSRKRRLAELTVDEFLASGFDSESESESENSPQAETREAREAARSPDKPGGSPSASRRKGRASEHKDQLSRLKDRDPEFYKFLQENDQSLLNFSDSDSSEEEEGPFHSLPDVLEEASEEEDGAEEGEDGDRVPRGLKGKKNSVPVTVAMVERWKQAAKQRLTPKLFHEVVQAFQAAVATTRGDQESAEANKFQVTDSAAFNALVTFCIRDLIGCLQKLLFGKVAKDSSRMLQPSSSPLWGKLRVDIKAYLGSAIQLMSCLSETTVLAAVLRHISVLVPXFLTFPKQCHMLLKRMVVVWSTGEESLRVLAFLVLSRVCRHKKDTFLGPVLKQMYITYVRNCKFTSPGALPFISFMQWTLTELLALEPGVAYQHAFLYIRQLAIHLRNAMTTRKKETYQSVYNWQYVHCLFLWCRVLSTAGPSEALQPLVYPLAQVIIGCIKLIPTARFYPLRMHCIRALTLLSGSSGAFIPVLPFILEMFQQVDFNRKPGRMSSKPINFSVILKLSNVNLQEKAYRGGLGWSSCYDLNPGSYLHSQAHCIGFPELVLPVVLQLKSFLRECKVANYCRQVQQLLGKVQENSAYICSRRQRVSFGVSEQQAVEAWEKLTREEGTPLTLYYSHWRKLRDREIQLEISGKERLEDLNFPEIKRRKMADRKDEDRKQFKDLFDLNSSEEDDTEGFSERGILRPLSTRHGVEDDEEDEEEGEEDSSNSEDGDPDAEAGLAPGELQQLAQGPEDELEDLQLSEDD

SEQ ID NO: 9164 - protein, 384 aa, Homo sapiens
  DOMAIN (109)..(163): ADHESION GLYCOPROTEIN PRECURSOR I domain identified by eMATRIX, accession number PD02929A, p-value=8.244e-36, raw score of 28.27
  misc_feature (1)...(384): Xaa = X or * as defined in Table 2
MSSFGYRTLTVALFTLICCPGSDEKVFEVHVRPKEAGRLSPKGSLEVNCSTTCNQPXSGVGLGDLSXDXGFCWDEQVQLGNNYLGLKHFPIDTVLQCHFTLSGKQESMNSNVSVYQPPRQVILTLQPTLVAVGKSFTIECRVPTVEPLDSLTLFLFRGNEILALWRTFRGRAAPAPQGGPQPHSNSTADRRGLAHRKLSPSLAVLDLMSRGGNIFHKHSAPKMLEIYETCVRTSPDWSSLVTGGVGVACPLFVTSVLLCFIFGQHLRPASGMGTYGVRAAWRRLPQAFRPIATHGVAWPHTTVVTGTQCDSSGLRYQPWLKDCDRQQRLGTLPFLARIQTPGLSPVPTVSPPGITMAREGSHHGGPLSLDASLPTLSFTGWHEA

SEQ ID NO: 9165 - protein, 434 aa, Homo sapiens
  misc_feature (1)...(434): Xaa = X or * as defined in Table 2
TTVQEESTVDSQPVPNIDHLLTNIGRTGVSPGDVSDSATSDSTKSKGSWGSGKDQYSRELLVSSIFAAASRKRKKPKEKAQPSSSEDELDNVFFKKENVEQCHNDTKEESKKESETLGRKQKIIIAKENSTRKDPSTTKDEKISLGKESTPSEEPSPPHNSKHNKSPTLSCRFAILKESPRSLLAQKSSHLEETGSDSGTLLSTSSQASLARFSMKKSTSPETKHSEFLANVSTITSDYSTTSSATYLAXPGLQSTEPXGASVAESKGDEADDERSELISEGRPVETDSESEFPVFPTSLDFREAFPRKTARSTKSSRRNSEGSELSCTEGSLTSSLDSRRQLFSSHKLIECDTLSRKKSARFKSDSGSLGDAKNEKEAPSLTKVFDVMKKGKSTGSLLTPTRGESEKQEPTWKTKIADRLKLRPRAPADDMYE

SEQ ID NO: 9166 - protein, 173 aa, Homo sapiens
  DOMAIN (52)..(75): Immunoglobulins and major histocompatibility complex proteins domain identified by eMATRIX, accession number BL00290A, p-value= 9.100e-12, raw score of 20.89
  DOMAIN (48)..(128): Immunoglobulin domain identified by PFam, accession name ig, E-value=0.006, PFam score of 14.5
  misc_feature (1)...(173): Xaa = X or * as defined in Table 2
DPEADSIRAEMSRSVALAVLALLSLSGLEAIQRTPKIQVYSRHPAENGKSNFLNCYVSGFHPSDIEVCLLKNGKRIEKVEHSDLSFSKDWSFYLLPYTEFHPQLKKDEYALPVXTHVTLSPAQRXFKWDRGHVKQHHGGLKMPHLGWNDSKFLLACFFNIDMLITLTLLCTKM

SEQ ID NO: 9167 - protein, 53 aa, Homo sapiens
ARELTWGRPSTRIQQQLGQLTLENLQMLPESEDEESYDTESEFTEFTEDEVSL

SEQ ID NO: 9168 - protein, 274 aa, Homo sapiens
  DOMAIN (29)..(42): REPEAT PROTEIN ANK NUCLEAR ANKYR domain identified by eMATRIX, accession number PD00078B, p-value=7.600e-12, raw score of 13.14
  DOMAIN (1)..(269): Ank repeat domain identified by PFam, accession name ank, E- value=3.4e-32, PFam score of 120.4
  misc_feature (1)...(274): Xaa = X or * as defined in Table 2
TPLHLAVITNQPEIAEALLGAGCDPELRDFRGNTPLHLACEQGCLASVGVLTQSCTTPHLHSILKATNYNGYVCLPALPHPLGGQVTWRRGRWANLRSPGKSLNSXHLEGXENMCAKCLLDAFIKFFQNPDCGFLKFRRXDYLFHKRIGERSEGXNRWVYFFPFVLPGHTCLHLASIHGYLGIVELLVSLGADVNAQGWCFLPPTHXVRLLVLMLXAEIPNAAISISNSFWFQEPCNGRTALYLAVDLPNPDLVSLLLKCGADVNRVTYQGYSP

SEQ ID NO: 9169 - protein, 441 aa, Homo sapiens
  DOMAIN (241)..(251): Ank repeat proteins domain identified by eMATRIX, accession number PF00023B, p-value=2.636e-09, raw score of 14.20
  misc_feature (1)...(441): Xaa = X or * as defined in Table 2
MVQLSPHYRGDSEDGRKRMVRQRTKPVLFFWSDWLGNSPSLTPPQRNPQPAFIGRRGGAAEPTAVRAAVPPASAPARKQRAARGPAHPQQRPQLVRAMFQAAERPQEWAMEGPRDGLKKERLLDDRHDSGLDSMKDEEYEQMVKELQEIRLEPQEVPRGSEPWKQQLTEDGDSFLHLAIIHEEKALTMEVIRQVKGDLAFLNFKTNLQQTPLHLAVITNQPEIVEALLGAGCDLELRDFRGNTPLXSLACEQGCLASVGVLDSSLAPPPQLHSILKGYPTTMGHTCLHLAFYPMGYWGHRGSFLVFLGVLDVKCSRSPCKWPGLPIHLAVDLQNPEPGCSLLFESVGADVQQSLPTQGYSPPTQPHPGPPQAPRIQQQLGQLTLENLQMLPRESPDEESYDTRVQSSTGVSPEDELAPMDDCGVFGGPRSDVMSAKGLKET

SEQ ID NO: 9170 - protein, 28 aa, Homo sapiens
  misc_feature (1)...(28): Xaa = X or * as defined in Table 2
XPQKEPYVIPFTGCVTQKGQVAGDAGWQ

SEQ ID NO: 9171 - protein, 137 aa, Homo sapiens
  DOMAIN (57)..(81): DEAD-box subfamily ATP-dependent helicases proteins domain identified by eMATRIX, accession number BL00039C, p-value=8.773e- 12, raw score of 15.63
  DOMAIN (20)..(103): DEAD/DEAH box helicase domain identified by PFam, accession name DEAD, E-value=5.2e-17, PFam score of 56.7
SVARFTGIKTAILVGGMSTQKQQRMLNRRPEIVVATPGRLWELIKEKHYHLRNLRQLRCLVVDEADRMVEKGHFAELSQLLEMLNDSQYNPKRQTLVFSATLTLVHQAPAVPATVYGEPENQVSHSVWQAAPACTTS

SEQ ID NO: 9172 - protein, 476 aa, Homo sapiens
  DOMAIN (361)..(404): 1 kw MIND INHIBITOR DIVISION CONTROL domain identified by eMATRIX, accession number DM01756B, p-value=4.822e-15, raw score of 22.91
  DOMAIN (326)..(440): ParA family ATPase domain identified by PFam, accession name ParA, E-value=2.7e-28, PFam score of 107.5
MGMPGCVTRHGRIKTVLTNMNGPGSFTRACKDLHGVESWNGKMARGLDVMAFQEQGGFRPCAELKFSGARVAYPMLPMPWNRLRFEPISSGGANSITVPLRRAVVLPRCSGGRCKDSARVRHNTGLHFASSGSGLPSWIPKERAGCPTVAEVSRRRVRTVRLLVAHRDPYDLRVSGKVPRTSEIYVHRSGRTARATNEGLSLMLIGPEDVINFKKIYKTLKKDEDIPLFPVQTKYMDVVKGRKVFPKPLGPGVKAQALDSERIPLFPMYVLQHGRLGLGPLRRVSLALVRPPGMVGSILGEKDDVTYAIKPTCWPGLDIIPSCLALHRIETELMGKFDEGKLPTDPHLMLRLAIETVAHDYDVIVIDSAPNLGIGTINVVCAADVLIVPTPAELFDYTSALQFFDMLRDLLKNVDLKGFEPDVRILLTKYSNSNGSQSPWMEEQIRDAWGSMVLKNVVRETDEVGKAACAEVSKRG

SEQ ID NO: 9173 - protein, 87 aa, Homo sapiens
  misc_feature (1)...(87): Xaa = X or * as defined in Table 2
IKKVRNLGPKHPRFSVLLLHVSCSTNGGVLLXRSSVPKKNKEEAAEYAKLLAKRMKEAKEKRQEQIAKRRRLSSLRASTFKSESSQK

SEQ ID NO: 9174 - protein, 504 aa, Homo sapiens
  DOMAIN (2)..(66): DEAD/DEAH box helicase domain identified by PFam, accession name DEAD, E-value=0.00066, PFam score of 15.2
  misc_feature (1)...(504): Xaa = X or * as defined in Table 2
LPLESLAVQVKQHIDAVARFTGIKNCYFGFGGMSTQKPARGCXTRRPEIVVATPGRLWELIKEKHYHLGNLRQLRCLVVDEADRMVEKGPFWLELLHSCFRDASNDSQYNPKRTKRLFFLATLTLVHQAPARNPFHKKHTKKMDYTAQLDLLMQKIGHEGASPKVIDLTREXGPRWETLTETKIPLXDLIEKDFLLVTTFLMQYSRAAAXCFANSISCIKRLSGLLKVLLDIMALGPWHGLVWHQEGRGLRNLGSILPRLEDCVLLATDVGSSGVWDIPKVQHVHPFTRVPRTSEIYVHRSWSNLLRSYQLTGLKSXLLIWGLKDVINFKKIYKTLKKDEDIPLFPRADINTWDVVKERIRLARQIEESEYRNFQACLHNSWIEQAAAALEIELEEDMYXGEGKADQQEERRRQKQMKVLKKELRHLLSQPLFTESQKTKYPTQSGKPPLLVLAPSKERVCFLSCLSQGRKEEGRTKEARGGPQPGTATAKLQVQFNCPGQVCQ

SEQ ID NO: 9175 - protein, 136 aa, Homo sapiens; identical to SEQ ID NO: 9121
  DOMAIN (37)..(79): Ribosomal protein L1e proteins domain identified by eMATRIX, accession number BL00939B, p-value=1.000e-40, raw score of 15.63
  DOMAIN (2)..(132): Ribosomal protein L4/L1 family domain identified by PFam, accession name Ribosomal_L4, E-value=8.3e-22, PFam score of 85.9
  misc_feature (1)...(136): Xaa = X or * as defined in Table 2

SEQ ID NO: 9176 - protein, 467 aa, Homo sapiens
  DOMAIN (71)..(126): Ribosomal protein L1e proteins domain identified by eMATRIX, accession number BL00939A, p-value=6.250e-21, raw score of 11.86
  DOMAIN (39)..(313): Ribosomal protein L4/L1 family domain identified by PFam, accession name Ribosomal_L4, E-value=1.8e-11, PFam score of 51.6
  misc_feature (1)...(467): Xaa = X or * as defined in Table 2
FPVAAAGLRGAWLSPLSAMACARPLISVYSEKGESSGKNVTLPAVFKAPIRPDIVNFVHTNLRKNNRQPYAVSELAGHQTKAESWGTGRAGGSKFPEVRGGGTHRSGQGAFGNMCRGGRMFAPTQNLGRRWNRRVDTTQNRYAICSALAASALTSNWVMSKGHRIEEVPELPLVVEDKVEGLQEEPRKLFLLLKKLKAWNDIKKVYASRRMRGGQRQNGETVRRIPGAGGPCIIYNEDNGIIKPFRNIPGNYSAXMXAKLNILEALLPGGHGGTFLAFGTXKLPFRKLDELYGTWRXSRASPQRSNYHSFPLHKMINTDLSRNLEKPQRSQRAPPGHRGKREDPIRRVLKKNPLKNLRIMLKLNPICKGPCCRRHPFFAQAQESQSSGVDKGKLLHQRHLQAKSDEKAAVAGKQPVVGKTGKKGCLLVFKNQKKPLVGKKAAATKKPAPERSLQRRNATTEEKKPAA

SEQ ID NO: 9177 - protein, 125 aa, Homo sapiens
  misc_feature (1)...(125): Xaa = X or * as defined in Table 2
TVNLCFSTFLWTVLYFTFFFAKCFQIHLLRIYLRXXLKTTNSWFMLYAIMHVLLVQGQNXNKIFSVKQIYLLCTFIYTGIFWXYHTKGXNKTFTMXNSMYIFGYLHTLKPKGKIKRKHLFATTIC

SEQ ID NO: 9178 - protein, 75 aa, Homo sapiens
GGILLSISRPYKTKPTHGIGKYKHLIKAEEPKKKKGKVAVRAINLGTDYNYGVLNIHLTAYDMTLAESYAQYVHN

SEQ ID NO: 9179 - protein, 257 aa, Homo sapiens
  misc_feature (1)...(257): Xaa = X or * as defined in Table 2
RPRSSKRMSGTSEKVLCLRNNTIFKQAFSLLRFRTSGEKPIYSVGGILLSISRPYKSKPTHGIGKYKHLIKAEEPKKKKGKVEVRAINLGTDYEYGVLNIHLTAYDMTLAESYAPLFSTTFCNSLSHXKSEESYAMPTQNHKKWLPVCRDQGQPKCLLGLKCLPTHERVVQISGLSATFARKFSWKIIPKPVLPXRESGLFSXREHTERKTSRGRFQRFDPELGRTFWAKFEVATVDPFHCQQWSYLSAKEKSLLGS

SEQ ID NO: 9180 - protein, 70 aa, Homo sapiens
LDSDLEVEARREESLRLFAICSWRFSLASFILLAKSLAYSAASSLFFLVRCFFRAIRRRLCCRTRGVTRR

SEQ ID NO: 9181 - protein, 94 aa, Homo sapiens
  misc_feature (1)...(94): Xaa = X or * as defined in Table 2
LSLFFETEFCSCYPGLECSGVILAHCNFRLPGFKXFSCLSLPSSWVYRYPPPDPANFLVLVETGFHHVGPGLVLNDPLIFNLDTCYSAKRQFLE

SEQ ID NO: 9182 - protein, 97 aa, Homo sapiens
  DOMAIN (4)..(54): Ribosomal protein L37e domain identified by PFam, accession name Ribosomal_L37e, E-value=1.5e-21, PFam score of 85.0
  misc_feature (1)...(97): Xaa = X or * as defined in Table 2
PHRFGKRRNKTHTLCRRCGSKAYHLQKSTCGKCGYPAKRKRKYNWSAKAKRPKYHPEPGRMRHLKIVYRRIQGMGFREGTTPXTQEGQAVASIQVHL

SEQ ID NO: 9183 - protein, 239 aa, Homo sapiens
  misc_feature (1)...(239): Xaa = X or * as defined in Table 2
STNKRSTRPPLGFEMASPHQEPKPGDLIEIFRLGYEHWALYIGDGYVIHLAPPSEYPGAGSSGVFSVLSNSAEVKRGRLEDVVGGCCYRGQQTAWDHGVPSPRALEGXSFSSAKEMVWFRRLKYSIVSRNCEALCSPSLRYGQVPAVKQVGKGPRFEVGVLATALGILVVAGCSFAIRRYQKKSDSLKQPQNPVLEAAVGVPVEMSLPRCLQQPDPRALSQAFSRSFPLFPSLAGKSMI

SEQ ID NO: 9184 - protein, 141 aa, Homo sapiens
  DOMAIN (35)..(112): Immunoglobulin domain identified by PFam, accession name ig, E-value=0.00025, PFam score of 19.0
MGIRLLCRVAFCFLAVGLVDVKVTQSSRYLVKRTGEKVFLECVQDMDHENMFWYRQDPGLGLRLIYFSYDVKMKEKGDIPEGYSVSREKKERFSLILESASTNQTSMYLCASSLYGATYGYTFGSGTRLTVVEDLNKVFPP

SEQ ID NO: 9185 - protein, 129 aa, Homo sapiens
  misc_feature (1)...(129): Xaa = X or * as defined in Table 2
PRVRYRGVITDPQPLMEQPGLGDSRYWLSSRLRVSATFWQNPRNHFRCQVQFYGLSENDEWTHDRAKPVTQIVSAEAWSKADCGFTSGNXQQGVLSATILYEILLGKATLYAVLVSALVLMGMVKRKDF

SEQ ID NO: 9186 - protein, 339 aa, Homo sapiens
  DOMAIN (175)..(198): Immunoglobulins and major histocompatibility complex proteins domain identified by eMATRIX, accession number BL00290A, p-value= 4.600e-10, raw score of 20.89
  DOMAIN (59)..(248): Immunoglobulin domain identified by PFam, accession name ig, E-value=0.00067, PFam score of 17.6
  misc_feature (1)...(339): Xaa = X or * as defined in Table 2
HLPDAAMGPQLLGYVVLCLLGAGPLEAQVTQNPRYLITVTDKGDVPEGYKVSRKEKRNFPLILESPSPNQTSLYFCARSFEQGYEQYFGPGTRLTVTEKRNFPLILESPSPNQTSLYFCASSSSQGRLSPGFNYGYTFGSGTRLTVVEDLNKLFPPEVAVFEPSEAEISHTQKATLVCLATGIFPDHVELSWWVNGKEAHSGVSTDPQPLKEQPALNDSRYCLSSRLRVSATFWQNPRNHFRCQVQFYGLSENDEWTQDRAKPVTQIVSAEAWGRADCGFTSVKSYQQGVLSATILYEILARGRPTLYCLCWXAPLVLMAMVKEKGFLKAALEVELGAY

SEQ ID NO: 9187 - protein, 104 aa, Homo sapiens
  misc_feature (1)...(104): Xaa = X or * as defined in Table 2
SFVIFDANIFFQFIGXSLLSLWMXALLCLLVTEHLYLVSIGHLWCVCVCVCVCVCVYDFLIPSHFSIDCFAKAIYILRILIIFVIFDANIFFQFIGCLLILCFR

SEQ ID NO: 9188 - protein, 96 aa, Homo sapiens
MQISPPPGHTQNQPYLLFSIASRKCLHPVLLVHYFFQLFLIPIIHSIFFKFFISCINVNTSLFTFSLQSQVMGELPLISFSTLSLLEESTYYRLGI

SEQ ID NO: 9189 - protein, 64 aa, Homo sapiens
  misc_feature (1)...(64): Xaa = X or * as defined in Table 2
LYWQKRKGKLLNNLTQGIVADPVRXKKFHFKCPSNCPKIHNTESAYAVSFMKYSAHVLGSLYEM

SEQ ID NO: 9190 - protein, 87 aa, Homo sapiens
  DOMAIN (18)..(45): Protamine P1 proteins domain identified by eMATRIX, accession number BL00048, p-value=1.000e-09, raw score of 6.39
LPSGPEYSAGLSTSRLKARHRGSRSPERRSGRPRGPRRSRAAAEKPSPKCARDAKPGAVATSPAPARRPVPGPRLRAPKLAGRSLLG

SEQ ID NO: 9191 - protein, 142 aa, Homo sapiens
  DOMAIN (51)..(101): Ribosomal protein S6e proteins domain identified by eMATRIX, accession number BL00578D, p-value=5.821e-10, raw score of 16.68
  misc_feature (1)...(142): Xaa = X or * as defined in Table 2
KKGEKDYSWTDLILTVPSPPGPQKELARIGQTFPISLKKMMSASMLXESPLNKGGXETXGPKAPKIQRLVTPTCSSSPNGGRIALKKQRTTRKIKKRLQNMLNFWPREXRRLRRSARNKLRRDADFPLCELLLLWPCPPATE

SEQ ID NO: 9192 - protein, 450 aa, Homo sapiens
  DOMAIN (384)..(409): Integrins alpha chain proteins domain identified by eMATRIX, accession number BL00242D, p-value=3.797e-09, raw score of 13.57
  DOMAIN (326)..(441): FG-GAP repeat domain identified by PFam, accession name FG- GAP, E-value=0.0093, PFam score of 22.6
MVGAADTAVSIMVLALVGLDESEFRDKLTPITIFMEYRLDYRTAADTTGLQPILNQFTPANISRQSGFVLLTCSDQKKIYIGDDNPLTLIVKAQNQGEGAYEAELIVSIPLQADFIGVVRNNEALARLSCAFKTENQTRQVVCDLGNPMKAGTQLLAGLRFSVHQQSEMDTSVKFDLQIQSSNLFDKLRNNGPSSFSKAMLHLQWPYKYNNNTLLYILHYDIDGPMNCTSDMEINPLRIKISSLQTTEKNDTVAGQGERDHLITKRDLALSEGDIHTLEIEAICYDWYVGSVIGKIRHVLGLMKLMFYSLLTLCSHRISKQWGNPDSDKDDGFFRRQDIAIAAPYGGEDKKGIVYIFNGRSTGLNAVPSQILEGQWAARSMPPSFGYSMKGATDIDKNGYPEELAVSAGLKRKMCSVVEKRHGGQYGLVEQNMKQNNPGYSPKFEIKVTF

SEQ ID NO: 9193 - protein, 156 aa, Homo sapiens
  DOMAIN (103)..(132): Integrins alpha chain proteins domain identified by eMATRIX, accession number BL00242E, p-value=1.375e-26, raw score of 9.03
  DOMAIN (125)..(139): Integrin alpha cytoplasmic region domain identified by PFam, accession name integrin_A, E-value=0.0013, PFam score of 25.5
MFLLVGAPKANTTQPGIVEGGQVLKCDWSSTRRCQPIEFDATELHRELKENQNHSYSLKSSASFNVIEFPYKNLPIEDITNSTLVTTNVTWGIQPAPMPVPVWVIILAVLAGLLLLAVLVFVMYRMGFFKRVRPPQEEQEREQLQPHENGEGNSET

SEQ ID NO: 9194 - protein, 50 aa, Homo sapiens
VCKHFLEAIENNKYGWFWVCPGGGDICMYRHALPPGFVFNKDKKKEEKKD

SEQ ID NO: 9195 - protein, 2183 aa, Homo sapiens
  DOMAIN (2129)..(2158): Integrins alpha chain proteins domain identified by eMATRIX, accession number BL00242E, p-value=1.375e-26, raw score of 9.03
  DOMAIN (289)..(1618): FG-GAP repeat domain identified by PFam, accession name FG- GAP, E-value=3.2e-131, PFam score of 449.4
  misc_feature (1)...(2183): Xaa = X or * as defined in Table 2
MCGGVFATEELAVSAGLKRKMCSVVEKRHGDFQVELLLDKLKQKGAIRRALFLYSRSPSHSKNMTISRGGLMQCEELIAYLRDESEFRDKLTPITIFMEYRLDYRTAADTTGLQPILNQFTPANISRQSGFVLLTCSDQKKIYIGDDNPLTLIVKAQNQGEGAYEAELIVSIPLQADFIGVVRNNEALARLSCAFKTENQTRQVVCDLGNPMKAGTQHLLSPCTQFSMQVFLFHYTASSSVVALDSHRSKPYCVNPAVKCACKGSRLHASYENLIPGDPSWTVSSRKHPPLCPGKESRMFLLVGAPKANTTQPGIVEGGQVLKCDWSSTRRCQPIEFDATGNRDYAKDDPLEFKSHQWFGASVRSKQDKILACAPLYHWRTEMKQEREPVGTCFLQDGTKTVEYAPCRSQDIDADGQGFCQGGFSIDFTKADRVLLGGPGSFYWQGQLISDQVAEIVSKYDPNVYSIKYNNQLATRTAQAIFDDSYLGYSVAVGDFNGDGIDDFVSGVPRAARTLGMVYIYDGKNMSSLYNFTGEQMAAYFGFSVAATDINGDDYADVFIGAPLFMDRGSDGKLQEVGQVSVSLQRASGDFQTTKLNGFEVFARFGSAIAPLGDLDQDGFNDIAIAAPYGGEDKKGIVYIFNGRSTGLNAVPSQILEGQWAARSMPPSFGYSMKGATDIDKNGYPDLIVGAFGVDRAILYRARPVITVNAGLEVYPSILNQDNKTCSLPGTALKVSCFNVRFCLKADGKGVLPRKLNFQVELLLDKLKQKGAIRRALFLYSRSPSHSKNMTISRGGLMQCEELIAYLRDESEFRDKLTPITIFMEYRLDYRTAADTTGLQPILNQFTPANISRQAHILLDCGEDNVCKPKLEVSVDSDQKKIYIGDDNPLTLIVKAQNQGEGAYEAELIVSIPLQAXSGKCAQWLRNGMEISRWNFFWINSSKREQYRRALFLYSRSPSHSKNMTISRGGLMQCEELIAYLRDESEFRDKLTPITIFMEYRLDYRTAADTTGLQPILNQFTPANISRQSGFVLLTCSDQKKIYIGDDNPLTLIVKAQNQGEGAYEAELIVSIPLQADFIGVVRNNEALARLSCAFKTENQTRQVVCDLGNPMKAGTQHLLSPCTQFSMQVFLFHYTASSSVVALDSHRSKPYCVNPAVKCACKGSRLHASYENLIPGDPSWTVSSRKHPPLCPGKESRMFLLVGAPKANTTQPGIVEGGQVLKCDWSSTRRCQPIEFDATGNRDYAKDDPLEFKSHQWFGASVRSKQDKILACAPLYHWRTEMKQEREPVGTCFLQDGTKTVEYAPCRSQDIDADGQGFCQGGFSIDFTKADRVLLGGPGSFYWQGQLISDQVAEIVSKYDPNVYSIKYNNQLATRTAQAIFDDSYLGYSVAVGDFNGDGIDDFVSGVPRAARTLGMVYIYDGKNMSSLYNFTGEQMAAYFGFSVAATDINGDDYADVFIGAPLFMDRGSDGKLQEVGQVSVSLQRASGDFQTTKLNGFEVFARFGSAIAPLGDLDQDGFNDIAIAAPYGGEDKKGIVYIFNGRSTGLNAVPSQILEGQWAARSMPPSFGYSMKGATDIDKNGYPDLIVGAFGVDRAILYRARPVITVNAGLEVYPSILNQDNKTCSLPGTALKVSCFNVRFCLKADGKGVLPRKLNFQVELLLDKLKQKGAIRRALFLYSRSPSHSKNMTISRGGLMQCEELIAYLRDESEFRDKLTPITIFMEYRLDYRTAADTTGLQPILNQFTPANISRQAHILLDCGEDNVCKPKLEVSVDSDQKKIYIGDDNPLTLIVKAQNQGEGAYEAELIVSIPLQADFIGVVRNNEALARLSCAFKTENQTRQVVCDLGNPMKAGTQLLAGLRFSVHQQSEMDTSVKFDLQIQSSNLFDKVSPVVSHKVDLAVLAAVEIRGVSSPDHIFLPIPNWEHKENPETEEDVGPVVQHIYELRNNGPSSFSKAMLHLQWPYKYNNNTLLYILHYDIDGPMNCTSDMEINPLRIKISSLQTTEKNDTVAGQGERDHLITKRDLALSEGDIHTLGCGVAQCLKIVCQVGRLDRGKSAILYVKSLLWTETFMNKENQNHSYSLKSSASFNVIEFPYKNLPIEDITNSTLVTTNVTWGIQPAPMPVPVWVIILAVLAGLLLLAVLVFVMYRMGFFKRVRPPQEEQEREQLQPHENGEGNSET

SEQ ID NO: 9196 - protein, 303 aa, Homo sapiens
  DOMAIN (141)..(152): Zinc finger C-x8-C-x5-C-x3-H type (and similar) domain identified by eMATRIX, accession number PF00642, p-value=4.436e-09, raw score of 11.59
  DOMAIN (128)..(153): Zinc finger C-x8-C-x5-C-x3-H type domain identified by PFam, accession name zf-CCCH, E-value=0.035, PFam score of 13.6
  misc_feature (1)...(303): Xaa = X or * as defined in Table 2
RCWRPRTLGFASPPTRPCSPTHAPGCEMTPRDWHRVLSFASPLRIEEIFQGYDKTFGLKNKKGAKQQKFIKAVTHQVKFGQSKSTSGSTEXSWKRKLKKDDKKKELQELNELFKPVVAAQKIRVKGADPKSVVCAFFKQGQCTKGDKCKFSHDLTLGEKMEKRSVYIDARDEELEKETKSSLIQADTMDNWDEKKLEEVVNKKHGEAEKKKPKTQIVCKHFLEAIENNKYGWFWVCPGGGDICMYRHALPPGFVLKKDKKKEEKEDEISLEDLIERERSALGPNVTKITLESFLAWKKRKRQV

SEQ ID NO: 9197 - protein, 71 aa, Homo sapiens
  DOMAIN (1)..(70): Isopentenyl-diphosphate delta-isomerase domain identified by PFam, accession name IPP_isomerase, E-value=0.0048, PFam score of - 83.3
ERAAQRRLKAELGIPLEEVPPEEINYLTRIHYKAQSDGIWGEHEIDYILLDGEQRPSHVTPTVMPDVARCP

SEQ ID NO: 9198 - protein, 56 aa, Homo sapiens
MPEINTNHLDKQQVQLLAEMCILIDENDNKIGAETKKNCHLNENIEKGAALKQSFL

SEQ ID NO: 9199 - protein, 253 aa, Homo sapiens
  DOMAIN (38)..(242): Isopentenyl-diphosphate delta-isomerase domain identified by PFam, accession name IPP_isomerase, E-value=3.5e-84, PFam score of 293.1
  misc_feature (1)...(253): Xaa = X or * as defined in Table 2
PAVVCGRRLISVLEQIRHFVMMPEINTNHLDKQQVQLLAEMCILIDENDNKIGAETKKNCHLNENIEKGLLHRAFSVFLFNTENKLLLQQRSDAKVTFPGLVLRNTCCSHPLRQSSRALRESDALGSXGARQHRGRLESLSLGIPLEEVPPEELIIXHRIHYKAQSDGIWGGHEIDYILWWRKNVTLNPDPNEIKSYCYVSKEELKELLKKAASGEIKITPWFKIIAATFLFKWWDNLNHLNQFVDHEKIYRM

SEQ ID NO: 9200 - protein, 99 aa, Homo sapiens
  misc_feature (1)...(99): Xaa = X or * as defined in Table 2
GIPDQEVIGTGYGILDQKASGVKYTKSDFRSPRPDDLSSFQLXVTSHWDLRLIEVTETICKRLLIIACTRRGPAAIDLPRACQRPLRHYTTWYTKGSRW

SEQ ID NO: 9201 - protein, 209 aa, Homo sapiens
  misc_feature (1)...(209): Xaa = X or * as defined in Table 2
MDSMPEPASRCLLLLPLLLLLLLLLPAPELGPSQAGAEENDWVRLPSKCEVCKYVAVELKSAFEETGKTKEVIGTGYGILDQKASGVKYTKSDLRLIEVTETICKRLLIIACTRRGPAAIDLPRLDSGLSFIRSGVRPACILVCLLVHRQKCSTVAAPVGTXRHXNGENSARSTMCRKVGVXARCQRTPRACQRPLRHYTTWYTKGSRW

SEQ ID NO: 9202 - protein, 318 aa, Homo sapiens
  DOMAIN (179)..(212): PROLINE-RICH PROTEIN 3 domain identified by eMATRIX, accession number DM00215, p-value=7.529e-11, raw score of 19.43
  misc_feature (1)...(318): Xaa = X or * as defined in Table 2
AEKGPPSPGVPSTCLANSPPPSAGSAAVPHSAPPGAAPRRSSRQRPCSPRRCWQEGAGVRAGQDGLGGSATRSAAQQSHQRQTGPEGSTGKAKARGSTGRKRXAMGGSAAGDGAPHVLGTGQPRAPPPSTGDGARAGNWLAQGSAPTHRRWSTCWEPASPGLPASSNCCTHTWTRNCPGTAPSGTALPGLPGRPAPHPEPPPPMPPPPPPRPGLPLGSCVFLXVERPIWREVLSVPAPPRACVDTSGHEASGPSPVAGTEPSRPWLKQPLPCPPQQPRSWLTRRPEAELHMPPTPLPAYLPGSGVPQSHSXPPATLLR

SEQ ID NO: 9203 - protein, 272 aa, Homo sapiens
GGWVAPETPSDPWFPVQRGVGDASVPGIGKNVVCEKAATSVDAFRMVTASRYYPQLMSLVGNVLRFLPAFVRMKQLISEHYVGAVMICDARIYSGSLLSPSYGWFCDELMGGGGLHTMGTYILDLLTHLTGRRAEKVHGLLKTFVRQNAAIRGIRHVTSDDFCFFQMLMGGGVCSTVTLNFNMPGAFVHEVMVDVPLLYLKGMVYMVQALRQSFQGQGDRRTWDRTPVSMAASFEDGLYMQSVVDAIKRSSRSGEWEAVEVLTEEPDTNQNL

SEQ ID NO: 9204 - protein, 217 aa, Homo sapiens
RANPTKPIGCAVRGPWSALKAGCGCQRRAGGRLAVVVVARRHVCSPGSGEGKLLRARPREEEPPGPLGSGPGRAMDSMPEPASRCLLLLPLLLLLLLLLPAPELGPSQAGAEENDWVRLPSKCEVCKYVAVELKSAFEETGKTKEVIGTGYGILDQKASGVKYTKSDLRLIEVTETICKRLLIIACTRRGPAAIDLPRACQRPLRHYTTWYTKGSRW

SEQ ID NO: 9205 - protein, 174 aa, Homo sapiens
  misc_feature (1)...(174): Xaa = X or * as defined in Table 2
PGRAMDSMPEPASRCLLLLPLLLVMLVLLPAPELGPSQAGTDENDWVRLPSKCEVCKYVAVELKSAFEETGKTKEVIGTGYGILDQKASGVKYTKSISDPPDQDDLSSFQLXVTSHWDLRLIEVTETICKRLLIIACTRRGPAAIDLAKVGFGIVLHPLWGPGLQCNLSVSAGL

SEQ ID NO: 9206 - protein, 398 aa, Homo sapiens
  DOMAIN (149)..(162): Phosphoribosylglycinamide formyltransferase proteins domain identified by eMATRIX, accession number BL00373C, p-value=3.348e- 12, raw score of 10.35
  DOMAIN (125)..(221): Formyl transferase domain identified by PFam, accession name formyl_transf, E-value=2.8e-19, PFam score of 70.9
  misc_feature (1)...(398): Xaa = X or * as defined in Table 2
SSAAEAMRVLVRRCWGPPLAHGARRGRPSPQWRALARLGWEDCRDSRVREKPPWRVLFFGTDQFAREALRALHAARENKEEELIDKLEVVTMPSPSPKGLPVKQYAVQSQLPVYEWPDVGSGEYDVGVVASFGRLLNEALILKFPYGILNVHPSCLPRWRGPAPVIHTVLHGDTVTGVTIMQIRPKRFDVGPILKQETVPVPPKSTAKGIGKAVLFKDWGANMLISVLEKFGLESLSNGRQQPMEGATYAPKISAGTSCIKWEEQTFEQKFRLYRAIGNIIPLQTLWMANTIKLLDLVEVNSSVLADPKNXREQALIPGSVIYHKQSQILLVYCKDGWIGVRSVMLKKSLTATDFYNGYLHPWYQKNSQAQPSQCRFQTLRLPTKKKQKKNCCYATMH

SEQ ID NO: 9207 - protein, 70 aa, Homo sapiens
EELHEKFDRLKKLHQDEKNKLEDKKKSLDDEVNAFKQRKTAAELLQSQGSQAGGSQTLKRDKEKKNLGFL

SEQ ID NO: 9208 - protein, 113 aa, Homo sapiens
SKPFSLQETYEAKRNEFLGELQKKEEEMRQMFVQRVKEKEAELKEAEKELHEKFDRFKKLHQDEKKKLEDKKKSLDDEVNPFKQRKTAAELLQSQGSQAGGSQTLKRDKEKKN

SEQ ID NO: 9209 - protein, 43 aa, Homo sapiens
EVNAFKQRKTAAELLQSQGSQAGGSQTLKRDKEKKNNPWLCTE

SEQ ID NO: 9210 - protein, 1149 aa, Homo sapiens
  DOMAIN (1014)..(1048): 3 RETROVIRAL PROTEINASE domain identified by eMATRIX, accession number DM00892C, p-value=1.740e-11, raw score of 23.55
  DOMAIN (2)..(217): Cell division protein domain identified by PFam, accession name GTP_CDC, E-value=4.8e-81, PFam score of 282.7
YKPIVEFIDAQFEAYLQEELKIRRVLHTYHDSRIHVCLYFIAPTGHSLKSLDLVTMKKLDSKVNIIPIIAKADAISKSELTKFKIKITSELVSNGVQIYQFPTDDESVAEINGTMNYTRDVFVITITILDKSGSRAHLPFAVIGSTEELKIGNKMMRARQYPWGTVQVENEAHCDFVKLREMLIRVNMEDLREQTHTRHYELYRRCKLEEMGFKDTDPDSKPFSLQETYEAKRNEFLGELQKKEEEMRQMFVQRVKEKEAELKEAEKELHEKFDRLKKLHQDEKKKLEDKKKSLDDEVNAFKQRKTAAELLQSQGSQAGGSQTLKRDKEKKNASKARSRHWREKSTSREILRRDLEVREQPRRKRTGLTTPDGTRSASSLGSLLGGGEDGWRTSAVGGRLPVAPPLPPLPPPPLPPLPPPPPEPVLEQWRYSHESDWQWALRRSFICRHLHSYPGAALDQLLALSAAWTNHVFLGCRYSPRLMEKILQMAEGIDIGEMPSYDLVLSKPSKGQKRHLSTCDASSSKDERQEDPYGPQTKEVNEQTHFASMPRDIYQDYTQDSFSIQDGNSQYCDSSGFILTKDQPVTANMYFDSGNPAPSTTSQQANSQSTPEPSPSQTFPESVVAEKQYFIEKLTATIWKNLSNPEMTSGSDKINYTYMLTRCIQACKTNPEYIYAPLKEIPPADIPKNKKLLTDGYACEVRCQNIYLTTGYAGSKNGSRDRATELAVKLLQKRIEVRVVRRKFKHTFGEDLVVCQIGMSSYEFPPALKPPEDLVVLGKDASGQPIFNASAKHWTNFVITENANDAIGILNNSASFNKMSIEYKYEMMPNRTWRCRVFLQDHCLAEGYGTKKTSKHAAADEALKILQKTQPTYPSVKSSQCHTGSSPRGSGKKKDIKDLVVYENSSNPVCTLNDTAQFNRMTVEYVYERMTGLRWKCKVILESEVIAEAVGVKKTVKYEAAGEAVKTLKKTQPTVINNLKKGAVEDVISRNEIQGRSAEEAYKQQIKEDNIGNQLLRKMGWTGGGLGKSGEGIREPISVKEQHKREGLGLDVERVNKIAKRDIEQIIRNYARSESHTDLTFSRELTNDERKQIHQIAQKYGLKKRLTATLHYSFHTVWMCSTSKATTAVVELGKRLKIHWCFDEKINQV

SEQ ID NO: 9211 - protein, 532 aa, Homo sapiens
  DOMAIN (145)..(427): Cell division protein domain identified by PFam, accession name GTP_CDC, E-value=2.2e-81, PFam score of 283.8
  misc_feature (1)...(532): Xaa = X or * as defined in Table 2
FVPPPFVEAYGWGCRKNWNWAGHRGKRRVKSAPSPYPTFKGWAVEGRLGLEQRRGGPSLAPPPTGLGRARSVTLSLCRRSSSVSCAVAPVAAAPVAALADAGAMAATDISRQVGEGCRTVPLAGHVGFDSLPDQLVNKSVSQGFCFNILCVGETGLGKSTLMDTLFQHQISKGEPATHTQPGVQLQSNTYDLQESNVRLKLTIVSTVGFGDQINKEDSYKPIVEFIDAQFEALLQEDPKVRRVLQTYHDSRIHVCLYFIAPTGHCLKSLDLVTMKKLDSKVNIIPIIAKADAISKSELTKFKIKITSELVSNGVQIYQFPTDDESVAEIQLNPXTPHLPFAVIGSTEELKIGNKMMRARQYPWGTVQVENEAHCDFVKLREMLIRVNMEDLREQTHTRHYELYRRCKLEEMGFKDTDPDSKPFSLQETYEAKRNEFLGELQKKEEEMRQMFVQRVKEKEAELKEAEKELHEKFDRLKKLHQDEKKKLEDKKKSLDDEVNAFKQRKTAAELLQSQGSQAGGSQTLKRDKEKKN

SEQ ID NO: 9212 - protein, 206 aa, Homo sapiens
MVRTQCLLGLRTFVAFAAKLWSFFIYLLRGQIRTVIQYQTVRYDILPLSPVSRNWLAQVVIDKHSVRFFVRKRPHVDFFLEVVSQWYELVVFTESMEIYGFAVAGKLDNSRSILKRRYYRQHCTLQLSSYIKDLSVVHSDLSSIVILDNSLGAYRSHPDNAIPIKSWFSDPSDTALLNLLPMLDALRFTADVHSVLSRNLHQHRLW

SEQ ID NO: 9213 - protein, 142 aa, Homo sapiens
HPVRFFVHRGPHVDFSLEVVSQWYELVVFTASMEIYGSAVADKLDNSRSILKRRYYRQHCTLELGSYIKDLSVVHSDLSSIVILDNSPGAYRSHPDNAIPIKSWFSDPSDTALLNLLPMLDALRFTADVRSVLSRNLHQHRL

SEQ ID NO: 9214 - protein, 135 aa, Homo sapiens
  DOMAIN (77)..(122): PROTEIN OXIDOREDUCTASE NAD INTERGENIC RE domain identified by eMATRIX, accession number PD01311A, p-value=5.909e-10, raw score of 30.23
  misc_feature (1)...(135): Xaa = X or * as defined in Table 2
GDELVKREAGMKMLPGVGVFGTGELPPEVLVPLLRAEGFTVEALWGKTXGGRRKALLKEMNIAFHTSRTYDILLHQDVDLVCISIPPPLTRQISVKALGIGKNVVCEKAATSVDAFRMVTASRYYPQLMSLVGNV

SEQ ID NO: 9215 - protein, 273 aa, Homo sapiens
  misc_feature (1)...(273): Xaa = X or * as defined in Table 2
WNSAELGRGGPGAGGAGVIGMMRTQCLLGLRTFVAFAAKLWSFFIYLLRRQIRTVIQYQTVRYDILPLSPVSRNRLAQVKRKILVLDLDETLIHSHHDGVLRPTVRPGTPPDFILKVVIDKHPVRFFVHKRPHVDFFLEVVSQWYELVVFTASMEIYGSAVGRLNWDNSRSILXGGRYYRQHCTLELGSYIKDPLLWFHRDLSGIVILDNSPGAYRSHPGYGGRDNAIPIKSWVSVTPSDTALLNLLPMLDALRFTADVRSVLSRNLHQHRLW

SEQ ID NO: 9216 - protein, 278 aa, Homo sapiens
  DOMAIN (108)..(155): Ribosomal protein L13e proteins domain identified by eMATRIX, accession number BL01104B, p-value=8.875e-34, raw score of 15.12
  DOMAIN (68)..(224): Ribosomal protein L13e domain identified by PFam, accession name Ribosomal_L13e, E-value=4.9e-45, PFam score of 159.2
  misc_feature (1)...(278): Xaa = X or * as defined in Table 2
RFPLGCFPAQEPQGPVGQPMGAPAGNGHGSXSPHFHQGTGKRAALATWFNQPAPERSPDVKAPAKPRARRIAPRPRVGVPIRPIVRCPTVRYHTKVRPGRGFSLEELRVAGIHKKVARTIGISVDPRRRNKSTESLQAKRAAGXREYRSKLILFPQRSPRAPKKGDSSAEELKLAHPGXPGPGHAPSGTVYKKEKARVITEEEKNFKAFASLRMARANAPALSAYRAKKSPRKPQKTDVEKPTIKPCLGTWNQSGSHAGSPRGVFRGNNWAWDGASLL

SEQ ID NO: 9217 - protein, 98 aa, Homo sapiens
MKSLNPHLDKIFPHKPLSSLASPSKTLVPGHLCDSFTPFKFSPNYLLFPQNHPHTSPHLPSPPKDKGISPIYTPHCLGGVITLILCMHFYRFVCHLSY

SEQ ID NO: 9218 - protein, 75 aa, Homo sapiens
ERFRPPIARVIDVSNGKVHVAESCLEETGGLGVDIVLDAGLDPPDSHCLFLKGATLAFLNDEVWNLSNVQQGRYL

SEQ ID NO: 9219 - protein, 161 aa, Homo sapiens
  DOMAIN (62)..(90): Quinone oxidoreductase / zeta-crystallin proteins domain identified by eMATRIX, accession number BL01162B, p-value=5.675e- 10, raw score of 18.11
KVQAVGAAQRQSSTDEEITFVFQEKEDLPVTEDNFVKLQVKACALSQINTKLLAEMKMKKDLFPVGREIAGIVLDVGSKVSFFQPDDEVVGILPLDSEDPGLCEVVRVHEHYLVHKPEKVTWTEAAGSIRDGVRAYTALHYLSHLSPGKSVLIMDGASAFG

SEQ ID NO: 9220 - protein, 163 aa, Homo sapiens
  DOMAIN (7)..(35): Quinone oxidoreductase / zeta-crystallin proteins domain identified by eMATRIX, accession number BL01162B, p-value=5.675e- 10, raw score of 18.11
MKMKKDLFPVGREIAGIVLDVGSKVSFFQPDDEVVGILPLDSEDPGLCEVVRVHEHYLARVIDVSNGKVHVAESCLEETGGLGVDIVLDAGVRLYSKDDEPAVKLQLLPHKHDIITLLGVGGHWVTTEENLQVKKQKHRDVDTDSRTQQVAEQESHSGSLSPF

SEQ ID NO: 9221 - protein, 73 aa, Homo sapiens
GRVGDEPAVKLQLLPHKHDIITLLGVGGHWVTTEENLQLDPPDSHCLFLKGATLAFLNDEVWNLSNVQQGKYL

SEQ ID NO: 9222 - protein, 53 aa, Homo sapiens
QSFQLRILKDVMEKLSTGVFRPQLDEPIPLYEAKVSMEAVQKNQGRKKQVVQF

SEQ ID NO: 9223 - protein, 565 aa, Homo sapiens
  DOMAIN (259)..(287): Quinone oxidoreductase / zeta-crystallin proteins domain identified by eMATRIX, accession number BL01162B, p-value=5.675e- 10, raw score of 18.11
  DOMAIN (216)..(565): Zinc-binding dehydrogenases domain identified by PFam, accession name adh_zinc, E-value=1.3e-06, PFam score of -8.3
  misc_feature (1)...(565): Xaa = X or * as defined in Table 2
MPRAAIAQTPAPTPAPAAAARGPGRRLAALSSPHLRAAEHDGRCSSETGCHGVLDSLASPTPPFRSDERPDQWEQGAGSLTKDWKVAVVKVQAVGAAQRQVSPGKRVLCLGKRAFKRKVERCPTEPCSPGEDGGSRRTLTWDLFGPRPSLAEAAEGHFFLPHHFAVFGKQLVVIRCMWLLSQIGPLHYAKRRNHLERDVTMKGLYFQQSSTDEEITFVFQEKEDLPVTEDNFVKLQVKACALSQINTKLLAEMKMKKDLFPVGREIAGIVLDVGSKVSFFQPDDEVVGILPLDSXKTPGLCESLLRVHEPLLGFINPEKVTWTEAAGSISGMGVRAYYSFLHLSFFIFSPGGNQCLIMDGAKCHLRTIAIQLAHHRGAKVISTACSLEDKQCLERFRPPIARVIDVSNGKVHVAESCLEETGGLGVDIVLDAGVRLYSKDDEPAVKLQLLPHKHDIITLLGVGGHWVTTEENLQLDPPDSHCLFLKGATLAFLNDEVWNLSNVQQGKYLSXQSFQLRILKDVMEKLSTGVFRPQLDEPIPLYEAKVSMEAVQKNQGRKKPSWFQF

SEQ ID NO: 9224 - protein, 45 aa, Homo sapiens
  misc_feature (1)...(45): Xaa = X or * as defined in Table 2
LKSPQRPGMVAHACNHSTLGARGGWITRXGQEFKTSLANMAKFHL

SEQ ID NO: 9225 - protein, 101 aa, Homo sapiens
KLFFPPSLLFTLATGIFLDLMHLKKPGGFDISLFYRDIISIAEDEDLRVHFEESSKLEDLLRKVRAKETRKRALSRCALSPGQLPTLPLNQKQAGRGGSHL

SEQ ID NO: 9226 - protein, 759 aa, Homo sapiens
  misc_feature (1)...(759): Xaa = X or * as defined in Table 2
GDREGTGRAHTEEGAGAGMHFYDVEGVDWDRVQGPRMRGLSSSVQVGRFPAPKVSGPLSICVVRQLGLASSRFARSVPFGVWKKDLPCLSLLSQSEDELTPFDMSIQVRLPFNLRQIXKQYWLGMVAAHAGTEKDKNSVNFKNIYVLQELDNPGQXYFKISFSLIYENISTLIKEDMGHGSDYSLSEVLWVCANLFSDVQFKMSHKRIMLFTNEDNPHGNDSAKASRARTKAGDLRDTGGHISPFSXIGTXLLFFYFLFFXIISIAEDEDLRVHFEESSKLEDLLRKVRAKETRKRALSRCALSPGQLPTLPLNQKQAGRGGFKPPPIKLYRETNEPVKTKTRTFNTSTGGLLLPSDTKRSQVGRDAFCCCCFXDRVSLCRPGWRGLMLMGFKPLVLLKKHHYLRPSLFVYPEESLVIGSSVDHGXVTLTHSAVYGAALCRYTPRRNIPPYFVALVPQEEELDDQKIQVTPPGMWQRYFQGFXTLPILWNHPWTPQGGGTVRLALDVSKKLETGTNCRQVKGLCWGNTGRNSKYRRAATTVLLSAVSVTHSATPEQVWGKMKAIVEKPRFTYRSDSFENPVLQQHFRNLRALALDLMEPEQAVDLTLAQCXSQXIKRLGSLVDESKGASLPQPDYNPEGKSYPKRKNTNKXKGLGKKKRPKGWKXFKKEGAXRPHIKKGVRWGKVHCAPCXKEACRGLRGXKSGLKKQELLEALTKHFPGLDQRPARPAALPAVLPGCPGLVLSQLKCVSPELGRVYPT

SEQ ID NO: 9227 - protein, 155 aa, Homo sapiens
  misc_feature (1)...(155): Xaa = X or * as defined in Table 2
SCSEGLNAVNNLKASRKPKCLSLKWLFLFYFPXXIDSQAFYPLISKIVKRKKMTHFWTLYFMYLFLRQSLALLRPGWSAVAQSQLTVALGLLVLRQSSYVSPPGTWNHRYMPPCPAFXNYFCRDGGLPILFRLVLNSWVXAVLSPRPLKMLRLQA

SEQ ID NO: 9228 - protein, 106 aa, Homo sapiens
KTVSEGFIFSHRTPSLPTFLVLPSSPNFYILDEPTNHLDMETIEALGRACNNFRGGVILVSHDERFIRLVCRELWVCEGGGVTRVEGGFDQYRALLQEQFRREGFL

SEQ ID NO: 9229 - protein, 251 aa, Homo sapiens
  DOMAIN (71)..(83): ABC transporters family proteins domain identified by eMATRIX, accession number BL00211A, p-value=3.647e-10, raw score of 12.23
  DOMAIN (66)..(247): ABC transporter domain identified by PFam, accession name ABC_tran, E-value=0.0025, PFam score of -25.7
  misc_feature (1)...(251): Xaa = X or * as defined in Table 2
VINLVYLISSPRPELKPVDKESEVVMKFPDGFEKFSPPILQLDEVDFYYDPKHVIFSRLSVSADLESRICVVGENGAGKSTMLKLLLGDLAPVRGIRHAHRNLKIGYFSQHHVGAAGTXTFSACGNLLGTQVFLGRPEEEYRHQLGFGMGISGELGHASSLPACLGGQKEAEVAFCSDGLLPCPNFLILDEPTNHLGHGRAIEALGPCLQTISGVGVILVSHEXSALSRLVCRELWVCXGRRRHPCGKEGF

SEQ ID NO: 9230 - protein, 723 aa, Homo sapiens
  DOMAIN (621)..(653): ABC transporters family proteins domain identified by eMATRIX, accession number BL00211B, p-value=7.857e-21, raw score of 13.37
  DOMAIN (214)..(709): ABC transporter domain identified by PFam, accession name ABC_tran, E-value=7.6e-50, PFam score of 179.0
  misc_feature (1)...(723): Xaa = X or * as defined in Table 2
GASFPGVPEWNMATCAEILRSEFPEIDGQVFDYVTGVLHSGSADFESVDDLVEAVGELLQEVSGDSKDDAGIRAVCQRMYNTLRLAEPQSQGNSQVLLDAPIQLSKITENYDCGTKLPGLLKREQSSTVNAKKLEKAEARLKAKLRKRSEKDTLKTSNPLVLEEASASQAGSRKESRLESSGKNKSYDVRIENFDVSFGDRVLLAGADVNLAWGRRYGLVGRNGLGKTTLLKMLATRSLRVPAHISLLHVEQEVAGDDTPALQSVLESDSVREDLLRRERELTSQIAAGRAEGSEAAELAKIYAKLEEIEADKAPARASVILAGLGFTPKMQQQPNPGVSQVAWRMRLALAGALFARPDLLLLDEPTNMLDVRAILWLENYLQTWPSTILVVSHDRNFLNAIATDIIHLHSQRIDGYRGDFETFIKSKQERRAQQQREYEAQQQYRQHIQVFIDRFRYNANRASQVQSKLKMLEKLSELKPVDKESXVVMKFPXWVXEALRRPFCSLDEVDFYYDPKHVIFKRLSVSADLESRICVVGENGAGKSTMLKLLLGDLAPVRGLRHAHRNLKIGYFSQHHVEAAWTXTSVLVELLARKFPGRPEEEYRHQLGRYGISGELAMRPLASLSGGQKSRVAFAQMTMPCPNFYILDEPTNHLDMETIEALGRALNNFRGGVILVSHDERFIRLVCRELWGMRRRRVTRVEGGFDQYRALLQEQFRREGFL

SEQ ID NO: 9231 - protein, 98 aa, Homo sapiens
  misc_feature (1)...(98): Xaa = X or * as defined in Table 2
PPPRTPSVPAGXLRASSTPPRSSSSSSSSSPRKGLSLRPQEALPPPPCPSCRSSAPSAPRGGRGETPNKGTGGSLCQSCHHPPVDVQAVLNKCFEADE

SEQ ID NO: 9232 - protein, 464 aa, Homo sapiens
  misc_feature (1)...(464): Xaa = X or * as defined in Table 2
FQGQRMAGELKPSCNLLEQSILLAKGTSGSSLTALISQVLKAPXVYVFGELLELCNVHELAEXANAAYLQLLNLFAYGTYPDYIANKESLPXLSTAQQNKLKHLTIVSLASRMKCIPYSVLLKDLEMRNLRELEDLIIEAVYTDIIQGKLDQRNQLLEVDFCIGRDIRKKDINNIVKTLHEWCDGCEAALLGIEQQVLRANQYKENHNRTLQQQVEAEDVYILPQSGNDCRGLRFVSSLIGGVRCVHLKHKGDAVVWEAIEEGEALPGKYRLKGGRSVWAAAVRAVCMDQVTNIKKTLKATASSSAQEMEQQLAERECPPHAEQRQPTKKMSKVKGLVSSSPLGPAGAAGTHQAWVRWGGDTKGPFPPLSTCSEFQTCPSPHQRLPTLLVLFQKNCYSPSPTPSFPSCSLQTQGLHQCHPKTGSDTAQLPSRRFLSLCKGLVSLPVFLLLPRHFVRLVISRRQL

SEQ ID NO: 9233 - protein, 63 aa, Homo sapiens
RMAWWESNNYQSFCLPSEESEPEDLENGEESSAELDYQDPDATSLKYVSGDVTHPQAGAEDAL

SEQ ID NO: 9234 - protein, 42 aa, Homo sapiens
  misc_feature (1)...(42): Xaa = X or * as defined in Table 2
FRAWTRSRSERRRRRKRSSSGSEKFDSKKXKKNSSRKKQHEE

SEQ ID NO: 9235 - protein, 223 aa, Homo sapiens
  misc_feature (1)...(223): Xaa = X or * as defined in Table 2
GRAEPEDLENGEESSAELDYQDPDATSLKYVSGXCHPPSGWGHEDALIVHCVDDSGHWGRGGLFTALGKASPLKPRKIYELAGENEKTLSLGGVLLFPVXXXKIQDTKGKICWPXLWLSIVNRSNVLSGIXDGSPIRRAXRRYCLAAKKAGKSSVQPPHVLDMPRKGFKRVGVPEPTLFGKHPGLQRGHPQPYHILFPLEGKSACPFHSQFFILPSLKDSWCP

SEQ ID NO: 9236 - protein, 67 aa, Homo sapiens
  DOMAIN (13)..(35): 10 KD CHAPERONIN SIGNATURE domain identified by eMATRIX, accession number PR00297B, p-value=4.553e-17, raw score of 11.62
  DOMAIN (1)..(67): Chaperonins 10 Kd subunit domain identified by PFam, accession name cpn10, E-value=1.4e-25, PFam score of 96.4
ERSAAETVTKGGIMLPEKSQGKVLQATVVAVGSGSKGKGGEIQPVSVKVGDKVLLPEYGGTKVVLDD

SEQ ID NO: 9237 - protein, 67 aa, Homo sapiens; identical to SEQ ID NO: 9236
  DOMAIN (13)..(35): 10 KD CHAPERONIN SIGNATURE domain identified by eMATRIX, accession number PR00297B, p-value=4.553e-17, raw score of 11.62
  DOMAIN (1)..(67): Chaperonins 10 Kd subunit domain identified by PFam, accession name cpn10, E-value=1.4e-25, PFam score of 96.4

SEQ ID NO: 9238 - protein, 142 aa, Homo sapiens
  DOMAIN (83)..(136): Chaperonins cpn10 proteins domain identified by eMATRIX, accession number BL00681, p-value=7.300e-18, raw score of 27.74
  DOMAIN (98)..(141): Chaperonins 10 Kd subunit domain identified by PFam, accession name cpn10, E-value=1e-16, PFam score of 64.8
SFTSAGRLEKPRNSSFFLPPPSLRVSVLRRALGANRGARRGDRPPSLGGARGLAATAGASAPARWVIFSRVARAGLRVSLRRYTRAEYESEAEGVMGGEIQPVSVKVGDKVLLPKYGGTKVVLDDKDYFLFRDGDILGKYVD

SEQ ID NO: 9239 - protein, 126 aa, Homo sapiens
  DOMAIN (40)..(93): Chaperonins cpn10 proteins domain identified by eMATRIX, accession number BL00681, p-value=8.579e-24, raw score of 27.74
  DOMAIN (4)..(125): Chaperonins 10 Kd subunit domain identified by PFam, accession name cpn10, E-value=8.5e-40, PFam score of 145.6
  misc_feature (1)...(126): Xaa = X or * as defined in Table 2
QAFRKFLPLFDRVLVERSAAETVTKGGIMLPEKSQGKVLQATVVAVGSGSKGKGGEIQPVSVKVGDKVLLPEYGGTKVVLDDKVCKPXXFXKEVRYLQLVVLTNGFFHLQDYFLFRDGDILGKYVD

SEQ ID NO: 9240 - protein, 85 aa, Homo sapiens
  DOMAIN (22)..(35): 10 KD CHAPERONIN SIGNATURE domain identified by eMATRIX, accession number PR00297C, p-value=3.571e-11, raw score of 11.31
  DOMAIN (12)..(85): Chaperonins 10 Kd subunit domain identified by PFam, accession name cpn10, E-value=2.7e-07, PFam score of 31.2
  misc_feature (1)...(85): Xaa = X or * as defined in Table 2
ISLLNKHPSFFKGGEIQPVSVKVGDKVLLPEYGGTKVVLDDKDVXTXXFXKEVRYLQLVVSTKGFFHLQDYFLFRDGDILGKYVD

SEQ ID NO: 9241 - protein, 57 aa, Homo sapiens
MSLVIIRFIIKGEIWEIIYMTERISGTSSGMGRHHVDAISNSDLFQSTVLSKNCNNL

SEQ ID NO: 9242 - protein, 179 aa, Homo sapiens
  DOMAIN (45)..(100): Histone H2A proteins domain identified by eMATRIX, accession number BL00046, p-value=1.000e-40, raw score of 12.95
  DOMAIN (12)..(137): Core histone H2A/H2B/H3/H4 domain identified by PFam, accession name histone, E-value=3.4e-16, PFam score of 67.2
  misc_feature (1)...(179): Xaa = X or * as defined in Table 2
AYAAGFGDSCLIAMSGRGKQXGKVFAKAKSRSSRAGLQFPGGRVHRLLRKGNYAERVGAGAPVYLAAVLEYLTAEILELAGNAARDNKKTRIIPRHLQLGHPATTEELNKLAXGRVTICFRGGVPSXTSRAVLLPKKTESSPQGQGQSDFDRYLELPRKRYSNPKGSFSEAPLPFQRKS

SEQ ID NO: 9243 - protein, 130 aa, Homo sapiens
  DOMAIN (102)..(113): Trp-Asp (WD) repeat proteins proteins domain identified by eMATRIX, accession number BL00678, p-value=3.769e-11, raw score of 9.67
  DOMAIN (69)..(113): WD domain, G-beta repeat domain identified by PFam, accession name WD40, E-value=0.0016, PFam score of 25.2
LKLVAPCRPSRSLRSSPISRRASTTRCLTIEKAKPIKCGTFGATSLQQRYLATGDFGGNLHIWNLEAPEMPVYSVKGHKEIINAIDGIGGLGIGEGAPEIVTGSRDGTVKVWDPRQKDDPVANMEPVQGE

SEQ ID NO: 9244 - protein, 21 aa, Homo sapiens
  misc_feature (1)...(21): Xaa = X or * as defined in Table 2
RTRGRTRGNLSFIXNHMXQIA

SEQ ID NO: 9245 - protein, 284 aa, Homo sapiens
  DOMAIN (79)..(106): Protamine P1 proteins domain identified by eMATRIX, accession number BL00048, p-value=4.197e-10, raw score of 6.39
  misc_feature (1)...(284): Xaa = X or * as defined in Table 2
SPLADTFLSSGLGRTASPRPKAEARGTGRVRGLRRAVRASPGRMGRSRSRSSSRSKHTKSSKHNKKRSRSRSRSRDKERVRKRSKSREKXRNRRRESRSRSRSTRHWPCPGASGTGSAPRPRPTASTSSGARRASAGSLDEKQKARGGGEESGVPSGSEKFDSKKXKKNSSRKKQHEEXKNWXQKRVEEELEKRKDEIEREVLRRVEEAKRIMEKQLLEELERQRQAELAAQKAREEEERAKREELERILEENNRKIAEAQAKLAEEQLRIVEEQRKIHEERMK

SEQ ID NO: 9246 - protein, 50 aa, Homo sapiens
  misc_feature (1)...(50): Xaa = X or * as defined in Table 2
SPSGYGRXSEASRRPTWCSQFQLRQPPHPEPPKSATWNQTPNIGNLSLPL

SEQ ID NO: 9247 - protein, 334 aa, Homo sapiens
  misc_feature (1)...(334): Xaa = X or * as defined in Table 2
CQMRSCDRTECSFTTARICLSPLPTAFRTHTYGPKSCRSPACDVLGKGRSCRGGWLRLASAWCSCARVSAGSALRFPGMESEMETQSAGAEEGFTQVTRKGGRRAKKRQAEQLSAAGEGGDAGRMDTEEARPAKRPVFPPLCGDGLLSGKEETRKIPVPANRYTPLKENWMKIFTPIVEHLGLQIRFNLKSRNVEIRTCKETKDVSDSDKRQTDFVKAFILGLSGWKEXHLTLIRLDDLFLESFEITDVKPLKGDHLSRAIGRIAGAKEGKTKFTIENVTRTTIVLADVKVHILGSFQNIKMARTAICNLILGNPPSKVYGNIRAVASRSADRF

SEQ ID NO: 9248 - protein, 56 aa, Homo sapiens
  misc_feature (1)...(56): Xaa = X or * as defined in Table 2
SSPGNLNVQEGFRITGLICYXKQYQYXMCFLFLLSLYVCVVFDFLLLLLFCGHPLH

SEQ ID NO: 9249 - protein, 85 aa, Homo sapiens
SPGRTAMRSWSCRPCGGGGLGSSQGRSEPGSSRLGPAPSCGLTHPCRRGPSCPHPCPAGCRTCGGICPGPHPTSRCPPSRNCGQT

SEQ ID NO: 9250 - protein, 934 aa, Homo sapiens
  DOMAIN (597)..(611): LEUCINE-RICH REPEAT SIGNATURE domain identified by eMATRIX, accession number PR00019A, p-value=1.783e-10, raw score of 11.19
  DOMAIN (404)..(858): Leucine Rich Repeat domain identified by PFam, accession name LRR, E-value=2.1e-82, PFam score of 287.2
MARRPRNSRAWHFVLSAARRDADARAVALAGSTNWGYDSDGQLLQVTCLSLTGSWLWDAGVPAGSAVFDTCAACPVSPNGPAVCCGQEHSDSDSDPEYSTLPPSIPSAVPVTGESFCDCAGQSEASFCSSLHSAHRGRDCRCGEEDEYFDWVWDDLNKSSATLLSCDNRKVSFHMEYSCGTAAIRGTKELGEGQHFWEIKMTSPVYGTDMMVGIGTSDVDLDKYRHTFCSLLGRDEDSWGLSYTGLLHHKGDKTSFSSRFGQGSIIGVHLDTWHGTLTFFKNRKCIRIKEAWSPLTRLPQPCLPCMQMALRKGNVSFGGRRSRVPTCPPTAVPRSPPAAPDQGLDAGRRPGPGAAAAVLGGTGPPQLEGNKPPKRGATMTTRMSSASSAAPGTSRACMMESRAATQALWLDGNNLSSVPPAAFQNLSSLGFLNLQGGQLGSLEPQALLGLENLCHLHLERNQLRSLALGTFAHTPALASLGLSNNRLSRLEDGLFEGLGSLWDLNLGWNSLAVLPDAAFRGLGSLRELVLAGNRLAYLQPALFSGLAELRELDLSRNALRAIKANVFVQLPRLQKLYLDRNLIAAVAPGAFLGLKALRWLDLSHNRVAGLLEDTFPGLLGLRVLRLSHNAIASLRPRTFKDLHFLEELQLGHNRIRQLAERSFEGLGQLEVLTLDHNQLQEVKAGAFLGLTNVAVMNLSGNCLRNLPEQVFRGLGKLHSLHLEGSCLGRIRPHTFTGLSGLRRLFLKDNGLVGIEEQSLWGLAELLELDLTSNQLTHLPHRLFQGLGKLEYLLLSRNRLAELPADALGPLQRAFWLDVSHNRLEALPNSLLAPLGRLRYLSLRNNSLRTFTPQPPGLERLWLEGNPWDCGCPLKALRDFALQNPSAVPRFVQAICEGDDCQPPAYTYNNITCASPPEVVGLDLRDLSEAHFAPC

SEQ ID NO: 9251 - protein, 209 aa, Homo sapiens
  misc_feature (1)...(209): Xaa = X or * as defined in Table 2
RSGGSASSGRAEARDCWGGRRSLPGDRTLEPCGGCNSCSGPSPACCVAPAXGPAAAADPPACLPSLAAAGAGGGSTGTGGKCAGTGGGXPSCCSGPPWSTPSGRISCCCSLVAATPGREGPSLYTSCSXKRXVCRARCPGARQXWSPGRTATRSWSCRPCGGGGPCRRGPSCPHPCPAGCRTCGGICPGPHPTSRCPPSCRCRRRERSS

SEQ ID NO: 9252 - protein, 234 aa, Homo sapiens
  misc_feature (1)...(234): Xaa = X or * as defined in Table 2
SVLESKGQRNKGQRKGPVPAQEGSSTGKSVRSGGSASLWQGQGSRTAGVGGGRCPGDRTLEPCGGCNSCSGPSPACCVAPAXGPAAAADPPACLPSLGRSCAGGGSTGTGGKWRWHRSGXPSCCSGPPWSTPSGRISCCCSLVCCHTYITSCSXKRXVCRARCPGARQXWSPGRTATRSWSCRPCGGGGPCRRGPSCPHPCPAGCRTCGGICPGPHPTSRCPPSCRCRRRERSS

SEQ ID NO: 9253 - protein, 122 aa, Homo sapiens
  DOMAIN (26)..(50): FGGY family of carbohydrate kinases proteins domain identified by eMATRIX, accession number BL00933A, p-value=4.673e- 12, raw score of 17.50
LKCNFRLDKYCGGTAMSGGEQKPERYYVGVDVGTGSVRAALVDQSGVLLAFADQPIKNWEPQFNHHEQSSEDIWAACCVCHKGDSHRNVIMWLDHRAVSQVNRINETKHSVLQYVGGVMSVE

SEQ ID NO: 9254 - protein, 106 aa, Homo sapiens
ASLIDAHAGGLGVIGADVRGHGLICEGQPVTSRLAVICGTSSCHMGISKDPIFVPGVWGPYFSAMVPGFWLNEGGQSVTGKLIDHMVQGHAAFPELQVKATARSPD

SEQ ID NO: 9255 - protein, 39 aa, Homo sapiens
  misc_feature (1)...(39): Xaa = X or * as defined in Table 2
IIPPSPNSNQLNPPXXXFPGNYYXYFNITQINKDNYKTE

SEQ ID NO: 9256 - protein, 102 aa, Homo sapiens
INKDPIFVPGVWGPYFSAMVPGFWLNEGGQSVTGKLDILSTNTPHPITILGNTNSILKTQLQHQKPFLITSPHIPKTPQTSRTDQASFLCSPSSDSLQILSL

SEQ ID NO: 9257 - protein, 97 aa, Homo sapiens
  DOMAIN (58)..(74): FGGY family of carbohydrate kinases proteins domain identified by eMATRIX, accession number BL00933E, p-value=9.217e- 09, raw score of 13.80
  misc_feature (1)...(97): Xaa = X or * as defined in Table 2
VADLTLKGMVTGLKLFQDLEYLAILYLATVQAIALGTRFIIEAMEAAGHSISTLFLCGGLSKNPLFVQMHADITGSNGKNEQSWESCVPETTGXKIL

SEQ ID NO: 9258 - protein, 562 aa, Homo sapiens
  DOMAIN (43)..(67): FGGY family of carbohydrate kinases proteins domain identified by eMATRIX, accession number BL00933A, p-value=4.673e- 12, raw score of 17.50
  misc_feature (1)...(562): Xaa = X or * as defined in Table 2
FRDDPRVRARLRAESVYLKFNFRLDKYCGGTALSGGEQKPERYYVGVDVGTGSVRAALVDQSGVLLAFADQPIKNWEPQFNHHEQSSEDIWAACCVVTKKVVQGIDLNQIRGLGFDATCSLVVLDKQFHPLPVNQEGDSHRNVIMWLDHRAVSQVNRINETKHSVLQYVGGVMSVEMQAPKLLWLKENLREICWDKAGHFFDLPDFLSWKATGVTARSLCSLVCKWTYSAEKGWDDSFWKMIGLEDFVADNYSKIGNQVLPPGASLGNGLTPEAARDLGLLPGIAVAASLIDAHAGGLGVIGAHVRGHGLHLXGAASDVTLAVICGTSSCHMGISKDPIFVPGVWGPYFSAMVPGFWLNEGGQSVTGKLIDHMVQGHAAFPELQVKATARMPEYILHIXTVTWDLDXGRVQPVGFSFTVXFYMFGPDFHGNRSPLADLTLKGMVTGLKLSQDLDDLAILYLATVQAIALGTRFIIEAMEAAGPLESSTLFLCGGLSQEYPLFVQMHADITGMPVVPVARGGSPFLCGAAVLGACASGDFASVTEAMAKMSKVGKVVFPRLPE

SEQ ID NO: 9259 - protein, 159 aa, Homo sapiens
  DOMAIN (20)..(51): HIT family proteins domain identified by eMATRIX, accession number BL00892A, p-value=1.214e-17, raw score of 18.17
  DOMAIN (10)..(151): HIT family domain identified by PFam, accession name HIT, E- value=1.6e-27, PFam score of 104.9
  misc_feature (1)...(159): Xaa = X or * as defined in Table 2
AATSWGAAQTISSPILDKSLPADISIEDQQCLVFRDVAPQAPVHFLVIPKKPIPRISQAEEEDQQLLGHLLLVAKQTAKAEGLGDGYRLGEXLLALGPSPMNSHSYFSIXSSFFDLCHDPDSLTPSSISVINDGKLGAQSVYHLHIHVLGGRQLQWPPG

SEQ ID NO: 9260 - protein, 169 aa, Homo sapiens
  DOMAIN (133)..(157): HIT family proteins domain identified by eMATRIX, accession number BL00892B, p-value=1.000e-20, raw score of 16.86
  DOMAIN (90)..(162): HIT family domain identified by PFam, accession name HIT, E- value=0.0027, PFam score of -10.5
  misc_feature (1)...(169): Xaa = X or * as defined in Table 2
RERRDIGGCWSSSSAWGNPREWGFLGNDQGRCTGSLRGPTSREHKTLAGPHKRIVSWGGSCPRIRGEDGWGCSPRSWLAGALATFIPXKAPFPRITPGXRRRPAATYVPPLSLXLLGHLTPMWLSRQQRLRGLGDGYRLVINDGKLGAQSVYHLHIHVLGGRQLQWPPG

SEQ ID NO: 9261 - protein, 362 aa, Homo sapiens
  misc_feature (1)...(362): Xaa = X or * as defined in Table 2
NCLNSFSCSMNQMYLLIALMTIEYNLAYDSYYICIHFIFKIVYKLTDFFLQMRLXILMQIFWXGSLFLLXXFQLIRDLPFAFSLRXKLCPHLLKYKGILWKQIILVLCXRXILIILMCDLFALSGIIVFLSFIMRKFSHLXVTVKFIYMSIPRRPVQILXEHLGLQDIIGIXILISCYXXENRYSIVIPLFCFVILITHFGFFSLFXIXLLVFVXXFXFNNPNQQYIXFICFLSNLTTFFLCFLVGGXCFVKGIIVXDHCFHTCFTLHVFXSTFIYXAFGLEXFHQMNTFWXFVMSSSNCYTLLGTXQXICKGKRNNFLYSANLNFIXXIIHFFLKIVWIDCFXNTNLWLWFFFSSAFPASK

SEQ ID NO: 9262 - protein, 51 aa, Homo sapiens
  misc_feature (1)...(51): Xaa = X or * as defined in Table 2
XEFLFKHPKRTATLSMRNTSVMKKGGIFSAEFLKVFLPSLLLSHLLAIGLG

SEQ ID NO: 9263 - protein, 254 aa, Homo sapiens
  misc_feature (1)...(254): Xaa = X or * as defined in Table 2
PPLSPGAHVGRGAPTSAFPPPAAEAHPAARRGLRSPQLPSGAMSQNGAPGMQEESLQGSWVELHFSNNGNGGSVPASVSIYNGDMEKILLDAQHESGRSSSKSSHCDSPPRSQTPQDTNRASETDTHSIGEKNSSQSEEDDIERRKEVESILKKNSDWIWDWSSSAGKIFPPKEFLFKHPEAARPTLQAXGNRAVMKKGGIFSAENFLKVFLPSLLLSHFAGPSGLGIYIGKGVLTTSTSTFWMKELGVLTLVR

SEQ ID NO: 9264 - protein, 127 aa, Homo sapiens
  DOMAIN (87)..(117): Sulfotransferase proteins domain identified by eMATRIX, accession number PF00685E, p-value=2.333e-31, raw score of 18.65
  DOMAIN (2)..(115): Sulfotransferase proteins domain identified by PFam, accession name Sulfotransfer, E-value=2.2e-10, PFam score of -34.6
HRQHPCIPHTTPTLSHCRRGGHKARFPRAQNPKREIQKILEFVGRSLPEETVDLMVEHTSFKEMKKNPMTNYTTVRREFMDHSISPFMRKGMAGDWKTTFTVAQNERFDADYAEKMAGCSLSFRSEL

SEQ ID NO: 9265 - protein, 103 aa, Homo sapiens
  DOMAIN (15)..(53): Sulfotransferase proteins domain identified by eMATRIX, accession number PF00685D, p-value=5.714e-33, raw score of 24.52
  DOMAIN (2)..(91): Sulfotransferase proteins domain identified by PFam, accession name Sulfotransfer, E-value=9.8e-07, PFam score of -83.8
TGRIPGHHASGDSKILEFVGRSLPEETVDFMVQHTSFKEMKKNPMTNYTTVPQEFMDHSISPFMRKGMAGDWKTTFTVAQNERFDADYAEKMAGCSLSFRSEL

SEQ ID NO: 9266 - protein, 54 aa, Homo sapiens
  misc_feature (1)...(54): Xaa = X or * as defined in Table 2
FAFQKFYIYTYFXKHTLWLGAVAHGCNPSTLGGQGGQITXDEEFETTLDKMVKS

SEQ ID NO: 9267 - protein, 192 aa, Homo sapiens
  DOMAIN (85)..(118): Sulfotransferase proteins domain identified by eMATRIX, accession number PF00685A, p-value=6.684e-34, raw score of 19.12
  DOMAIN (67)..(191): Sulfotransferase proteins domain identified by PFam, accession name Sulfotransfer, E-value=2.9e-13, PFam score of 4.1
MRRAARAMAFGPPRPQGTAQVPLLAPSPSLSRTRGPRGLCALRALELQGRNMELIQDISRPPLEYVKGVPLIKYFAEALGPLQSFQARPDDLLISTYPKSGTTWVSQILDMIYQGGDLEKCHRAPIFMRVPFLEFKVPGIPSGMETLKNTPAPRLLKTHLPLALLPQTLLDQKVKVRLGTVVHTRNLSTLGG

SEQ ID NO: 9268 - protein, 104 aa, Homo sapiens
  DOMAIN (46)..(92): Sulfotransferase proteins domain identified by eMATRIX, accession number PF00685C, p-value=8.579e-20, raw score of 26.03
  misc_feature (1)...(104): Xaa = X or * as defined in Table 2
VSYYHFHRMEKAHPEPGTWDSFLEKFMAGEVWAXLEEGGCEAEGWWLXRTATLCRCPLPASLVSYGSWYQHVQEWWELSRTHPVLYLFYEDMKEVRPTVMLPPM

SEQ ID NO: 9269 - protein, 307 aa, Homo sapiens
  DOMAIN (37)..(70): Sulfotransferase proteins domain identified by eMATRIX, accession number PF00685A, p-value=5.286e-33, raw score of 19.12
  DOMAIN (22)..(307): Sulfotransferase proteins domain identified by PFam, accession name Sulfotransfer, E-value=1.4e-61, PFam score of 218.0
  misc_feature (1)...(307): Xaa = X or * as defined in Table 2
RRNMELIQDTSRPPLEYVKGVPLIKYFAEALGPLQSFQARPDDLLINTYPKSGTTWVSQILDMIYQGGDLEKCNRAPIYVRVPFLEFKAPGIPLRMETLKDTPAPRLIKSHLPLALLPQTLLDQKVKVVYVAAQRKRSVAVSYYHFYHMAKVHPEPGTWDSFLGESSLVLXKVVLADSWYQHVQEWWELNRTHPVLYLFYEDMKENPEKGRFQKDPWSLGGRSLQEKTGDFQVQHTSFKEMKKNPMTNLHPTVPPGSSMDHSISPLPXGKGMAGDWKTTFTVAQNERFDADYAEKMAGCSLSFRSEL

SEQ ID NO: 9270 - protein, 94 aa, Homo sapiens
  DOMAIN (31)..(77): Biotin-requiring enzymes attachment site proteins domain identified by eMATRIX, accession number BL00188, p-value=2.469e-20, raw score of 30.29
  DOMAIN (29)..(90): Biotin-requiring enzymes domain identified by PFam, accession name biotin_lipoyl, E-value=0.0042, PFam score of 15.0
HEEGSIEIDIPVPKYLSSVSSQETQGGPLAPMTGTIEKVFVKAGDKVKAGDSLMVMIAMKMENKLKSSQKDKVRQFMIFTQSSEKTAVRLSFSK

SEQ ID NO: 9271 - protein, 74 aa, Homo sapiens
  DOMAIN (11)..(57): Biotin-requiring enzymes attachment site proteins domain identified by eMATRIX, accession number BL00188, p-value=9.224e-16, raw score of 30.29
  DOMAIN (7)..(74): Biotin-requiring enzymes domain identified by PFam, accession name biotin_lipoyl, E-value=0.024, PFam score of 6.2
  misc_feature (1)...(74): Xaa = X or * as defined in Table 2
AHKKLRAAPLAPMTGTHXKVFVKAGDKVKAGNPSWVMFPMKMEHTIKSPKDGTVKKVFYREGAQANRHHSFSRV

SEQ ID NO: 9272 - protein, 101 aa, Homo sapiens
  DOMAIN (32)..(45): NONHISTONE CHROMOSOMAL PROTEIN HMG17 FAMILY SIGNATURE domain identified by eMATRIX, accession number PR00925B, p-value=3.089e- 10, raw score of 3.73
MGKGRSPASPAKADGSHCDPKTAPKAKEAPAPPKAEAKAKALKAKKAVLKGVRSHTQKRRSACHSPSGGPRHCDSGGSPDILGRAPPGETSVATMLSSKFR

SEQ ID NO: 9273 - protein, 72 aa, Homo sapiens
  DOMAIN (44)..(70): Ribosomal protein L23 domain identified by PFam, accession name Ribosomal_L23, E-value=0.00036, PFam score of 18.5
  misc_feature (1)...(72): Xaa = X or * as defined in Table 2
LIAGAFRKASGGNNIFRRPKTLXLRRQPRXPQKSTPRRNKLGHYAIIKFPLTTESAVKKIEETNTLVFTVLV

SEQ ID NO: 9274 - protein, 310 aa, Homo sapiens
  DOMAIN (131)..(164): Ribosomal protein L23 proteins domain identified by eMATRIX, accession number BL00050A, p-value=2.761e-17, raw score of 23.71
  DOMAIN (111)..(155): Ribosomal protein L23 domain identified by PFam, accession name Ribosomal_L23, E-value=9.9e-14, PFam score of 50.6
CTPEKCLPAVHRRNWLRNAEPPVWKRHLSPICRKRQGRATKPKRRPWYTTPPTRRVRDVALRPYSRHGRQPHAKKKIRMSLTFRRPKTLRLRRQPRYPRKSTPRRNKLGHYAIIKFPLTTESAVKKIEENNTLVFTVDVKANKHQIRQAVKKLYDSDVAKHTEERRHDEQNNILTREAKNRNDNTRNRARTETNTETQKNSGYQALISFHSYYSDTSDNKAHLVSYQSGQCTYDRLGWNLLIRMTCRSLQHTYDIQSTQIASCFHPVSVRVNLRLYCANYGGISAVFMPLRKELLILTRSSNSKVSQLRI

SEQ ID NO: 9275 - protein, 92 aa, Homo sapiens
  DOMAIN (9)..(22): NONHISTONE CHROMOSOMAL PROTEIN HMG17 FAMILY SIGNATURE domain identified by eMATRIX, accession number PR00925B, p-value=3.089e- 10, raw score of 3.73
KAKKEAPAPPKAEAKAKALKAKKAVLKGVHSHKKKKIRTSPTFRRPKTLRLRRQPKYPRKSAPRRNKSVLPPVPMKRFGYSPLVIWKFTHSA

SEQ ID NO: 9276 - protein, 84 aa, Homo sapiens
EMAPKAKEAPAHPKAEAKAKALKAKKAVLKGVRSHTRKKKIRMSLTFRRPKTLRLRRQPRYPRKSTPRRNKLGHYAIIKFPLTT

SEQ ID NO: 9277 - protein, 220 aa, Homo sapiens
  DOMAIN (80)..(112): Bacterial-type phytoene dehydrogenase proteins domain identified by eMATRIX, accession number BL00982A, p-value=7.750e- 20, raw score of 18.41
  DOMAIN (79)..(114): Pyridine nucleotide-disulphide oxidored domain identified by PFam, accession name pyr_redox, E-value=5.5e-06, PFam score of 22.9
  misc_feature (1)...(220): Xaa = X or * as defined in Table 2
FVTRPDAGVMRLPLVLLLAVLLLAVLCKVYLGLFSGSSPNPFSEDVKRPPAPLVTDKEARKKVLKQAFSANQVPEKLDVVVIGSGFGGLAAAAILAKAGKRVLVLEQHTKAGGCCHTFGKNGLEFDTGIHYIGRMEEGSIGRFILDQITEGQLDWAPLSSPFCIMVLEGPKWPKGVPHVQWRESLHSGPQGGSFHRRKLSLTSIXSWLRWYPVEPLMPSC

SEQ ID NO: 9278 - protein, 213 aa, Homo sapiens
  DOMAIN (189)..(203): Ribosomal protein L23 proteins domain identified by eMATRIX, accession number BL00050B, p-value=8.125e-12, raw score of 14.81
  DOMAIN (195)..(213): Ribosomal protein L23 domain identified by PFam, accession name Ribosomal_L23, E-value=0.00046, PFam score of 18.2
  misc_feature (1)...(213): Xaa = X or * as defined in Table 2
PGSYLKPLSWTVALSLRPGFMSRWPCQRLTWQRRSVTQASGASGASLCASRLPRDKTAPKAKEAPAPPKAEAKAKALKPKKAVVERCPHTHAKKRIRMSPTFRRPKTLRLRRQPRYPRKSTPRRNKLGHYAIIKFPLTTESAGKKNKKNNTPLVHCGCXRPTRHQIRQAVKKLYDSDVAKVTTLICPDKEKKAYVRLAPDYDALDVANKIGII

SEQ ID NO: 9279 - protein, 534 aa, Homo sapiens
  DOMAIN (301)..(334): PROLINE-RICH PROTEIN 3 domain identified by eMATRIX, accession number DM00215, p-value=5.881e-09, raw score of 19.43
MHLIPPATNCDTLVECCLPGKLTRDLVCTAFTGFGTSYSPQENSHNHSALHSSNSHSSNPSNNPSKTSDANILSQTSRHNDRDYRLPRAETHSSSTPVQHPIKPVVHPTATPSTVPSSPFTLQSDHQPKKSFDANGASTLSKLPTPTSSVPAQKTERKVLQQLSKHNRKVMIRSALITSIILDLLYIEKDLRYQKNIESTSGDKPVSHSCTTPSTSSASGLNPTSAPPTSASAVPVSPVPQSPIPPLLQDPNLLRQLLPALQATLQLNNSNVDISKINEAQPSNQSPMSLTSDASSPRSYVSPRISTPQTNTVPIKPLISTPPVSSQPKVSTPVVKQGPVSQSATQQPVTADKQQGHEPVSPRSLQRSSSQRSPSPGPNHTSNSSNASNATVVPQNSSARSTCSLTPALAAHFSENLIKHVQGWPADHAEKQASRLREEAHNMGTIHMSEICTELKNLRSLVRVCEIQATLREQRILFLRQQIKELEKLKNQNSFMISASKTGSTKGLFFMLDINVNVTTFSDANINFEIALVL

SEQ ID NO: 9280 - protein, 126 aa, Homo sapiens
LLTSSKVMNLSLLEVFSVSSSQRSPSPGPNHTSNSSNASNATVVPQNSSARSTCSLTPALAAHFSENLIKHVQGWPADHAEKQASRLREEAHNMGTIHMSEICTELKNLRSLVRVCEIQATLREQR

SEQ ID NO: 9281 - protein, 228 aa, Homo sapiens
  DOMAIN (111)..(144): PROLINE-RICH PROTEIN 3 domain identified by eMATRIX, accession number DM00215, p-value=5.881e-09, raw score of 19.43
  misc_feature (1)...(228): Xaa = X or * as defined in Table 2
QRSLFLRVPQSPIPPLLQDPNLLRQLLPALQATLQLNNSNVDISKINEVLTAAVTQASLQSIIHKFLTAGPSAFNITSLISQAAQLSTQAQPSNQSPMSLTSDASSPRSYVSPRISTPQTNTVPIKPLISTPPVSSQPKVSTPVVKQGPVSQSATQQPVTAGPGPRSSEPVSPRRSSALKXPEKSITWVPIHTSNSSNGIQMATVVPQEFFLARSTCSLTAGTSSTLQ

SEQ ID NO: 9282 - protein, 345 aa, Homo sapiens
  DOMAIN (70)..(110): kw TRANSCRIPTASE REVERSE II ORF2 domain identified by eMATRIX, accession number DM01354H, p-value=6.850e-32, raw score of 18.00
MEDFTTPLSTLASSMRQKVNKDIQDLDSALQQADVIDIYRTLHPKSTEYTFFSALHCTYSKSDHVIGSKALLSKCKRTEITTNCVSDHSAIKLEFRIKKLTQNRTTTWKLNNLLLNDYWVDNEMKAEIKVFFETTQHDQNFTKARCIQEHRTPYSQSFKLKAETRDPSSFTKNVQKMKRVRDADLAVAALSRLRGKVWVKAWPPLRGCRCVLGCCFLAFCIRSLMDVKHSCPVCQRELFYYHRLPRPSPRSAYLAVRDIGPKMARDTVNLWPQARDPSENASPALLQTHAEKVLVRRVGSGLGTTLPRRGDDPTPERQISFLKCLLKKLSHGFGSEGAMPEEISH

SEQ ID NO: 9283 - protein, 435 aa, Homo sapiens
  misc_feature (1)...(435): Xaa = X or * as defined in Table 2
MGRNQSRKAENSKHESTYSPPKDHSSSQAMEQSWTENGFEKLGFRRKEALYYLDLTASCQSQELFQLYAGMSVVGTSMPVQAVCPYCGNRIITVTTFVPGALTWLLCTTLFLFGYVLGCCFLAFCIRSLMDVKHSCPVCQRELFYYHRLRQMELASSARTVVAPSRPCAGREGRGDANGKNSSPTAGSAMSSEPPPPPQPPTHQAGVGLLDTPRSRERSPSPLRGNVVPSPLPTRRTRTFSATVRASQGPVYKGVCKCFCRSQRAIGFNYPPAGWAGPDIFLWHISXLWKGGVIVPSGKGDEGHPNKMCSHPHPKEXRIAARPVKVVHHLTLAPQAPKHETWSGHVISSLGGLVESTPLSLCFVGDFAGRRQQTLEDDILPHETGLQRGNGPSQVSPGGKGYGGAGVGCGVFPAISTAYGPLQQPLHHLKSIKSI

SEQ ID NO: 9284 - protein, 112 aa, Homo sapiens
  misc_feature (1)...(112): Xaa = X or * as defined in Table 2
PIITKEHLFYVILVPSSGLDGIQGXSQKEGRGLAVPTPVSVAAGLPAASMAEEAADQVGRAALAWLCPAGRRRGFGGEVMRALVASRPDLLTLSASSGWALGSEGRVKASAD

SEQ ID NO: 9285 - protein, 268 aa, Homo sapiens
  DOMAIN (188)..(206): HISTONE H5 SIGNATURE domain identified by eMATRIX, accession number PR00624F, p-value=6.800e-09, raw score of 5.29
  misc_feature (1)...(268): Xaa = X or * as defined in Table 2
GIKRRSGREATRALITSPPNPFRRPAGQSQARAARPTWSAASSAMEAAGSPAATETGKYIASTQRPDGTWRKQRRVKEGYVPQRRSQYMKTSMXSFSRVNQSCPQGXALRPLLLSPHPGPEGGEPGPLQGQPNVNLEGEREKEAAAGKRKERAEGLSKDSXLRCPWEETAQLPSAPQGSRAAPTAASDQPDSAATTEKAKKIKNLKKKLRQVEELQQRIQAGEVSQPSKEQLEKLARRRALEEELEDLELGLXGLSPEATAPVTPSRA

SEQ ID NO: 9286 - protein, 88 aa, Homo sapiens
  misc_feature (1)...(88): Xaa = X or * as defined in Table 2
ERERESVCVCMCVRVCVCVCLRERERQRQRDKRLCGEMRKIQYVNKLHYISKYLYIYKYVILQTXTFIHIYIYLYKXICIHTQMYAVY

SEQ ID NO: 9287 - protein, 45 aa, Homo sapiens
GHFPCALKSVVPPDEKHWNDLALEFHYMRWVLASFISMRKIQRRI

SEQ ID NO: 9288 - protein, 569 aa, Homo sapiens
  DOMAIN (497)..(542): Receptor tyrosine kinase class II proteins domain identified by eMATRIX, accession number BL00239F, p-value=3.222e-10, raw score of 28.15
  DOMAIN (295)..(540): Eukaryotic protein kinase domain identified by PFam, accession name pkinase, E-value=1.6e-40, PFam score of 148.0
  misc_feature (1)...(569): Xaa = X or * as defined in Table 2
NLVHCHCLDIFINQAFDMQRDLQITPKRLEYTRKKENELYESLMNIANRKQEEMKDMIVETLNTMKEELLDDATNMEFKDVIVPESGEPVGTREIKCCIRQIQELIISRLNQAVANKLISSVDYLRESFVGTLERCLQSLEKSQDVSVHITSNYLKQILNAAYHVEVTFHSGSSVTRMLWEQIKQIIQRITWVSPPAITLEWKRKVAQEAIESLSASKLAKSICSQFRTRLNSSHEAFAASLRQLEAGHSGRLEKTEDLWLRVRKDHAPRLARLSLESCSFTGCLCLHRKPKLGQELGRGQYGVVYLCDNWGGHFPCALKSVVPPDEKHWNDLALEFHYMRSLPKHERLVDLHGSVIDYNYGGGSSIAVLLIMERLHRDLYTGLKAGLTLETRLQIALDVVEGIRFLHSQGLVHRDIKLKNVLLDKQNRAKITDLGFCKPEAMMSGSIVGTPIHMAPELFTGKYDNSVDVYAFGILFWYICSGSVKLPEAFERCASKDHLWNNVRRGARPERLPVFDEECWQLMEACWDGDPLKRPLLGIVQPMLQGILXNRLCKSNSEQPNRGLDDST

SEQ ID NO: 9289 - protein, 156 aa, Homo sapiens
  misc_feature (1)...(156): Xaa = X or * as defined in Table 2
GPEAVPHRACSLWLPTPSGPTCPATRHSEHEFTFQMWPGCASSSLLCVGTPGEARADHRCMRVTPVHLGLPGWVGGAGARPHCCESATPGGPRGCPTPDDWVAAHIPPSFHKXGNPGCIRGDPRGLLWPLCPMTCVASDKAPALLGSACCSVWSVR

SEQ ID NO: 9290 - protein, 351 aa, Homo sapiens
  DOMAIN (277)..(290): REPEAT PROTEIN ANK NUCLEAR ANKYR domain identified by eMATRIX, accession number PD00078B, p-value=5.950e-10, raw score of 13.14
  DOMAIN (186)..(319): Ank repeat domain identified by PFam, accession name ank, E- value=3.9e-26, PFam score of 100.3
  misc_feature (1)...(351): Xaa = X or * as defined in Table 2
PVWRGPAGPTPGIPSTTEKHTRLPSANMMVLKVEELVTGKKNGNGEAGEFLPEDFRDGEYXAAVTLERQEDLKTLLAHPVTLGEPQLRKRETHERAELKKKKLEQRSKLENLEDLEIIIQLXEKRKKSRETKVPVLKDPEPXIHYGTCWECPTFLKASLWENNLPVVEKFLSDKNNPDVCDEYKRTALHRACLEGHLAIVEKLMEAGAQIEFRDMLESTAIHWASRGGNLDVLKLLLNKGAKISARDKLLSTALHVAVRTGHLXGCAEHLIACEADLNAKDREGDTPLHDAVRLNRYKMIRLLIMYGADLNIKNCAGKTPMDLVLHWQNGTKAIFDSLRENSYKTSRIATF

SEQ ID NO: 9291 - protein, 108 aa, Homo sapiens
  misc_feature (1)...(108): Xaa = X or * as defined in Table 2
HGVSLLFPRLECNGTISAHHNLRLLSXSDSPASASQVAGITGMHHHARLILYFLVEMGFLHVGQAGLELPTSGDPTLPWPSPKCWDYRREPTSPGPQTYIITQSKSSP

SEQ ID NO: 9292 - protein, 121 aa, Homo sapiens
LLLWTMSVIFFACVVRVRDGLPLSASTDFYHTQDFLEWRRRLKSLALRLAQYPGRGSAEGCDFSIHSIIQKVKWHFNYVSSSQMECSLEKIQEELKLQPPAVLTLEDTDVANGVMNGHTPM

SEQ ID NO: 9293 - protein, 246 aa, Homo sapiens
  misc_feature (1)...(246): Xaa = X or * as defined in Table 2
LLLWTMSVIFFACVVRVRDGLPLSASTDFYHTQDFLEWRRRLKSLALRLAQYPGRGSAEGCDFSIHFSSFGDVACMAICSCQCPAAMAFCFLETLWWEFTASYDTTCIGLASRPYAFLEFDSIIQKVKWHFNYVSSSQMECSLEKIQEELKLQPPAVLTLEDTDVANGVMNGHTPMHLEPAPNFRMEPVTALGILSLILNIMCAALNLQPVQHVYLGQLDLGAHHRKSFIGREKGNILVFXVDMIQ

SEQ ID NO: 9294 - protein, 333 aa, Homo sapiens
  DOMAIN (132)..(169): DNA/RNA non-specific endonucleases proteins domain identified by eMATRIX, accession number BL01070A, p-value=4.000e-39, raw score of 18.15
  DOMAIN (12)..(332): DNA/RNA non-specific endonuclease domain identified by PFam, accession name Endonuclease, E-value=3.8e-135, PFam score of 462.4
MRALRAGLTLALGAGLGAVVEGWRRRREDARAAPGLLGRLPVLPVAAAAELPPVPGGPRGPGELAKYGLPGLAQLKSRESYVLCYDPRTRGALWVVEQLRPERLRGDGDRRECDFREDDSVHAYHRATNADYRGSGFDRGHLAAAANHRWSQKAMDDTFYLSNVAPQVAPAPRAGRGMRGRRLASRGLGLFFCRTGQLPNAPPVPHLNQNAWNNLEKYSRSLTRSYQNVYVCTGPLFLPRTEADGKSYVKYQVIGKNHVAVPTHFFKVLILEAAGGQIELRTYVMPNAPVDEAIPLERFLVPIESIERASGLLFVPNILARAGSLKAITAGSK

SEQ ID NO: 9295 - protein, 126 aa, Homo sapiens
  DOMAIN (92)..(106): DNA/RNA non-specific endonucleases proteins domain identified by eMATRIX, accession number BL01070D, p-value=9.100e-15, raw score of 13.05
QKVRGQIREGCLEEVALGSSRPPAHVCLGLPTGQTADGKSYVKYQVIGKNHVAVPTHFFKVLILEAAGGQIELRTYVMPNAPVDEAIPLEAFLVPIESIERASGLLFVQNILARAGSLKAITAGSK

SEQ ID NO: 9296 - protein, 353 aa, Homo sapiens
  DOMAIN (187)..(224): DNA/RNA non-specific endonucleases proteins domain identified by eMATRIX, accession number BL01070A, p-value=1.333e-37, raw score of 18.15
  DOMAIN (67)..(353): DNA/RNA non-specific endonuclease domain identified by PFam, accession name Endonuclease, E-value=1.7e-115, PFam score of 397.1
  misc_feature (1)...(353): Xaa = X or * as defined in Table 2
ARGWVPRPKPLAVFVSGREVTLSSAAPAALCPRWIPRRGSFKSLAGRPPLGRSPAMRALRAGLTLASGAGLGAVVEGWRRRREDARAALGLLGRLPVLPVAAAAELPPVPGGPRGPGELAKYGLPGLAQLKSRESYVLCYDPRTRGALWVVEQLRPERLRGDGDRRECDFREDDSVHAYHRATNADYRGSGFDRGHLAAAANHRWSQKAMDDTFYLSKVAPQVPHSNQIAWNNLEKYSRSLTRSYQNVYCLHXGHFFLPRTEADGKSYVKYQVIGKNHVAVPTHFFKVLILEAAGGQIELRTYVMPNAPVDEAIPLERFLVPIESIERASGLLFVPNILARAGSLKAITAGSK

SEQ ID NO: 9297 - protein, 101 aa, Homo sapiens
  DOMAIN (17)..(32): WILM'S TUMOUR PROTEIN SIGNATURE domain identified by eMATRIX, accession number PR00049D, p-value=7.750e-12, raw score of 0.00
  misc_feature (1)...(101): Xaa = X or * as defined in Table 2
GSPGTRSETREPGAMSQPPAPPPPLPPPPPPPEAPQTPSSLASAAASGGLXSGETGESFPGAARIRSVRRVYFSRPPVLSASSVPSAASGTSSNSCWGLRR

SEQ ID NO: 9298 - protein, 151 aa, Homo sapiens
  misc_feature (1)...(151): Xaa = X or * as defined in Table 2
EFKQLIHIEHQPNGGASVIHAYSNELSHLSPMEMERFARKSLVGSXCSSENENSGSFPTXWGIVHGAATYLPDFLDYFSFNFPNSPVKMEILGKKDIETTTMSNFHAQSLTVLQPGRQSETPSQKKRKKFMIMLSSRWEGETKNKYRRLTN

SEQ ID NO: 9299 - protein, 190 aa, Homo sapiens
  DOMAIN (151)..(162): DNA PROTEIN POLYMERASE ENDONUCLEASE DNA- domain identified by eMATRIX, accession number PD01937A, p-value=3.475e-09, raw score of 6.68
APAQLRLRAMQPRVLGALPLCLLLPSPSSSRSSFSFSAGTAVPSSASASLSQPVPRKLLVPPTLLHAQPHHLLLPAAAAAASANAKSRRPKEKREKERRRHGLGGAREAGGASREENGEVKPLPRDKIKDKIKERDKEKEREKKKHKVMNEIKKENGEVKILLKSGKEKPKTNIEDLQIKKVKKKKKKKH

SEQ ID NO: 9300 - protein, 901 aa, Homo sapiens
  DOMAIN (274)..(285): DNA PROTEIN POLYMERASE ENDONUCLEASE DNA- domain identified by eMATRIX, accession number PD01937A, p-value=3.475e-09, raw score of 6.68
  misc_feature (1)...(901): Xaa = X or * as defined in Table 2
TEKGAAAGTAGSCSRRQHASPQSYGSPASWSFAPLSAAPSPSSSRSSFSFSAGTAVPSSASASLSQPEPRKLLVPPTLLHAQPHHLLLPAAAAAASANAKSRRPKEKREKERRRHGLGGAREAGGASREENGEVKPLPRANDKTRSFDDFSPDQAAAECLSIRKRRILKGSCQTGYLRKALFSDTVTLGIKASTYGFWGGMIQSIVKGLAETFNFWIHIWELNDLQYISALFACSEEMPDYHLEKQLADKIKDKIKERDKEKEREKKKHKVMNEIKKENGEVKILLKSGKEKPKTNIEDLQIKKVKKKKKKKHKENEKRKRPKMYSKSIQTICSGLLTDVEDQAAKGFLNDNIKDYVGKNLDTKNYDSKIPENSEFPFVSLKEPRVQNNLKRLDTLEFKQLIHIEHQPNGGASVIHAYSNELSHLSPMEGWERFAEEFVGLXVFSENENSAAFYVMGIVHGAATYLPDFLDYFSFNFPNSPVKMEILGKKDIETTTMSNFHAQVKRTYSHGTYRAGPMRQISLVGAVDEEVGDYFPEFLDMLEESPFLKCTLPWGTLSSLKLQSRKDSDDGPIMWVRPGEQMIPVADMPKSPFKRKRTTNEIKNLQYLPRTSEPREMLFEDRTRAHADHIGQGFERQTTAAVGVLKAVHCGEWPDQPRITKDVICFHAEDFLEVVQRMQLDLHEPPLSQCVQWVDDAKLNQLRREGIRYARIQLYDNDIYFIPRNVVHQFKTVSAVCSLAWHIRLKLYHSEEDTSQNTATHETGTSSDSTSSVLGPHTDNMICAVSKASLDSVFSDKLHSKYELQQIKHEPIASVRIKEEPVNVNIPEKTTALNNMDGKNVKAKLDHVQFAEFKIDMDSKFENSNKDLKEELCPGNLSLVDTRQHSSAHSNQDKKDDDILC

SEQ ID NO: 9301 - protein, 40 aa, Homo sapiens
LEYCLCWILFAGFMSFSGLCTPSFCWSIFSNSFPKKGTWR

SEQ ID NO: 9302 - protein, 91 aa, Homo sapiens
  DOMAIN (59)..(79): RIBOSOMAL PROTEIN L5 SIGNATURE domain identified by eMATRIX, accession number PR00058E, p-value=1.346e-25, raw score of 13.85
  DOMAIN (1)..(67): Ribosomal L18p/L5e family domain identified by PFam, accession name Ribosomal_L18p, E-value=0.0034, PFam score of -17.4
FKLIAWHSHEKIYEGQVEVTGDEYNVESIDGQPGAFTCYLDAGLARTTTGNKVFGALKGAVDGGLSIPHSTKRFPGYDSESSCCYTRESSL

SEQ ID NO: 9303 - protein, 113 aa, Homo sapiens
  misc_feature (1)...(113): Xaa = X or * as defined in Table 2
IYSYGKTGPVXKRKNCQSRIKEQNPIICWLQATHLKCKETYKLKMRKICQANTNQNEEIGILXNSRLYSKNYYQGXXXKGSILQEDMTILNMYAPKNRGSGYMRQKLIELQGE

SEQ ID NO: 9304 - protein, 102 aa, Homo sapiens
  misc_feature (1)...(102): Xaa = X or * as defined in Table 2
LSRIMKAWFPLFFKIPFRDKVFFLSPPAWSAVAQSRLHCSLELVGSINSSISASXLGWEYRCAPQCPGXFLFFCRDGALPCCPSWSQVICLPXPPKALGLQA

SEQ ID NO: 9305 - protein, 56 aa, Homo sapiens
MHPVSCWVIMSCRPLCTRLILSDSPPGPPSDICVSRKNPSNYPAMVLPQCFTICII

SEQ ID NO: 9306 - protein, 391 aa, Homo sapiens
MSELRLCCDLLVQQVDKTKEVTTTGVSNSEEGIDVGTLLKSTCNTFLKTLEECMQIANAAFTSELLYHTPPGSPQLAMLKSSKMKHPIIPIHNSLERQTELSTCENGSLNMEINGEEEILMKNKNSLYLKSAEIDCSISSEENTDDNITVQGEIMKEDRMENLKNHDNNLSQSGSDSSCSPECLWEEGKEVIPTFFSTMNTSFSDIELLEDSGIPTEAFLASCCAVVPVLDKLGPTVFAPVKMDLVENIKKVNQKYITNKEEFTTLQKIVLHEVEADVAQVRNSATEALLWLKRGLKFLKGFLTEVKNGEKDIQTALNNAYGKTLRQHHGWVVRGVFALALRATPSYEDFVAALTVKEGDHRKEAFSIGMQRDLSLYLPAMKKQMAILDAL

SEQ ID NO: 9307 - protein, 705 aa, Homo sapiens
  DOMAIN (34)..(124): PH domain identified by PFam, accession name PH, E-value=1.4e -11, PFam score of 46.4
  misc_feature (1)...(705): Xaa = X or * as defined in Table 2
MGVELFTPASVMGVKRCCCSIPGQLSGNGEPRFSEIDSSVSVRGGWQPRWFLLCGGILSYYDSPEDAWKGCKGSIQMAVCEIQVHSVDNTRMDLIIPGEQYFYLKARSVAERQRWLVALGSAKACLTDSRTQKDKEFAENTENLKTKMSELRLCCDLLVQQVNKTKEVTTTGVSNSEEGIDVGTLLKSTCNTFLKTLEECMQIANAAFTSELLYRTPPGSPQLAMLKSSKKVNQKYITNKEEFTTLQKIVLHEVEADVAQVRNSATEALLWLKRGLKFLKGFLTEVKNGEKDIQTALSFSSNSCTCIWRLGPGDVLTLXRKRRLXRANAALXLQXSQPVSAFSSLSSPCGTIFNGKEKGGCKFDIFVLMFRLISKKTQTQQALRKRFFEKCLHNSYSEPVGSLMHISSGIMVPFSHFEVPAFISRTDTLFEMREDNAYGKTLRQHHGWVVRGVFALALRAAPSYEDFVAALTVKEGDHQKEAFSIGMQRDLSLYLPAMEKQLAILDTLYEVHGLESDEVLYPLGCLDCCPEGEQSWFQKKNVFGCLSQLPVGRGVQLPCGHEGPAKENRVWLCMPLAITPESAEAQNRDNHLWSSVVRVDGELMNDDGLTSALRTQITFGMICCVNALSSENKVVASLLTLVRFTAAPSLPTLHCVSRHLQVEDPHLVMSVCECGTTISLPEPRSQLQCSTAVSQLEDSRRMAEH

SEQ ID NO: 9308 - protein, 126 aa, Homo sapiens
  misc_feature (1)...(126): Xaa = X or * as defined in Table 2
NMVQTTCGPGLMSTPCTGPAQARRXKWLVVECLSLTGMGPGEGRGQGAAEAEPNXVLGTPAGGSGPCPPGIQQTPPSPHQPHSQVLSSLSPTPRICPGFLAYLLSLFTPREELQLTQNDTFLAPRV

SEQ ID NO: 9309 - protein, 21 aa, Homo sapiens
  misc_feature (1)...(21): Xaa = X or * as defined in Table 2
FLILNCNSFXKIYPKYKSLIR

SEQ ID NO: 9310 - protein, 107 aa, Homo sapiens
  DOMAIN (62)..(77): PROFILIN SIGNATURE domain identified by eMATRIX, accession number PR00392D, p-value=8.773e-14, raw score of 12.00
  DOMAIN (44)..(107): Profilins domain identified by PFam, accession name profilin, E-value=1.2e-17, PFam score of 68.0
VYNLYLAPTAGWFSEVEDRWVFGEHGGNLGALTNLMGAWFLFQPAEVGVLVGKDRSSFYVNGLTLGGQKCSVIRDSLLQDGEFSMDLRTKSTGGAPTFNVTVTKTDK

SEQ ID NO: 9311 - protein, 313 aa, Homo sapiens
  DOMAIN (80)..(94): Profilin proteins domain identified by eMATRIX, accession number BL00414A, p-value=6.250e-12, raw score of 13.85
  misc_feature (1)...(313): Xaa = X or * as defined in Table 2
IFKIAFAKFGVWAGEWGREGMGSRKWSARAAAQRAEPRSGRQRVPRALRLPPARQPRQLEPSPRPPAAAPESSPSSSAMAGWNAYIDNLMADGTCVTGAIVRYQDSEPPFWHAVPGKTRFVNITPAEVGCPWLAKTRSSFLRXMGLTLWGGQKCSVNRGLHCLQEWGIIACDLRYQEPPGGAPHLSIVTCHPRLNKDAKSWLMGQRKVSHGGLTNKKCYEMASHLSGFPSTDLRLVPFPLSPFPTAFAPLSLPIHTQTNFYFLGPLPHTPYCCQNHMGLGGQGLMGQTPSPTHIPSRVWLEKLLFFGVFFFSE

SEQ ID NO: 9312 - protein, 269 aa, Homo sapiens
  misc_feature (1)...(269): Xaa = X or * as defined in Table 2
NHLEIVNLCNVGISQSFPQIXLKAQATKEKINCIPIKLKTFGTEKYIIKNVKRQYIEXQKISANHLSDKRLVFRIYFLKTITVQYXKDKPIIKXVKDLNRHFSKEDTYMTNKYMKRCXKSSTIREMXIKTTMRXTLPHYRWNIIKKTDNNNCXXGCGXTGILIHCWLECKIMYPIFRTVXQFPEKVKQHYPSDAAILLLGIYPRNMKSKCLPKNYTRMFITELLIILKKXKQLKCPINXXWIKXNDKMWXIHMIKYYSAIKRHRVLINA

SEQ ID NO: 9313 - protein, 225 aa, Homo sapiens
  misc_feature (1)...(225): Xaa = X or * as defined in Table 2
PVSWSLNSCRFFFFFXDQSLPSVVQAGSGQXRNLDSLQPLASRFKXFSSSRLLSSWDYRHMATMARLIFIFLVEMGFTMLARLVLNFLTSSDPPTSAFPKWLGLQGVKPNTRAVGFNXXLGYYSIILYHSNSPGTDLVFILFIYLFTYLFLRQEQNSAAQARVQXWHNLGSLQSPPPGVHXFLCLSLPSSWDYRCAPPHQANFCIFXRDGVFPCWPGWSRTPDLR

SEQ ID NO: 9314 - protein, 86 aa, Homo sapiens
  misc_feature (1)...(86): Xaa = X or * as defined in Table 2
MSPLSQFVDGTLLKIQCYYGFTEFHSVARLECIGMISAHCNLCLPGSSNSPASASXIAGIIAPCHHAPLIFVFLXRQGFTRIYFFK

SEQ ID NO: 9315 - protein, 147 aa, Homo sapiens
  DOMAIN (79)..(133): Tubulin subunits alpha beta, and gamma proteins. domain identified by eMATRIX, accession number BL00227F, p-value=1.000e- 40, raw score of 21.16
  DOMAIN (4)..(130): Tubulin/FtsZ family domain identified by PFam, accession name tubulin, E-value=3.5e-72, PFam score of 253.2
ILTMREIVHIQAGQCGNQIGAKFWEVISDEHGIDEQMLNVQNKNSSYFVEWIPNNVKTAVCDIPPRGLKMAVTFIGNSTAIQELFKRISEQFTAMFRRKAFLHWYTGEGMDEMEFTEAESNMNDLVSEYQQYQDATAKEEEDFGEEA

SEQ ID NO: 9316 - protein, 467 aa, Homo sapiens
  DOMAIN (44)..(99): Tubulin subunits alpha beta, and gamma proteins. domain identified by eMATRIX, accession number BL00227B, p-value=9.500e- 35, raw score of 19.29
  DOMAIN (1)..(463): Tubulin/FtsZ family domain identified by PFam, accession name tubulin, E-value=8.8e-105, PFam score of 361.5
  misc_feature (1)...(467): Xaa = X or * as defined in Table 2
IQAGQCGNQIGAKFWEVISDEHGIDPTGTYHGDSDLQLDRISVYYNEATGGKYVPRAILVDLEPGTMDSVRSGPFGQIFRPDNFVFGQVWGQVTTWAKGHYTEGAELVDSVLDVVRKEAESCDCLQGFQLTHSLGGGTGSGMGTLLYQQGFEKEYPDRIMNTFSVVPSPKCLDTVVEPYNATLSVHQLVENTDETYCIDNEALYDICFRTLKLTTPTYGDLNHLVSATIECVVTTCLRFPGQLNADLRKLAVNMVPFPRLHFFMPGFAPLTSRGSQQYRALTVPELTPARSFDAKNMMAACDPRQGPINFNRGLLSSRGSGCPMKEGRMKQMLXRCKNKNSSYFCGNESPNNVKTAVCDIPTSWASKMAVTFIGQXHSPSQELFKRISEQFTAMFRRKAFLHWYTGEGMDEMEFTEAESNMNDLRLXSIKQLPRMPTQEEEEDFGEEARKRRPKGRAPNQLKASQFP

SEQ ID NO: 9317 - protein, 379 aa, Homo sapiens
  misc_feature (1)...(379): Xaa = X or * as defined in Table 2
KSGGLRRRQRPGRSAAVGEEELPPGMEKFKAAMLLGSVGDALGYRNVCKENSTVGMKIQEELQPVGGLGHLVLSPGEWPVSDNTIMHIATAEALTTDYWCLDDLYREMVRCYVEIVEKLPERRPDPATIEGCAQLKPNNYLLAWHTPFNEKGSGFGAATKAMCIGLRYWKPERLETLIEVSVECGRMTHNHPTGFLGSLCTALFVSFAAQGKPLVQWGRDMLRAVPLAEKYCRKTIRHTAEYQEHWFYFEAKWQFYLEERKISKDSKNKAIFPDNYDAEEREXTYRKWSSEGRGGRRGHDAPMIAYDALLAAGNSWTELCHRAMFHGGESAATGTIAACLFGLLYGLDLVPKGLSQDLEDKEKLEDLGAALYRLSTEKK

SEQ ID NO: 9318 - protein, 75 aa, Homo sapiens
  DOMAIN (2)..(67): Transcription initiation factor IIA, gamm domain identified by PFam, accession name TFIIA_gamma, E-value=2.6e-31, PFam score of 117.5
AMAYQLYRNTTLGNSLQESLDELIQGSLNTYRFCDNVWTFVLNDVEFREVTELIKVDKVKIVACDGKNTGSNTTE

SEQ ID NO: 9319 - protein, 139 aa, Homo sapiens
  DOMAIN (2)..(114): Transcription initiation factor IIA, gamm domain identified by PFam, accession name TFIIA_gamma, E-value=0.00031, PFam score of -1.6
  misc_feature (1)...(139): Xaa = X or * as defined in Table 2
AMAYQLFRILPLETSFQESLDXLIQSQQITPPTCPFKFYLQLDRAINAALAQRVRNRVNFRGSPKYGTRFCDNVGDFWYRNDVEFQRGXPEPIKRGXKXKLVACDGKNTGLPIPTEWNRKKYDFFYTHLLLFIAFEREA

SEQ ID NO: 9320 - protein, 56 aa, Homo sapiens
  misc_feature (1)...(56): Xaa = X or * as defined in Table 2
QEKLFIXVLCFNFFSFFFFFFCFLVDXFXFLFGKGAVXTLFVFSSASHRYRQGKTR

SEQ ID NO: 9321 - protein, 73 aa, Homo sapiens
  DOMAIN (28)..(66): ATP synthase delta (OSCP) subunit proteins domain identified by eMATRIX, accession number BL00389C, p-value=6.760e-25, raw score of 20.13
  DOMAIN (8)..(69): ATP synthase delta (OSCP) subunit domain identified by PFam, accession name OSCP, E-value=2.5e-24, PFam score of 85.8
KDGFAFQPLEEATLSELKTVLKSFLSQGQVLKLEAKTDPSILGGMIVRIGEKYVDMSVKTKIQKLGRAMREIV

SEQ ID NO: 9322 - protein, 115 aa, Homo sapiens
  misc_feature (1)...(115): Xaa = X or * as defined in Table 2
SPQIRKQEISISLLTDGTILYIENPKESPPPKLLKVIKFNKATRFKINMQKSVVFLHPRNQFENEFKKILSFGTEPSRSEYLGINITKEVXNLNTKNDIVEKMKELLSKWKDSPC

SEQ ID NO: 9323 - protein, 243 aa, Homo sapiens
  DOMAIN (196)..(234): ATP synthase delta (OSCP) subunit proteins domain identified by eMATRIX, accession number BL00389C, p-value=1.000e-22, raw score of 20.13
  DOMAIN (54)..(243): ATP synthase delta (OSCP) subunit domain identified by PFam, accession name OSCP, E-value=0.019, PFam score of 11.9
  misc_feature (1)...(243): Xaa = X or * as defined in Table 2
ILGFDLQPPGRRWAAPAVSGLSRKVRCFSTGXVRPFAKLVGPSVQVYGIEGRYATALYSAASKQNKLEQLEKELLRVAQNPRRNPKVACFLFLNPLCESRSIKSEKALNDITSKKRRFSPPSTTQLLNQFCLAGKMGPIXANNPKGVVSGLFLTMDGVFHSRERVPLHSGPLASSFRKESHTLLNLKTVLKEFPKVKGQVLELGAKTDPSILGGMIVRIGEKYVDMSVKTKIQKLGRAMREIV

SEQ ID NO: 9324 - protein, 123 aa, Homo sapiens
  DOMAIN (60)..(73): LUTEOVIRUS ORF6 PROTEIN SIGNATURE domain identified by eMATRIX, accession number PR00910A, p-value=8.500e-09, raw score of 2.51
  DOMAIN (71)..(114): Hsp20/alpha crystallin family domain identified by PFam, accession name HSP20, E-value=5.7e-06, PFam score of 26.4
  misc_feature (1)...(123): Xaa = X or * as defined in Table 2
ATEPLAPSERREVSIPLLVPAPLPPPPRPPVPSRTRTRPWRRPXACFPMTLAASCGPTRSPWPSQQPIPQPAPVGPGNIKTLGDAYEFAVDVRDFSPEDIIVTTSNNHIEVRAEKLAADGTVM

SEQ ID NO: 9325 - protein, 165 aa, Homo sapiens
  DOMAIN (136)..(158): ALPHA CRYSTALLIN SIGNATURE domain identified by eMATRIX, accession number PR00299F, p-value=3.392e-09, raw score of 13.20
  DOMAIN (70)..(153): Hsp20/alpha crystallin family domain identified by PFam, accession name HSP20, E-value=2.7e-12, PFam score of 49.0
LWQLHAAPLGAPGLPRQVIRALRGGEVHREGTSAPGRHRRRCGCPVGLEQVLHSLQPCVATKTDVATGTDVAMKTGNIKTLGDAYEFAVDVRDFSPEDIIVTTSNNHIEVRAREAERPDGTVMNTFAHKCQLPEDVDPTSVTSALREDGSLTIRAWRHPHTEHVQ

SEQ ID NO: 9326 - protein, 201 aa, Homo sapiens
  DOMAIN (109)..(191): Hsp20/alpha crystallin family domain identified by PFam, accession name HSP20, E-value=0.00078, PFam score of 18.7
  misc_feature (1)...(201): Xaa = X or * as defined in Table 2
KKLTPVVRSRVERDPRVRRGLRPHPVLSSLRPPGQGPAPSVDEPQNLFHLPSGEKIPFLFLLLLLFTPPPRPPVLSRPRTRPWRRPXACFPMTLAAICGPTRSPWPSQPAPVVAGNIKTLXDAYEFVVDVRDFSPEDIIVTTSNNHIEVRPEKLAADGTVMNTFAHKCQLPEDVDPTSETSALGEDGRLTIRARGHPHTEH

SEQ ID NO: 9327 - protein, 93 aa, Homo sapiens
  misc_feature (1)...(93): Xaa = X or * as defined in Table 2
KGIIWYINMEEQFVIXIHFLXTRSQFYFVNITFKYIYTHIYVQLYIHVHMICKFIFIYNIFIXIDICRQVIDYRDPRKQLNNCSKFSSLTAGV

SEQ ID NO: 9328 - protein, 43 aa, Homo sapiens
  misc_feature (1)...(43): Xaa = X or * as defined in Table 2
SRRDHSFILXILHLSIYIHTYMYNYIYMCIYMYQRKQYGKTNP

SEQ ID NO: 9329 - protein, 149 aa, Homo sapiens
  misc_feature (1)...(149): Xaa = X or * as defined in Table 2
TPKTKHNSNPFSVPHAHKFACSYFFFCLCVFMGSKLNLLAIYKNVNSKLYLLRNVIFFXFIFTQLFILIYFFYTVLNTQTYFLFMIFLSCSHGICFPILFSLISITGWDLTNNNVRGRKYFATVDYYTLKFYIMKIYNSLYASKKKKKA

SEQ ID NO: 9330 - protein, 75 aa, Homo sapiens
  misc_feature (1)...(75): Xaa = X or * as defined in Table 2
MSQNTGNIISIPYQDGLPVISMIVLKRYMKEQWPSFRLKLKRLNXXXXXXXXXXXXXXXXXXXXXXXXXXXXXXX

SEQ ID NO: 9331 - protein, 148 aa, Homo sapiens
LLRRVSVTAVAALSGRPLGTRLGFGGFLTRGFPKAAAPVRHSGDHGKRLFVIRPSRFYDRRFLKLLRFYIALTGIPVAIFITLVNVFIGQAELAEIPEGYVPEHWEYYRVKELEVRKLMHVRGDGPWYYYETIDKELIDHSPKATPDN

SEQ ID NO: 9332 - protein, 208 aa, Homo sapiens
  misc_feature (1)...(208): Xaa = X or * as defined in Table 2
HASAHASAMSLLRRVSVTAVAALSGRPLGTRLGFGGFLTRGFPKAAAPVRHSGDHGKRLFVIRPSRFYDRRFLKLLRIHLALTGLPVTIFIALVNVFIGQAELAEFPEGYVPEHWGILLRHPISKMGFARXFLMIGPEKDIMERNNGPSFQIGSLKKAGIYGVKGSWEVRKIXWHVEEGDGPWVLLWRPFDQGTLLDHSSRKPTPWTN

SEQ ID NO: 9333 - protein, 121 aa, Homo sapiens
  misc_feature (1)...(121): Xaa = X or * as defined in Table 2
FLTGTQWGKDSPFNTWCXDHWNIHRNLDLYLIPYIKINLKQLTGPNLRAKTIKLPEQNIGENLCDLXLSRERYSTKSITRIRKLDTLGFIKIKNKCISKDTIRKRXATDWEKIFANHVLKG

SEQ ID NO: 9334 - protein, 64 aa, Homo sapiens
  misc_feature (1)...(64): Xaa = X or * as defined in Table 2
SNFTGKIHKXLTSFKIVNLFIYLFFETGFHSLTRLECSGMILAHCNLRFPESRKLFFFGAIDSF

SEQ ID NO: 9335 - protein, 94 aa, Homo sapiens
  misc_feature (1)...(94): Xaa = X or * as defined in Table 2
MSPAKATEMLIFGKKLTAGEACAQGLVTEVFPDSTFQKEVWTRLKAFCKLSPNCLEIFKEVXRKRERXKLXAVNAEECNVLQGRWLSDECTNAV

SEQ ID NO: 9336 - protein, 482 aa, Homo sapiens
  DOMAIN (111)..(161): Acyl-CoA-binding protein domain identified by eMATRIX, accession number BL00880, p-value=3.953e-23, raw score of 17.52
  DOMAIN (81)..(171): Acyl CoA binding protein domain identified by PFam, accession name ACBP, E-value=1.9e-14, PFam score of 61.4
  misc_feature (1)...(482): Xaa = X or * as defined in Table 2
SSSSGLALGMQRPLLARLRGTPGRALSAPAATGFAELRAAQGMAMAYLAWRLARRSCPSSLQVTSFPVVQLHMNRTAMRASQKDFENSMNQVKLLKKDPGNEVKLKLYALYKQATEGTCKMPKPGVFDLINKAKWDAWNALGSLPQGSCPGXNYVDLVSSLSPSIGNPPSQVEPGTERDNQLGFETLVVTSEDGITKIMFNRPKKKNAINTEMYHEIMRALKAASKDDSIITVLTGNGDYYSSGNDLTNFTDIPPGVGVEEKANTNAVLLREFVGCFIDFPKPLDCSGSMGPSCGASPVTLLGAYSMPVLLHLDRGTFHTPFXSPXAQSPEGCSSYTFPKIMSPAKATEMPFIFGKEVNQREEACASRDLFTEGFPWIALFRKKVWDQGXRAFCKSFPPQMALEEFSKEVIRKREREKLHAVKAEECQCPFQGKWLSDECTNAVVNFLSQKIKNCDDHLQQHQSMSQGRMCCSLCLSSTGTK

SEQ ID NO: 9337 - protein, 79 aa, Homo sapiens
MSQAAASHKSKLTPKNQRAPFTLLRKSQCQDPSRGESEEGWWPIQRACRSMETFLPQMFQSWHQIYKNVSRDQFFTLSK

SEQ ID NO: 9338 - protein, 138 aa, Homo sapiens
  misc_feature (1)...(138): Xaa = X or * as defined in Table 2
LSTPLTSWCWMRRTTPGSPTTRCSCSSAPGTQPLGGGHQXRGCHQCVASSPRXAWPASGPAKLQXLQQPKTQQRAPATGEHVPPVQPSAQXPHSRFQSSETSRPADGSEQQPARASGPGARRPPHQPRQVINCWLRRC

SEQ ID NO: 9339 - protein, 70 aa, Homo sapiens
  misc_feature (1)...(70): Xaa = X or * as defined in Table 2
LLWWFRLRSSPCGTQQGPWHLVCVYGYAGGWAGPPWHTCPWDPSHCPGTEXCPWCVWFCFFCNTYLLVPN

SEQ ID NO: 9340 - protein, 91 aa, Homo sapiens
  misc_feature (1)...(91): Xaa = X or * as defined in Table 2
PHSRFQSSETSRPADGSEQQPARASGPGARRPPHQPRFHPPPSARAISIECPAXAVMRSGSEPRARQEYSLGLWTPSQFLQGILYLARSPT

SEQ ID NO: 9341 - protein, 153 aa, Homo sapiens
  misc_feature (1)...(153): Xaa = X or * as defined in Table 2
TTNNIFKWAKYFKRHFSRDIXMANEHMKRCLTSLTIMEMQIKTTIRCHLTPRMPIIKKIIKCXXGWRETGTLIYAWWECKIVQPAFRTVWQFLKRLSQHPTIPFPGMCPRETKTHIHSKTYTQMFMAALFIEARKWKQFKCLSTNEWTNVVRP

SEQ ID NO: 9342 - protein, 107 aa, Homo sapiens
RVFLSYQLTLFSSQDDIIDDVESFVAAAEILKERGAYKIYVMATHGILSAEAPRLIEESSVDEVVVTNTVPHEVQKLQCPKIKTVDISLILSEAIRRIHNGESMAYL

SEQ ID NO: 9343 - protein, 102 aa, Homo sapiens
AKRAQSYAERLRLGLAVIHGEAQCTELDMDDGRHSPPMVKNATVHPGLELPLMMAKEKPPITVVGDVGGRIAIIVVWLYVIHVQRWHSWLLVSRLSTLGLYF

SEQ ID NO: 9344 - protein, 381 aa, Homo sapiens
  DOMAIN (265)..(316): Phosphoribosyl pyrophosphate synthetase proteins domain identified by eMATRIX, accession number BL00114D, p-value=8.000e- 29, raw score of 21.45
  DOMAIN (162)..(347): Phosphoribosyl transferase domain identified by PFam, accession name Pribosyltran, E-value=0.055, PFam score of -1.7
  misc_feature (1)...(381): Xaa = X or * as defined in Table 2
VRKGTDLGALPVPPPAMNAARTGYRVFLANSTAVCSELAKRITERLGAELGKSVVYQETNGETRVEIKESVRGQDIFIIQTIPRDVNTAVMELLIMAYALKTACARNIIGVIPYIPYSKQSKMRKRGSIVCKLLASMLATAGLTHIITMDLHQKEIQGFFSFPVDNLRSLHLFLAFSIIQGRKFPNLQEMQVIVGXVFLDAGKGGAQSYAERLRLGFWAVHSRGEGFSCTKLDMDDGRHSPPMVKNATVHPGLELPLMMAKEKPPITVVGDVGGRIAIIVDDIIDDVESFVAAAEILKERGAYKIYVMATHGILSAEALRLIEESSVDEVVVTNTVPHEVQKLQCPKIKTVDISLILSEAIRRIHNGESMAYLFRNITVDD

SEQ ID NO: 9345 - protein, 107 aa, Homo sapiens
  DOMAIN (31)..(50): OSTEOPONTIN SIGNATURE domain identified by eMATRIX, accession number PR00216F, p-value=3.700e-23, raw score of 11.79
  DOMAIN (2)..(107): Osteopontin domain identified by PFam, accession name Osteopontin, E-value=0.0067, PFam score of -44.8
  misc_feature (1)...(107): Xaa = X or * as defined in Table 2
XVPTVDTYDGRGDSVVYGLRSKSKKFRRPDIQYPDATDEDITSHMESEELNGAYKAIPVAQDLNAPSDWDSRGKDSYETSQLDDQSAETHSHKQSRLYKRKAYDESH

SEQ ID NO: 9346 - protein, 46 aa, Homo sapiens
  misc_feature (1)...(46): Xaa = X or * as defined in Table 2
MXXXXXXXXXXXXXXXXXXXXXXXXXKKXXXKKXXXQKXXXXGPFF

SEQ ID NO: 9347 - protein, 84 aa, Homo sapiens
  DOMAIN (24)..(52): !!!! PROTEIN ALU SUBFAMILY WARNING ENTRY NUCLEAR PHOSPHO domain identified by eMATRIX, accession number PD02454B, p-value= 1.887e-16, raw score of 11.61
  misc_feature (1)...(84): Xaa = X or * as defined in Table 2
LLQAGAHACNPSGFGEAKAGGSTDLRSGDQPGQHGETPSLLKVQKVAXRGGAPLXSQLLRGGGGCSEPRSHDXIPAWMTEGDSV

SEQ ID NO: 9348 - protein, 207 aa, Homo sapiens
  DOMAIN (29)..(59): Osteopontin proteins domain identified by eMATRIX, accession number BL00884A, p-value=8.615e-32, raw score of 11.35
  DOMAIN (29)..(207): Osteopontin domain identified by PFam, accession name Osteopontin, E-value=1.4e-56, PFam score of 201.4
EHSIVGTRLVSGQLQPSQPNADQGKLTTMRIAVICFCLLGITCAIPVKQADSGSSEEKQLYNKYPDAVATWLNPDPSQKQNLLAPQTLPSKSNESHDHMDDMDDEDDDGPCGDSQDSIDSNDSDDVDDTDDSHQSDESHHSDESDELVTDFPTDLPATEVFTPVVPTVDTYDGRGDSVVYGLRSKSKKFRRPDIQVNPLTDTPDGSD

SEQ ID NO: 9349 - protein, 397 aa, Homo sapiens
  DOMAIN (74)..(104): OSTEOPONTIN SIGNATURE domain identified by eMATRIX, accession number PR00216B, p-value=4.886e-33, raw score of 7.89
  DOMAIN (37)..(371): Osteopontin domain identified by PFam, accession name Osteopontin, E-value=3.2e-151, PFam score of 515.8
  misc_feature (1)...(397): Xaa = X or * as defined in Table 2
SHASGRRQSTASSGPDSVSGQLQPSQPNADQGKLTTMRIAVICFCLLGITCAIPVKQADSGSSEEKHFYNKYPDAVATWLNPDPSHKQNLLAPQNAVSSEETNDFKQETLPSKSNESHDHMDDMDDEDDDDHVDSQDSIDSNDSDDVDDTDDSHQSDESHHSDESDELVTDFPTALPATEVFTPVVPTVDTYDGRGDSVVYGLRSKSKKFRRPDIKYPDATDEDITLHMESEELNGAYKAIPVAQDLNAPSDWDSRGKDSYETSQLDDQSAETHRHQQSRLYKRKANDESNEHSDCDWXARTFPKVSREFHSHEFSSPWRFCLFVAPKSREEDNTPLEFRYSQELDSASSGGQLKGGKNTISPLCHLVQKKNGFIAKMKENHEMLLSPVYWLKCVSI

SEQ ID NO: 9350 - protein, 217 aa, Homo sapiens
  DOMAIN (189)..(210): Glyceraldehyde 3-phosphate dehydrogenase proteins domain identified by eMATRIX, accession number BL00071E, p-value=9.100e- 18, raw score of 11.48
  DOMAIN (3)..(217): glyceraldehyde 3-phosphate dehydrogenases domain identified by PFam, accession name gpdh, E-value=1.8e-86, PFam score of 291.5
MTAFNSGKVDIVAINDPFIDLNYMVYMFLYDSTHGKFHGTVKAENGTLVINGNPITIFQDQDPSKIKWAPLAKVIHDNFGIIEGFMTTVHTITATQTINGPSGNCHVMAAGLSRTSSLSLLALAKPVGKVIPELNGKLTGMAFHVPTANVSVADLTCRLEKPAKYDDIKKNTHSSTFDAGAAIVLKDHSVKLISWYDNEFGYSNRVVHLMAHNASKE

SEQ ID NO: 9351 - protein, 1754 aa, Homo sapiens
  DOMAIN (847)..(874): Anaphylatoxin domain proteins domain identified by eMATRIX, accession number BL01177E, p-value=3.057e-22, raw score of 20.64
  DOMAIN (25)..(647): Alpha-2-macroglobulin family N-terminal regi domain identified by PFam, accession name A2M_N, E-value=0, PFam score of 1072.6
TRSAPRAASWLEDPREVRSVCLSATFFTLSLQKPRLLLFSPSVVHLGVPLSVGVQLQDVPRGQVVKGSVFLRNPSRNNVPCSPKVDFTLSSERDFALLSLQVPLKDAKSCGLHQLLRGPEVQLVAHSPWLKDSLSRTTNIQGINLLFSSRRGHLFLQTDQPIYNPGQRVRYRVFALDQKMRPSTDTITVMVENSHGLRVRKKEVYMPSSIFQDDFVIPDISEPGTWKISARFSDGLESNSSTQFEVKKYVLPNFEVKITPGKPYILTVPGHLDEMQLDIQARYIYGKPVQGVAYVRFGLLDEDGKKTFFRGLESQTKLVNGQSHISLSKAEFQDALEKLNMGITDLQGLRLYVAAAIIESPGGEMEEAELTSWYFVSSPFSLDLSKTKRHLVPGAPFLLQALVREMSGSPASGIPVKVSATVSSPGSVPEAQDIQQNTDGSGQVSIPIIIPQTISELQLSVSAGSPHPAIARLTVAAPPSGGPGFLSIERPDSRPPRVGDTLNLNLRAVGSGATFSHYYYMILSRGQIVFMNREPKRTLTSVSVFVDHHLAPSFYFVAFYYHGDHPVANSLRVDVQAGACEGKLELSVDGAKQYRNGESVKLHLETDSLALVALGALDTALYAAGSKSHKPLNMGKVFEAMNSYDLGCGPGGGDSALQVFQAAGLAFSDGDQWTLSRKRLSCPKEKTTRKKRNVNFQKAINEKLGQYASPTAKRCCQDGVTRLPMMRSCEQRAARVQQPDCREPFLSCCQFAESLRKKSRDKGQAGLQRALEILQEEDLIDEDDIPVRSFFPENWLWRVETVDRFQILTLWLPDSLTTWEIHGLSLSKTKGLCVATPVQLRVFREFHLHLRLPMSVRRFEQLELRPVLYNYLDKNLTVSVHVSPVEGLCLAGGGGLAQQVLVPAGSARPVAFSVVPTAAAAVSLKVVARGSFEFPVGDAVSKVLQIEKEGAIHREELVYELNPLDHRGRTLEIPGNSDPNMIPDGDFNSYVRVTASDPLDTLGSEGALSPGGVASLLRLPRGCGEQTMIYLAPTLAASRYLDKTEQWSTLPPETKDHAVDLIQKGYMRIQQFRKADGSYAAWLSRDSSTWLTAFVLKVLSLAQEQVGGSPEKLQETSNWLLSQQQADGSFQDPCPVLDRSMQGGLVGNDETVALTAFVTIALHHGLAVFQDEGAEPLKQRVEASISKANSFLGEKASAGLLGAHAAAITAYALSLTKAPVDLLGVAHNNLMAMAQETGDNLYWGSVTGSQSNAVSPTPAPRNPSDPMPQAPALWIETTAYALLHLLLHEGKAEMADQASAWLTRQGSFQGGFRSTQDTVIALDALSAYWIASHTTEERGLNVTLSSTGRNGFKSHALQLNNRQIRGLEEELQFSLGSKINVKVGGNSKGTLKVLRTYNVLDMKNTTCQDLQIEVTVKGHVEYTMEANEDYEYDELPAKDDPDAPLQPVTPLQLFEGRRNRRRREAPKVVEEQESRVHYTVCIWRNGKVGLSGMAIADVTLLSGFHALRADLEKLTSLSDRYVSHFETEGPHVLLYFDSVPTSRECVGFEAVQEVPVGLVQPASATLYDYYNPERRCSVFYGAPSKSRLLATLCSAEVCQCAEGKCPRQRRALERGLQDEDGYRMKFACYYPRVEYGFQVKVLREDSRAAFRLFETKITQVLHFTKDVKAAANQMRNFLVRASCRLRLEPGKEYLIMGLDGATYDLEGHPQYLLDSNSWIEEMPSERLCRSTRQRAACAQLNDFLQEYGTQGCQV

SEQ ID NO: 9352 - protein, 426 aa, Homo sapiens
  DOMAIN (141)..(155): GLYCERALDEHYDE-3-PHOSPHATE DEHYDROGENASE SIGNATURE domain identified by eMATRIX, accession number PR00078A, p-value=1.000e- 15, raw score of 10.38
  DOMAIN (32)..(397): glyceraldehyde 3-phosphate dehydrogenases domain identified by PFam, accession name gpdh, E-value=2.7e-69, PFam score of 234.1
  misc_feature (1)...(426): Xaa = X or * as defined in Table 2
IRLSVCSSCSTVSRIFFCVASRATSLRTPMGKVKVGVNGFGRIGRLVTRAAFNSGKVDIVAINDPFIDLNYMVYMFQYDSTHGKFHGTVKAENGKLVINGNPITIFQERDPSKIKWGDAGAEYVVESTGVFNQPWKKAGAHLQGGAKRVIISAPSCLMPPMFVMGVNHEKYDNSLKIISNAFLQPPTCLAPLAKGXFHDNFGXSWEGLIDHSSMAITGNPRKTVDGPSRGNCGRGWAAGLSRTSSLGLYWALPKAVGKGHPXGXTGKLTGMAFPVVPNCQNVSVVDLTCRSRKTLPQYDXHQGRVVKQASEGPPQGAILGYTEAPRWVSSDCNSGPPVFPPFDAGAGIALNDHFVKLISWYDNEFGYSNRVVDLHGPHGLQGSKTPGTTEPQARGTRGRDETLTAGESLPHSDPHHTESPLLTVAM

SEQ ID NO: 9353 - protein, 144 aa, Homo sapiens
  DOMAIN (70)..(97): Macrophage migration inhibitory factor family proteins domain identified by eMATRIX, accession number BL01158B, p-value=7.075e- 21, raw score of 17.07
  DOMAIN (28)..(144): Macrophage migration inhibitory factor (MIF) domain identified by PFam, accession name MIF, E-value=4.5e-05, PFam score of 18.7
  misc_feature (1)...(144): Xaa = X or * as defined in Table 2
LSGGPRRAASCASSAGLLVLLPFMPMFIVNTKLHRASLPEGFLSKLTQQLAQANRQAPPNXFAFNVFPDQVYSFGGSSEPCALCSLHSIGKIGGAPDPAPYSKLLCGPAGRSRLPIQARTRVYINYYDMNRGQMWAGNNFHLSP

SEQ ID NO: 9354 - protein, 135 aa, Homo sapiens
  misc_feature (1)...(135): Xaa = X or * as defined in Table 2
QQPPPERPAHQFARPPAPFTMQPASAKWYDRRDYVFIEFCVEDSKDVNVNFEKSKLTFSKLSFLSNDVKXSFTQLNNFDWLVFSLKLLLIFVSLKRLNSFFIILYSCLGGSDNFKHLNEIDLFHCIDPNVSSLYA

SEQ ID NO: 9355 - protein, 279 aa, Homo sapiens
  misc_feature (1)...(279): Xaa = X or * as defined in Table 2
RAFCCVTSRRPASPPLVCTHARSFSVLAPLFLHFPLLPDRRSRSFRAVHFWGPRSSPPHAAVRLREARRGRDRREKAESPTGEKSTSPSSSRRQRGPPTKVRRPPAPFTMQPASAKWYDRRDYVLKWEFVFLNTLRDVNVNFEKSKTYNFSCLREGSDNFXGIXMEIDLFHCIDPNDFQGLKGTDRSIFMFVLRKRRIWASSWPKGLTKERGKGLIWVSVDFNNWKDWEDDSDEDMSNFDRFSEMMNNMGGDEVVDYPEVDGADDDSQDSDDEKMPYLE

SEQ ID NO: 9356 - protein, 90 aa, Homo sapiens
RRYRPTPGVHRADGLLHVRGREHVLQRRPEDLRCHSHCHPSHPTDRLLLLVIWTHLGGIWAGHSPWTVIQTAGRPPRDLSPSARPISSPP

SEQ ID NO: 9357 - protein, 95 aa, Homo sapiens
LPGLSGRDEASLWMGGGRGLLGRETLGPGGGCSGEGPLCYWPPPGSPPAPSLRASLPLEPPRCPLRSCSLPRSACLCSRCSWQPNRVSHFLLWTS

SEQ ID NO: 9358 - protein, 248 aa, Homo sapiens
  misc_feature (1)...(248): Xaa = X or * as defined in Table 2
RLTKRPETFPRRHPKLPTLKTPVAGATPLSPSHPDWPVFNPIPLTNRTXPPLQLQLRQPSRSCPETTQGPAISSEAELPVRSPPPPFRLFPTPEPGLSRQWPXEVEGTSRTPFFKAEGQKEGKVKEGKTEGPCSPSRRTRILPPYSRLESGPVHWGEQGPNRKSWPPPNLPDQGFXQEREEAMGHIPSPPGIRQRHRTSVQEXGSEIKPKXCPEPGKAFNPRPWGLGLTTRPLPLHSQKSRQDSXNTG

SEQ ID NO: 9359 - protein, 83 aa, Homo sapiens
RPAKRGAAMDGRVQLIKALLALPIRPATRRWRNPIPFPETFDGDTDRLPEFIVQTASYPPWARTRSSARPISSPPPETSCVLA

SEQ ID NO: 9360 - protein, 291 aa, Homo sapiens
  misc_feature (1)...(291): Xaa = X or * as defined in Table 2
KVTFLITRLTGPALQVGDPLHQEGEPPPQLITGAFWPEMKRVFGWGGGRGLLGRETLGPGGGCSGEGPLCYWPPPGSPPAPSFRASPPLEPPRCPLRSCSLPRSACLCSRNSAPGSCCRPWASLWSEPPPSPSSQPAPPMYIWTLSCAPVAQSXAPVTHWTDHPLPPLPSPLLPTRLPDDLHHFGPQTLRCQSHRHPSHPHRQDCWLLMXIWTHLGGIWAGHSPWTVIQTAGRPPRDLSPSARPISSPIPETFCAPATWLPGLSCAWQAKFESLIFSLWTKLVFAHKRSIS

SEQ ID NO: 9361 - protein, 58 aa, Homo sapiens
EKLRKFRFRKETDNAAIIMKVDKDRQMVVLEEEFQVFEIRTTDDLTEAWLQEKLSFFR

SEQ ID NO: 9362 - protein, 46 aa, Homo sapiens
  misc_feature (1)...(46): Xaa = X or * as defined in Table 2
MKVDKDRQMXVLEEEFQNISPEELKMELPERQPRLQRXTTDDVCRE

SEQ ID NO: 9363 - protein, 126 aa, Homo sapiens
  DOMAIN (17)..(123): Cofilin/tropomyosin-type actin-binding pr domain identified by PFam, accession name cofilin_ADF, E-value=4.3e-12, PFam score of 53.6
VDRTIMSDSLVVCEVDPELTEKLRKFRFRKETDNAAIIMKVDKDRQMVVLEEEFQFVVYSYKYVHDDGRVSYPLCFIFSSPVGCKPEQQMMYAGSKTRLVQTAELTKVQTGMWLQSVRERWCGSWV

SEQ ID NO: 9364 - protein, 179 aa, Homo sapiens
  misc_feature (1)...(179): Xaa = X or * as defined in Table 2
KTAELRKEEACGQNNHALPGSLRQSDSLVVCEVDPELTEKLRKFRFRKETDNAAIIMKVDKDPARWWCLEGKNFKNISPQRELKMGFPRRDKPRFVVYSYKYVHDDGRVSYPLCFIFPPRPVGCKPEQQMMYAGSKNRLVQTAELTKGVPKSRTTXLTSLRPWLQEKLSFLSLISGAGD

SEQ ID NO: 9365 - protein, 817 aa, Homo sapiens
  DOMAIN (65)..(80): FKBP-type peptidyl-prolyl cis-trans isomerase proteins domain identified by eMATRIX, accession number BL00453A, p-value=8.364e- 12, raw score of 15.57
  DOMAIN (50)..(105): FKBP-type peptidyl-prolyl cis-trans isomeras domain identified by PFam, accession name FKBP, E-value=1.7e-21, PFam score of 71.8
EILLCPSLPFNCQYILVLLGSRIRAREPPMAVQAVTQGPPKYTKSVLKKGDKTNFPKKGDVVHCWYTGTLQDGTVFDTNIQTSAKKKKNAKPLSFKVGVGKVIRGHVARKFLDDEAELSEEDAEYVSSDENDESENEQDSSLLDFLNDETQLSQAINAWFACKSPSIICVDDEVVSSVCAFFSSGSSDLYKTSEWKLSKLPQFLAEHKLLGNIKNVAKTANKDHLVTAYNHLFETKRFKGTESISKVSEQVKNVKLNEDKPKETKSEETLDEFIQLRRELASVNGHSGDDGPPGDDLPSGIEDITDPAKVTSLILKFVSGQLITEIENMRHRIIEIHQEMFNYNEHEVSKRWTFEEGIKRPYFHVKPLEKAQLKNWKEYLEFEIENGTHERVVVLFERCVISCALYEEFWIKYAKYMENHSIEGVRHVFSRACTIHLPKKPMVHMLWAAFEEQQGNINEARNILKTFEECVLGLAMVRLRRVSLERRHGNLEEAEHLLQDAIKNAKSNNESSFYAVKLARHLFKIQKNLPKSRKVLLEAIERDKENTKLYLNLLEMEYSGDLKQNEENILNCFDKAVHGSLPIKMRITFSQRKVEFLEDFGSDVNKAVTEVREVTRKSVPRNSLESAEYLKLITGLLNAKDFRDRINGIKQLLSDTENNQDLVVGNIVKIFDAFKSRLHDSNSKVNLVALETMHKMIPLLRDHLSPIINMLIPAIVDNNLNSKNPGIYAAATNVVQALSQHVGDTSRMFRRTKSYDSLLTTLIGAGIRILFSSCQEETADLLKELSLVEQRKNVGIHVPTVVNSNKTHFKKSPCMHK

SEQ ID NO: 9366 - protein, 336 aa, Homo sapiens
MVDKCRYHQRSLHKVSNSESKISSGLLLSRLQRRPRGRGDAELRRAGSVKRRQRGKMAAAVPQRAWTVEQLRSEQLPKKDIIKFLQEHGSDSAVQQVITNLLIGQIELRSEDSPDILTYSHERKVEKLIVPLGEELAAIQKTYIQIPEQDETYLEDSFCVDEEESCKGQSSEEEVCVDFNLITDDCFANSKKYKTRRAVMLKEMMEQNCAHSKKKLSRIILPDDSSEEENNVNDKRESNIAVNPSTVKKNKQQDHCLNSVPSGSSAQSKVRSTPRVNPLAKQSKQTSLNLKDTISEVSDFKPQNHNEVQSTTPPFTTVDSQKDCRKFPVPQKVLSE

SEQ ID NO: 9367 - protein, 289 aa, Homo sapiens
  DOMAIN (226)..(260): FKBP-type peptidyl-prolyl cis-trans isomerase proteins domain identified by eMATRIX, accession number BL00453B, p-value=1.818e- 17, raw score of 23.86
  DOMAIN (251)..(289): FKBP-type peptidyl-prolyl cis-trans isomeras domain identified by PFam, accession name FKBP, E-value=0.00011, PFam score of 18.6
  misc_feature (1)...(289): Xaa = X or * as defined in Table 2
MVDKCRYHQRSLHKVSNSESKISSGLLLSRLQRRPRGRGDAELRRAGSVKRRQRGKMAAAVPQRAWTVEQLRSEQLPKKDIIKFLQEHGSDSLLAEHKLLGNIKNVGKTANKDHLVTAYNHLFETKPFXGYLKVXSKVSEQVKKCERLMKINPKETKSERDPWNEGPPKYTKSCSXKRGDKTQLFPKRGDVVHCWYTGNTTKMGTVFXYLIFQTSAKKKEKCPSLXGFKVRSRPKLSRGWDEALLTMSKGEKARLEIEPEWAFGKKGLPDAKIPPNAKLTFEVELVDID

SEQ ID NO: 9368 - protein, 169 aa, Homo sapiens
  DOMAIN (13)..(52): Ribosomal L29e protein family domain identified by PFam, accession name Ribosomal_L29e, E-value=1.6e-08, PFam score of 41.8
  misc_feature (1)...(169): Xaa = X or * as defined in Table 2
AIRAVAYCADMAQSMNHTTLHQSRIWHRIGIKKPRSQTDQSLTGVDPMFLKNMRFAKKHNNMGLKRMQANNAKAMSARAEAIKALVKPKEAYLXIPNGVSRKLDPLAYIAHPKLAKRALARIAKGLKLCRPEALAEARAKDQTKVQGVAPAXAPAHAPKRTQAPTKASE

SEQ ID NO: 9369 - protein, 147 aa, Homo sapiens
  misc_feature (1)...(147): Xaa = X or * as defined in Table 2
LSPRLECSGAIXAHCNLRPPGFKQFSCLSLSSSWDYRHAPPTPQLIWFWYFKXRPGFQLVLVQAGLELLTLXIPPASASQKCWDYQVXAPHWPALYKVSYXEKWFPIMFFAPFSWLSLGTEKFVRKVKVAGLGTLPTGWALCSLWKY

SEQ ID NO: 9370 - protein, 218 aa, Homo sapiens
  DOMAIN (42)..(86): Ribosomal L29e protein family domain identified by PFam, accession name Ribosomal_L29e, E-value=0.0049, PFam score of 23.5
  misc_feature (1)...(218): Xaa = X or * as defined in Table 2
IERLQVRIACSCRDAIPGSSHASAHASEALREPRLNGADMAKSKNHTTNNQSRKWPRNGIKKPRSQRYEFSXRGWPPQVSLRNMRFAQRSTNKKGPXRRLQANKLPRAMSATCPRLIKAPPLKAPRRFKPQDPPKGVSRKLDRLAYIAQPQGLGSVARCPXLPRGPRLCPPKAKGQGQGQAKAKDQTKGFKPRPRVQAPVSVSVQAPKRTQAPTKASE

SEQ ID NO: 9371 - protein, 135 aa, Homo sapiens
  misc_feature (1)...(135): Xaa = X or * as defined in Table 2
RENCILLSTRAQSVFNAQGTALWSFQDPATGEGGAGHGGRLMRPSLLPSQGASACXPRFGESKLAPVGKFPKMCLLELPFLSHHLSRGCSGASEGQLCLLEVPATARVGVHKPSQSRGLEFSWVLMSDLCSGPPL

SEQ ID NO: 9372 - protein, 108 aa, Homo sapiens
  misc_feature (1)...(108): Xaa = X or * as defined in Table 2
TCGLPMCQKQTVSWGGKTPSLRRFPPQRPRPPRGQPPSGARWEHPPPGTTAPRRSRRPSPPARLAGPEPXAKSPLHAANSRGQTKGHLWKTLVLVFKKPNFFFFNFHN

SEQ ID NO: 9373 - protein, 138 aa, Homo sapiens
  misc_feature (1)...(138): Xaa = X or * as defined in Table 2
NQINFCLNGKYTYICIDTLPLYMFNIHTLKHINTSVIISLEFAIXHKGQVELHIKITYRSNXMWLGHNQRRNLCPQEGEEIPNEAXIFSIIKRQSWPGTVAHACNLITLGGXDGRISXDQVFKTSLINIVETPSLLKK

SEQ ID NO: 9374 - protein, 105 aa, Homo sapiens
NHPFKLRNPGGPGVVPVAMIPGMRGHKPFWLTLPLGRAQLSLDTLISLQSFLGSRGSYSSNRRKSISGSRQPHVSDSLLNSRQNYKNYSMESRTHFRIQAATLQA

SEQ ID NO: 9375 - protein, 640 aa, Homo sapiens
  misc_feature (1)...(640): Xaa = X or * as defined in Table 2
VETPPQGSVHSGHLGSVVGDPHTGTGNAGERGPRGKGARVLALDSGGMDSSPSLPLIRTPESSLHEALDQCMTALDLFLTNQFSEALSYLKPRTKESMYHSLTYATILEMQAMMTFDPQDILLAGNMMKEAQMLCQRHRRKSSVTDSFSSLVNRPTLGQFTEEEIHAEVCYAECLLQRAALTFLQGSSHGGAVRPRALHDPSHACSCPPGPGRQHLFLLQDENMVSFIKGGIKVRNSYQTYKELDSLVQSSQYCKGENHPHFEGGVKLGVGAFNLTLSMLPTRILRLLEFVGFSGNKDYGLLQLEEGASGHSFRSVLCVMLLLCYHTFLTFVLGTGNVNIEEAEKLLKPYLNRYPKGAIFLFFAGRIEVIKGNIDAVSDGGPGRGWGSLGVSQTSRKSGTCDILRDRIDWGRGGGPRENQPESRGRRGPSGRAAWEDKGGGGICGAWDFDWEIXDCSIAVEGGGGRCLREAEVRKAHLFRAXRLGWSLVPPLHYSSLLLFHFVTKNQSPRRGLYLSPTSCKTXEVKPGLEARSPGSWGPTXAXHRAGPLCPGGVPVCCGVGRFGGCRGVGAGWAPVRLTRRCLQAIRRFEECCEAQQHWKQFHHMCYWELMWCFTYKGQWKMSYFYADLLSKENCWSKVG

SEQ ID NO: 9376 - protein, 604 aa, Homo sapiens
  misc_feature (1)...(604): Xaa = X or * as defined in Table 2
LGEGGGKKGLWDLVAGLHPLGGQQSPMGQKGHKDSLYPCGGTPESSLHEALDQCMTALDLFLTNQFSEALSYLKPRTKESMYHSLTYATILEMQAMMTFDPQDILLAGNMMKEAQMLCQRHRRKSSVTNSFSSLVNRPTLGQFTEEEIHAEVCYAKCLLQRAALTFLQDENMVSFIKGGIKVRNSYQTYKELDSLVQSSQYCKGENHPHFEGGVKLGVGAFNLTLSMLPTRILRLLEFVGFSGNKDYGLLQLEEGASGHSFRSVLCVMLLLCYHTFLTFVLGTGNVNIEEAEKLLKPYLNRYPKGAIFLFFAGRIEVIKGNIDAAIRRFEECCEAQQHWKQFHHMCYWELMWCFTYKGQWKMSYFYADLLSKENCWSKATYIYMKAAYLSMFGKEDHKPFGDDEVELFRAVPGLKLKIAGKSLPTEKFAIRKSRRYFSSNPISLPVPALEMMYIWNGYAVIGKQPKLTDGILEIITKAEEMLEKGPENEYSVDDECLVKLLKGLCLKYLGRVQEAEENFRSISANEKKIKYDHYLIPNALLELALLLMEQDRNEEAIKLLESAKQNYKNYSMESRTHFXIQAATLQAKSSIENSSRSMVSSVSL

SEQ ID NO: 9377 - protein, 133 aa, Homo sapiens
  misc_feature (1)...(133): Xaa = X or * as defined in Table 2
SKFYLFIYLFYFFVYTYVINIVYIKIXQQIDLNFIYLFIYLFYFWRQSRAFLSKLXCSGANMTHLSLNLPGSRNTPAPALQAAGTTGMXHHTWLIFVVFVETEFHHVGLKFLSLDIHPPWPSKVLGXQGGWIV

SEQ ID NO: 9378 - protein, 111 aa, Homo sapiens
  misc_feature (1)...(111): Xaa = X or * as defined in Table 2
KGKIPWLCGIXPQNEKLMXHSKSLATVFCIYRTNXKNKRIISINAEKAIDQIQHTFMNFLKNFMKTVRKLKMDGSILNIIKEICERPVTNMXDGELLDDFPKIGDEAQRPP

SEQ ID NO: 9379 - protein, 258 aa, Homo sapiens
  DOMAIN (27)..(109): Phosphotyrosine interaction domain (PTB/PID) domain identified by PFam, accession name PID, E-value=7.2e-17, PFam score of 64.4
MNRAFSRKKDKTWMHTPEALSKHFIPYNAKFLGSTEVEQPKGTEVVRDAVRKLKFARHIKKSEGQKIPKVELQISIYGVKILEPKTKAEEITLTIGQAFDLAYTKFLESGGKDVETRKQIAGLQKRIQDLETENMELKNKVQDLENQLRITQVSAPPAGSMTPKSPSTDIFDMIPFSPISHQSSMPTRNGTQPPPVPSRSTEIKRDLFGAEPFDPFNCGAADFPPDIQSKLDEMQEGFKMGLTLEGTVFCLDPLDSRC

SEQ ID NO: 9380 - protein, 90 aa, Homo sapiens
MTPKSPSTDIFDMIPFSPISHQSSMPTRNGTQPPPVPSRSTEIKRDLFGAEPFDPFNCGAADFPPDIQSKLDEMQEGFKMGLTLEAQYFV

SEQ ID NO: 9381 - protein, 111 aa, Homo sapiens
  DOMAIN (68)..(105): Phosphotyrosine interaction domain (PTB/PID) domain identified by PFam, accession name PID, E-value=5.4e-06, PFam score of 25.7
TFIWLILIMNLAFSRKKDKTWMHTPEALSKHFIPYNAKTCLAPPFAFCHDYKTWMHTPEALSKHFIPYNAKFLGSTEVEHPKGTEVVRDAVRKLKFARHIKKSEGQKIPKV

SEQ ID NO: 9382 - protein, 313 aa, Homo sapiens
  DOMAIN (30)..(164): Phosphotyrosine interaction domain (PTB/PID) domain identified by PFam, accession name PID, E-value=6.5e-32, PFam score of 117.9
  misc_feature (1)...(313): Xaa = X or * as defined in Table 2
SSSWNRAFSRKKDKTWMHTPEALSKHFIPYNAKFLGSTEVEQPKGTEVVRDAVRKLKFARHIKKSGGQKIPKVELQISIYGSKNSXDPKTKREVQHNCQLHRISFCADDKTDKRIFTFICKDSESNKHLCYVFDSEKCAEEITLTIGQAFDLAYRKFLESGGKDVETRKQIAGLQKRIQDLETENMELKNKVQDLENQLRITQVSAPPAGSMTPKSPSTDIFDMIPFSPISHQSSMPTRNGTQPPPVPSRSTEIKRDLFGAEPFDPFNCGAADFPPDIQSKLDEMQAPEMEGFKMGLTLEGTVFCLDPLDSRC

SEQ ID NO: 9383 - protein, 143 aa, Homo sapiens
  misc_feature (1)...(143): Xaa = X or * as defined in Table 2
GKVSPPGLXGPXGEQGPLGPSGAATGLPHSLCPEAFASPRSVEYRXDQAQLALWAVPLXEGPLPDLVRGVVPGSPVKVPGDEVRTCHSCGRFPRALGQSKTLPPNLPLTTRRGVNSEDLPSPVYRAADRGNRFPGAVGGSCHR

SEQ ID NO: 9384 - protein, 131 aa, Homo sapiens
  DOMAIN (79)..(115): Synapsins proteins domain identified by eMATRIX, accession number BL00415Q, p-value=8.115e-09, raw score of 2.23
  misc_feature (1)...(131): Xaa = X or * as defined in Table 2
GRAWRTCPCRAHQPRRSHLRPSSCSTLQRGXSPPPGRSSSPVQPXCAXARGWGSGPGXHWTCLFLAWQSPQCTGPQICQYPRPLRSPRPAGPPGGTSGHSPPDARAPRPRRPAPCGRECSSSSGRNAAPLG

SEQ ID NO: 9385 - protein, 117 aa, Homo sapiens
  DOMAIN (11)..(117): Mov34/MPN/PAD-1 family domain identified by PFam, accession name Mov34, E-value=8.4e-06, PFam score of -20.0
VSWLPQESSHHYFKYCKISALALLKMVMHARSGGNLEVMGLMLGKVDGETMIIMDSFALPVEGTETRVNAQAAAYEYMAAYIENAKQVGRLENAIGWYHSHPGYGCWLSGIDVSTQM

SEQ ID NO: 9386 - protein, 37 aa, Homo sapiens
HHVMCVFFSSCKTTIEAIHGLMSQVIKDKLFNQINIS

SEQ ID NO: 9387 - protein, 359 aa, Homo sapiens
  DOMAIN (65)..(359): Mov34/MPN/PAD-1 family domain identified by PFam, accession name Mov34, E-value=6.5e-20, PFam score of 79.6
  misc_feature (1)...(359): Xaa = X or * as defined in Table 2
KRQLFPLSWAMAASGSRMAQKTWELANNMQEAQSIDEIYKYDKKQQQEILGGEALDXGVRSHHYFKYCKISALALLKMVMHARSGEGNLEVMGLMLGKVWDGETMIIMGKFFFCLVEGTETRVNSLQAAAYEYMAAYIENANQVGSPENAIGWYHSHPGYGCWLSGIDVSTQMLNQQFQEPFVAVVIDPTRTISAGKVNFGAFWAHPKGGYNPPDEGPSGVPGLFPLNKIEDLGVHCKQYYALEVSYFKSLLGSQNCLELLWNKIWGGIRWSSSLAGLLNADYPTGQVLXFVLKKLEQSRSPSLGRGEFPCWGLETHDRKSEDKLAKATRSSCKLPIEAIHGLMSQVIKDKLFNQINIS

SEQ ID NO: 9388 - protein, 145 aa, Homo sapiens
  misc_feature (1)...(145): Xaa = X or * as defined in Table 2
LFISLLSISEKIIENCWVXLSAARSXALRKLAFFXATRSFFXARDILGRFHLFFCNFFLGLLFIDWILSYSSMSFLIHLLHPAGQQQASTICCSIICQANLHTIFWQFVCIRCADYHIPLYTGISNLTNDISVCHTNYHPVIGVW

SEQ ID NO: 9389 - protein, 267 aa, Homo sapiens
  DOMAIN (187)..(196): C4-TYPE STEROID RECEPTOR ZINC FINGER SIGNATURE domain identified by eMATRIX, accession number PR00047C, p-value=9.654e- 09, raw score of 5.40
  misc_feature (1)...(267): Xaa = X or * as defined in Table 2
HPRGAKYPETNPGFVTLSYVGPPDSRQLTHSRPSRSENACGHRPGELNWLNCSGCLLVPRGKRVWTETCNLVWKTEASGPPPGDPLPSLSSPITHTQARPTDTQAHCPAPCPPHXPLALNPQQNFCPEESAAQVGQGEEDRTSRGWWHGSQPQVGAGKXPLSTGSKAQGARLTGGGVPSPRLRXEQALVRCRCRLCRLGSCVRSHSLKFIDEAGEAPSAAGLDGQGTGRAPGAPEARCPRPAESGEGPGSGQAPAEQDPQPRAALRA

SEQ ID NO: 9390 - protein, 144 aa, Homo sapiens
QRGGIRGNGDPFPWVGLSVGLSVPTTGSERRLSGDLSSMPGPGTLSVRVSPPQPILSRGRPDSNKTENRRITHISAEQKRRFNIKLGFDTLHGLVSTLSAQPSLKERAGLQEEAQQLRDEIEELNAAINLCQQQLPATGVPITH

SEQ ID NO: 9391 - protein, 804 aa, Homo sapiens
  DOMAIN (611)..(632): Myc-type 'helix-loop-helix' dimerization domain proteins. domain identified by eMATRIX, accession number BL00038B, p-value= 6.538e-13, raw score of 16.97
  DOMAIN (577)..(632): Helix-loop-helix DNA-binding domain identified by PFam, accession name HLH, E-value=8.7e-06, PFam score of 32.7
  misc_feature (1)...(804): Xaa = X or * as defined in Table 2
MAGALAGLAAGLQVPRVAPSPDSDSDTDSEDPSLRRSAGGLLRSQVIHSGHFMVSSPHSDSLPRRRDQEGSVGPSDFGPRSIDPTLTRLFECLSLAYSGKLVSPKWKNFKGLKLLCRDKIRLNNAIWRAWYIQYVKRRKSPVCGFVTPLQGPEADAHRKPEAVVLEGNYWKRRIEVVMREYHKWRIYYKKRVSGGGPGRPQSFPPAAAGYRPPRKIPGKGILTPELAPLGPSIQSRADSATVWPQRLLAASLPRGRLRKPSREDDLLAPKQAEGRWPPPEQWCKQLFSSVVPVLLGDPEEEPGGRQLLDLNCFLSDISDTLFTMTQSGPSPLQLPPEDAYVGNADMIQPDLTPLQPSLDDFMDISDFFTNSRLPQPPMPSNFPEPPSFSPVVDSLFSSGTLGPEVPPASSAMTHLSGHSRLQARNSCPGPLDSSAFLSSDFLLPEDPKPRLPPPPVPPPLLHYPPPAKQETVPEFPCTFLPPTPAPTPPRPPPGPATLAPSRPLLVPKAERLSPPAPSGSERRLSGDLSSMPGPGTLSVRVSPPQPILSRGRPDSNKALLGSFLGSPNSLLPETENRRITHISAEQKRRFNIKLGFDTLHGLVSTLSAQPSLKVSKATTLQKTAEYILMLQQERAGLQEEAQQLRDEIEELNAAINLCQQQLPATGVPITHQRFDQMRDMFDDYVRTRTLHNWKFWVVSSLKPMAGGLQGLWQGSSLTWAQFSILIRPLFESFNGMVSTASVHTLRQTSLAWLDQYCSLPALRPTVLNSLRQLGTSTSILTDPGRIPXEQATRAVTEGTLGKPL

SEQ ID NO: 9392 - protein, 178 aa, Homo sapiens
SVTVEWIENGDTKGKEIDLESIFSLNPDLVPDEEIEPSPETPPPPASSAKVNKIVKNRRTVASIKNDPPSRDNRVVGSARARPSQFPEQSSSAQQNARRKSNCVKEVEKLQEKREKRRLQQQELREKRAQDVDATNPNYEIMCMIRDFRGSLDYRPLTTADPIDEHRICVCVRKRPLN

SEQ ID NO: 9393 - protein, 40 aa, Homo sapiens
YNTYSLFLFFFQDKVKSFRAALQEEEQASKQINPKRPRAL

SEQ ID NO: 9394 - protein, 159 aa, Homo sapiens
MRAFLAALVTDWYQYRLAANALFTFLYCDTFKLEILKAFKRYKESIRWLEDEKALLEMTEEVDYDVDSYATQLEAILEQKIDILTELRENETLVPKTTKTNKTHKDCGARGGANQKTTEGKAIHSEKRAPNKSATYTAKEEHNKTGQERREPEKYRESE

SEQ ID NO: 9395 - protein, 696 aa, Homo sapiens
  DOMAIN (292)..(314): KINESIN HEAVY CHAIN SIGNATURE domain identified by eMATRIX, accession number PR00380A, p-value=3.432e-21, raw score of 14.18
  DOMAIN (225)..(557): Kinesin motor domain identified by PFam, accession name kinesin, E-value=1.5e-72, PFam score of 254.4
  misc_feature (1)...(696): Xaa = X or * as defined in Table 2
LGLQMHTTSGRIHQAMVTSLNEDNESVTVEWIENGDTKGKEIDLESIFSLNPDLVPDGEIEPSPETPPPPASSAKVNKIVKNRRTVASIKNDPPSRDNRVVGSARARPSQFPEQSSSAQQNGSVSDISPVQAAKKEFGPPSRRRSNCVKEVDKLQDKREMKRLQQQELREIRAQDVDATHPNYEIMCMIRGFTGSLDYRPLASADPIDEHRIYVCVRKRPLNKKETQMKDLDVITIPSKDVVMVHEPKQKVDLTRYLENQTFRFDYAFDDSAPNEMVYRFTARPLVVTIFERGMATCLAYGQTGSGKTHTMGGDFSGKNQDCSKGIYALAARDVFLMLKKPNYKKLELQVYATFFEIYSGKVFDLLNRKTKLRVLEDGKQQVQVVGLQEREVKCVEDVLKLIDIGNSCRTSGQTSANAHSSRSHAVFQIILRRKGKLHGKFSLIDLAGNERGADTSSADRQTRLEGAEINKSLLALKECIRALGRNKPHTPFRASKLTQVLRDSFIGENSRTCMIATISPGMWASCENTLNTLRYANRVKELTVDPTAAGDVRPIMHHPPNQIDDLETQWGVGSSPQRDDLKLLCEQNEEEVSPQLFTFHEAVSQMVEMEEQVVEDHRAVFQESIRWLEDEKALLGDXLEEVDYDVDSYATQLEAILEQKIDILTELRDKVKSFRAALQEEEQASKQINPKRPRAL

SEQ ID NO: 9396 - protein, 62 aa, Homo sapiens
  misc_feature (1)...(62): Xaa = X or * as defined in Table 2
VLPNLTVHASPTTIKIWAGKVTHAYNPSTLGGQRGRIAXAQEFKTSLSNIMGLRLSKKKKKK

SEQ ID NO: 9397 - protein, 213 aa, Homo sapiens
MLEEQLVRMLTREVMDLITVCCVSKKGADHSSAPPADGDDEEMMATEVTPSAMAELTDLGKCLMKHEVLSGTLLADAVTWLFTSVLKGLQMHGQHDGCMASLVHLAFQIYEALRPRYLEIRAVMEQIPEIQKDSLDQFDCKLLNPSLQKVADKRRKDQFKRLIAGCIGKPLGEQFRKEVHIKNLPSLFKKTKPMLETEVLDNDGGGLATIFEP

SEQ ID NO: 9398 - protein, 61 aa, Homo sapiens
  misc_feature (1)...(61): Xaa = X or * as defined in Table 2
STHASESNFSICSILCFCLEAPISLMYSLSASLEDQPWAWALCGGGRAPSTTXPPLSLXHL

SEQ ID NO: 9399 - protein, 41 aa, Homo sapiens
  misc_feature (1)...(41): Xaa = X or * as defined in Table 2
SMCLTVSMLVTACPADPCVTXAXNRSSFEVPPPWTSDLRFF

SEQ ID NO: 9400 - protein, 132 aa, Homo sapiens
  misc_feature (1)...(132): Xaa = X or * as defined in Table 2
DGVSLVSPRLEYSGAISAHCKLRLPRFKXFSCLSIPSSWDYRHVPPPPANSVFLVKTGFHHVGQAGLELLTSGDLPTSAFPKCWDYRCDHCAWAKDXKFKCVSVGRRGGPGEAVHQNSNRLSYWWEDGGKTG

SEQ ID NO: 9401 - protein, 30 aa, Homo sapiens
TLSTYFIPVIDSCPSLGIFSWQPPEHNKER

SEQ ID NO: 9402 - protein, 63 aa, Homo sapiens
  misc_feature (1)...(63): Xaa = X or * as defined in Table 2
WRRRRRRFCPQPQSLIWSGMRSPKKLTPPRXNYLRQALRRNLSTLRRPFAQETAWYQWCFLGL

SEQ ID NO: 9403 - protein, 45 aa, Homo sapiens
FLCLGRYPHLPPSSPGQRQVGISGPEVAVVVVYTHPSPSNPAFLL

SEQ ID NO: 9404 - protein, 452 aa, Homo sapiens
  DOMAIN (43)..(91): Ribosomal protein S18 proteins domain identified by eMATRIX, accession number BL00057, p-value=4.402e-12, raw score of 24.94
VETQEGKTTIIEGRITATPKESPNPPNPSGQCPICRWNLKHKYNYDDVLLLSQFIRPHGGMLPRKITGLCQEEHRKIEECVKMAHRAELQRELQRLSPLPATQVYYQITGLGFLKELFRRANPNSTGPLAKAQGGYLTRWAPGSVKPIYKKGPRWNRGEANRKAHFSTVQWPAPSAIAHAKDDVSPLQPTQCLLDNIKKKVVPLSGRPGNTDSTCQESRSIYLKSQALAVTFTHFLTATAEQAEPSQLLSPPPGLGEKPPADLVLQWSEAPRAKQHYCTSPSHPAQRRVSSSDSEHPAAASHPRRPPRPGTNGWSRRGSCRASWSRDCSGVRSRRVALGMAMDQVNALCEQLVKAVTVMMDPNSTQRYRLEALKFCEEFKEKCPICVPCGLRLAEKTQVAIVRHFGLQILEHVVKFRWNGMSRLEKVYFEEQWSWNLIAKGPFEHFGRGEPY

SEQ ID NO: 9405 - protein, 86 aa, Homo sapiens
  misc_feature (1)...(86): Xaa = X or * as defined in Table 2
SHCPLSMHVGGTRPSWWGGTGVXLWPRACRVGLLLPSTGAGGTLEALLSVSDTASKVFLELARHCPSEGVNPTGHAHPVPSRGPFL

SEQ ID NO: 9406 - protein, 177 aa, Homo sapiens
  DOMAIN (91)..(121): Ribosomal protein L3 proteins domain identified by eMATRIX, accession number BL00474B, p-value=7.500e-24, raw score of 21.72
  DOMAIN (61)..(177): Ribosomal protein L3 domain identified by PFam, accession name Ribosomal_L3, E-value=3.7e-56, PFam score of 196.9
QLNGRSIRHEVMSHRKFSAPRHGSLGFLPRKRSSRHRGKVKSFPKDDPSKPVHLTAFLGYKAGMTHIVREVDRPGSKVNKKEVVEAVTIVETPPMVVVGIVGYVETPRGLRTFKTVFAEHISDECRLLPLRQKKAHLMEIHVNGGTVAEKLDWARERLEQQVPVNPVFGQDEMIDVI

SEQ ID NO: 9407 - protein, 149 aa, Homo sapiens
  DOMAIN (30)..(67): Ribosomal protein L3 proteins domain identified by eMATRIX, accession number BL00474D, p-value=5.765e-26, raw score of 29.47
  DOMAIN (31)..(98): Ribosomal protein L3 domain identified by PFam, accession name Ribosomal_L3, E-value=1.6e-23, PFam score of 84.3
PRAKAQKGSPVLWAQKSCPPKTTRALAKVACIGAWHPARVAFSVARVGQKGYHPRTEITKKIYKIGQGYLIKDGKLIKNNASTDYDLSDKSINPLSLLVQTKRRALEKIDLKFIDTTSKFGHGRFQTMEEKKAFMGPLKKDRIAKEEGA

SEQ ID NO: 9408 - protein, 207 aa, Homo sapiens; identical to SEQ ID NO: 8337
  DOMAIN (55)..(90): Ribosomal protein L3 proteins domain identified by eMATRIX, accession number BL00474C, p-value=6.571e-34, raw score of 21.74
  DOMAIN (1)..(153): Ribosomal protein L3 domain identified by PFam, accession name Ribosomal_L3, E-value=2.7e-80, PFam score of 280.2

SEQ ID NO: 9409 - protein, 417 aa, Homo sapiens; identical to SEQ ID NO: 8338
  DOMAIN (242)..(277): Ribosomal protein L3 proteins domain identified by eMATRIX, accession number BL00474C, p-value=5.829e-23, raw score of 21.74
  DOMAIN (98)..(377): Ribosomal protein L3 domain identified by PFam, accession name Ribosomal_L3, E-value=4e-131, PFam score of 449.0

SEQ ID NO: 9410 - protein, 301 aa, Homo sapiens; identical to SEQ ID NO: 8339
  DOMAIN (175)..(210): Ribosomal protein L3 proteins domain identified by eMATRIX, accession number BL00474C, p-value=5.829e-23, raw score of 21.74
  DOMAIN (31)..(301): Ribosomal protein L3 domain identified by PFam, accession name Ribosomal_L3, E-value=3.4e-131, PFam score of 449.3

SEQ ID NO: 9411 - protein, 180 aa, Homo sapiens
  DOMAIN (66)..(113): kw TRANSCRIPTASE REVERSE II ORF2 domain identified by eMATRIX, accession number DM01354V, p-value=1.364e-10, raw score of 12.97
  misc_feature (1)...(180): Xaa = X or * as defined in Table 2
AAGTYSLXIGKEXVKLSLSVDSMILYIDNLKTLPRKTLTTDKFSKISEYNISVFXCINDEKAEKEIRKTIPFTIIKRXNTSDLTKKVKGLYKGNYKTLMKEINKWKDIPCAXIRRINIIKIVYPKXTXFKAISIKILLSFVTEIEKKIPKFIXNQKRIRIAKATLSCWNLFPMNSWHNRC

SEQ ID NO: 9412 - protein, 447 aa, Homo sapiens
  DOMAIN (255)..(290): Ribosomal protein L3 proteins domain identified by eMATRIX, accession number BL00474C, p-value=2.440e-31, raw score of 21.74
  DOMAIN (126)..(392): Ribosomal protein L3 domain identified by PFam, accession name Ribosomal_L3, E-value=1.6e-147, PFam score of 503.5
MKAAGRGDVPCKARDAEIPKAMGAHLLHQHDLDVRHGVKEPFWVTPFLLQVCPGFCHLLPYHRYFQSLMVTYKIFIDVARKFSAPRHGSLGFLPQKRSSRHRGKVKSFPKDDPSKPVHLTAFLGYKAGMTHIMREVDSPASKVNKKQTVFAEHISNECKRRFYKNWHKSKKKAFTKYCKKWQDEDVKKQLEKDFSSMKKYCHVIRVIAHTQMRLLPLRQKKAHLMEIQVNGGTVAEKLDWVCERLEQQVNVNQVFGQDEMIDVIGVTKGKGYKGVTSRWHTKKLPCKTHRGLCKVACIGAWHPARVAFSVARAGEKGYRHRTEINKKIYKIGQGYLIKDGKLIKNNASTDSDLSDKSTNPLGGFVHYGEVTNDLVMLKGCVVGTKKRVLTLHESLLVQMKRQALEKIDLKFIDTTSKFGHGCFQTMEQKKAFMGPLKKDGIAKEEGA

SEQ ID NO: 9413 - protein, 377 aa, Homo sapiens; identical to SEQ ID NO: 8340
  DOMAIN (208)..(243): Ribosomal protein L3 proteins domain identified by eMATRIX, accession number BL00474C, p-value=3.314e-26, raw score of 21.74
  DOMAIN (50)..(322): Ribosomal protein L3 domain identified by PFam, accession name Ribosomal_L3, E-value=2e-144, PFam score of 493.2

SEQ ID NO: 9414 - protein, 422 aa, Homo sapiens
  DOMAIN (85)..(115): Ribosomal protein L3 proteins domain identified by eMATRIX, accession number BL00474B, p-value=2.714e-22, raw score of 21.72
  DOMAIN (56)..(228): Ribosomal protein L3 domain identified by PFam, accession name Ribosomal_L3, E-value=1.9e-59, PFam score of 208.3
  misc_feature (1)...(422): Xaa = X or * as defined in Table 2
ESDGVTSHRKFSAPRHGTLGFLPRKRSSRHRGKAKSFPTDDPPKPGHLTGFLAYTAGMTHIVREVDRPGSKANTKEAGEAATIVETPPMVSVGIVGYVETPRGLRTFKTVFAEHISDECKRRFYKNWHKSKKKAFTKYCKKWQDEDGKKQLEKDFSSMKKYCQVIRVIAHTQMRLLPLRQKKAHLMEIQVNGGPCGPRSWDWAREKLEQQVPVNQVFGQDEMIDVIGGDPGAKGYKRGSPVRWHTKKAAPARPHPRACAKVGLVLGAWHPGRVAFSVASRWGRKGLPFHRTEINQGRIFKDWPRATLIKDGKLIKDQCLHLNYDLSXPRASNPLGGFVHYWXSDRNDFVMLKGCVVGTKKRGAHPFRKSLLVQTKRRALEKIDLKFIDTTSKFGHGRFQTMEEKKAFMGPLKKDRIAKEEGA

SEQ ID NO: 9415 - protein, 199 aa, Homo sapiens
  misc_feature (1)...(199): Xaa = X or * as defined in Table 2
TTTMSSKKAKTKTTKKRPQRATSNVFAMFVHSQIQGVQRGPFNMIDQNRDGFHSDKEKVLHDMLAFSREESPLDAYLDAMMNEAPGPHQVSPWFLTMFWXESLNRTDPLKIVIQKPPFACFDXKKATRHPFREDYLREELLTNPWGDRVYQIEEVGXTCTGEAPIXQKKGNFQITSEFHHGILTGRPPKHKDDLKELLA

SEQ ID NO: 9416 - protein, 101 aa, Homo sapiens
KPSSNRMSLQWTAVATFLYAEVFVVLLLCIPFISPKRWQKIFKSRLLELLVSYGNTFFVVLIVISALVHTLQAHYRGPDCYTFRMRLLSSCCACQACTALA

SEQ ID NO: 9417 - protein, 71 aa, Homo sapiens
KLEEENRSLKADLQKLKDELASTKQKLEKAENQVLAMRKQSEGLTKEYDRLLEEHAKLQAAVDGPMDKKEE

SEQ ID NO: 9418 - protein, 71 aa, Homo sapiens
PSSNRMSLQWTAVATFLYAEVFVVLLLCIPFISPKRWQKIFKSRLVELLVSYGNTFFVVLIVILVLLVIGE

SEQ ID NO: 9419 - protein, 308 aa, Homo sapiens
  misc_feature (1)...(308): Xaa = X or * as defined in Table 2
FRPRYEGRGRGCCGRVRLLRRGLHVDCGKLGNKLTSSCGKPSSNRMSLQWTAVATFLYAEVFVVLLLCIPFISPKRWQKIFKSRLVGVVSVPMGNTFFVLVLIVILVLLVIECRAAKFREVWMDVDGKRVNLPGTIPGGHGEALSHMEAFSVAPGGNLLHWLGFSLLLSFLLRRLVTLISQQATLLASNEAFKKQAEKCXVKAARKYMEENDQLKKGAPFDEGKLNFENAELKLEEKNRELKANLQKLKDELGQALSKKLEKGXKTSFWPMRKQFMRGLTQERYDRLLEEQPKAAGLQVDGPMDKKEE

SEQ ID NO: 9420 - protein, 402 aa, Homo sapiens
  DOMAIN (22)..(38): T-CELL GLYCOPROTEIN CD8 CHAIN SURFACE ALPHA PRE domain identified by eMATRIX, accession number PD02080A, p-value=9.308e- 09, raw score of 10.03
  DOMAIN (106)..(369): Galactosyltransferase domain identified by PFam, accession name Galactosyl_T, E-value=3.2e-40, PFam score of 147.1
  misc_feature (1)...(402): Xaa = X or * as defined in Table 2
QARGASLRPSLLRIPSEYAFTMQLRLFRRLLLAALLLVIVWTLFGPSGLGEELLTLSLAFLLPAPALPGPPLALPRLLIPTQEACCGPGAPPFLLILGGTAPENLNQRNAIRASRGGLREARGLRVQTLFLLGEPNAQHPVWGSQGEXTGPSESAAQGDILQAAFQDSYRNLTLKTLSGLNWAEKHCPMARYVLRTDEDGIANVPELVSELVLRGGRWGQWERSTEPQREAEQEGGQVLHSEEVPLLYLGRVHWRVNPSRTPGGRHRVSEEQWPHTWGPFPPYASGTGYVLSASAVQLILKVASRAPLLPLEDVFVGVSARRGGLAPTQCVKLAGATHYPLDRCCYGKFLLTSHKLDPWKMQEAWKLVGGSDGEKDCAPFAPWFPGKSLGILRCRAIAWLQS

SEQ ID NO: 9421 - protein, 131 aa, Homo sapiens
AINYNEKIYELRVMETKPDKAVSIIECDMNVDFDAPLGYKEPERQVQHEESTEGEADHSGYAGELGFRAFSGSGNRLDGKKKGVEPSPSPIKPGDIKRGIPNYEFKLGEAGGRFVAFSGEGQSLRKKGRKP

SEQ ID NO: 9422 - protein, 36 aa, Homo sapiens
SAALHLFSAPCSMGAGPSLLLACDSVDLPVAASKGL

SEQ ID NO: 9423 - protein, 498 aa, Homo sapiens
GTRKSGRRGFFVALPERSGVCQVVSIMFSFNMFDHPIPRVFQNRFSTQYRCFSVSMLAWPNDRSDVEKGGKIIMPPSALDQLSRLNITYPMLFKLTNKNSDRMTHCGVLEFVADEGICYLPHWMMQNLLLEEDGLVQLETVNLQVATYSKSKFCYLPHWMMQNLLLEEGGLVQVESVNLQVATYSKFQPQSADFLDITNPKAVLENALRNFACLTTGDVIAINYNEKIYELRVMETKPDKAVSIHECDMNVDFDAPLGYKEPERQVQHEESTEGEADHSGYAGELGFRAFSGSGNRLDGKKKGVEPSPSPIKPGDIKRGIPNYEFKLGKITFIRNSRPLVKKVEENRTTDIQATPTPLTPATHRLHTFDRPMAVLGLHSQPPLQACVPWGGHSTLDPPYVMPNQSQLLCEFTSILSGRSSKTAGAADLGDMADGSGWQPPRPCEAYRAEWKLCRSARHFLHHYYVHGERPACEQWQRDLASCRDWEERRNAEAQEKDE

SEQ ID NO: 9424 - protein, 348 aa, Homo sapiens
  misc_feature (1)...(348): Xaa = X or * as defined in Table 2
GRAVGGVSSLHCPERSGVCQVVSIMFSFNMFDHPIPRVFQNRFSTQYRCFSLSMLAGPNDRSSIGEKEGKIIMPPSALDQLSRLXHYRIPMLFKLTNRNSDRMTALLQCLEFVADEGICYFPTLWMMQNLLLEEGGLVQVKSVNLSSATLLPNFQPQSPDFLDITNPKAVFENALRNFACLTTGDVIAINYNEKILRNCVVMETQTPTRPVSHHXSVNHXTVDFDCFPLGLPKNPGKTKSHHEESEQKVKADPTVAYAWKSLGFPRFSRGSGNRLDGKKKGVEPSPSPIKPGDIKRGIPNYEFKLGKITFVSRNSRPLVKKVEEDEAGGRFVAFSGEGQSLRKKGRKP

SEQ ID NO: 9425 - protein, 131 aa, Homo sapiens
  misc_feature (1)...(131): Xaa = X or * as defined in Table 2
APARSALCSGSAPRTSGQPWGTAPAPPSFHQRNTPCPWSAPPSGAAPWGSTKGQRLDGPCCAPFPPRGLSMXSKVPWWPAXTAPAPPSFHQRNTPCPWSAPPSGAAPWGSTKGQRLDGPCCAPFPPRGLSM

SEQ ID NO: 9426 - protein, 504 aa, Homo sapiens
  DOMAIN (337)..(356): AROMATIC-L-AMINO-ACID DECARBOXYLASE SIGNATURE domain identified by eMATRIX, accession number PR00800E, p-value=2.929e- 09, raw score of 16.89
  misc_feature (1)...(504): Xaa = X or * as defined in Table 2
MAPLQQHIAVLPDTTADQVTTEDDGYTWTALQHVATAKEKRKSSQTMEESQDFPLHIPRPAQGTQRAVARPSPGPKAWTEAGPAKDAARSEKPGGRKAPGGRGQLTCRRSLSPVRQPPVSVPVSDSLRRRSPCSPADWREAGATSLDRIRPILVLMVDKKLVVVFGSTGAQGGSVARILLEDGTFKVRVVTRNPRKKAAKELRLQGAEVVQGDQDDQVIMELALEWAYATFIGTNYWESCSQEQEVTPAGSLDRIRPILVLMVDKKLGLHYVVYSGLGTSRSXRQGDWPPRTLTAKGRWRNISGTLAFPXPVWGFLANLENLLLQLFFPRKTPEGKELLCGACPQVTFPWMACPCLTWGPVVLSLFEDARKIRRPEHRGXALAGTRPRSTLPCSPSTPARSCTMPRXLPEDYEKLGFPGARDLGQHVPFLCPETPTRDIPSLTLRLNPKALTLDQWLGTAQRGLQPAVTLPASRPLVGIRGHQRGKKAPTSEIKPICSPKKKKK

SEQ ID NO: 9427 - protein, 346 aa, Homo sapiens
  misc_feature (1)...(346): Xaa = X or * as defined in Table 2
ILRSVARAQRGRRSLRFHWSPGGHGGRSEAGAAGPVEMRRCTAAPQGRVPGLPSKLGGIPDALPTVAAPRPVCQRCGQPLALVVQVYCPLEGSPFHRLLHVFACACPGCSTGGARSWKVFRSQCLQVPEREAQDAQKQGNSLAAEDWCEGADDCGKXYXGGAFTTVYLGFWEXCQQCHKTXTGLLGSKTSCLQDAVLGAAHPVPPGLPLFLPYYICVADEDDYRDFVNLDHAHSLLRDYQQREGIAMDQLLSQSLPNDGDEKSXEDHNXKVGGSRPFXQIPXKRNWLLVREQILRVFPGVESHSFXPAPTSEVTELPSLQPVWEAKRIFEFQLMPALGQHASRVLI

SEQ ID NO: 9428 - protein, 50 aa, Homo sapiens
  DOMAIN (3)..(31): 303 kw ACTIVATING RAN GTPASE ISOZYME domain identified by eMATRIX, accession number DM01269A, p-value=1.600e-20, raw score of 23.35
  DOMAIN (1)..(50): RanBP1 domain identified by PFam, accession name Ran_BP1, E- value=1.2e-06, PFam score of 1.6
  misc_feature (1)...(50): Xaa = X or * as defined in Table 2
NGKERGTGDVKLLKHKEKGAIRLLMRRDKTLKICANHYITPMMELKPNAX

SEQ ID NO: 9429 - protein, 50 aa, Homo sapiens
AAAKDTHEDHDTSTENTDESNHDPQFEPIVSLPEQEIKTLEEDEEELFKM

SEQ ID NO: 9430 - protein, 272 aa, Homo sapiens
  DOMAIN (107)..(122): RanBP1 domain proteins domain identified by eMATRIX, accession number PF00638, p-value=4.600e-18, raw score of 11.91
  DOMAIN (79)..(223): RanBP1 domain identified by PFam, accession name Ran_BP1, E- value=3.2e-08, PFam score of 18.6
  misc_feature (1)...(272): Xaa = X or * as defined in Table 2
MRRPRRRLCWLRCLVECGPLQSRSAVGNSEEQRKAYVFFSSLSLVDTHEDHDTSTENTDESNHDPQFEPIVSLPEQEIKTLEEDEEELFKMRAKLFRFASENDLPEWKERGTGDVKLLKHKEKGAIRLLMRRDKDPXKICANPLPSRPLMGAESPTAGRRSVPWVLETPHADFRPNECPPSPELPGPPRFLNAXRMPQKFQNQSFEELQGKRSEGEEEKESRFQGKNDSLHRKKCAEKPGSSLRXREETKEDAEAEAINRLILLSFSSLSLS

SEQ ID NO: 9431 - protein, 118 aa, Homo sapiens; identical to SEQ ID NO: 9147

SEQ ID NO: 9432 - protein, 79 aa, Homo sapiens
MRTAESCRRLSWAALLGSHWRCCSHPCAAGQGPYPRAAVNGPRTPLAYLRFKEMFSSGLINVEFPQFLYLSHFHSLLLR

SEQ ID NO: 9433 - protein, 39 aa, Homo sapiens
FCLIGLFLFPQALSGFRQIHVIDMDTIDVSNLNRQFLFR

SEQ ID NO: 9434 - protein, 990 aa, Homo sapiens
MRKKFHIIVCGLDSIIARRWINGMLISLLNYEDGVLDPSSIVPLIDGGTEGFKGNARVILPGMTACIECTLELYPPQENCPACSQLPQNIQFSPSAKLQEVLDYLTNSASLPFIATSFSHEDIDNHTEDSVQYVGYEPRYLRLLAIRHIVLRLFPGAHARQGGEERDWQSGEGRGWRSGEGRGQKHNRQGADRLPPPPPPDSGGEERKAENMDVNIAPLRAWDDFFPGSDRFARPDFRDISKWNNRVVSNLLYYQTNYLVVAAMMISIVGFGCCVRGRSKRMRTWAPFVSAVRERPRLSSFAKQALSQAQKSIDRVLDIQEEEPSIWAETIPYGEPASKHNLPEPEPRIASRLGHCWDPRSEVRKSSGKGRTIANSGPTPVFFRISSPVSGGWDTSTWGLKSNTEPQSPPIASPKAITKPVRRTVVDESENFFSAFLSPTDVQTIQKSPVVSKPPAKSQRPEEEVKSSLHESLHIGQSRTPETTESQVKDSSLCVSGETLAAGTSSPKTEGKHEETVNKESDMKVPTVSLKVSESVIDVKTTMESISNTSTQSLTAETKDIALEPKEQKHEDRQSNTPSPPVSTFSSGTSTTSDIEVLDHESVISESSASSRQETTDSKSSLHLMQTSFQLLSASACPEYNRLDDFQKLTESCCSSDAFERIDSFSVQSLDSRSVSEINSDDELSGKGYALVPIIVNSSTPKSKTVESAEGKSEEVNETLVIPTEEAEMEESGRSATPVNCEQPDILVSSTPINEGQTVLDKVAEQCEPAESQPEALSEKEDVCKVTLTVEFLNEKLEKREAQLLSLSKEKALLEEAFDNLKDEMFRVKEESSSISSLKDEFTQRIAEAEKKVQLACKERDAAKKEIKNIKEELATRLNSSETADLLKEKDEQIRGLMEEDWAAVFELYNCEDERCYLDLARLRGVHYITWRRQNKVFPQDKGHHPTLGEHPKFTNYSFDVEEFMYLVLQAADHVLQHPKWPFKKKHDEL

SEQ ID NO: 9435 - protein, 472 aa, Homo sapiens
  DOMAIN (84)..(128): Ubiquitin-activating enzyme proteins domain identified by eMATRIX, accession number BL00536B, p-value=4.343e-23, raw score of 18.17
  DOMAIN (285)..(441): Repeat in ubiquitin-activating (UBA) pro domain identified by PFam, accession name UBACT_repeat, E-value=2.6e-30, PFam score of 114.1
  misc_feature (1)...(472): Xaa = X or * as defined in Table 2
DGQYRIWWLIEWHVDGGCGDTETWKDRWNHVKKFLERSGPFTHPDFEPSTESLQFLLDTCKVLVIGAGGLGCELLKNLALSGFRQIHVIDMDTIDVSNSXIRQFLFRPKDIGRPKAEVAAEFLNDRVPNCNVVPHFNKIQDFNDTFYRQFHIIVCGTGTLSCARRWINGMLISLLNYERMVSXDPSSIVPLIDGGTEGFKENARVILPGMTACIECTLELYPPQVNFPMCTIASMPRLPEHCIEYVGMLQWPKEQPFGEGVPLDGDDPEHIQWIFQKSLERASQYNIRGVTYRLTQGVVKRIIPAVASTNAVIAAVCATXEVFKIATSAYIPLXIITWVFNDVDGLYTYTFEGRKGKENCPACSQLPQNISVFLHQAKLQEVLGIILTNSASLQNEILPAITATLGGEKIGTLYLQSVTSIEERTRPNLSKTIGRIGGLLDGPKTGRLLDVTTPQTVLFQTSILLLKGKSPT

SEQ ID NO: 9436 - protein, 49 aa, Homo sapiens
  misc_feature (1)...(49): Xaa = X or * as defined in Table 2
MXXXXXXXXXXXXXXXXXXXXXXXXXXXXXXXXXXXXXXXXXXXXXSCR

SEQ ID NO: 9437 - protein, 45 aa, Homo sapiens
  misc_feature (1)...(45): Xaa = X or * as defined in Table 2
MLGLRSGIPAPVRLQLAVVLGNSLGNFGTEGPGLKGRTMVTGDPX

SEQ ID NO: 9438 - protein, 92 aa, Homo sapiens
  DOMAIN (35)..(63): !!!! PROTEIN ALU SUBFAMILY WARNING ENTRY NUCLEAR PHOSPHO domain identified by eMATRIX, accession number PD02454B, p-value= 1.989e-10, raw score of 11.61
  misc_feature (1)...(92): Xaa = X or * as defined in Table 2
GKVRTVKIKYWMLARSSGSSLXSQHFGRLRQADHEVQEIKHHPGKHSANPSLLKIQKVSXLVSQAWWWVPVVPAIREVEAGEWCEPGRQSLQ

SEQ ID NO: 9439 - protein, 118 aa, Homo sapiens
  misc_feature (1)...(118): Xaa = X or * as defined in Table 2
MANGPRAXFCENFQAALALSRVGLHKNPEKEPYKSKYSARALLEEVKALLGPAPEDEDERPEAEDGPGAGDHALGLPVAQRAVRLAVIEFHLGVNHIDTEELSAGEEHLVKCLRLLRS

SEQ ID NO: 9440 - protein, 351 aa, Homo sapiens
  misc_feature (1)...(351): Xaa = X or * as defined in Table 2
HWLSTANVISDYYDKSSPTQDTAETVXDTPELYHQGKGEIARCWIKYCLTLMQNAQLSMQDNIXELDLDKQSELIALRKKELDEEESIRKKAVQFGTGELCDAISAIEEKVSYLRPLDFEEARELFLLGQHYVFEAKEFFQIDGYVTDHIEVVQDHSALFKVLAFFETDMERRCKMHKRRIAMLEPLTVDLNPQYYLLVNRQIQFEIAHAYYDMMDLKVAIADRLRDPDSHIVKKINNLNKSALKYYQLFLDSLRDPNKVFPEHIGEDVLRPAMLAKFRVARLYGKIITADPKKELENLATSLEHYKFIVDYCEKHPEAAQEIEVELELSKEMVSLFPTKMERFRTKMALS

SEQ ID NO: 9441 - protein, 845 aa, Homo sapiens
  DOMAIN (780)..(835): Actins proteins domain identified by eMATRIX, accession number BL00406D, p-value=2.263e-22, raw score of 12.58
  DOMAIN (774)..(845): Actin domain identified by PFam, accession name actin, E- value=5.1e-36, PFam score of 119.5
  misc_feature (1)...(845): Xaa = X or * as defined in Table 2
VKCRKAEGRRESRLQTFEESQAVEAAMANVPWAEVCEKFQAALALSRVELHKNPEKEPYKSKYSARANMEEVKALLGPAPEDEDERPEAEDGPGAGDHALGLPAEVVEPEGPVAQANRLRLAVIEFHLGVNHIDTEELSAGEEHLVKCLRLLRRYRLSHDCISLCIQAQNNLGIVWSEREEIETAQAYLESSEALYNQYMKEVGSPPLDPTERFLPEEEKLTEQERSTRFSKVYTHILYYLAQVYQHLECFETAAHYCHSTLKRQLEHNAYHPIEWAINAATLSQFYINKLCFMEARHCLSAANVIFGQTGKISATEDTPESEGEVPELYHQRKGEIARCWIKYLFXLLMQNAQLSMQDNIGELDLDKQSELRALRKKELDEEESIRKKAVQFGTGELCDAISAVEEKVSYLRPLGFEEARELFLLGQHYVFERAKEFFQIDGYVTDHIEVVQDHSALFKVLAFFETDMERRCKMHKRGLAMLEPLTVDLNPQYYLLVNRQIQFEIAHAYYDMMDLKVAIADRLRDPDSHIVKKINNLNKSALKYYQLFLDSLRDPNKVFPEHIGEDVLRPAMLAKFRVARLYGKIITADPKERAGKIWATSLEHYKFIVDYCEKRHPEAAQEIEVELELSKEMPGRRSETPSLKERNKKDKIQTAKTTSAPPAQSLALATPQPVRMCRQLTRVISLGSSKGKASFAGPDRPPYEDPHIVRLQLYHPQRERSCVTSSRRSCAKSPWTLSRRWPHGSSWEKSYELSDGQVITSSNKRFHCPEALFQPSFLGMESCGIYKTTFKSIVKCDVDIHKDLYANTVLSGSTTMYPGIALQDAEGDHCPGSQHEEDQDHCSF

SEQ ID NO: 9442 - protein, 375 aa, Homo sapiens; identical to SEQ ID NO: 9148
  DOMAIN (296)..(342): kw TRANSCRIPTASE REVERSE II ORF2 domain identified by eMATRIX, accession number DM01354O, p-value=1.000e-40, raw score of 8.73

SEQ ID NO: 9443 - protein, 140 aa, Homo sapiens
  misc_feature (1)...(140): Xaa = X or * as defined in Table 2
GTVVMGLPKYFISLSTKFPLSFSLSADELHIASLFLWPRSKPFGVIQRSCASQLNALPEVLKNPGDPDKMLRFAESPRNLPAGVLGDIWTDGKGSVSLQEQVYHFPLIRPTPGSXARASFLSCGXEEFRRHGLTFSSTRE

SEQ ID NO: 9444 - protein, 473 aa, Homo sapiens
  DOMAIN (369)..(390): M-PHASE INDUCER PHOSPHATASE SIGNATURE domain identified by eMATRIX, accession number PR00716D, p-value=6.625e-28, raw score of 9.50
  DOMAIN (314)..(422): Rhodanese-like domain identified by PFam, accession name Rhodanese, E-value=1e-34, PFam score of 128.8
MSTELFSSTREEGSSGSGPSFRSNQRKMLNLLLERDTSFTVCPDVPRTPVGKFLGDSANLSILSGGTPKCCLDLSNLSSGEITATQLTTSADLDETGHLDSSGLQEVHLAGMNHDQHLMKCSPAQLLCSTPNGLDRGHRKRDAMCSSSANKENDNGNLVDSEMKYLGSPITTVPKLDKNPNLGEDQAEEISDELMEFSLKDQEAKVSRSGLYRSPSMPENLNRPRLKQVEKFKDNTIPDKVKKKYFSGQGKLRKGLCLKKTVSLCDITITQMLEEDSNQGHLIGDFSKVCALPTVSGKHQDLKYVNPETVAALLSGKFQGLIEKFYVIDCRYPYEYLGGHIQGALNLYSQEELFNFFLKKPIVPLDTQKRIIIVFHCEFSSERGPRMCRCLREEDRSLNQYPALYYPELYILKGGYRDFFPEYMELCEPQSYCPMHHQDHKTELLRCRSQSKVQEGERQLREQIALLVKDMSP

SEQ ID NO: 9445 - protein, 441 aa, Homo sapiens
  DOMAIN (345)..(385): Cyclophilin-type peptidyl-prolyl cis-trans isomerase signatur domain identified by eMATRIX, accession number BL00170B, p-value= 8.071e-09, raw score of 20.97
  misc_feature (1)...(441): Xaa = X or * as defined in Table 2
IMASAHLATSAFCTRSSSSGRSGSCKRGSWDSEQALIRAWTTLPSSLHAADGSFAGGRGIPSKRWSWRAGQQSSLCLIMQTSSNCGNSFQLVSEGASWRGLPHCSCAELQDSLNFSYHPSGLSLSVRPSSPGNSPKEQPFSQVLRPEPPDPEKLPVPPAPPSKRHCRSLSVPVDLSRWQPVWRPAPSKLWTPIKHRGSGGGGGPQVPHQSPPKRVSSLRFLTSSQCLFSMCPSSQTLQPSFLQPGPGPSSSRPCAASPQSGSWESDAESLSPCPPQRRFSLSPSLGPQASRFLPSARSSPASSPELPLATXGLSATFPESRSQPCDLDARKTGVKRRHEEDPRRLRPSLDFDKMNQKPYSGGLCLQETAREGSSISPPWFMACSPPPLSASCSPTGGSSQVLSESEKEEEGAVRWGRQALSKRTLCQRDFGDLDLNLIEEN

SEQ ID NO: 9446 - protein, 92 aa, Homo sapiens
RRRGFCFITYTDEEPVKKLLESRYHQIGSGKCEIKVAQPKEVYRQQQQQQKGGRGAAAGGRGGTRGRGRGNQSTYGKASRGGGNHQNNYQPY

SEQ ID NO: 9447 - protein, 323 aa, Homo sapiens
  DOMAIN (161)..(171): Eukaryotic  RNA-binding region RNP-1 proteins domain identified by eMATRIX, accession number BL00030B, p-value=9.526e- 09, raw score of 7.03
  DOMAIN (122)..(195): RNA recognition motif. domain identified by PFam, accession name rrm, E-value=6.6e-13, PFam score of 56.3
RQRRAQSAFFRSRLAAVLVGSSGRRSGSALANRGQKKAGLTAFCSIQRSAAAAAATRTARQHPPADSSVTMEDMNEYSNIEEFAEGSKINASKNQQDDGYRTLLPPLPLPQRAARALRSSKMFIGGLSWDTSKKDLTEYLSRFGEVVDCTIKTDPVTGRSRGFGFVLFKDAASVDKIENIELPMDTKTNERRGFCFITYTDEEPVKKLLESRYHQIGSGKGQNWNQGFNNYYDQGYGNYNSAYGGDQNYSGYGGYDYTGYNYGNYGYGQGYADYSAGTSLQAVCHPDHVYLWGSHVAGRAQGIHQKTLSCGMVSSNFMYQRKD

SEQ ID NO: 9448 - protein, 91 aa, Homo sapiens
  misc_feature (1)...(91): Xaa = X or * as defined in Table 2
SLHHKDFTGMLLLQFAHHLGEIGFSLLISPKSRQPRLFLPSVRQCGAAAARRCYRLAPRPVCSGKRRTAPGAGDXGGERARPPRARVFCPR

SEQ ID NO: 9449 - protein, 344 aa, Homo sapiens
  DOMAIN (152)..(171): Eukaryotic  RNA-binding region RNP-1 proteins domain identified by eMATRIX, accession number BL00030A, p-value=4.938e- 12, raw score of 14.39
  DOMAIN (67)..(225): RNA recognition motif. domain identified by PFam, accession name rrm, E-value=9.2e-39, PFam score of 142.2
DLFRRHFKSSSIQRSAAAAAATRTARQHPPADSSVTMEDMNEYSNIEEFAEGSKINASKNQQDDGKMFIGGLSWDTSKKDLTEYLSRFGEVVDCTIKTDPVTGRSRGFGFVLFKDAASVDKVLELKEHKLDGKLIDPKRAKALKGKEPPKKVFVGGLSPDTSEEQIKEYFGAFGERENIEFSMDTKTNERRGFCFITYTDEEPVKKLLESTYHQIGSGKCEIKVAQPKEVYRQQQQQQKGGRGAAAGGRGGTRGRGRGQGQNWNQGFNNYYDQGYGNYNSAYGGDQNYSGYGGYDYTGYNYGNPMEYGTRGYGQTYQWPQQSTLMGKASRGGGQSTQNNYPAHT

SEQ ID NO: 9450 - protein, 458 aa, Homo sapiens
  DOMAIN (223)..(233): Eukaryotic  RNA-binding region RNP-1 proteins domain identified by eMATRIX, accession number BL00030B, p-value=9.526e- 09, raw score of 7.03
  DOMAIN (185)..(350): RNA recognition motif. domain identified by PFam, accession name rrm, E-value=6.1e-15, PFam score of 63.1
  misc_feature (1)...(458): Xaa = X or * as defined in Table 2
PQEFTPLRFSLLILLFSQARVPSRVASLLAGRAAMEVPPRLSHVPPPLFPSAPATLASRSLSHWRPRPPRQLAPLLPSLAPSSARQGARRAQRHVTAQQPSRLAGGAAIKGGRRRRPDLFRRHFKSSSIQRSAAAAAATRTARQHPPADSSVTMEDMNEYSNIEEFAEGSKINASKNQQDDGKMFIGGLSWDTSKKDLTEYLSRFGEVVDCTIKTDPVTGRSRGFGFVLFKDAASVDKVLGTXKGHKLDGKLIDPKRAKALKGKEPSPKRFLWSGLSPDTSEEQIKEYFGAFGEIENIELPMDTKTNERRGFCFITYTDEEPVKKLLESRYHQIGSGKCEIKGCTTPKRYLGQQQQPPKGCKRGAAAGGRVGTRGRGRSQGQNWTQGFNNYYDQGYGNYNSAYGGDQNYSGYGGYDYTGYNYGNYGYGQGYADYSGQQSTYGKASRGGGNHQNNYQPY

SEQ ID NO: 9451 - protein, 223 aa, Homo sapiens
  misc_feature (1)...(223): Xaa = X or * as defined in Table 2
WLRWATIYKAGQPQLEAQNPYSFREGQPFLRLDHLRTAGAEQNCAAAVWVRRLXRNMGFVLLTGAASFIMVAHLSHQCSQGPAKKVPKWEYPYPCTATEPLNNGHHPSTCIQAKPHPRNTVGKVXPSPSLFFPSLLGGVYHPAVXASWPWAWPWICWTEFLYAYGLLHGENPSKRSPRSPWGSIALLAFGWGTTVCSGFPSILVWVKSGLGQVEPKCCHLKKL

SEQ ID NO: 9452 - protein, 162 aa, Homo sapiens
  misc_feature (1)...(162): Xaa = X or * as defined in Table 2
SFRISSFGIITFKIVSFGIMAQTHAMGQFFERNSVPXLTQGEIENLNRPIPVKLESITNNLLXXKAPGLDGFTDDXSNIXEINLXPRNISLKFFFLRKKSYQFSTIASKKIEAKGTHPNXLXETSITLILKSDKDMTRKGKLQSLINIDAKILNKILANQMQ

SEQ ID NO: 9453 - protein, 580 aa, Homo sapiens
  DOMAIN (539)..(556): Eukaryotic thiol (cysteine) proteases cysteine proteins domain identified by eMATRIX, accession number BL00139D, p-value= 3.769e-21, raw score of 9.24
  DOMAIN (353)..(580): Papain family cysteine protease domain identified by PFam, accession name Peptidase_C1, E-value=8.5e-106, PFam score of 364.9
MRAQTHNRAVDIALGTAGAHLEDPGAQQGQDRCSWQVCRSARRRRRREAAGGRRAARRAQHPCCREPSGNQSLSAHLHTGATKGPASSLLHEHLWKPIARSARLPGNSSPLFSAPCSMGAGPSLLLAALLLLLSGDGAVRCDTPANCTYLDLLGTWVFQVGSSGSQRDVNCSVMGPQEKKVVVYLQKLDTAYDDLGNFGHFTIIYNQGFEIVLNDYKWFAFFKYKEEGSKVTTYCNETMTGWVHDVLGRNWVFFTGKKVGTASENVYVNTAHLKNSQEKYSNRLYKYDHNFVKAINAIQKSWTATTYMEYETLTLGDMIRRSGGHSRKIPRPKPAPLTAEIQQKILHLPTSWDWRNVHGINFVSPVRNQASCGSCYSFASMGMLEARIRILTNNSQTPILSPQEVVSCSQYAQGCEGGFPYLIAGKYAQDFGLVEEACFPYTGTDSPCKMKEDCFRYYSSEYHYVGGFYGGCNEALMKLELVHHGPMAVAFEVYDDFLHYKKGIYHHTGLRDPFNPFELTNHAVLLVGYGTDSASGMDYWIVKNSWGTGWGENGYFRIRRGTDECAIESIAVAATPIPKL

SEQ ID NO: 9454 - protein, 81 aa, Homo sapiens
  DOMAIN (54)..(76): PROTEIN LARGE TEGUMENT PROBABLE CAPSID ASSEMBLY V domain identified by eMATRIX, accession number PD02913G, p-value=5.970e- 09, raw score of 15.63
  misc_feature (1)...(81): Xaa = X or * as defined in Table 2
DKAYQCSDCDKELHSVTLVSRXSVLSMHQSIHIWKKKLICFLKCHKAFSQXSALIIKQRIHVAQIIXICCIWESLQPEVVL

SEQ ID NO: 9455 - protein, 178 aa, Homo sapiens
  misc_feature (1)...(178): Xaa = X or * as defined in Table 2
RLFKCILGLLTFPPDSSHPQLPGESPGSFEKSRCPGCWPHPAQPHQSRWAGPACSSYSGVLQGXEPQIXSLQHGRGGGGRTGGLEKETRTGSRISDTALGGEAGPCPCGQLPHLPGPPPAAHDAGPYIPPKGPGGSGYLHPHGSAKLGSNQGAMKQAGRTGSAGSQGSAEFHKAALWT

SEQ ID NO: 9456 - protein, 109 aa, Homo sapiens
  misc_feature (1)...(109): Xaa = X or * as defined in Table 2
EPVCATWKNRTPEPTRQCRPAEKQRASATQHQEGRQPGWKPRRSSDPPHRPRGFSSTHDVSDXPKTNCREAKGEEAGSGLPTGTGIGGSKPSNRLRSTTHTTPGTVFNT

SEQ ID NO: 9457 - protein, 94 aa, Homo sapiens
  misc_feature (1)...(94): Xaa = X or * as defined in Table 2
KQSQVWCVLWSERGLLGLDPPNPSACGGDRLSRTSAVPPVPXSXNSSAHGPGGRPGKPQGWGXTVTSGRSVAGKPGVPSNRRCFLPPHPWLLDN

SEQ ID NO: 9458 - protein, 329 aa, Homo sapiens
  misc_feature (1)...(329): Xaa = X or * as defined in Table 2
PQPAQPCPGKELRTVNGSQMLLVLLVLSWLPHWGALSLAEASRASFPGPSELQLRRTSKIPKSLRKRYEDLLNPGCGPNQSWEDSNTDLVPAPAVRILTPEVRLGSGGHLHLRISRAALPEGLPEASRLHRALFRLSPTASRSWDVTRPLRRQLSLARPHGPALHLRLSPPPSSQSDQLLAESSSARPQLELHLRPQAARGRRRARASNGDHCPLGPGRCCRLHTVRASLEDLGWADWVLSPREVQVTLCAIGACPSQFPGRQKMHAQESKTNPAPALKAPNTVPKRPCLVPRQLQIPWVLHSKRPDTGVCFQDLSDXLVKPKTCHLHY

SEQ ID NO: 9459 - protein, 121 aa, Homo sapiens
  misc_feature (1)...(121): Xaa = X or * as defined in Table 2
HVLTAHPPPHRLGPGPQGRSGMGRELVGPTVCLSSLPRLAASFPRPPVGLGPQQVQVVNGGCWPCRGYGEGTQAPQPPSXVGDPGEPNPQAPGAQSSTPKPAHIPPPTQEAGRRWEGKWFF

SEQ ID NO: 9460 - protein, 417 aa, Homo sapiens
  misc_feature (1)...(417): Xaa = X or * as defined in Table 2
VCPGTGGEXGLWGQLGGLPKETPLKPMDAFTGSGLKRKFDDVDVGSSVSNSDDEISSSDSADSCDSLNPPTTASFTPTSILKRQKQLRRKNVRFDQVTVYYFARRQGFTSVPSQGGSSLGMAQRHNSVRSYTLCEFAQEQEVNHREILREHLKEEKLHAKKMKLTKNGTVESVEADGLTLDDVSDEDIDVENVEVDDYFFLQPSAPKRRRALLRASGVHRIDAEEKQELRAIRLSREECGCDCRLYCDPEACACSQAGIKCQVSDRMSFPCGCSRDGCGNMAGRIEFNPIRVRTHYLHAIMKLELESKRQGAAQQPQXGALPDCQLQPDRSTGPXDPLTWHLIPAWLQAHASGSQYSRQSQPHSSRDRRMARSSCFSSASIRCTPEALSRARLRLVGRWLQEEVIIHLHIFHINIFI

SEQ ID NO: 9461 - protein, 150 aa, Homo sapiens
  misc_feature (1)...(150): Xaa = X or * as defined in Table 2
GTRFLHSFLSSLKHGCGPSLLLAALLLLSPGDGAVRCDTPANCTYLDLLGTWVFQVGSSGSQRDVNCSVMGPQRKKKXVVYLQKLDTAYDDLGNSGHFTIIYNQGFEIVLNDYKWFAFFKDVTDFISHLFMQLGTVGIYDLPHLRNKAGY

SEQ ID NO: 9462 - protein, 97 aa, Homo sapiens
LVVMDALVEDDICILNHETAHKRDTVTPVSIYSGDESVASHFALVTAYEDIKKRLKDSEKENSLLKKRIRFLEEKVIFIFYLHCVCDIRNNSKYLKF

SEQ ID NO: 9463 - protein, 114 aa, Homo sapiens
ESLKVLNEQLQSKEVELLQLRTEVETQQVMRNLNPPSSNWEVEKLSCDLKIHGLEQELELMRKECSDLKIELQKAKQTDPYQEDNLKSRDLQKLSISRVSVAQPGVQWRNHGIA

SEQ ID NO: 9464 - protein, 423 aa, Homo sapiens
  misc_feature (1)...(423): Xaa = X or * as defined in Table 2
GIETRRPWGRPYVAWLLVVMDALVEDDICILNHEKAHKRDTVTPVSIILPGDESVASHFALVTPYEDIKKRLKDSRKRTSFLKKRIRFLEEKLIGSDLKKKQVTXGREQVNKAYHAYREVCIDRDNLKSKLDKMNKDNSESLKVLNEQLQSKEVELLQLRTEVETQQVMRNLNPPSIQTGEVGKVGAGDLKIHGFGNQELELMRKECSDLKIELQKAKQTDPYQEDNLKSRDLQKLSISSDNMQHAYWELKERKCLNLHLVTSSYKLELLRKTXKTSTAIKKACAPVGCVEDLGRDSTKLHLDGFLLATYARHPPLLPNGKALCHTTSSPLPGDVKVLSEKAILQSWTDNERSIPNDGYDAFREHSSYGQNSLEDNSWGIFQSPPKSQSETAFGETKTKTLPLPNLPPLHYLDQHNQNCLYKN

SEQ ID NO: 9465 - protein, 126 aa, Homo sapiens
  DOMAIN (21)..(70): kw TRANSCRIPTASE REVERSE II ORF2 domain identified by eMATRIX, accession number DM01354Z, p-value=9.386e-15, raw score of 9.06
  misc_feature (1)...(126): Xaa = X or * as defined in Table 2
FLYDPAPPFLSIYPKELKVESXIDTCTLIFIAALFLIGKRWKXPKYPLTDEWINKVWYINTIEYYSHLKRKDILTHYTTWVNREDLILSEISQSQKINTVESTYMRYKYISNSXISIGTSYKSHRV

SEQ ID NO: 9466 - protein, 126 aa, Homo sapiens
  misc_feature (1)...(126): Xaa = X or * as defined in Table 2
DRVSLWLPRLECSGAISAHCNLCFSGLSNSPTSASRVAGTTGACHHTLLIXFLFVFVVVVFETESHLWLPRLECSGAISAHCNLCFSGLSNSPTSASRVAGTTGACHHTLLIFVFLVEMGFHHVGK

SEQ ID NO: 9467 - protein, 142 aa, Homo sapiens
KKDPRWALYSLYVYKFLHFSYSSAKNPDGCFFQKVLNGFTKFFCKEQYCKLLKLYFYRLFALLWILCLSGFLKFFFYSEIMELVLAAAGALLFCGNFIIYDTHSLMHKLSPEEYVLAAISLYLDIINLFLHLLRFLEAVNKK

SEQ ID NO: 9468 - protein, 90 aa, Homo sapiens
  misc_feature (1)...(90): Xaa = X or * as defined in Table 2
VLLILFSNINIFLXSLPYSFFFIGEDNGSWVLAAAGALLFCGDSSSMDTHSLDGINWSPEEYVLAAISLYLDIINLFLHLLRFLEAVNKK

SEQ ID NO: 9469 - protein, 241 aa, Homo sapiens
  misc_feature (1)...(241): Xaa = X or * as defined in Table 2
DPTPVTPRSSLKNDSTNGSSVASATVHIEWAFLRKVYSILSLQVLLTTVTSPVFLYFESVRTFVHESPALILLFALGSLGLNFALTLNRHKYPLNLYLLFGFTLLEALTVAVVVTFYDVYIILQAFILTTTVFFWFDCVYSYQSKKDFSKFGAGLFALLVGXLCLSGFLKVFFFYSEIMELALAAAGAPPFPVDFIIYDTHSLMHKLSPEEYVLAAISLYLDIINLFLHLLRFPGSQLNKK

SEQ ID NO: 9470 - protein, 463 aa, Homo sapiens
  DOMAIN (9)..(48): PROTEIN ZINC FINGER ZINC-FINGER METAL-BINDING NU domain identified by eMATRIX, accession number PD01066, p-value=1.750e-35, raw score of 19.43
  DOMAIN (171)..(448): Zinc finger, C2H2 type domain identified by PFam, accession name zf-C2H2, E-value=1e-63, PFam score of 225.1
  misc_feature (1)...(463): Xaa = X or * as defined in Table 2
AMSQGSVTFRDVAIDFSQEEWKWLQPAQRDVYRCVMLENYGHLVSLAGLSISKPDVVSLLEQGKEPWVWGKREVKRDLFSVSESSGENQGLFHQKNVIYDGLHPSIXIMERNSKVKAPVYSSFKGGWKCKDHTEMLQENQGCIRKVTVSHQEALAQHMNISTVERPYGCHECGKTFGRRFSLVLHQRTHTGEKPYACRACGKTFSQISNLVKHQMIHTGKKPHECKDCNKTFSYLSFLIEHQRTHTGEKPYECTECGKAFSRASNLTRHQRIHIGKKQYICRKCGKAFSSGSELIRHQITHTGEKPYECIECGKAFRRFSPLTRHQSIHTTKTPYECNECRKAFRCHSFLIKHQRIHAGEKLYECDECGKVFTWHASLIQHTKSHTGEKPYACAEXNKAFSRSFSLILHQRTHTGEEPYVCKVCNKSFSWSSNLAKHQRTHTLDNPYEYENSFNYHSFLTEHQ

SEQ ID NO: 9471 - protein, 107 aa, Homo sapiens
  misc_feature (1)...(107): Xaa = X or * as defined in Table 2
HLELFLGIRGIKMFVGWTNEXEEKAGLNGSRLXSQHFGKPRWVDHLRSGVRDQSVGQHGKTSSLQKNTKTSWAWWRAPVVPATXEAEVGGWLEPRGGGCSEAVSGAF

SEQ ID NO: 9472 - protein, 118 aa, Homo sapiens
  misc_feature (1)...(118): Xaa = X or * as defined in Table 2
DRVSLLSPRLECNSAIPAHCNPCLPGFKQFSCLSLPSSWGXRCLPPRLANFLYSLVEIGFHHVGQAGLKLLTSCDPPTSAFPKCWDYRHEPQWPDLXLTSFXGYRYEDSFDFLPKVPI

SEQ ID NO: 9473 - protein, 135 aa, Homo sapiens
  misc_feature (1)...(135): Xaa = X or * as defined in Table 2
EASLDLAPNISPPKTSCLPTGSCCSFTQTWMPQSKVFIHGPEQGPWDWALGTDLTALPFKARNMPNLDTAGLPSIALRLTVNHRRSPGSQELSCLPDSCLSQPPQPCXGSLLPLEYKCTPKEALRKXKRLSFLFV

SEQ ID NO: 9474 - protein, 220 aa, Homo sapiens
  misc_feature (1)...(220): Xaa = X or * as defined in Table 2
SSEEEQRSFSSWHQGDEPAVTWKWLPKVPPRWRFSHFPLDSPWHFLLQTAVTPLPQISAAPPKPLLPPTSPLAFFSSLLTDLPYLHPQGFSAGATANKASHNRTRALQSHSSPEGKEEPXTPYPPELEYIPRKRGKNPHGKLVGTGLGHSAFPCGYSFLFHPSPKRGSGTRDRVEGRLKARQNIRVCSNNAGEYEEARRFKGLSSQSGPVPPDVGSGVQT

SEQ ID NO: 9475 - protein, 114 aa, Homo sapiens
LRRGRSRETNEEPPPPTVQVQGPGPQREEKQKTKMAKFVIRPATAADCSDILRLIKVAESQSSSRGVGWRWLRFPGWGDSRLEVSAGVRAQPVPLSAPIPGSAATPPARPIPFP

SEQ ID NO: 9476 - protein, 118 aa, Homo sapiens
EEDAPGRRMRNHLLLLFQVQGPGPQREEKQKTKMAKFVIRPATAADCSDILRLIKELAKYEYMEEQVILTEKDLLEDGFGEHPFYHCLVAEVPKEHWTPEGNPSPFPEARETKLLCKK

SEQ ID NO: 9477 - protein, 266 aa, Homo sapiens
  misc_feature (1)...(266): Xaa = X or * as defined in Table 2
LRRGRSRETNEEPPPPTVQVQGPGPQREEKQKTKMAKFVIRPATAADCSDILRLIKELAKYEYMEEQVILTEKDLLEDGFGEHPFYHCLVAEVPKEHWTPEGYSLXLRHVHGPSVYMDGRGGNXKILYTIKXMIMINEDTALVGFAHVLIYPMNPWDWQSYLYLEDFSVMSGYKGLGIGSEILRNLSPGCQXRCRCSSKHFLVAEWQXTHPITFYKRRGASDLSQXRRGWETCSKIGQGSTWLKIGQPEGVRECCLLGWTTSHSYF

SEQ ID NO: 9478 - protein, 247 aa, Homo sapiens
  misc_feature (1)...(247): Xaa = X or * as defined in Table 2
NPGAAKMPAYHSSLMDPDTKLIGNMAHLLPIRSQFKGPAPKRDTRIPDIVDEAIFLPSGPNVFFKNYEIKNEADRTLIYITLYISECLKKLQKCQFPKAQGEKEMYTLGIPLNFPIPGEPGFSHFNANLCPNPANKQEDEVMRAYLPTSLRPRTLGLKTLXEKFFGPSRMDKPQQSGWTWLCXRDSFMNKSLSGPWTIEREPGAAHRLPRGPGAAFFQQDVTQSFCLYFSKVFIQKRRRACLYLKNS

SEQ ID NO: 9479 - protein, 132 aa, Homo sapiens
  misc_feature (1)...(132): Xaa = X or * as defined in Table 2
AKAKMADVLDLHEAGGEDFAMDEDGDESIHKLKEKAKKRKGRGFGSRXVWGKWGRVAXXGRSYGFWSPHPPHRNNGRKEEFSVISCMSLIEEGSRARMREDYDSVEHDGDEPGPQRSVEGWILFVTGVHEEA

SEQ ID NO: 9480 - protein, 50 aa, Homo sapiens
  DOMAIN (9)..(32): Immunoglobulins and major histocompatibility complex proteins domain identified by eMATRIX, accession number BL00290A, p-value= 4.600e-16, raw score of 20.89
  DOMAIN (1)..(50): Class I Histocompatibility antigen, domains domain identified by PFam, accession name MHC_I, E-value=8.2e-25, PFam score of 93.9
SHSMRYFFTSVSRPGRGEPRFIAVGYVDDTQFTDRANLGTLRGYYNQSED

SEQ ID NO: 9481 - protein, 227 aa, Homo sapiens
  DOMAIN (87)..(106): Eukaryotic  RNA-binding region RNP-1 proteins domain identified by eMATRIX, accession number BL00030A, p-value=7.000e- 09, raw score of 14.39
  misc_feature (1)...(227): Xaa = X or * as defined in Table 2
CLSGTDEISIEGEMADVLDLHEAGGEDFAMDEDGDESIHKLKEKAKKRKGRGFGSEEGSRARMLXDYDSVEQDGDVPGPQRSVEGWILFVTGSPXRKPPEEDIHDKFARIMGEIKNISSSTFDRRTGYILKGYTLSLNIETYKEAQAAMEGLNGQDLMGQPISVDWCFVRGPPKGKRRGGRRRSRSPDRRPSLTGPLLSRCSLQDSIWTMAALGQIGLGWELCCVYI

SEQ ID NO: 9482 - protein, 146 aa, Homo sapiens
  misc_feature (1)...(146): Xaa = X or * as defined in Table 2
FYVILISVRELYLCHHLPFLCAGVYMTNSAMKVFLIWLVIVKITVLEFKKLSWPGAVVWFXGLILYTHIXTLNTHIXVQNVCYYILQRNKXFHRFCINIKSWLGAEPHACNPSTLGGXHSXITXAQKFETSLGNIVRPCLYKKYKN

SEQ ID NO: 9483 - protein, 142 aa, Homo sapiens
  DOMAIN (58)..(71): LUTEOVIRUS ORF6 PROTEIN SIGNATURE domain identified by eMATRIX, accession number PR00910A, p-value=7.000e-10, raw score of 2.51
  misc_feature (1)...(142): Xaa = X or * as defined in Table 2
RRANPPSISPSAQDSRVTVPGEGPGSPGXPSRPVSGPAPGSGGLRGGSSAPATPLGEAPSPSAGPTPALQPCDPGAGPGTARPGQTASAAPAPLPPRRGAGAPPQAGREGGPCGEEERPPSGREKVSCXKRQTGPGQRRADK

SEQ ID NO: 9484 - protein, 220 aa, Homo sapiens
  misc_feature (1)...(220): Xaa = X or * as defined in Table 2
ACTAADLIAGTTISEAGPHMENQPGEVAGPAGPPTPSWAPRIPLAPPWRAAAGRDPATGQEDSQXPTPGCPSWPPWPTQLSPSAAGSPIHTPPIQGFHSQLLSXRSPGTEEPXEANKLPPWTGHREPEPHPGLPGHPCAAGSIGHWHLLLLCPLATLHGERQRHLHPGQRSGCGVQGRTPPGSAQIQDLPAAPSSILQNLSTQLCSAARPRSMPASRMRM

SEQ ID NO: 9485 - protein, 24 aa, Homo sapiens
MESGHWGKGPGHHLPIPAACLPDP

SEQ ID NO: 9486 - protein, 163 aa, Homo sapiens
  DOMAIN (38)..(51): LUTEOVIRUS ORF6 PROTEIN SIGNATURE domain identified by eMATRIX, accession number PR00910A, p-value=7.000e-10, raw score of 2.51
  misc_feature (1)...(163): Xaa = X or * as defined in Table 2
KHSASAAQALPGTLGACTGSGGLRGGSSAPATPLGEAPSPSAGPTPALQPCDPGAGPVLPGQVKLPQQPPAPLPPRRGAGAPPPPEIPSGSSFQGYWEGGAQTPGLLPAQRPLPPPFPALGSGCSALEEGXATGTRGHKGGSCSXGLWGEPGRAGKHPPHLLL

SEQ ID NO: 9487 - protein, 131 aa, Homo sapiens
  DOMAIN (30)..(68): Synapsins proteins domain identified by eMATRIX, accession number BL00415O, p-value=8.520e-09, raw score of 3.44
  misc_feature (1)...(131): Xaa = X or * as defined in Table 2
LQKRVGDWLGEAPPWGWVGSHRCRARTARPGQTASAAPAPLPPRRGAGAPPLARVPAPPCCAQRAPPSSSQPGRNQXXAASGPWRPPRPGREVGTCGEEERPASGREKDSCXERQTGPGQRRAVKMTQTIR

SEQ ID NO: 9488 - protein, 262 aa, Homo sapiens
  misc_feature (1)...(262): Xaa = X or * as defined in Table 2
ARELRAGGFYVVPHRGLEMPETALEAGVSGVGLQHLPHHLGEAPSPSAWPDTQRCSRVIPVQGPVLPGQVKLPQQPPAPLPPRRGAGAPPLRDLARVPAPPCCAQRAPPSSSQPGRNQXXAASGPWRPPRQAEKESNCGEEERPASGREKDSCXERQNGARSAAGRQAKESPQTSRPPDGEPACEVAGPAGPPTPSWAPRSPLAPPWRAAAARDPATGRRTVSDPHRPAHHGLPGQHSYLLQLQDHLSIHSPIQGFHSQLLS

SEQ ID NO: 9489 - protein, 108 aa, Homo sapiens
  DOMAIN (5)..(24): ARRESTIN SIGNATURE domain identified by eMATRIX, accession number PR00309D, p-value=6.932e-18, raw score of 7.09
  DOMAIN (1)..(58): Arrestin (or S-antigen) domain identified by PFam, accession name arrestin, E-value=6.9e-31, PFam score of 116.1
PLFSDNGKKRGLALDGKLKHEDTNLASSTIVKEGANKEVLGILVSYRVKVKLVVSRGGAPETDVPVDTNLIEFDTNYATDDDIVFEDFARLRLKGMKDDDYDDQSTRP

SEQ ID NO: 9490 - protein, 139 aa, Homo sapiens
  DOMAIN (89)..(137): Arrestins proteins domain identified by eMATRIX, accession number BL00295E, p-value=1.000e-40, raw score of 14.48
  DOMAIN (1)..(137): Arrestin (or S-antigen) domain identified by PFam, accession name arrestin, E-value=7.3e-80, PFam score of 278.7
  misc_feature (1)...(139): Xaa = X or * as defined in Table 2
EIRAFCAKSLEXKSHKRNSVRLVIRKVQFAPEKPGPQPSAETTRHFLMSDRSLHLEASLDKEVRQYADICLFSTAQYKCPVAQLEQDDQVSPSSTFCKVYTITPLLSDNREKRGLALDGKLKHEDTNLAFSTIGKEGGH

SEQ ID NO: 9491 - protein, 85 aa, Homo sapiens
  misc_feature (1)...(85): Xaa = X or * as defined in Table 2
DGVLLLLPRLECNSAILAHRNLRLPGFKRFSCLTLLSPWDYRHLPPRLAIFFVFLVYVGFHHVGYAGLELLTSRXSARPRPPKIA

SEQ ID NO: 9492 - protein, 140 aa, Homo sapiens
  DOMAIN (42)..(65): Immunoglobulins and major histocompatibility complex proteins domain identified by eMATRIX, accession number BL00290A, p-value= 3.813e-15, raw score of 20.89
  DOMAIN (33)..(140): Class I Histocompatibility antigen, domains domain identified by PFam, accession name MHC_I, E-value=1.8e-77, PFam score of 270.8
GSTHASARMAVMAPRTLLLLLSGALALTQTWAGSHSMRYFYTSGSRPGRGEPRFIAVGYVDDTQFVRFDSDAASQRMEPRAPWIEQEGPEYWDQETRNVKAQSQTDRVDLGTLRGYYNQSEDGSHTIQIMYGCDVGPDGR

SEQ ID NO: 9493 - protein, 50 aa, Homo sapiens
  misc_feature (1)...(50): Xaa = X or * as defined in Table 2
GGALLKDPLGGPNLPGGGKDKFFSFWGAFXNPPGDFWEGTFFLGGGILGP

SEQ ID NO: 9494 - protein, 113 aa, Homo sapiens
  DOMAIN (67)..(113): Arrestin (or S-antigen) domain identified by PFam, accession name arrestin, E-value=7.3e-20, PFam score of 77.9
SQPRPFPSAGDPPGLKEFRLFQNDTGSLGVYCFSGEHGGATPRGLELWCGGGLCSIQSCLTPSHPTVRQYADICLFSTAQYKCPVAQLEQDDQVSPSSTFCKVYTITPLLSDN

SEQ ID NO: 9495 - protein, 136 aa, Homo sapiens
  DOMAIN (65)..(83): ARRESTIN SIGNATURE domain identified by eMATRIX, accession number PR00309C, p-value=3.500e-21, raw score of 8.22
  DOMAIN (31)..(135): Arrestin (or S-antigen) domain identified by PFam, accession name arrestin, E-value=1.6e-75, PFam score of 264.3
PVPAPRGFPGQGAVLPWGAPQCKCPRRRPFQNLPCSVTLQPGPEDTGKACGVDFEIRAFCAKSLEEKSHKRNSVRLVIRKVQFAPEKPGPQPSAETTRHFLMSDRSLHLEASLDKELYYHGEPLNVNVHVTNNSTP

SEQ ID NO: 9496 - protein, 448 aa, Homo sapiens
  DOMAIN (58)..(81): ARRESTIN SIGNATURE domain identified by eMATRIX, accession number PR00309A, p-value=7.500e-27, raw score of 9.68
  DOMAIN (42)..(400): Arrestin (or S-antigen) domain identified by PFam, accession name arrestin, E-value=3.5e-199, PFam score of 675.1
  misc_feature (1)...(448): Xaa = X or * as defined in Table 2
FPGRRFRGGAGILAAGEEAASEPRTERAAGARTMGEKPGTRVFKKSSPNCKLTVYLGKRDFVDHLDKVDPVDGVVLVDPDYTMKDRKVFVTLSPCAFRYGREDLDVLGLSFRKDLFIATYQAFPPVPNPPRPPTRLQDRLLRKLGQHAHPFFFTIPQNLPCSVTLQPGPEDTGKACGVDFEIRAFCAKSLEEKGHKGTSVRLVIRKVQFAPEKPGPQPSAETTRHFLMSDRSLHLEASLDKELYYHGEPLNVKCSTFTNNSTKTVQGRFKVSCXGQYADIWPLSGTAQYKCPVAQLEQDDQVSPSSTFCKVYTITPLLSDNREKPCLALDGKLKHEDTNLVSSTIVKEGANKEVLGILVSYRVKVKLVVSRGGDVSVELPFVLMHPKPHDHISLPRPQSAAPETDVPVDTNLIEIDTNYATDDDIVFEDFARLRLKGMKDDDYDDQLC

SEQ ID NO: 9497 - protein, 45 aa, Homo sapiens
MKRNKNILYYGTNKLYNTNNLLNNFINILVSSLGLSERSFYRYIL

SEQ ID NO: 9498 - protein, 335 aa, Homo sapiens
  DOMAIN (31)..(55): ANNEXIN TYPE VI SIGNATURE domain identified by eMATRIX, accession number PR00202B, p-value=8.986e-19, raw score of 11.44
  DOMAIN (20)..(269): Annexin domain identified by PFam, accession name annexin, E- value=5.4e-06, PFam score of 33.4
  misc_feature (1)...(335): Xaa = X or * as defined in Table 2
VVAMAQVLRGTVTDFPGFDERADAETLRKAMKGLGTDEESILTLLTSRSNAQRQEISCSAFKTLFGRDLLDDLKSELTGKFEKLIVALMKPSRVLXMLIELKHALKGAGTNEKVLTEIIASRTPEELRAIKQVYEEEYGSSLEDXRWLGDPSGYYPAGCWLVLLQANRDPDAGIDEAQVEQDAQALFQAGELKWGTDEEKFITIFGTRSWSSFXGKVFDKYMTISRISKLRETIDRETSGQFRSQLLLGCCGILFRRYTSPTLQETFIYAMKEAGTDDHTLIRVMVSRSEIDLVYIPGREFRKNFCHPPPYSMIKGRYIWGTIKKALLLLCGEDD

SEQ ID NO: 9499 - protein, 166 aa, Homo sapiens
MRKSQCKKAENSKNQKASSPPKDHNSSPAREQNWTENEFDELTEVGFRRDMDEARNHHSQQTNTGTENQTPHVLIHKWELNNENTWTQEVEHHTPRPVRSAVFSVLSKQSWRVSETGFSAEMWLNGLPALLASYLIIHAYLPFPGKPMYFSKRTSDTKAIISTALD

SEQ ID NO: 9500 - protein, 127 aa, Homo sapiens
  DOMAIN (55)..(101): PROTEIN NUCLEAR RIBONUCLEOPROTEIN domain identified by eMATRIX, accession number PD02784C, p-value=1.000e-40, raw score of 20.76
  DOMAIN (60)..(127): RNA recognition motif. domain identified by PFam, accession name rrm, E-value=2.3e-12, PFam score of 54.5
  misc_feature (1)...(127): Xaa = X or * as defined in Table 2
MRGTFAXXXXXXXXXXXKTVEQTATTTNKKPGQGTPNSANTQGNSTPNPQVPDYPPNYILFLNNLPEETNEMMLSMLFNQFPGFKEVRLVPGRHDIAFVEFENDGQAGAARDALQGFKITPSHAMKI

SEQ ID NO: 9501 - protein, 179 aa, Homo sapiens
  DOMAIN (149)..(165): CALICIVIRUS NON-STRUCTURAL POLYPROTEIN FAMILY SIGNATURE domain identified by eMATRIX, accession number PR00918E, p-value= 8.091e-10, raw score of 13.57
MPVNKHKRHDTIAESLITPNVTTDSVKDCIKELGNRLFLWTQGCSSHVATVAPPTAPRGLRVRSAVRPLPLGGWAAAMEGEPPPVEERRRLQEELNEFVESGCRTLEEVTASLGWDLDSLDPGEEEAAELHQIRCQESWEFASSPFCALKLDTSDWDSTNSRIIKGCHQEVVTGNSCGH

SEQ ID NO: 9502 - protein, 117 aa, Homo sapiens
DMDEARNHHSQQTNTGTENQTPHVLIHKWELNNENTWTQEVEHHTPRPVRSAVFSVLSKQSWRVSETGFSAEMWLNGLPALLASYLIIHAYLPFPGKPMYFSKRTSDTKAIISTALD

SEQ ID NO: 9503 - protein, 116 aa, Homo sapiens
  DOMAIN (39)..(85): PROTEIN NUCLEAR RIBONUCLEOPROTEIN domain identified by eMATRIX, accession number PD02784C, p-value=4.106e-09, raw score of 20.76
LGSSTNALRQLQGFPFYGKPMRIQYAKTDSDIISKMRGTFADKEKKKEKKKAKTVEQTATTTNKKPGFKEVRLVPGRHDIAFVEFENDGQAGAARDALQGFKITPSHAMKITYAKK

SEQ ID NO: 9504 - protein, 23 aa, Homo sapiens
  misc_feature (1)...(23): Xaa = X or * as defined in Table 2
SWKPSFSANXHSNRKPNTACSHS

SEQ ID NO: 9505 - protein, 167 aa, Homo sapiens
IHGKNFQLGKDRRQYWDNVSVVWHQVGAFEHSADHILHGSALREMRVLHSSPSQTLVLTARFHPLESSPWHAGSLGLLSPRPLQPPPCSRSSVWQSRCLQSKSCPLAGVEPFHIESGSQGGNKLCSSPQSTAPHTSSFLHNALAPELLGNPEPWHRVHKVSSTFPLW

SEQ ID NO: 9506 - protein, 130 aa, Homo sapiens
  misc_feature (1)...(130): Xaa = X or * as defined in Table 2
GGWEGLTDTSYRRAPAGIRPVLQRKEQTVIFAVLQPLLVIPRXTASGVDLQQTAGRPAEERPVRRKTKKQNATTSKSTKGTPTQKPHSNVIRFKDERDMDEAGNHHSQQTNTGTENQTTTCSHSYVGVEQ

SEQ ID NO: 9507 - protein, 261 aa, Homo sapiens
  DOMAIN (90)..(133): PROTEIN NUCLEAR RIBONUCLEOPROTEIN domain identified by eMATRIX, accession number PD02784B, p-value=1.243e-40, raw score of 26.46
  DOMAIN (59)..(131): RNA recognition motif. domain identified by PFam, accession name rrm, E-value=0.039, PFam score of 17.4
  misc_feature (1)...(261): Xaa = X or * as defined in Table 2
VGSCAFYLAVSVFLAPRPFLHLLQLGADEARSWDFLRSPEEFNTNMDIRPNHTIHINNMNDKIKKEELKRSLYALFSQFGHVVDIVALKTMKMRGQAFVIFKELGSSTNALRQLQGFPFYGKPMRIQYAKTGSDIISKMRGTFADKEKKKEKKKARTVDQTATTTNKKPGQGTPNSAIPQGNSTTQIPQVPDYPSKLNFYSLNKLTQRETNEMMLSHAVXISSTWPSSEVPSGYPGRHDIAFVEFENDGQAGAARDALQGF

SEQ ID NO: 9508 - protein, 88 aa, Homo sapiens
  DOMAIN (34)..(62): !!!! PROTEIN ALU SUBFAMILY WARNING ENTRY NUCLEAR PHOSPHO domain identified by eMATRIX, accession number PD02454B, p-value= 9.892e-12, raw score of 11.61
  misc_feature (1)...(88): Xaa = X or * as defined in Table 2
DLLKVLHEKPKLARRSGSHLXPRHFGRLRWKDCIKPGVQDHSGQYRESPSLQNIKKKIIWAWWCMPIVPTTQAVKVGGSLELKRLRLQ

SEQ ID NO: 9509 - protein, 137 aa, Homo sapiens
VLKLQKVYYAQSQQKVFDVRLNGHVVVKDLDIFDRVGHSTARDEIIPMSIRKGKLSVQGEVSTFTGKLYIEFVKGYYDNPKVCALYIMAGTVDDVPKLHSNPLLPLPVVRTNDYPEQGGGVWERNQPYWFWFLYFSQ

SEQ ID NO: 9510 - protein, 147 aa, Homo sapiens
  misc_feature (1)...(147): Xaa = X or * as defined in Table 2
MGSWSLPGRTLWKEKVRFLKSKERTNPGSNFFSFPGSQHTREERSQECLSLPVLPSYLATRLSLPDSCPLKGRKAHXQRHSEIXLMGFEPGWPGKLXGWIELAFLLGCLHLTLPLPCPTPLPPKSTKSGCFSLSIALCFNKQFAVTK

SEQ ID NO: 9511 - protein, 321 aa, Homo sapiens
  misc_feature (1)...(321): Xaa = X or * as defined in Table 2
VRGGLAAGRGRGSAGAAPVVVAAMLGAWAVEGTAVALLRLLLLLLPPAIRGPGLGVAGVAGAAGAGLPESVIWAVNAGGEAHVDVHGIHFRKCIPLXGRVGRASDYGMKLPILRSNPEDQSCYQTERSNEETFGYESPIQREGGLTCWSLKFAEVYFAQSQQKVFDVRLNGHVVVKDLDIFDRVGHSTAHDEIIPMSIRKGKLSVQGEVSTLYTGNSNMEFVKGYLXPIPKVCALYIMAGTVDDVPKLQPHPGXERKKGEEEEEEYDEGSIPKKNRPIKNGGQSGPRHNPTPXASDNSSLMFPILVAFGVFIPTLFCLCRL

SEQ ID NO: 9512 - protein, 52 aa, Homo sapiens
MEGEPPPVEERRRLQEELNEFVESGCRTLEEVTASLGWDLDSLDPGEEEAAE

SEQ ID NO: 9513 - protein, 150 aa, Homo sapiens
  DOMAIN (86)..(113): Protamine P1 proteins domain identified by eMATRIX, accession number BL00048, p-value=8.763e-09, raw score of 6.39
RNSEKEVEKRKVALQEAKLKAKGLNPDGTPALSTLGGFSPASKPSSPREVKAEEKSPISINAKTVKKEPEDRQQASKSPYNGYNNRRSRSGTYSSRSRSRSRSHSESPRRHHNHSSPHLKAKHTRDDLQSSNRHGHKRKKSRSRSQSKSR

SEQ ID NO: 9514 - protein, 138 aa, Homo sapiens
  DOMAIN (85)..(118): CYCLIN CELL CYCLE DIVISION PROTE domain identified by eMATRIX, accession number PD02331B, p-value=2.875e-09, raw score of 13.43
QRGNYSFEIVAMACINLASKIEEAPRRIRDVINVFHHLRQLRGKRTSYIYQSLGDVEWYIEMKLSSWQQTPSPLILDQNYINTKNQVIKAERRVLKELGFCVHVKHPHKIIVMYLQVLECERNQTLVQTAWVVHDGIT

SEQ ID NO: 9515 - protein, 88 aa, Homo sapiens
  DOMAIN (12)..(39): Protamine P1 proteins domain identified by eMATRIX, accession number BL00048, p-value=8.763e-09, raw score of 6.39
  misc_feature (1)...(88): Xaa = X or * as defined in Table 2
TSNFYYLSYNNRRSRSGTYSSRSRSRSRSHSESPRRHHNHGSPHLKAKHTRDDLKSSNRHGHIRKKSRSRSQSKSRDHSDAGXKHRLE

SEQ ID NO: 9516 - protein, 607 aa, Homo sapiens
  DOMAIN (412)..(432): CORONAVIRUS NUCLEOCAPSID PROTEIN domain identified by eMATRIX, accession number DM01206B, p-value=8.429e-12, raw score of 10.69
  misc_feature (1)...(607): Xaa = X or * as defined in Table 2
FPGRRFRLRWACVRLAKTMASGPHSTATAAAAASSAAPSAGGSSSGTTTTTTTTTGGILIGDRLYSEVSLTIDHSLIPEERLSPTPSMQDGLDLPSETDLRILGCELIQAAGILLRLPQVAMATGQVLFHRFFYSKSFVKHSFEIVAMACINLASKIEEAPRRIRDVINVFHHLRQLRGKRTPSPLILDQNYINTKHQVIKAERRVLKELGFCVHVKHPHKIIVMYLQVLECERNQTLVQTAWNYMNDSLRTNVFVRFQPETIACACIYLAARALQIPLPTRPHWFLLFGTTEEEIQEICIETLRLYTRKKPNYELLEKEVEKRKVALQEAKLKAKGLNPDGTPALSTLGVGFSPASKPFIHQENVKAGRRKSPIFHLMWKDSSKKEPGGXDRQAFPKALYNGVKEKDSRRRSRNSRSASRSRSRTRSRSRSHTPRRHYNNRRSRSGTYSSSPRSRSPSHSESPRRHHNHGSPHLKAKHTRDDLKSSNRHGHKRKKSRSRSQSKSRDHSDAAKKHRHERGHHRDRRERSRSFEEVPXKARHHGWPVRSGTWARAQGADLSSSLWSPAIQFLGFGPIYQCDGMGLNPKTIKRKTGLGFDFLETPPRSS

SEQ ID NO: 9517 - protein, 522 aa, Homo sapiens [sequence omitted]

SEQ ID NO: 9518 - protein, 187 aa, Homo sapiens
  DOMAIN (30)..(101): RNA recognition motif. domain identified by PFam, accession name rrm, E-value=1.3e-06, PFam score of 35.5
  misc_feature (1)...(187): Xaa = X or * as defined in Table 2
GLRTPAAYLYCGTVRTAGVAAASRYQGDNIYVKNLDDSIDDERLQKEFSPFGTIXSAKGMMEGGHSKGFGFRICFSSPEEASKAGTELNGRTVATKPSYVALAQPKEECQAHLSNQHMQRMASVRAVPNHVMNPYKPAPPSGYLMTGIPETQNRPPRPGAVGHPCNPSTLGGQEGKNTGSGDRDHPG

SEQ ID NO: 9519 - protein, 754 aa, Homo sapiens
  DOMAIN (238)..(278): Poly-adenylate binding protein unique domain proteins. domain identified by eMATRIX, accession number PF00658A, p-value=1.000e- 40, raw score of 19.88
  DOMAIN (168)..(520): RNA recognition motif. domain identified by PFam, accession name rrm, E-value=1.1e-112, PFam score of 387.8
MKPKTSEEVCSPLVWQYSLFPSHTLGNPVHIQALTTMTFSKSLSPTSTIFRVLGQNSAKTAPVKGIHDHHAVKGNGLFSASSSGAGVQRAGRLGGPGAGGQDPRSQLVSASAAAVGDSSSQQAPLLRPTRVAAVPAGTRSAVRVAACGPAGSRAEMNPSAPSYPMASLYVGDLHPDVTEAMLYEKFSPAGPILSIRVCRDMITRRSLGYAYVNFQQPADAERALDTMNFDVIKGKPVRIMWSQRDPSLRKSGVGNIFIKNLDKSIDNKALYDTFSAFGNILSCKVVCDENGSKGYGFVHFETQEAAERAIEKMNGMLLNDRKVFVGRFKSRKEREAELGARAKEFTNVYIKNFGEDMDDERLKDLFGKFGPALSVKVMTDESGKSKGFGFVSFERHEDAQKAVDEMNGKELNGKQIYVGRAQKKVERQTELKRKFEQMKQDRITRYQGVNLYVKNLDDGIDDERLRKEFSPFGTITSAKVMMEGGRSKGFGFVCFSSPEEATKAVTEMNGRIVATKPLYVALAQRKEERQAHLTNQYMQRMASVRAVPNPVINPYQPAPPSGYFMAAIPQTQNRAAYYPPSQIAQLRPSPRWTAQGARPHPNTSTQTMGPRPAAAAAAATPAVRTVPQYKYAAGVRNPQQHLNAQPQVTMQQPAVHVQGQEPLTASMLASAPPQEQKQMLGERLFPLIQAMHPTLAGKITGMLLEIDNSELLHMLESPESLRSKVDEAVAVLQAHQAKEAAQKAVNSATGVPTV

SEQ ID NO: 9520 - protein, 683 aa, Homo sapiens
  DOMAIN (130)..(170): Poly-adenylate binding protein unique domain proteins. domain identified by eMATRIX, accession number PF00658A, p-value=1.000e- 40, raw score of 19.88
  DOMAIN (60)..(412): RNA recognition motif. domain identified by PFam, accession name rrm, E-value=1.1e-112, PFam score of 387.8
  misc_feature (1)...(683): Xaa = X or * as defined in Table 2
FSIPVDFCPSALAPRSPPPGSGPQPRHSLSSSHGKVAACGPAGSRAEMNPSAPSYPMASLYVGDLHPDVTEAMLYEKFSPAGPILSIRVCRDMITRRSLGYAYVNFQQPADAERALDTMNFDVIKGKPVRIMWSQRDPSLRKSGVGNIFIKNLDKSIDNKALYDTFSAFGNILSCKVVCDENGSKGYGFVHFETQEAAERAIEKMNGMLLNDRKVFVGRFKSRKEREAELGARAKEFTNVYIKNFGEDMDDERLKDLFGKFGPALSVKVMTDESGKSKGFGFVSFERHEDAQKAVDEMNGKELNGKQIYVGRAQKKVERQTELKRKFEQMKQDRITRYQGVNLYVKNLDDGIDDERLRKEFSPFGTITSAKVMMEGGRSKGFGFVCFSSPEEATKAVTEMNGRIVATKPLYVALAQRKEERQAHLTNQYMQRMASVRAVPNPVINPYQPAPPSGYFMAAIPQDXDRAAYYPPSQIAQLRPSPRWTAQGARTHPFQNMPGAIRPAAPRPPFSTMRPASSQVPRVMSTQRVANTSTQTMGPRPAAAAAAATPAVRTVPQYKYAAGVRNPQQHLNAQPQVTMQQPAVHVQGQEPLTASMLASAPPQEQKQMLGERLFPLIQAMHPTLAGKITGMLLEIDNSELLHMLESPESLRSKVDEAVAVLQAHQAKEAAQKAVNSATGVPTV

SEQ ID NO: 9521 - protein, 78 aa, Homo sapiens
  DOMAIN (37)..(60): TRANSFORMING PROTEIN P21 RAS SIGNATURE domain identified by eMATRIX, accession number PR00449C, p-value=6.786e-21, raw score of 17.27
  DOMAIN (15)..(78): Ras family domain identified by PFam, accession name ras, E- value=0.00027, PFam score of -88.1
ATMATAPYNYSYIFKYIIIVMADCPHTIGVEFGTRIIEVSGQKIKLQIWDTAGQERFRAVTRSYYRGAAGALMVYDIT

SEQ ID NO: 9522 - protein, 264 aa, Homo sapiens
  DOMAIN (82)..(104): TRANSFORMING PROTEIN P21 RAS SIGNATURE domain identified by eMATRIX, accession number PR00449A, p-value=6.824e-19, raw score of 13.20
  DOMAIN (83)..(264): Ras family domain identified by PFam, accession name ras, E- value=5.1e-14, PFam score of 22.7
  misc_feature (1)...(264): Xaa = X or * as defined in Table 2
GSTGAVTAATATAATAAGASAPLGLPVYLPAPRSTAPAPSPAASALLFLVLTPPSRPERLPSHQQPPSATMATAPYNYSYIFKYIIIGDMGVGKSCLLHQFTEKKFMGXFVPHTIGCWNLGTRIIESLVGQKIKLQIWGLRQGQERLRAVYTRAYYRGAAGALMVYDITRRSTYNHLSSWLTRCQGISPNPKYWXXFSIGNXSQIWRPQRDVTYEEAKQFAEENGLLFLEASAKTGRRIVEDAFPLRACPRKIYQNIQDGKLGS

SEQ ID NO: 9523 - protein, 90 aa, Homo sapiens
  misc_feature (1)...(90): Xaa = X or * as defined in Table 2
ACDDWNRMDKSHLHPPPPPFPRDPDYVGPSPGTRSPPPTSGSRSPRNRSAPPAPPAAPPQVQARPPXHSPPDKRKRPNCRTRGSPPWFRS

SEQ ID NO: 9524 - protein, 121 aa, Homo sapiens
SLICFAVGVGDCAEFWVTRLAPRAEKRRLAPAVPPHHQDERGGTSTPHFHNLSHGFWVTFPALLPQYDILPLNSFLHEIQEPSLGSGLGPFSCNTYLISFSSTCHLAPVINLWALPGASIM

SEQ ID NO: 9525 - protein, 78 aa, Homo sapiens
  misc_feature (1)...(78): Xaa = X or * as defined in Table 2
PCALVLPLRPYATKXGMLPWLLLGHLQSRAFAVALDHILFXVLCHVXIPSILTKIFENGYFVISVLLMRNILSSSALL

SEQ ID NO: 9526 - protein, 85 aa, Homo sapiens
  misc_feature (1)...(85): Xaa = X or * as defined in Table 2
LKVNISLGMVGHACNPSTLGSQEXATVPLILYFLNKLAFTSHCGITLNSFLHKIQEPSLGSRLGPLSCNYHATALQPGQQSKALS

SEQ ID NO: 9527 - protein, 159 aa, Homo sapiens
  DOMAIN (55)..(79): PROTEIN NUCLEAR RIBONUCLEOPROTEIN SMALL MRNA RNA domain identified by eMATRIX, accession number PD01861A, p-value=8.085e- 15, raw score of 14.06
  DOMAIN (38)..(106): Sm protein domain identified by PFam, accession name Sm, E- value=5.8e-15, PFam score of 63.2
LWGLGNPETKEDTVFLKREYTFPRHLSNGVSSYLLNRNRERVSPNEKHLVLLRDGRTLIGFLRSIDQFANLVLHQTVERIHVGKKYGDIPRGIFVVRGENVVLLGEIDLEKESDTPLQQVSIEEILEEQRVEQQTKLEAEKLKVQALKDRGLSIPRADT

SEQ ID NO: 9528 - protein, 168 aa, Homo sapiens
  DOMAIN (47)..(71): PROTEIN NUCLEAR RIBONUCLEOPROTEIN SMALL MRNA RNA domain identified by eMATRIX, accession number PD01861A, p-value=4.780e- 14, raw score of 14.06
  DOMAIN (32)..(105): Sm protein domain identified by PFam, accession name Sm, E- value=0.00067, PFam score of 25.8
  misc_feature (1)...(168): Xaa = X or * as defined in Table 2
EGRGFGRAGLPPLCIAALFQFKMNYMPGTATLIEDIDKKHLVLLRDGRTHIGFLRSIDQFANLVLHQTVERIHVGQKYTGDIPRGIFVVRGENVVLLGEIDLEKESDTPLQQVSHXRKFLEEQKGWNQQTKLEAEKLKVQALKDRGLSIPRADTFDKDLFFCPEAVGS

SEQ ID NO: 9529 - protein, 178 aa, Homo sapiens
  misc_feature (1)...(178): Xaa = X or * as defined in Table 2
TVFQIWANHPGQRPARQLCPVHLLGGQSHQEPRHTSNSEPSRASASLRRLTPLKPTGIGPGSQILEDRDFRAFTXWGDYFWGKGAPACLIQDGVKGQWAGPHSGVGGVGWPAPRACPPVFSPQGPQSSACGCQYYLSPRPKAYPQGWGRGGDPPGQNVRSSVCDLRCCMWTLNCTCSF

SEQ ID NO: 9530 - protein, 111 aa, Homo sapiens
  misc_feature (1)...(111): Xaa = X or * as defined in Table 2
RLLFLVRKRMISFSAPPLMLPFSFYFFVCPAARTARKRKPSPEPEGEVGPPKINGEAQPWLSTSTEGLKIPMTPTSSFVSPPPPTAXPHSNRTTPPEAAQNGQSPMAALIL

SEQ ID NO: 9531 - protein, 161 aa, Homo sapiens
ARKVRARAAGLESRTGSTGPRPCATRCWRCTSTATRGPSRASFKKEPALTAVARTARKRKPSPEPEGEVRAPLRSTEKAQPGCPHSTEGLKIPMTPTSSFVSPPPPTASPHSNPGPHRLESGPRMGQFPIGSPDLSSRQFRGQSCSKDANQVHSTTRRNSN

SEQ ID NO: 9532 - protein, 318 aa, Homo sapiens
  misc_feature (1)...(318): Xaa = X or * as defined in Table 2
ALEGAGKSRGFWRAGLGQQAQDRARHAAGRCTSTATSGPFESKFKKEPALTAGRLFGVFEGQRGQPGLKAVCKNSKGKGSPLPEPRKVKSGPLKIQRRGPSRRLSPHPQRGSRSPXLLHPLLCLRHHPLPHLIPTGPHRLKRPRMASPPWQPXSXXQTMQGASHASKDANPGSLPTTRKEXPTVGPSSVLLXTKERLGPKRGGGPREQATQEDWEPVHPASLPDFLFGQPVAPLCCTLCHERLEDTHFVQCPSVPSHKFCFPCSSQGIKQQGSSGEVYCPSGDKCPSCGLPMSPWAFMQGEIATILAGDVKVKKERDS

SEQ ID NO: 9533 - protein, 68 aa, Homo sapiens
  DOMAIN (3)..(46): kw TRANSCRIPTASE REVERSE II ORF2 domain identified by eMATRIX, accession number DM01354T, p-value=9.000e-20, raw score of 9.48
  misc_feature (1)...(68): Xaa = X or * as defined in Table 2
PTRPRTSYEKQGYLLLPPVFSIVLEVLARAISQETEIKSVQMGKEEVKLSLFVCVYIYAXENPVESTK

SEQ ID NO: 9534 - protein, 115 aa, Homo sapiens
  DOMAIN (33)..(88): kw TRANSCRIPTASE REVERSE II ORF2 domain identified by eMATRIX, accession number DM01354Q, p-value=9.565e-37, raw score of 9.23
  misc_feature (1)...(115): Xaa = X or * as defined in Table 2
CTVGVRCTVFPTEHKLPAVESHLIVSRSESVINKIXANQIWEHIKKIIHHEEVGFILGMQGWLNIRKAPTEIYHINRSKDKNHMIILTDXEKAFDKIXHYFILKTLDKLGIXGNF

SEQ ID NO: 9535 - protein, 373 aa, Homo sapiens
  DOMAIN (158)..(202): Synapsins proteins domain identified by eMATRIX, accession number BL00415N, p-value=8.076e-10, raw score of 4.29
ERLLRVCLALGSAGTADDVKLHPVSCADTARSTPGTSAPSTSGTSAPFTPGTSAPSTPGTSAPSTPGTSAPSTPGTSAPSKPGTSAPSTPGTSAPSKPGTSASSTPGTSAPSKPGTSAPSTPGTSAPSKPGTSAPSTPGTSAPSKPGTSAPSTPGTSAPSTPGPQHPPHRGPQHPPSRGPQHPPHRGPQHPPSRGPQHPPHLGPQHPPSRGPQHPPHQGPQHPPSRGPQHPPPPGTSAPSKPGTSAPSTPGTSAPSKPGTSAPSTPGTSAPSKPGTSASSTPGTSAPSKPGTSAPSTPGTSAPSKPGTSAPSTPGTSAPSKPGTSAPSTPGTSAPSKPGTSAPSKPGTSAPSKPGTSAPSKPGTSAPADPGVL

SEQ ID NO: 9536 - protein, 157 aa, Homo sapiens
  DOMAIN (95)..(122): C1q domain proteins domain identified by eMATRIX, accession number BL01113A, p-value=7.128e-10, raw score of 17.99
  misc_feature (1)...(157): Xaa = X or * as defined in Table 2
GWHWFLASQKSLLKPPLSRNPCVLVSCHMAQSWARTQEFLCPMCPTTCAQSGTGTESCFPNPNXVLGAGAPQPDQRCHKAGPFSSPGFRLPSSRHGGPVLPGTLGPPGPPGRPPHKPSNEQRDAGQQLQLPPPACPQGKLPQLPFCLKFYSLPELPH

SEQ ID NO: 9537 - protein, 125 aa, Homo sapiens
  misc_feature (1)...(125): Xaa = X or * as defined in Table 2
LRKDDTQIREAFHIFVQSWRPALPSLPSLPLARALAETLNQPFGSGLITPSGILLNSQMLDFSWPNRTANHSAPSTVVRPAEGLCGTYLALGANGAARGLSGLTQVLLNVLNXNRNLSDSLARGR

SEQ ID NO: 9538 - protein, 105 aa, Homo sapiens
AAQVLIMGPDDFIVAMVSSLNQPFGSGLITPSGILLNSQMLDFSWPNRTANHSAPSLENSVQPGKRPLSFLLPTVVRPAEGLCGTYLALGANGAARGLSGLTQGC

SEQ ID NO: 9539 - protein, 674 aa, Homo sapiens
  DOMAIN (152)..(195): Gamma-glutamyltranspeptidase proteins domain identified by eMATRIX, accession number BL00462A, p-value=6.438e-24, raw score of 20.89
  DOMAIN (166)..(670): Gamma-glutamyltranspeptidase domain identified by PFam, accession name G_glu_transpept, E-value=1.1e-80, PFam score of 281.5
  misc_feature (1)...(674): Xaa = X or * as defined in Table 2
NSRVDDFVARARMAAENEASQESALGAYSPVDYMSITSFPRLPEDEPAPAAPLRGRKDEDAFLGDPDTDPDSFLKSARLQRLPSSSSEMGSQDGSPLRETRKDPFSAAAAECSCRQDGLTVIVTACLTFATGVTVALVMQIYFGDPQIFQQGAVVTDAARCTSLGIEVLSKQGSSVDAAVAAALCLGIVAPHSSGLGGGGVMLVHDIRRNESHLIDFRESAPGALREETLQRSWETKPGLLVGVPGMVKGLHEAHQLYGRLPWSQVLAFAAAVAQDGFNVTHDLARALAEQLPPNMSERFRETFLPFGRPPLPGSLLHRPDLAEVLDVLGTSGPAAFYAGGNLTLEMVAEAQHAGGVITEEDFSNYSALVEKPVCGVYRGHLVLSPPPPHTGPALISALNILEGFNLTSLVSREQALHWVAETLKIALALASRLGDPVYDSTITESMDDMLSKVEAAYLRGHINDSQAAPAPLRPVYELDGAPAAAQVLFMGPDDFIVPMVSSLNQPFGSGLITPSGILLNSQMLDFSWPNRTANLSAPSLENSVQPGKRPLSFLLPTVVRPAEGLCGTYLALGANGAARGLSGLTQVRFTPWLAFFSREPSCGLDCRCLSXQSNLLQVDSECRAETSWGGHRDRXRKDSSQGCPWVHGSRRTNNFIIAVKDPRSPDAAGATIL

SEQ ID NO: 9540 - protein, 75 aa, Homo sapiens
  misc_feature (1)...(75): Xaa = X or * as defined in Table 2
IFQCTKFTWDSQITPRLFHPAPPTWCRPLPVSGXRRVRGWTTRQGSGGGRGPAPLSSQAPPKGPVPFQWHLRAEG

SEQ ID NO: 9541 - protein, 611 aa, Homo sapiens
  DOMAIN (450)..(484): PH domain identified by PFam, accession name PH, E-value= 0.00031, PFam score of 20.2
MGLAMFAVPPGHTTPAGAPHSASSASLHSERPLSSSAWAGPRPEGLHQRSCSVSSADQWSEATTSLPPGMQHPVLPADIKLREGQDSELEQKTAVCAAQASLAGEKGRLGVSAPGASPLMLSVAANAALGWDGVGVPDGWGSGSPPSAVCVQTQARASTRRQASTVTRTHFEMRPPWSPPGAENQKRSCGESSWPAAPQQFALSNSAAIRAEIQRFESVHPNIYAIYDLIERIEDLALQNQIREHVISIEWARRWCRLGGPGPDLSRPGRGQVGAAKWLSCWGPSGIPSQQLAGGPPAVRALQLRGHPGEIQRFESVHPNIYSIYDLIERIEDLALQNQIREHVNSIEGKRTGGCGNGPQWPLRRRPRAPQAVLAMLSLSGVLARLRTRPRGLPICVAEPAGSFAISRSGTLWGWGYYADCVPGREGGVAWGGRDQICPGLAGEEAEESFEFVVVSLTGQTWHFEASTAEERDSWVQSVQAQILASLQGACSAKDKVVISVGEDGFFLYGMHVPPTMEVPAEGPFPGRSDIIALWWNSHIAQGSSATPIALAICKESRKQDKESRKQDKESRMGTGRSSGEWKEKRCGEGEEDGQECRYLLLTLARQFSEA

SEQ ID NO: 9542 - protein, 199 aa, Homo sapiens
  DOMAIN (67)..(80): N-acetyl-gamma-glutamyl-phosphate reductase proteins domain identified by eMATRIX, accession number BL01224E, p-value=9.842e- 09, raw score of 7.46
RATRPPCDGSNSAAIRAEIQRFESVHPNIYAIYDLIERIEDLALQNQIREHVISIEGERSRGLREPGRSGLSGAGRGLHRPCLAMLSLSGVLARLRTRPRGLPICVAEPAGSFAISRSGTLWGWGFSADCVPGREGGVAWGGRDQICPGLAGEGGRGRGLQGDPRLLGLEAAAGHAGADRPPGTPHPESGPETPGHCAA

SEQ ID NO: 9543 - protein, 92 aa, Homo sapiens
LPWLRWAGMALGSLTAGAVGPRPQRCALRPRQGPAPEGRQAPRKGRSPHHPPLQSGSWRLPCPPRYRASRPPKPQRARRSRPDRARPAPPAP

SEQ ID NO: 9544 - protein, 43 aa, Homo sapiens
GRFSSESSPRAGPPPAPHRGHVQRCCVSPTGLLIWKELERPFC

SEQ ID NO: 9545 - protein, 97 aa, Homo sapiens
  misc_feature (1)...(97): Xaa = X or * as defined in Table 2
FLRWSLALSPSLECSGAISAHRNLRLPGSTNLPASTSRVASTVGMATAPGLNFCIFSREGXVKHVGPGCLELPTSSDPLPLVSPKLRDYRPEPLCLA

SEQ ID NO: 9546 - protein, 575 aa, Homo sapiens
  DOMAIN (330)..(350): HIV REV INTERACTING PROTEIN SIGNATURE domain identified by eMATRIX, accession number PR00405A, p-value=6.327e-14, raw score of 17.71
  DOMAIN (326)..(446): Putative GTP-ase activating protein for Arf domain identified by PFam, accession name ArfGap, E-value=4.7e-53, PFam score of 189.7
  misc_feature (1)...(575): Xaa = X or * as defined in Table 2
TDLKRCTYYETCATYGLNVERVFQDVGIIDSAVPCSAQKVVALRKKQQLAIGPASHCPNSPKHWAVSAASIPAVHITQATNGGGKAFSDYSSSVPSTPSISQRELRIETIAASSTPTPIRKQSKRRSNIFTSRKGADLDREKKAAECKVDSIGSGRAIPIKQGILLKRSGKSLNKEWKKKYVTLCDNGLLTYHPSLHDYMQNIHGKEIDLLRTTVKVPGKRLPRATPATAPGTSPRANGLSVERSNTQLGGGNRGRGVVXICGWVSLTGADVGTFEGFNGRRERELLGFQSVQAQILASLQGCLQCQGQDFDLGNQNAALAVQAVRTVRGNSFCIDCDAPNPDWASLNLGALMCIECSGIHRHLGAHLSRVRSLDLDDWPPELLAVMTAMGNALANSVWEGALGGYSKPGPDACREEKERWIRAKYEQKLFLAPLPSSDVPLRQQLLRAVVEDDLRLLVMLLAHGSKEEVNETYGDGDGRTALHLSSAMANVVFTQLLIWGESRASSLPXPRSSXPCSLKATSSFLPYNQSLSSHVLPTVNMCFLLQYGVDVRSRDARGLTPLAYARRAGSQECA

SEQ ID NO: 9547 - protein, 985 aa, Homo sapiens
  DOMAIN (778)..(798): HIV REV INTERACTING PROTEIN SIGNATURE domain identified by eMATRIX, accession number PR00405A, p-value=6.327e-14, raw score of 17.71
  DOMAIN (778)..(867): Putative GTP-ase activating protein for Arf domain identified by PFam, accession name ArfGap, E-value=5.6e-20, PFam score of 79.8
  misc_feature (1)...(985): Xaa = X or * as defined in Table 2
ESEEILWGEQLAGGPPQQFALSNSAAIRAEIQRFESVHPNIYAIYDLIERIEDLALQNQIREHVISIEDSFVNSQEWTLSRSVPELKVGIVGNLSSGKSALVHRYLTGGPIVQGGSPLKGGGLRSEIAADGHSYLLLIRDEGGPGELQYAAWVDAMVFVWSPCEDGITFSKTVYNYFLRLCSFRNASEVPMVLVGTQDAISAANPRVIDDSRARKLSTDLKRCTYYETCATYGLQCGSVSFQDVAQKVVGTLRKKQQLAIGPCKSLPNSPSHFGRVRRLHSSAVYQSTSISQRELRIETIAASSTPTPIRKQSKRRSNIFTVPLPPAAAAASSSSWSSSFSSSSLSFSSSSSFSSSSSSSSSRCRRSPGAWVSALTGADRLSRKGADLDREKKAAECKVDSIGSGRAIPIKQGILLKRSGKSLNKEWKKKYVTLCDNGLLTYHPSLHDYMQNIHGKEIDLLRTTVKVPGKRLPRATPATAPGTSPRANGLSVERSNTQLGGGTGPMLFQGPSFHTRFPRFQSPWLPIAFPQDFSIPSVVLDHWISCSLGPVTAALLVPFLCPVPAVSAWQHRSAAGAHTQELADGAHPARVPLPHADADTDPRAPHSASSASLHSERPLSSSAWAGPRPEGLHQRSCSVSSADQWSEATTSLPPGMQHPASGPAEVLSSSPKLDPPPSPHSNRKKHRRKKSTGTPRPDGPSSATEEAEESFEFVVVSLTGQTWHFEASTAEERELWVQSVQAQILASLQGCRSAKDKTRLGNQNAALAVQAVRTVRGNSFCIDCDAPNPDWASLNLGALMCIECSGIHRHLGAHLSRAPHNNGPFLSVISREEKERWIRAKYEQKLFLAPLPSSDVPLGQQLLRAVVDKNELRLLVMLLAHGSKEEVNETYGDGDGRTALHLSSAMANVVFTQLVIWTGWNXGTPDARGLTPLAYARRAGSQECADILIQHGCPGEGCGLAPTPNREPANGTNPSAELHRSPSLL

SEQ ID NO: 9548 - protein, 154 aa, Homo sapiens
  misc_feature (1)...(154): Xaa = X or * as defined in Table 2
TLCTYILISEVISLPGTAFIQRKGLGLRPSQNNAYSLSQTSPGLIIFLRVQGKFDLNLALVLFFSGGTESRSIAQLECSGMTSAHCNLRFLGSSYSPASASXVAGTTGACHHAQLIFLVFLVEKGFHRVSRDGLHLLNLVIRPPQPPKALGLQA

SEQ ID NO: 9549 - protein, 184 aa, Homo sapiens
  misc_feature (1)...(184): Xaa = X or * as defined in Table 2
PPPCRAKQHQTKTKKRPQRATSNVFAMFDQSQIQEFKEAFNMIDPDQDGFIDREDLHDMLASLGKNPTXWSILDAMMMRAPGPPSNFTPWFPHHGFGEERLNGHQIPEDVHRKMPFACFEXKKPLGTIREDYLRELLTTHGGIGFTDEEVDELYREAPYXPKRGNFNYSEFTRILKHGAKDKDD

SEQ ID NO: 9550 - protein, 332 aa, Homo sapiens
  misc_feature (1)...(332): Xaa = X or * as defined in Table 2
VAGATGTHHHAWLILSFLRWSLTLSPRLECSGTFSAHCNFRLLGSSNSPASASXVARITGAHHHTRLIFVFLVETRFHHGGQVGLKLLTSGDPPASASQSTGITGVSHHAWPYFKLFCRDGVLLCCPGXSQTLGLKQSSCQSFPKXLDYRCEPPRPTNLXRCLRDRVPYLTTSPVRSRGGTRMEKEVPEQRLAGSRMGQELTQQPSTETSWSLGRRRTKSPLFXIFFMFLRRSLNSVTQAGVQXHNLGSLQPPPHGFKRLSCLSLLSSWDHRCTPPCLDNFXIFGRDGGFTMLARQVSNSXPQGPPTLASQSSGNTGLSHCNQPVAPIFAPR

SEQ ID NO: 9551 - protein, 156 aa, Homo sapiens
  misc_feature (1)...(156): Xaa = X or * as defined in Table 2
GSTLSPSLPGFCPENSNKCKFNTLLTAESLKLPQDLSFDPSQKPTQVRHLESPPGEGPPSRAPQKNSHEIRNCLMKCIFLXLGRMKAQTPTLLFSPGLGMSPAARPRSFPGGLGEVGAGTISVPSTLTPSTSETTLPQPRYGMKLADADVGKKKKK

SEQ ID NO: 9552 - protein, 223 aa, Homo sapiens
  misc_feature (1)...(223): Xaa = X or * as defined in Table 2
ELGHWGNRVCLSEALGLAELHPCPGNEVGPQRQGXGLAVLILAIILLQGTLAQSIKGNHLVKVYDWQEDGSVLLTCDAEAQNISTWFKDGKMIGFLTEDKKKWESGEVMPRDPRGMYQCXRDHRNKSKTTSQVLFTGMCSGTCIXDLNAATISGFPLWLKTVSLFVLAFGVYFIAGQGWSSASPRASDKQTLLPNDPAPTQPLKDPRKMTQYSHLQGNQLRRN

SEQ ID NO: 9553 - protein, 50 aa, Homo sapiens
  misc_feature (1)...(50): Xaa = X or * as defined in Table 2
WTGGKKKAGWMPKKESVKLAQXCMPVIPATQEAETGKLLEPRSSRSAWET

SEQ ID NO: 9554 - protein, 108 aa, Homo sapiens
  DOMAIN (11)..(34): Translationally controlled tumor protein domain identified by eMATRIX, accession number BL01002A, p-value=4.000e-22, raw score of 13.19
  DOMAIN (11)..(107): Translationally controlled tumor protein domain identified by PFam, accession name TCTP, E-value=1.1e-21, PFam score of 85.5
RRRRLPSVAIMIIYGDLISHDEMFSDIYKIREIADGLCLEVEGKMVSRTEGNIDDSLIGGNASAEGPEGEGTESTVITGVDIVMNHHLQETSFTKEAYKKYIKDYMKC

SEQ ID NO: 9555 - protein, 110 aa, Homo sapiens
  DOMAIN (1)..(24): Translationally controlled tumor protein domain identified by eMATRIX, accession number BL01002A, p-value=1.360e-24, raw score of 13.19
  DOMAIN (1)..(110): Translationally controlled tumor protein domain identified by PFam, accession name TCTP, E-value=4.8e-37, PFam score of 136.5
MIIYRDLISHDEMFSDIYKIREIADGLCLEVEGKMVSRTEGNIDDSLIGGNASAEGPEGEGTESTVITGVDIVMNHHLQETSFTKEAYKKYIKDYMKSIKGKLEEQRPDR

SEQ ID NO: 9556 - protein, 93 aa, Homo sapiens
  DOMAIN (44)..(85): kw TRANSCRIPTASE REVERSE II ORF2 domain identified by eMATRIX, accession number DM01354I, p-value=4.068e-12, raw score of 15.55
  misc_feature (1)...(93): Xaa = X or * as defined in Table 2
LNHAVQEMIVKIELTQHMYINFHGIKLEINKGKKFGKLIHLWKLNNTVLSDQXVKAEIQKGNKEIVLRWNKKEGMMYQNTWDVAKPVLRADAW

SEQ ID NO: 9557 - protein, 193 aa, Homo sapiens
  DOMAIN (174)..(187): EF-hand calcium-binding domain proteins domain identified by eMATRIX, accession number BL00018, p-value=3.400e-12, raw score of 7.41
  DOMAIN (53)..(193): EF hand domain identified by PFam, accession name efhand, E- value=2.4e-43, PFam score of 157.5
AARAAGSECGGADARRSWNCCSCCRRRRNLDPRAPDTPGLAMADQLTEEQIAEFKEAFSLFDKDGDGTITTKELGTVMRSLGQNPTEAELQDMINEVDADDLPGNGTIDFPEFLTMMARKMKDTDSEEEIREAFRVFDKDGNGYISAAELRHVMTNLGEKLTDEEVDEMIREADIDGDGQVNYEEFVQMMTAK

SEQ ID NO: 9558 - protein, 228 aa, Homo sapiens
  DOMAIN (21)..(202): Translationally controlled tumor protein domain identified by PFam, accession name TCTP, E-value=9e-06, PFam score of -17.9
  misc_feature (1)...(228): Xaa = X or * as defined in Table 2
STWAVRGSRGWGVGWGGGGGSHDEMFSDIYKIRGDRGRGLCLEGGRGRWVSRTEGNIDDSLIGGKCPPLKGPEGRRVPERHQLITGVDIVMNHHLPGNKFSQKEASKKVHQRITMKSIKGKLXRTRDPEKSKTFLXQGAAEQIQAHPLPNFQKLTSFFIGENMNPRWAWVLLLDYREDGWCPPXYDFLLRDGLEMEKMLTNVGNYFGSITLSSITGLLPCHPTQPPGT

SEQ ID NO: 9559 - protein, 60 aa, Homo sapiens
  DOMAIN (16)..(58): Ribosomal protein S14p/S29e domain identified by PFam, accession name Ribosomal_S14, E-value=0.0015, PFam score of 15.6
  misc_feature (1)...(60): Xaa = X or * as defined in Table 2
WSHLLRMLQLXWSHPPKNAAAYSSCRVXXERRGLIRTYGLDMCSQSFCQYAKDIGFIKLD

SEQ ID NO: 9560 - protein, 107 aa, Homo sapiens
  DOMAIN (76)..(107): Ribosomal protein S14p/S29e domain identified by PFam, accession name Ribosomal_S14, E-value=0.0005, PFam score of 17.1
FVILGKRCRGALGCLKSQVEEATGGTREHADWESLVPPLQACTVAWESRDAGSSRLSAESCNFYDLQNRCLFSYSRVCSNRHGLIRKYGLNMCRQCFRQYAKYIGFI

SEQ ID NO: 9561 - protein, 197 aa, Homo sapiens
  DOMAIN (90)..(130): ADP-ribosylation factors family proteins domain identified by eMATRIX, accession number BL01019A, p-value=7.085e-14, raw score of 13.20
  DOMAIN (57)..(197): Ras family domain identified by PFam, accession name ras, E- value=9.1e-57, PFam score of 202.0
GLLQAEGPWRSSGEAAFREITMEIWLLAWAISPVALSESTDPETWQSRCEDRHFLFKFLVIGSAGTGKSCLLHQFIENKFKQDSNHTIGVEFGSRVVNVGGKTVKLQIWDTAGQERFRSVTRSYYRGAAGALLVYDITSRETYNSLAAWLTDARTLASPNIVVILCGNKKDLDPEREVTFLEASRFAQENELMFLET

SEQ ID NO: 9562 - protein, 162 aa, Homo sapiens
  DOMAIN (133)..(156): TRANSFORMING PROTEIN P21 RAS SIGNATURE domain identified by eMATRIX, accession number PR00449E, p-value=8.313e-18, raw score of 13.50
  DOMAIN (15)..(162): Ras family domain identified by PFam, accession name ras, E- value=2e-28, PFam score of 107.9
GRDRVMAETYDFLFKFLVIGSAGTGKSCLLHQFIENKFKQDSNHTIGVEFGSRVANLGGEEPVKLQIWDTAGQQTGFAGKTYTSLAAWLTDARTLASPNIVVILCGNKKDLDPEREVTFLEASRFAQENELMFLETSALTGENVEEAFLKCARTILNKIDSG

SEQ ID NO: 9563 - protein, 674 aa, Homo sapiens
  DOMAIN (379)..(411): Cytochrome P450 cysteine heme-iron ligand proteins domain identified by eMATRIX, accession number BL00086, p-value=4.375e-24, raw score of 20.87
  DOMAIN (273)..(671): Cytochrome P450 domain identified by PFam, accession name p450, E-value=4.2e-163, PFam score of 555.3
MLLRLVQGDYYGDLAARLGYFPSSIVREDQTLKPGKVDVKTDEGAGAVAGVERLPAEEQARPRRHIAALSGRDRVMAETYDFLFKFLVIGSAGTGKSCLLHQFIENKCEFPAVVLGTLSCVYAHVKQDSNHTIGVEFGSRVVNVGGKTVKLQIWDTAGQERFRSVTRSYYRGAAGALLVYDITSRETYNSLAAWLTDARTLASPNIVVILCGNKKDLDPEREVTFLEASRFAQENDGARDTVLETALGPTFMELTVQWVRVEGQTHFQTVTPQEAHVQEEINLVVGHVRLPALKDRAAMPYTDMVIHEVQRFADIIPMNLPHRITRDTAFHGFLIPKGTDVITLLNTVHYDPSQFLTPQEFNPEHFLDANQSFKKSPAFMPFSAGHRLCLGESLARMELFLYLTAILQSFSLQPLGAPEDIDLTPLSSGVALANGERWRILRRFSLTILRDFGMGKQSIKERIQEEASYLLEEFQKTKTLCNVYNSMTLSKQHTHFEDDETSSEAKIHEEINQVIGPHRLPRVDDRVKMPYTDVVIHEIQRLVDIVPMGVPHNIIQDTQFRGYLLPKGTDVFPLLGSVLKDPKYFRYPDAFYPQHFLDEQGRFKKNEAFVPFSSGKRICLGEAMARMELFLYFTSTLQNFSLCSLVPLVDIDITPKLSGFGNITPTYELCLVAR

SEQ ID NO: 9564 - protein, 235 aa, Homo sapiens
  DOMAIN (62)..(102): ADP-ribosylation factors family proteins domain identified by eMATRIX, accession number BL01019A, p-value=7.085e-14, raw score of 13.20
  DOMAIN (29)..(235): Ras family domain identified by PFam, accession name ras, E- value=2.4e-53, PFam score of 190.6
  misc_feature (1)...(235): Xaa = X or * as defined in Table 2
REQARPRRHIAALSGRDRVMAETYDFLFKFLVIGSAGTGKSCLLHQFIENKFKQDSNHTIGVEFGSRVVNVGGKTVKLQIWDTAGQERFRSVTRSYYRGAAGALLVYDITSRETYNSLAAWLTDALTPVQPQKTGAFLCGNKKXPGPLEREVTFLEAPSRFAQENELMFLETSALTGENVKKAFLKCARTILNKIDSGELDRERMGSGIQYGIASLRKLRQPRSAQAVAPQPCGC

SEQ ID NO: 9565 - protein, 312 aa, Homo sapiens
  DOMAIN (143)..(170): Enoyl-CoA hydratase/isomerase proteins domain identified by eMATRIX, accession number BL00166C, p-value=4.176e-11, raw score of 18.93
  DOMAIN (62)..(245): Enoyl-CoA hydratase/isomerase family domain identified by PFam, accession name ECH, E-value=6.7e-30, PFam score of 112.8
  misc_feature (1)...(312): Xaa = X or * as defined in Table 2
VKMALVASVRVPARVLLRAGARLPGAAFGRTERAAGGGDGARPFGSQRVLVEPDAGAGVAVMKFKNPPVNSLSLEFLTELVISLEKLENDKSFRDVILTSDRPGVFSAGLDLTEMCGRSPAHYAWVLERPVQELWLRLYQSNLVLVSAINGACPAGGCLVALTCDYRILADNPRYCKGIQIRPKVGIICPFWGXKETLGKNLLGPGGGESALQVGLLFPPAGRPCKVGIVDQVWSPEKQVQSIGLSAIAQWMAIPKPMAHKLTKAIMRKGQGPPAWSRKGYADVQNFVSFISKDSIQKSLQMYLERLKEEKG

SEQ ID NO: 9566 - protein, 257 aa, Homo sapiens
MKEVVYWSPKKVADWLLENAMPEYCEPLEHFTGQDLINLTQEDFKKPPLCRVSSDNGQRLLDMIETLKMEHHLEAHKNGHANGHLNIGVDIPTPDGSFSIKIKPNGMPNGYRKEMIKIPMPELERSQYPMEWGKTFLAFLYALSCFVLTTVMISVVHERVPPKEVQPPLPDTFFDHFNRVQWAFSICEINGMILVGLWLIQWLLLKYKSIISRRFFCIIGTLYLYRGITMYETTLTAPGMLCNCSPKLCGDCEAQLR

SEQ ID NO: 9567 - protein, 230 aa, Homo sapiens
  misc_feature (1)...(230): Xaa = X or * as defined in Table 2
IPVGELYPLLEDGIAAFIEWNPTHEALWEPQEQQETQGPKSKHGEAPVGASWPFRRGFGEARPPPPVRPTLIHAWKSSXPICLFSLRHCHQALPGGTLDKWPSSPRGGCSPRTPGVTQQARRLSPHRVAGXQSSSGACPWMSRSSAPFPFLTPSQSPRAALXVRKTKSPGTGEHRLWTGLGAGGVSARPVVKHSAGPGGIHGGRAPGAEQRSGLWKAGCWGSVRASAPGP

SEQ ID NO: 9568 - protein, 116 aa, Homo sapiens
  misc_feature (1)...(116): Xaa = X or * as defined in Table 2
EVRLLSRPWPHEHEHGPWPLTIIKWDFPDYRQWKIEGTPFRKTIQKKLGCKKGLRDPWGRNEAWRYMGGFAKSVSFSXCILFKGFKWGDLLAFVVAVRELEYLPGESPXIKDKKHH

SEQ ID NO: 9569 - protein, 75 aa, Homo sapiens
SSLSKIRESIRRGSEKLVSRLRGEAAAGAAGMKRAMSLNTLNVDAPRAPGTQFPSWHLDKAPRTLSASTQDLSPH

SEQ ID NO: 9570 - protein, 132 aa, Homo sapiens
  misc_feature (1)...(132): Xaa = X or * as defined in Table 2
TASPAPPQAFRRSSSLSKIRESIRRGSEKLVSRLRGEAARRTSRVSVDQVGKEPXHQQNRQPTPPPPPFCSRTFHGSHLPCDTHRSNPVLERSLVEGGHSWIHSFPPCCPLCRMKRDMSLNTLNVDAPRAPG

SEQ ID NO: 9571 - protein, 76 aa, Homo sapiens
  misc_feature (1)...(76): Xaa = X or * as defined in Table 2
AVGSVHAGVQQWVSGGVGPPGSAGPPGRKPRLXRGPSEDPARRNAPAIERLSRRRGRCSARGLRGRDQEEGQPGRT

SEQ ID NO: 9572 - protein, 157 aa, Homo sapiens
  DOMAIN (50)..(102): CAMP-DEPENDENT PROTEIN KINASE REGULATORY CHAIN domain identified by eMATRIX, accession number DM01513B, p-value=1.000e- 40, raw score of 6.81
  DOMAIN (1)..(92): Cyclic nucleotide-binding domain identified by PFam, accession name cNMP_binding, E-value=1.3e-20, PFam score of 81.9
  misc_feature (1)...(157): Xaa = X or * as defined in Table 2
MFERIVXADEHVIDQGDDGDNFYVIERGTYDILVTKDNQTRSVGQYDNRGSFGELALMYNTPRAATIVATSEGSLWGLDRVTFRRIIVKNNAKKRKMFESFIESVPLLKALKDGQRFNPHLHFAFEGPFIRPLVKITPTQFLYLWFKTACLSNNLSA

SEQ ID NO: 9573 - protein, 492 aa, Homo sapiens
  DOMAIN (425)..(438): CAMP-DEPENDENT PROTEIN KINASE SIGNATURE domain identified by eMATRIX, accession number PR00103E, p-value=2.500e-18, raw score of 17.80
  DOMAIN (341)..(443): Cyclic nucleotide-binding domain identified by PFam, accession name cNMP_binding, E-value=5.1e-23, PFam score of 89.9
  misc_feature (1)...(492): Xaa = X or * as defined in Table 2
RRVARPGNAEPAKERRDVSRGRARRDLAGAERKAGVSERGDSGRRRPNPSIPSAAAGMSHIQIPPGLTELLQGYTVEVLRQQPPDLVEFAVEYFTRLREARAPASVLPAATPRQSLGHPPPEPGPDRVADAKGDSESEEDEDLEVPVPSRFNRRVSVCAETYNPDEEEEDTDPRVIHPKTDEQRCRLQEACKDILLFKNLDQEQLSQVLDAMFERIVKADEHVIXPKGDDGRQPFYCHRTGGTYDILVTLDNQTRSVGQYDNRGSFWRLALMYNTPRAATIVATSEGSLWGLDRVTFRRIIVKNNAKKRKMFESFIESVPLLKSLEVSERMKIVDVIGEKIIRDGERXITQGEKADSFYIIESGEVSILIRSRTKSNKDGGNQEVEIARCHKGQYFGELALVTNKPRAASAYAVGDVKCLVMDVQAFERLLGPCMDIMKRNISHYEEQLVKMFGSSVDLGNLRAVGVPHPTSLLSVTPKPSGQPQNTYRKQT

SEQ ID NO: 9574 - protein, 304 aa, Homo sapiens
SLLTRLLGDIRQWVGKEGEVQDILRQHILQQGPGGTAQVVMQAFGAGWPVPGLASWKSDVRWCPYPLQHLICISLQPLIGAHKVIVHGTRLAQVVHGHPMLIHALRVLIHQVSQELGECDIVACRAGPRSSPVPPHYLSPIALLVLSDLAKLVAVGREEAFQGLPHKQELKVVLQAVANLLRPQVGQEHQVTAVVHLEADVHAVQDACQHLHHPLPVRAGHLGDVAVEEAVTVTYEDVAQQGARLPHRQVPGVPGHAWLSAHRPQVLFRTSCRTCKSASPALPVPNLLVNSLRDCSCLGKHKHP

SEQ ID NO: 9575 - protein, 266 aa, Homo sapiens
  DOMAIN (83)..(108): Hypothetical yabO/yceC/sfhB family proteins domain identified by eMATRIX, accession number BL01129E, p-value=4.000e-25, raw score of 13.25
  DOMAIN (2)..(95): RNA pseudouridylate synthase domain identified by PFam, accession name PseudoU_synth_2, E-value=6.7e-08, PFam score of 29.0
  misc_feature (1)...(266): Xaa = X or * as defined in Table 2
EEFAAVSERIHEQVRDRQLENEYVCRVEGEFPTEEVTCKEPILVVSYKVGVCRVDPRGKPCETVFQRLSYNGQSSVVRCRPLTGRTHQIRVHLQFLGHPILNDPIYNSVAWGPSRGRGGYIPKTNEELLFVPGXAEHQAKQSLDVLDLCEGDLSPGTLTDSTAPSSELGKDDLEELATAAQKMGGKXAEAAPQELDTIALASEKAVETDVMNQETDPTLCKMPAGATGSLAPRPCDVPTCPNAIKGQALSTFHPMPAWAQDDWQKD

SEQ ID NO: 9576 - protein, 203 aa, Homo sapiens
  DOMAIN (95)..(115): kw TRANSCRIPTASE REVERSE II ORF2 domain identified by eMATRIX, accession number DM01354W, p-value=1.909e-09, raw score of 12.64
  misc_feature (1)...(203): Xaa = X or * as defined in Table 2
DFLLLVLTGLYIYRKSKIHKVLEXIIEFINVTSYKVNIQKDIAILRTSQKHXKTNXKYKAKYLEINXTNQDFYNENYKTLLRKVKDNLGKWTIIPYSSTGKLDIVKMSIILRLFYKTNAITGIVPKHSFVKINPEIPKLIYGNMGNREGKTILKNKKVGRLSLPDFQKYYKATXIKIVWYXCKKRQMNQEAEITSAKRKPWSL

SEQ ID NO: 9577 - protein, 111 aa, Homo sapiens
  misc_feature (1)...(111): Xaa = X or * as defined in Table 2
SALRRGAGAKAGRPLAPATALGGQTQPEKGPAPPXNGWTGLGAGPPAWRARPRPSPPEFSQFSLSYNMSXAKVGGXEHGSTAPGEGGPXRKGGGPPPPNPQRQGQSPGTSP

SEQ ID NO: 9578 - protein, 64 aa, Homo sapiens
  DOMAIN (12)..(40): kw TRANSCRIPTASE REVERSE II ORF2 domain identified by eMATRIX, accession number DM01354A, p-value=9.775e-11, raw score of 11.77
  misc_feature (1)...(64): Xaa = X or * as defined in Table 2
QEQNPQISILTLNRNGLNATLKRYRLLNQIKSFCKKDQTMCCLQETYLTCKDTHRPKVKGXKNI

SEQ ID NO: 9579 - protein, 110 aa, Homo sapiens
  DOMAIN (56)..(84): !!!! PROTEIN ALU SUBFAMILY WARNING ENTRY NUCLEAR PHOSPHO domain identified by eMATRIX, accession number PD02454B, p-value= 1.557e-09, raw score of 11.61
  misc_feature (1)...(110): Xaa = X or * as defined in Table 2
RRLPTGILAGRVSAAVKPTHRTQNSLLQQRITPRPWRGGSHLXSQHFGKPRQADHLSPGVPRVSPGXRGETPSLQRIQTLAQVLCCAPVVPATREVEVGGSPEPGRSRLQ

SEQ ID NO: 9580 - protein, 73 aa, Homo sapiens
  misc_feature (1)...(73): Xaa = X or * as defined in Table 2
VNMRDRFGQIMIENLRRRQCELAGVETCKSLESRIESLEFLDEMXLLEQLMRHYCLCWATKGGNELGLKEITY

SEQ ID NO: 9581 - protein, 98 aa, Homo sapiens
GPTLFCCFLPVARAVPRRPSTPLPCPWRTQLPGTSTPMATRQRESSITSCCSTSSCDADDEGVRGTCEDASLCKRCLSGAGFGAGIWGAGLGGRWACI

SEQ ID NO: 9582 - protein, 127 aa, Homo sapiens
MTAGLRQRPWAVTGKNVEHRVWAEEKSKGRGEELQVRVDVDVTYTDGHILDSKRYAVIGADLRDLSELEEKLKKCNMNTQLPTLLIAECVLVYMTPEQSANLLKWAANSFERAMFINYEQNVKSQIF

SEQ ID NO: 9583 - protein, 215 aa, Homo sapiens
MESFGVLPLFLGADAGYVGVIAGVRCLLSGVVPVDLEEFTGDVLFSACGPRSFESGSKKTVVQLLFRVMPSRVVRLATTCRWDPKPSLDLCHFGGNEACCQTPLCECVGVRRAEGDNLLICRRLMPSQKPKPLALLEETCKLPERQVVNAKEKFLEEMKKCYSSEHMNDKKAKLYYYRYGESLSGLYRRSNQPQPSLKPKPNREQGPNSLQLCDG

SEQ ID NO: 9584 - protein, 399 aa, Homo sapiens
  misc_feature (1)...(399): Xaa = X or * as defined in Table 2
AAPAEPGRALPSSVAFSLWLAPSPAARRPRFHVPGGAQLPGTVHARWPARQRESSITSCCSTSSCDADDEGVRGTCEDASLCKRFAVSIGYWHDPYIQDLVRLSKQRKAPEINRGYFARVHGCSVQLIKAFLRKTECHCSNCSNLGGQGMGSPPFWRLKDEDLSSQVNIFEVDFPMIVTRKLHSIKWLAFPLSSPILELHSEDTLQMASDCICDGHILDSKRYAVIGADLRDLSELEEKLKKCNMNTQLPTPXIAECVLVYMTPEQSANLLKWAANSFERAMFIYYQQVNMGDLFGQIMIENLRGRPVCDLAGVETCKSLESQKERLLSNGWENKHRPVRTXLEFVPPGLPSKLKXSRIESLEILDENWELLEQLMRHYCLCWATQRRKXSLGLKEITY

SEQ ID NO: 9585 - protein, 81 aa, Homo sapiens
  DOMAIN (49)..(61): UBIQUITIN C-TERMINAL HYDROLASE (C12) FAMILY SIGNATURE domain identified by eMATRIX, accession number PR00707D, p-value=8.667e- 13, raw score of 9.57
  DOMAIN (1)..(78): Ubiquitin carboxyl-terminal hydrolase, famil domain identified by PFam, accession name UCH, E-value=2.4e-05, PFam score of -52.9
FEDGSVLKQFLSETEKMSPEDRAKCFEKNEAIQAAHDAVAQEGQCRVDDKVNFHFILFNNVDGHLYENIYPPMQSKMLQYL

SEQ ID NO: 9586 - protein, 304 aa, Homo sapiens
  DOMAIN (77)..(90): UBIQUITIN C-TERMINAL HYDROLASE (C12) FAMILY SIGNATURE domain identified by eMATRIX, accession number PR00707B, p-value=3.919e- 14, raw score of 6.84
  DOMAIN (46)..(261): Ubiquitin carboxyl-terminal hydrolase, famil domain identified by PFam, accession name UCH, E-value=1.3e-32, PFam score of 121.8
  misc_feature (1)...(304): Xaa = X or * as defined in Table 2
MQLKPMEINPEVSARCTATRRARGRGRGSRVADRFGFAFFFAFAFQMLNKVLSRLGVAGQWRFVDVLGLEEESLGSVPAPACALLLLFPLTAQHENFRKKQIEELKGQEVSPKVYFMKQTIGNSLGPLGPNSTQGPNIKDQLGFEDGSVLKQFLSETKKNVPLKDRAKCFEKNEAIQAAPXMPVGTGKAQCRVDDRVNFHFYSGXPTVDGPPSMNLDGPNAFSPWTHGPQLQEDTLLKDASKVCRRNSPEREQRRSPASSARGFSCKGSLNALWGGICWIFPSFPFKHGKYITPPCQSKMLQYL

SEQ ID NO: 9587 - protein, 80 aa, Homo sapiens
  misc_feature (1)...(80): Xaa = X or * as defined in Table 2
NWISFLPWHYSHFEVYERYDSVLXIPFSLLQXPIENVYPKIXKKKSTSSNKIALVLSGTYKNSLEPRSGASSVLWFTPNL

SEQ ID NO: 9588 - protein, 124 aa, Homo sapiens
  misc_feature (1)...(124): Xaa = X or * as defined in Table 2
RALAVSMLGAWPGPWALDWGPYSMTARHGTFSLXAPYPDPCPAGPPPAPRQQGKAPSGCGGRSICSGRLPSVVWPLMPAWQRPSXGGGLHSAPNARKAQAYPGCLPFYLPLPGLLSGWSAGFLC

SEQ ID NO: 9589 - protein, 185 aa, Homo sapiens
  misc_feature (1)...(185): Xaa = X or * as defined in Table 2
ERGRKMAVESRVTQEEIKKEPEKPIDREKTCPLVLRVFTTNNGRHHEMDEFSRGNVPSTELQIFPLWMDATLKELTSLVKRVYPEARKKGTHFNFAIVFTDVKRPGYRXFSFLQSXGGLASTMSGRKGTDDSHEPLQSQKFQIGDYLDIANYPLPNRGTHPPSGRMRPILNFYLLFVEFIFPSVM

SEQ ID NO: 9590 - protein, 168 aa, Homo sapiens
  DOMAIN (64)..(109): Synaptophysin / synaptoporin proteins domain identified by eMATRIX, accession number BL00604F, p-value=7.081e-09, raw score of 5.96
  misc_feature (1)...(168): Xaa = X or * as defined in Table 2
FFFFFLKTSTLSFITTHCLQIQREGPGAEGAAVAGGAPRGAEGPAATSTETGGSAGDAAPSPPRGLPSKXQEGPGPFWGDPNARQWPGGRGRREAWRGLRAGSGESHQVGPWPASRSTGGGSGQVGGAGERLGEDSGLGQVKATRWGLSPPPAALEEAVANTGPSPPC

SEQ ID NO: 9591 - protein, 210 aa, Homo sapiens
  DOMAIN (27)..(47): Globin domain identified by PFam, accession name globin, E- value=0.0055, PFam score of 14.9
  misc_feature (1)...(210): Xaa = X or * as defined in Table 2
APEFPGRHLLLTQLCSLASLIQTRMVHLTPEEKSAVTALWGKVNVDEVGGKALGRLLVVLPWDPKRSFEVLWGNLSQLPECCXWGKPLKVKGSMAKEKVLGCPLSDGLAHLGQPSKGTFAHTEVSLHCDKLHRGSLKNFRLLGNVLGLCCLAHHFGKRISTPPVQAAXSRKLVGLVLAKCPWPHKYHLKLAFLAVQFLFKGFLWSLKTNY

SEQ ID NO: 9592 - protein, 59 aa, Homo sapiens
  misc_feature (1)...(59): Xaa = X or * as defined in Table 2
MSEETAKEVMRAYLQQLRQETGLRLCEKVFDPQNDKPSKWWTCFVKRQFMNKSLSXPGQ

SEQ ID NO: 9593 - protein, 229 aa, Homo sapiens
  misc_feature (1)...(229): Xaa = X or * as defined in Table 2
NPGAAKMPAYHSSLMDPDTKLIGNMAHLLPIRSQFKGPAPKRDTRIPDIVDEAIFLPSGPNVFFKNYEIKNEADRTLIYITLYISECLKKLQKCQFPKAQGGGKEMFYAGESTNFSHFLGEPGFFPLXPPFYAQTWPTTQEDEVMRALFTTQLRQETGLRLCGESFSDPQNGXTPAKWWTCFVKRQFMNKSLSGPGTVEGSPGQPTVFPEALGQHFSSKMLHNLFAFIS

SEQ ID NO: 9594 - protein, 157 aa, Homo sapiens
PAGRGMALLDLALEGMAVFGFVLFLVLWLMHFMAIIYTRLHLNKKATDKQPYSKLPGVSLLKPLKGVDPNLINNLETFFELDYPKYEVLLCVQDHDDPAIDVCKKLLGKYPRYYISANVTGFKCVTGMSCLMRKDVLHQAGGLIALAQYIAEDYFMA

SEQ ID NO: 9595 - protein, 508 aa, Homo sapiens
MIDKIDAYHKTVFMRMEIVQTFPSEVYQDLVLELFIYSFQVIVYDHIKFISVKRKQTAKCDIFSTVRDKGVGLSKTEIAPDPESTHMTLMPRKQFKKGSSQEASSSEWKKQKSDALGLAACEKDMKAMGTDIWKLQQRCISTQVIPDTLTDMVNQMTEKVGLVHGLPYVADRQGFAATLEQVYFGTSHPRYYISANVTGFKCVTGMSCLMRKDVLDQAGGLIAFAQYIAEDYFMAKAIADRGWRFAMSTQVAMQNSGSYSISQFQSRMIRKTITRMVTQINCEFEEVVPSSNPDSQIEVEEVSLYTHMDYNEVFTPVSCLEKCSALQNQNQEKVKSVGESYELSGGLIKKASISSRDEVRVFSAFIDSTGQMVLVSVTGRDAGSRGLQAGLAANLILRFQPLAAKRYNHDFPEQESPNPLSLPIKTVEPREIYRLIQEQWVSTLICKLPDLPIRELQSENTGLLPRTNSTSVEIRKRSAIVRQCFSGRAWHLRDTNTSFNNMLSVHDA

SEQ ID NO: 9596 - protein, 239 aa, Homo sapiens
  misc_feature (1)...(239): Xaa = X or * as defined in Table 2
RPQRAGPVRRAGVMALLDLALEGMAVFGFVLFLVLWLMHFMAIIYTRLHLNKKATDKQPYSKLPGVSLLKPLKGVDPNLINNLETFFELDYPKPLFFSVAPMKRIEKTQMXXPXCSTYXYEVLLCVQDHDDPAIDVCKKLLGKYPNVDARLFIGGKKVGINPKINNLMPGYEVAKYDLIWICDSGIRGTMEMPMSLEQSYDPNVRDPIYRNNGDADGQHLVLHDFYQQGSGPKCSLINA

SEQ ID NO: 9597 - protein, 56 aa, Homo sapiens
GGTLCFSKLDYAVAWFIRESMTIYIFLSALWDPTISWRTGRYRLRCGGTAEEILDV

SEQ ID NO: 9598 - protein, 411 aa, Homo sapiens
  misc_feature (1)...(411): Xaa = X or * as defined in Table 2
CVLLDLALEGNVPVFGFVLFLVLWLMHFMAIIYTRLHLNKRATDRQPYSKLPGVSLLKPLKGVDPNLINNLETFFELDYPKKFNLHTMLFDXYEVLLCVQDHDDPAIDVCKKLLGKYPNVDARLFIGGKKVGINPKINNLMPGYEVAKYDPIWICDSGIRIFPDTLTDMVNQMTEKVGLVHGLPYVADRQGFAATLEQVYFGTSHPRYYISANVTGFKCVTGMSCLMRKDVLDQAGDFIAFAQYIAKDYFMAKAIADRGWRFAMSTQVAMQNSGSYSISQFKSRMIRWTKLRINMLPATIICEPISRMPLLPSLINWDGQAHHVFRWDIMVFFYGCHCLAWFIFDYIPTPGVSQGGTLCFSKLGLMQSPWFIRESMTIYIFLSALWDPTISWRTGRYRLRCGGTAEEILDV

SEQ ID NO: 9599 - protein, 131 aa, Homo sapiens
  misc_feature (1)...(131): Xaa = X or * as defined in Table 2
XTQTDSPWFMISEKQRNFNAESTIGSHIHGPRIVAGLHAPTLMEEDEDALQETVRASIRKEQRNSRHDGGDGIRKAHAAIPRESRSMKRSPRKEVKKKRWNRPKMSLAQKKDRVAQKKASFLRAQERAAES

SEQ ID NO: 9600 - protein, 154 aa, Homo sapiens
  misc_feature (1)...(154): Xaa = X or * as defined in Table 2
NGSSLRSPRLRXSRTIPQSSXVAGITGAHHHARLIFFFFFFFETESCRVSQAGVQWRDLGSLQALLPGFTPFSCLTLQSSWDYRHPPPRPANFLYFXXRRGFTVLARMVLISXFRDPPASASQSAGIIGVSHRARPRGRLLAPSYICRNRGLEG

SEQ ID NO: 9601 - protein, 109 aa, Homo sapiens
  misc_feature (1)...(109): Xaa = X or * as defined in Table 2
GAILAHCNLRLPGFKQFSCLSLPRHSXTSQXPLTSRLPMVRHGXVKKSEGILCSLPPCTTXVPTSSAPMPWPSRQWERSSRTMTVISSSQLMALGPSCPQRDGSPTSSP

SEQ ID NO: 9602 - protein, 99 aa, Homo sapiens
  misc_feature (1)...(99): Xaa = X or * as defined in Table 2
DRVSLLSPRLECSGAILAHCNLRLPGFKQFSCLSLPSSWDYRRAPPHLANFLYFXXRRFFRHGCPGWSLLSSGNPATLAFXKCXNYGHEPPHPARKIHI

SEQ ID NO: 9603 - protein, 156 aa, Homo sapiens
PAPQSLLSARHVSALPTPASRRCSGLPPMTPKTMPRAVGSPLCVPARRRSSEPRKNSAMRALLVDIKLEPLAVTPDAASQPLIDLPLIDFCDTPEAHVAVGSESRPLIDLMTNTPDMNKNVAKPSPVVGQLIDLSSPLIQLSPEADKENVDSPLLK

SEQ ID NO: 9604 - protein, 90 aa, Homo sapiens
FASIPANSSRPLSNISKSGRMGHAMLRPALPAGPVGASSWQAKRSESSQLNKTRSIRRRHSCLNSKTKVMPTPTNQFKIPKFSIGDSPKA

SEQ ID NO: 9605 - protein, 157 aa, Homo sapiens
VGRVTVHSTPVRRSSGPGPQSLLSARRVSALPTPASRRCSGLPPMTPKTMPRAVGSPLCVPARRRSSEPRKNSAMRTEPTRESNRKTDSTLVDVSPDRGSPPSRVPQALNFSPEESDSTFSKSTPLIDFCDTPEAHVAVGSESKPLIDLMTNTPDMN

SEQ ID NO: 9606 - protein, 301 aa, Homo sapiens
  misc_feature (1)...(301): Xaa = X or * as defined in Table 2
TAGCGLGCASGPQAGHPATAGPQTLLPSAGGRAWSSCPPRPALHRWPAGWEGCGYRRWSRAASYSPWKNKVLLIKPFSIRYKAQSNSYDKPTYQSPSRRSLSAAXIPTHPXSLLSSRGCERRCAPTMRQPGAADTEPMCYHSWPHHSLLFLPSSCLWGAGVEDKELVPLWRVFLPGRRSWFPSSQKSRCLSHSCLGGCQVSRRGKFEQQNLSSVPDSPGKNKHHGKISGPTCLSGGPGESVPIVHRLSESSHWQMSLLQTRAAAPALSAAGFLKSPPLSSQPGPALCPASRSFQCQSAQGQ

SEQ ID NO: 9607 - protein, 125 aa, Homo sapiens
ASRRCSGLPPMTPKRCPGRGSPLCVPARRRSSEPRKNSAMRTEPTRESNRKTDSRLVDVSPDRGSPPSRVPQALNFSPEESDSTFSKSTATEVAREEAKPGGDAAPSEVGGLLEPRSSGPAWEMM

SEQ ID NO: 9608 - protein, 702 aa, Homo sapiens
  misc_feature (1)...(702): Xaa = X or * as defined in Table 2
ILLLADEKFDFDLSLSSSSANEDDEVFFGPFGHKERCIAASLELNNPVPEQPPLPTSESPFAWSPLAGEKFVEVYKEAHLLALHIESSSRNQAAQAAKPEDPRSQGVERFIQESKLKINLFEKEKEMKKSPTSLKRETYYLSDSPLLGPPVGESCTAHAASQAATQRKPGTKLLLPRAASVRGRSIPGAAEKRTARMPKGRRKRKXQVLFXGXGCCGGXGEGXGCGEAGSSRIAPKKEIPASPSRTKIPAEKESHRDVLPDKPAPGAVNVPAAGSHLGQGKRAIPVPNKVNNEIFADSVFSHFAPLGLKKTLLKAPGSTSNLARKSSSGPVWSGASSACTSPAVGKGLCCTPVCPARPARPLHSCCCKMTPSRPWLMWQCREGLECPXGSGGTWVRHSCDRRAGRGSGQSPRPHFGSSEVLGXTWRPGERTGDSPDSSTPKLSRAQRPQSCTSVGSSRHXCCVCRVTVHSTPVRRSSGPAPQSLLSAWRVSALPTPASRRCSGLPPMTPKTMPRAVGSPLCVPARRRSSEPRKNSAMRTEPTRESNRKTDSRLVDVSPDRGSPPSRVPQALNFSPEESDSTFSKSTATEVAREEAKPGGDAAPSEALLVDIKLEPLAVTPDAASQPLIDLPLIDFCDTPEAHVAVGSESRPLIDLMTNTPDMNKNVAKPSPVVGQLIDLSSPLIQLSPEADKENVDSPLLKF

SEQ ID NO: 9609 - protein, 747 aa, Homo sapiens
  misc_feature (1)...(747): Xaa = X or * as defined in Table 2
LLTALSMEEGGGRDEPSASRAGDVNMDDPKKEDILILADENISTFDLSLSSSSANEDDEVFFXPFGHKERCIAASLELNNPVPEQPPLPTSESPFAWSPLAGEKFVEVYKEAHLLALHIESSSRNQAAQAAKPEDPRSQGVERFIQESKFKINLFEKEKEMKKSPTSLKRETYYLSDSPLLGPPVGEPRLLASSPALPSSGAQARLTRAPGPPHSAHALPRESCTAHAASQAATQRKPGTKLLLPRAASVRGRGIPGAAEKPKKEIPASPSRTKIPAEKESHRDVLPDKPAPGAVNVPAAGSHLGQGKRAIPVPNKLGLKKTLLKAPGSYSNLQRKSSSGAVWSGASSACTPQPVAKAKSSEFASIPANXLPGLCPNISKSGRMGPAMLRPALPAGPVGASSWQAKRVDVSELAAEQLTAPPSASPTQPQTPEGGGQWLNSSCAWSESSQLNKTRSIRRRDSCLNSKTKVMPTPTNQFKIPKFSIGDSPDSSTPKLSRAQRPQSCTSVGRVTVHSTPVRRSSGPAPQSLLSARRVSALPTPASRRCSGLPPMTPKTMPRAVGSPLCVPARRRSSEPRKNSAMRTEPTRESSRKTDSRLVDVSPDRGSPPSRVPQALNFSPEESDSTFSKSTATEVAREEAKPGGDAAPSEALLVDIKLEPLAVTSDAASQPLIDLPLIDFCDTPEAHVAVGSESRPLIDLMTNTPDMNKNVAKPSPVVGQLIDLSSPLIQLSPEADKENVDSPLLKF

SEQ ID NO: 9610 - protein, 117 aa, Homo sapiens
  DOMAIN (1)..(117): RNA 3'-terminal phosphate cyclase domain identified by PFam, accession name RCT, E-value=0.014, PFam score of -149.5
DVQLEGAKIGSTEITFTPEKIKGGIHTAYTKTAGSVCLLMQVSMPSVLFAASPSQLHLKGGTFKVAQDMATAAVRCIKKEIRDLYVNIQPVQEPKDQAFGNGNGIIIIAETSTGCLF

SEQ ID NO: 9611 - protein, 139 aa, Homo sapiens
  misc_feature (1)...(139): Xaa = X or * as defined in Table 2
LEQGCNLFLHKHSXLGEVFFFVCFRRSFTLVAQAGVKWGDLGSLHKLPSSLSLPSSWDYRHPLPRLANFFVFLVKMGFTVLARMVSISXPRDPPTSASQSAGIIGVSPRAGPVAGILMFCRWNISNKPKGAVIEKKKKK

SEQ ID NO: 9612 - protein, 408 aa, Homo sapiens
  DOMAIN (49)..(81): RNA 3'-terminal phosphate cyclase proteins domain identified by eMATRIX, accession number BL01287A, p-value=2.688e-26, raw score of 17.95
  DOMAIN (34)..(408): RNA 3'-terminal phosphate cyclase domain identified by PFam, accession name RCT, E-value=3.8e-184, PFam score of 625.2
  misc_feature (1)...(408): Xaa = X or * as defined in Table 2
TKVSELLCGSQRLFFLPLWRRLCRCGLGPRVSPMAGPRVEVDGSIMEGGGQILRVSTALSCLLGLPLRVQKIRAGRSTPGLSIMTXRPQHLSGLEMIRDLCDGQLEGAEIGSTEITFTPEKIKGGIHTADTKTAGSVCLLMQVSMPCVLFAASPSELHLKGGTNAEMAPQIDYTVMVFKPIVEKFGFIFNCDIKTRGYYPKGGGEVIVRMSPVKQLNPINLTERGCVTKIYGRAFVAGVLPFKVAKDMAAAAVRCIRKEIRDLYVNIQPVQEPKDQAFGNGNGIIIIAETSTGCLFAGSSLGKPGFNSDKVVIEAAEWLLANLRHGGTVDEYPARPSLIVFHGHXPNGVSRIKTGPVTLHTQTAPIHFAEQIAKGXILLXRNPEDEEDAAKDTYIIECQGIGMTNPNL

SEQ ID NO: 9613 - protein, 96 aa, Homo sapiens
  DOMAIN (14)..(42): !!!! PROTEIN ALU SUBFAMILY WARNING ENTRY NUCLEAR PHOSPHO domain identified by eMATRIX, accession number PD02454B, p-value= 2.385e-24, raw score of 11.61
  misc_feature (1)...(96): Xaa = X or * as defined in Table 2
SQHFGRPRRADHLSSGVQDQPGQRGKTPSLLKIQKLAGRGGSLLXSQLPRRLRQRENRLNPGGGGCSELRSRDCTPAWATEGNSVSKKNKXKKKKK

SEQ ID NO: 9614 - protein, 170 aa, Homo sapiens
  misc_feature (1)...(170): Xaa = X or * as defined in Table 2
SPLLDVYFKTRLLSRGRREPACTLRLNTIGTLLSHCPLGIQGPHPGPSGKTCGPFKPRGPGHSCPPPDKKQVPTVLPLLPAPLRWAQAGLPGYAGISGSPGRPLGAQAGXGSGVIGESNYFVHCMHPRGPGSPHLPGGXGLQPKPPRPRLPSSSGSTTGLGDRKPCSYSQ

SEQ ID NO: 9615 - protein, 80 aa, Homo sapiens
  misc_feature (1)...(80): Xaa = X or * as defined in Table 2
GCNGNKDSCGPIAPSSGDILLLTVKRSLPRXNFSPCAPCSSSSKRAMCSRVCSPWGLXCGPIAPSSGDILLLTVKRSLPR

SEQ ID NO: 9616 - protein, 309 aa, Homo sapiens
MAYLQDRTLRSRYSNYSRPKSTGLERLFPPQIKTRIPTYDEDDNTILYAYETKPEFVNKVIYDALQNLDKKIDVIRRKVSKIQRFHARSLWTNHKRYGYKKHSYRLVKKLKLQKMKKNEVYETFSYPESYSPTLPVSRRENNSPSNLPRPSFCMEEYQRAELEEDPILSRTPSPVHPSDFSEHNCQPYYASDGATYGSSSGLCLGNPRADSIHNTYSTDHASAAPPSGMLAQGEPNLVHAPEMMSYSALMENRYTGSSLCFPSGLEIDGKALLLLTSDVLLKHLGVKLGTAVKLCYYIDRLKQGKCFEN

SEQ ID NO: 9617 - protein, 249 aa, Homo sapiens
  misc_feature (1)...(249): Xaa = X or * as defined in Table 2
KGFKNPTFPCEIPAGQTHKPHHHNKHSSPPVQKLKLQKMKKNEVYETFSYPESYSPTLPVSRRENNSPSNLPRPSFCMEEYQRAELEEDPILSARTPSPVHPSDFSEHNCQPYYASDGATYGSSSGLCLGNPRADSIHNTYSTDHASAAPPSVTRSPVENDGYIEEGSITKHPSTWSVEAVVLFLKQTDPLALCPLVDLFRSHEIDGKALLLTHGVTVLPEATWGVKLGTGLXSLCYLHXPDLKQGKCL

SEQ ID NO: 9618 - protein, 58 aa, Homo sapiens
ARIPGICGSGSSSCRLTRSSKAQLCWWNMGLGIFRICITRVSEEAQTTSSRRCSQSTQ

SEQ ID NO: 9619 - protein, 116 aa, Homo sapiens
  misc_feature (1)...(116): Xaa = X or * as defined in Table 2
MAWFHDMNPQSIALIPPATTEISADSQLPCIKDGSEGVKDVELVLPEXSMFEDASVSEGRGTQIEENPLEENILAGEXASQTGDSGNEXANRGDGSDVSSQTPQTSSDWLEXXXLX

SEQ ID NO: 9620 - protein, 70 aa, Homo sapiens
  misc_feature (1)...(70): Xaa = X or * as defined in Table 2
KKILWKKIFWRGKQHLKLVTVVTTAANRGDGSDVSSQTPQTSSDWLEQVHLVXTAHIWGSKWIYRYRSVC

SEQ ID NO: 9621 - protein, 82 aa, Homo sapiens
  DOMAIN (10)..(38): !!!! PROTEIN ALU SUBFAMILY WARNING ENTRY NUCLEAR PHOSPHO domain identified by eMATRIX, accession number PD02454B, p-value= 7.658e-15, raw score of 11.61
  misc_feature (1)...(82): Xaa = X or * as defined in Table 2
QEGIKSCKSDENSGLAPGQHGETPSLLKVSKLAGYGGACPXSQLLRRLRQENCLNRDLGGGGCSEPRSCHCTPAWTTEQDSV

SEQ ID NO: 9622 - protein, 681 aa, Homo sapiens
  DOMAIN (475)..(484): Zinc finger C3HC4 type (RING finger), proteins. domain identified by eMATRIX, accession number BL00518, p-value=7.429e-10, raw score of 12.23
  DOMAIN (526)..(602): IBR domain identified by PFam, accession name IBR, E-value=9e -15, PFam score of 62.5
  misc_feature (1)...(681): Xaa = X or * as defined in Table 2
MRQNSGGNVHLPAAHLVLCGLVPNRPWTGKNKNKRHHLGCIPQPPTLAKIAKAAKGSAGNFRYPLILGSFPANWVFMNFFQSKATLDFNLICSLNVKDVAEVFQKWLKIEGKKCHCLSEKTKQNMGNTTTKFRKALINGDENLACQIYENNPQLKESLDPNTSYGEPYQHNTPLHYAARHGMNKILGTFLGRDGNPNKRNVHNETSMHLLCMGPQIMISEGALHPRLARPTEDDFRRADCLQMILKWKGAKLDQGEYERAAIDAVDNKKNTPLHYAAASGMKACVELLVKHGGDLFAENENKDTPCDCAEKQHHKDLALNLESQMVFSRDPEAEEIEAEYAALDKREPYEGLRPQDLRRLKDMLIVETADMLQAPLFTAEALLRAHDWDREKLLEAWMSNPENCCQRSGVQMPTPPPSGYNAWDTLPSPRTPRTTRSSVTSPDEISLSPGDLDTSLCDICMCSISVFEDPVDMPCGHDFCKGCWESFLNLKIQEGEAHNIFCPAYDCFQLVPVDIIESVVSKEMDKRYLQFDIKAFVENNPAIKWCPTPGCDRAVRLTKQGSNTSGSDTLSFPLLRAPAVDCGKGHLFCWECLGEAHEPCDCQTWKNWLQKITEMKPEELVGVSEAYEDDRQCVCXVMNXTAKPCANCKSPIQKNEGCNHMQCAKCKYDFCWICLEEWEKT

SEQ ID NO: 9623 - protein, 39 aa, Homo sapiens
  misc_feature (1)...(39): Xaa = X or * as defined in Table 2
ESTVSCCEKPTGAMPXMHTACGRPCPSIWRLTKLSMRLR

SEQ ID NO: 9624 - protein, 157 aa, Homo sapiens
  misc_feature (1)...(157): Xaa = X or * as defined in Table 2
LGRMQDPQGGQMRWAYSLTFAKDVCQLGLSHYFAGAASGGCAQARCGPGPRRXGPPAPVPSPSPLALPPMGTRKLHPGMWTALHVRIPVPGKEGCVQLIGEISCVLLQKASWSEASTLCPAKGAIPNGAAFHQRCGRPEAHLGHRLSLAPPREPVET

SEQ ID NO: 9625 - protein, 101 aa, Homo sapiens
ISSAPQLAGHKRQFGSVCHQDPRVCDEPSSEDPHEWPEDITKWPVSCSGGVVREPSVSCGRECHTPPTGDTRDSHHGTTSRFQRLCTCPLYSLSINQRLPL

SEQ ID NO: 9626 - protein, 585 aa, Homo sapiens
  DOMAIN (378)..(531): Rhomboid family domain identified by PFam, accession name Rhomboid, E-value=0.068, PFam score of -19.9
  misc_feature (1)...(585): Xaa = X or * as defined in Table 2
RTWEKAPEQADLTGGALDRSELERSHLMLPLERGWRKQKEGAAAPQPKVRLRQEVVSTAGPRRGQRIAVPVRKLFAREKRPYGLGMVGRLTNRTYRKRIDSFVKRQIEDMDDHRPFFTYWLTFVHSLVTILAVCIYGIAPVGFSQHETVDSVLRNRGVYENVKYVQQENFWIGPSSEDLIHLGAXISPCMRQDPQGLSFIRSAREREKHSACCVRNDRSGCVQTSEEECSSTLAVWVKWPIHPSAPELAGHKRQFGSVCHQDPRVCDEPSSEDPHEWPEDITKWPICTKNSAGNHTNHPHMDCVITGRPCCIGTKGRYVCVPASAAGLWAQSIALGCEITSREYCDFMRGYFHEEATLCSQVHCMDDVCGLLPFLNPEVPDQFYRLWLSLFLHAGQVTLILHCLVSICFQMTVLRDLEKLAGWHRIAIIYLLSGVTGNLASAIFLPYRAEVGPAGSQFGILACLFRGSSSRAGQILGAALACLLQACWLWVLFLFHLWGLLPWDLTTFAHIFGGSSVALFLSFAFLPYISFGKVRPVPETLPDHHLSGGLPRASWLAWWSSSTSILSAVSRVSSSPASPFTDKLL

SEQ ID NO: 9627 - protein, 312 aa, Homo sapiens
MAALYACTKCHQRFPFEALSQGQQLCKECRIAHPVVKCTYCRTEYQQERLECNGTISAHCNLHLPGSSDSPASSSRVAGITGIKTNTICKKCAQNVQLYGTPKPCQYCNIIAAFIGNKCQRCTNSEKKYGPPYSCEQCKQQCAFDRKDDRKKVDGKLLCWLCTLSYKRVLQKTKEQRKHLSSSSRAGHQEKEQYSRLSGGGHYNSFSPDLALDSPGTDHFVIIAQLKEEVATLKKMLHQKDQMILEKEKKITELKADFQYQESQMRAKMNQMEKTHKEVTEQLQAKNRELLKQAAALSKSKKSEKSGAITSP

SEQ ID NO: 9628 - protein, 341 aa, Homo sapiens
MAALYACTKCHQRFPFEALSQGQQLCKECRIAHPVVKCTYCRTEYQQERLECNGTISAHCNLHLPGSSDSPASSSRVAGITGIKTNTICKKCAQNVQLYGTPKPCQYCNIIAAFIGNKCQRCTNSEKKYGPPYSCEQCKQQCAFDRKDDRKKVDGKLLCWLCTLSYKRVLQKTKEQRKHLSSSSRAGHQEKEQYSRLSGGGHYNSQKTLSTSSIQNEIPKKKSKFESITTNGDSFSPDLALDSPGTDHFVIIAQLKEEVATLKKMLHQKDQMILEKEKKITELKADFQYQESQMRAKMNQMEKTHKEVTEQLQAKNRELLKQAAALSKSKKSEKSGAITSP

SEQ ID NO: 9629 - protein, 170 aa, Homo sapiens
  misc_feature (1)...(170): Xaa = X or * as defined in Table 2
LGXLQPPPPGFKRFSCLSLSSSWDYRMRHHAWLIFVFLVEMGFTLISASRVAGITGMRHHAWLIFVFCSRDGVSTCLGQAGSQTPDLKVICPLGPPKSAGITGVSHCSWPVIYVLSTLLHAVRNVLFKRTFPLKSSSFLSYDKEIFPILIGLKFYLVTLTSFVKGHILLK

SEQ ID NO: 9630 - protein, 40 aa, Homo sapiens
  misc_feature (1)...(40): Xaa = X or * as defined in Table 2
MFCSLQPTDLRKEXMNLQTLRLRSSNKHQRFPGLPRGLCD

SEQ ID NO: 9631 - protein, 133 aa, Homo sapiens
  misc_feature (1)...(133): Xaa = X or * as defined in Table 2
STFGFQGTGWETRWGPTXPGVSAWSLVPSPVLETPDLERGKRAHLGVATAGGPAGPYRLSPHTLSSRKEGKGEAASKGTEAELMTIGIENSTCQSCLSPSFSHYFWSPRGAGPKAMWLVGDRKGATKNDKRGY

SEQ ID NO: 9632 - protein, 103 aa, Homo sapiens
  misc_feature (1)...(103): Xaa = X or * as defined in Table 2
KVVTLIILILQRRKWGAPGSDPKSPCCSDSKGQASFTAPXCSYLYTADGRLGLAWGXGLNRSAMTSNPDQTHLVAQTSGKPERKHKVSGFLVKVIPATAYDNG

SEQ ID NO: 9633 - protein, 175 aa, Homo sapiens
MKLRQRWRHPAHFSGTGKMIGEGTQVSVGTGVTVDTGVGCLSTSSHYANRNADTFRCLCRKRCQRLLKSQRRGVKKSCISVPHRQLSQALQAMRDSSEPWALSIKSLFREDEALASKHYRRNAPRAALRQFLSDFHRDCLNVFKTKYHTLMYMGRTIMRCEPCACGGEGKKNVLF

SEQ ID NO: 9634 - protein, 127 aa, Homo sapiens
  misc_feature (1)...(127): Xaa = X or * as defined in Table 2
KNSQYTPLTLIQMMGFXFFVFERQSHSVVEAGVQSCSHGSLQPLPPGSSNPPTSASRVAGTTGAHHHDLLIFLFLXRRGFALLHRLVSNSWRSRDSAWPSAFPKWLGLWDVEATTPRPGLFSHLVAG

SEQ ID NO: 9635 - protein, 135 aa, Homo sapiens
  misc_feature (1)...(135): Xaa = X or * as defined in Table 2
ARTPLQGAGGLVLSRLLSLPLPGLSPLPTVSCARWPLCPRPWSSLPGFWDSWHCNHRTGHRTGPGGLDTQSAXVNKLIWGKGNHLXPQATAQLWPQLGGWQGWTRPSRWWPLSSPHCXPGYRSLKDSFANTFLLF

SEQ ID NO: 9636 - protein, 155 aa, Homo sapiens
  DOMAIN (88)..(100): Globins profile domain identified by eMATRIX, accession number BL01033B, p-value=1.000e-15, raw score of 13.81
  DOMAIN (9)..(129): Globin domain identified by PFam, accession name globin, E- value=2.6e-43, PFam score of 155.5
  misc_feature (1)...(155): Xaa = X or * as defined in Table 2
RKTTTATMTSLCRKVNGGHAGXETLRRLLVVYPWTQRFFDSFGNLSSASAIMGNPKVKAHGKKVLTSLGDAIKHLDDLKGTFAQLSELHCDKLHVDPENFKLLGNVLETVLAIHFGKEITPEVQASWQEDGDWSGQSPVLQIPLSSLAMMQSCQG

SEQ ID NO: 9637 - protein, 207 aa, Homo sapiens
  DOMAIN (105)..(117): Globins profile domain identified by eMATRIX, accession number BL01033B, p-value=1.000e-15, raw score of 13.81
  DOMAIN (74)..(152): Globin domain identified by PFam, accession name globin, E- value=3e-08, PFam score of 33.2
  misc_feature (1)...(207): Xaa = X or * as defined in Table 2
APSPRRPWGHFTEEDQGLLSTSLWCKVNVEKCWKEKTPGKGSLVVYPWTQRFFDSFGNLSSAFAHHGQTPKVKAHGKKVLTFLGRCQQSTLDDLKGTFAQLSELHCDKLHVDPENFKLLGNVLVTVLAIHFGKEFTPERLQASWQKMGDXSGQCPVLQIPLSSLPMMQSFSRIRLLFLQAITNNKSISAKRSHMIFFSSFFYIFLNI

SEQ ID NO: 9638 - protein, 75 aa, Homo sapiens
SRMATLIYVDKENGEPGTRVVAKDGLKLGSGPSIKALDGRSQVSTPRFGKTFDAPPALPKATRKALGTVNRATEK

SEQ ID NO: 9639 - protein, 228 aa, Homo sapiens
  misc_feature (1)...(228): Xaa = X or * as defined in Table 2
NNPEWRTLIYVDKENGEPGTRVVAKDGLKLGSGPSIKALDGRSQVSTPRFGKTFDAPHPALPKATXKGFGELSTGATEKSVKDPGDPLKQKNGPAFSGPKKMDLKKDCLKQKSSVSWPSGLMPNPRNKTKFFPLQILLDFXGVFDLCPEEHPDLRHLPPLSGVPLMIPLTRERELXKSWFQLGPPFHLWKDGPLPPWGIPICLQFSFQGISVRTWGVDLPPVCCDIDI

SEQ ID NO: 9640 - protein, 119 aa, Homo sapiens
GTRVIKRISSSREGLAVPGLNATPAPSAFVLSALQPSPTHSSSNTQRLPHRVTGGFSLNGQLIGNKARSPGQHDGTYFGRLGIANAATDFQLEVTPENITLNPGFGAPAFSWRDQAVLR

SEQ ID NO: 9641 - protein, 160 aa, Homo sapiens
FQLEVTPQNITLNPGFGGPVFSWRDQAVLRQDGVVVTINKKRNLVVSVDDGGTFEVVLHRVWKGSSVHQDFLGFYVLDSHRMSARTHGLLGQFFHPIGFEVSDIHPGSDPTKPDATMVGLQKDYSKDPWHGAEVSCWFIHNNGAGLIDGAYTDYIVPDIF

SEQ ID NO: 9642 - protein, 98 aa, Homo sapiens
  misc_feature (1)...(98): Xaa = X or * as defined in Table 2
EKRKKRGFFKTKPLLKCPGPWGESRFWGPPKGKSQVXGHIXMGPNLGERWKKGPKRPKKPKTKGPPPFGVHPPKRNRPHLGWPGGPTLKKGKNNLGFC

SEQ ID NO: 9643 - protein, 102 aa, Homo sapiens
  misc_feature (1)...(102): Xaa = X or * as defined in Table 2
EVRANLSSQALRMWLDYGFVTPLTSMSIRGMADQDGLKPTIDKPSEDSPPLEMLGPRRTFVLSALQPSPTHSSSNTQRLPDRVTGVDTXVVTXPYVLCWNLC

SEQ ID NO: 9644 - protein, 494 aa, Homo sapiens
  DOMAIN (327)..(347): INHIBITOR HEAVY CHAIN CHANNEL IN domain identified by eMATRIX, accession number PD01101C, p-value=1.237e-16, raw score of 12.69
  DOMAIN (260)..(473): "Phage" integrase family domain identified by PFam, accession name Phage_integrase, E-value=4.3e-14, PFam score of 60.2
TKEALLRILEDMKEEDYLNFILFSGDVSTWKEHLVQATPENLQEARTFVKSMEDKGMDNFLMRKGKTKAKLEERGANQDSRNGSKVRYRRAASHEESESEAAACIRDAMAYSVHHNLRCLVSVDSSVGEGFIDNWEQELPVSAASDYGKLTGPLQQTQRGATTGSQVEKVRCWQGQKINCDSSAVAQIQQPVQGVMSQKARHTYLVAKPPSSGKPLGASGRTMEQFTIHLTVNPQSKVTFQLTYEEVLKRNHMQYEIVIKVKPKQLVHHFETKEALLKILGDMQPGDYFDLVLFGTRVQSWKGSLVQASEANLQAAQDFVRGFSLDEATNLNGGLLRGIEILNQVQESLPELSNHASILIMLTDGDPTEDPPVFIRDKLMERRNRRTGRTEKARIWEVTDRTVRTWIGEAVAAAAADGVTFSVPVTPHTFRHSYAMHMLYAGIPLKVLQSLMGHKSISSTEVYTKVFALDVAARHRVQFAMPESDAVAMLKQLS

SEQ ID NO: 9645 - protein, 941 aa, Homo sapiens
  DOMAIN (285)..(338): INHIBITOR HEAVY CHAIN CHANNEL IN domain identified by eMATRIX, accession number PD01101B, p-value=1.000e-40, raw score of 21.53
  DOMAIN (305)..(492): von Willebrand factor type A domain identified by PFam, accession name vwa, E-value=6.6e-24, PFam score of 92.9
  misc_feature (1)...(941): Xaa = X or * as defined in Table 2
SMDGAMGPRGLLLCMYLVSLLILQAMPALGSATGRSKSSEKRQAVDTAVDGVFIRSLKVNCKVTSRFAHYVVTSQVVNTANEAREVAFDLEIPKTAFISDFAVTADGNAFIGDIKDKVTAWKQYRKAAISXEKAGLVRASGRTMEQFTIHLTVNPQSKVTFQLTYEEVLKRNHMQYEIVIKVKPKQLVHHFEIDVDIFEPQGISKLDAQASFLPKELAAQTIKKSFSGKKTSNGSHSRRFQGHVLFRPTVSQQQSCPTCSTSLLNGHFKVTYDVSRDKICDLLVANNHFAHFFAPQNLTNMNKNVVFVIDISGSMRGQKVKQTKEALLKILGDMQPGDYFDLVLFGTRVQSWKGSLVQASEANLQAAQDFVRGFSLDEATNLNGGLLRGIEILNQVQESLPELSNHASILIMLTDGDPTEGVTDRSQILKNVRNAIRGRFPLYNLGFGHNVDFNFLEVMSMENNGRAQRIYEDHDATQQLQGFYSQVAKPLLVDVDLQYPQDAVLALTQNHHKQYYEGSEIVVAGRIADNKQSSFKADVQAHGEGQEFSITCLVDEEEMKKLLRERGHMLENHVERLWAYLTIQELLAKRMKVDREERANLSSQALQMSLDYGFVTPLTSMSIRGMADQDGLKPTIDKPSEDSPPLEMLGPRRTFVLSALQPSPTHSSSNTQRLPDRVTGVGHRPFNFIHSTCPRKRDTLCFNINEEPGVILEPGYRDPNTGFFSGMGQLIGQQGPGSLGEGIDGHYFGAAGEFANPATELFSWEVTPSEHLRXNPGFGGPVFSWRRDQVFLSGRDGVVVTINKKRNTVVSVDDGGTFEVVLHRVWKGSSVHQDFLGLLMCWDKSIGMSSPGRKGCWGQIFPTPIGFEVSDIPPQGSDPHKSPNATMVVRNPPGLTVTRGLQKDYSKDPWHGAEVSCWFIHNNGAGLIDGAYTDYIVPDIF

SEQ ID NO: 9646 - protein, 349 aa, Homo sapiens
  misc_feature (1)...(349): Xaa = X or * as defined in Table 2
NNSGVMPEMPEDMEQEEVNIPXXGGFWVTGCHWGFLGRAVHKEFQQNNLWHAVGCGFRRARPKFXTGXICWDSNAVHHIIHDFQPHVIVHCAAERRPDVVENQPRCLPLQLNVDASGEFXAKGKAAACLGSISPFYIXAQVFVFXWEPNPPYREEDIPAPLNLYGQTKLDGRKGCPWRNHLGAAVLRIPILYGEVEKLEKKCCELLMFEXKCQFSQQSPAKQWIHWQARGSPPHMSKDVAPLCARQLAEKRMLDPSIKGTFHWSGNEQMTKYEKGMCQLPDAFNLPSSHLRDPITDSPVLGAQRPRNAQLDCSKLETLGIGQRTPFRIGIKESLWPFLIDKRWRQTVFH

SEQ ID NO: 9647 - protein, 84 aa, Homo sapiens
  DOMAIN (6)..(54): Protein-L-isoaspartate(D-aspartate) O-methyltransferase signa domain identified by eMATRIX, accession number BL01279A, p-value= 1.000e-40, raw score of 24.27
  DOMAIN (1)..(84): Protein-L-isoaspartate(D-aspartate) O-methyl domain identified by PFam, accession name PCMT, E-value=1.5e-06, PFam score of -44.9
STISAHAYALELLFDQLHEGAKALDVGSGSGILTACFARMGGCTGKVIGIDHIKELVDDSVNNVRKDDPTLLSSGRIQLVVGDG

SEQ ID NO: 9648 - protein, 59 aa, Homo sapiens
  misc_feature (1)...(59): Xaa = X or * as defined in Table 2
SCQSACQKNGKIILRLQLLGPXDRLEDTLLNTHGLLQSQILCQFCFLCTCQQKVLRISK

SEQ ID NO: 9649 - protein, 61 aa, Homo sapiens
VHFCRIFFMAFLLFTWRSSELSVDMYKESRTGKVFVTATARACSGVCLPICPKAQAAAALI

SEQ ID NO: 9650 - protein, 138 aa, Homo sapiens
  DOMAIN (61)..(105): Protein-L-isoaspartate(D-aspartate) O-methyltransferase signa domain identified by eMATRIX, accession number BL01279B, p-value= 1.000e-40, raw score of 17.77
  DOMAIN (8)..(128): Protein-L-isoaspartate(D-aspartate) O-methyl domain identified by PFam, accession name PCMT, E-value=6.2e-21, PFam score of 83.0
MAWKSGGASHSELIHNLRKNGIIKTDKVFEVMLATDRSHYAKCNPYMDSPQSIGRVQLVVGDGRMGYAEEAPYDAIHVGAAAPVVPQALIDQLKPGGRLILPVGPAGGNPNVGASIPGSRMASIQNEALWMGGDIRAL

SEQ ID NO: 9651 - protein, 304 aa, Homo sapiens
  DOMAIN (207)..(251): Protein-L-isoaspartate(D-aspartate) O-methyltransferase signa domain identified by eMATRIX, accession number BL01279B, p-value= 1.000e-40, raw score of 17.77
  DOMAIN (67)..(304): Protein-L-isoaspartate(D-aspartate) O-methyl domain identified by PFam, accession name PCMT, E-value=1.5e-43, PFam score of 158.1
  misc_feature (1)...(304): Xaa = X or * as defined in Table 2
TVQPHVSGSGGDGSNSGSYSGDASGAVTVWEVVSLLGKLLGTVVALKVVLYLLRVCLAMAWKSGGASTSELIHNLRKNGIIKTDKVFEVMLATDRSHYSQKCNPYMDSPQIKXGFQATISCSTHCNAYALRNFLFWIQLHEGSLKLFDVGSGKWESLLACFARMVGCTGKVIGIDAHXRSXXDDSVKLMFREGTIPTLLSFRGGVQLVCGGMGRMGYAEEAPYDAIHVGAAAPVVPQALIDQLKPGGRLILPVGPAGGNQMLEQYDKLQDGSIKMKPLMGVIYVPLTDKEKQWSGGMIVKATSA

SEQ ID NO: 9652 - protein, 159 aa, Homo sapiens
RPPRVPSWRGWPAGALRGAPARGIRSCGSRAGRSRMAAAAAAGEARRVLVYGGRGALGSRCVQAFRARNWWVASVDVVENEEASASIIVKMTDSFTEQADQVTAEVGKLLGEEKVDAILCVAGGWAGGNAKSKSLFKNCDLMWYKQNYMDSVLVSFSCV

SEQ ID NO: 9653 - protein, 104 aa, Homo sapiens
  misc_feature (1)...(104): Xaa = X or * as defined in Table 2
YSNNPKDRKGETGINEKTNNKMVDLSSYTSVITLNFXMLXDKINXKFVKSPXKKPTLCCLLETYFKYGIGGLKVKRWRKIXHAHTIGKKTLVAILITKHTSELS

SEQ ID NO: 9654 - protein, 280 aa, Homo sapiens
  DOMAIN (150)..(188): Short-chain dehydrogenases/reductases family proteins domain identified by eMATRIX, accession number BL00061B, p-value=1.931e- 13, raw score of 25.79
  misc_feature (1)...(280): Xaa = X or * as defined in Table 2
CTFTKVFLLLRIWYRNMLLKNSVTPLPSCHPSAQCLGTLMRALSQVFRDAWWWVASVDVVENEEASASIIVKMTDSFTEQADQVTAEVGKLLGEEKVDAILCVAGGWAGGNAKSKSLFKNCDLMWEAEHYWTSDHLPSHLALTKHLKEGGLLTLAGAKAALDGTPGMIGYGMAKGAVHQLCQSLAGKNSGMPPGAAAIAALPVTLDTPMNRKSMPEADFSSWTPLXFLVETFHDWITGKNRPSSGSLIQVVTTEGRTELTPAIFLGLISVPMRWPAQKSH

SEQ ID NO: 9655 - protein, 68 aa, Homo sapiens
  misc_feature (1)...(68): Xaa = X or * as defined in Table 2
MSWLSCLSNITVWNISPVLLSFFGGNSLISHLXKIPEEEPFLTPLLSSSPSGFXPHVPRVLRSQSATV

SEQ ID NO: 9656 - protein, 171 aa, Homo sapiens
  DOMAIN (72)..(89): Zinc finger C2H2 type, domain proteins. domain identified by eMATRIX, accession number BL00028, p-value=6.294e-14, raw score of 16.07
  DOMAIN (42)..(120): Zinc finger, C2H2 type domain identified by PFam, accession name zf-C2H2, E-value=9.8e-22, PFam score of 85.6
MDLEPVQTEQSGAGVKENRGRNTAWRTPGDLHRRIHTGEKPYKCNECGKVFNQISHLAQHQRIHTGEKPYKCNECGKVFHQISHLAQHRTIHTGEKPYECNKCGKVFSRNSYLVQHLIIHTGEKPYRCNKRKGTEIKGRERLKGGAEIERRKMMRDSDKVGEDSKKTTYPI

SEQ ID NO: 9657 - protein, 663 aa, Homo sapiens
  DOMAIN (29)..(68): PROTEIN ZINC FINGER ZINC-FINGER METAL-BINDING NU domain identified by eMATRIX, accession number PD01066, p-value=5.200e-38, raw score of 19.43
  DOMAIN (246)..(663): Zinc finger, C2H2 type domain identified by PFam, accession name zf-C2H2, E-value=8.7e-100, PFam score of 344.9
  misc_feature (1)...(663): Xaa = X or * as defined in Table 2
LLGHEEQTRKGKRKAKAAGMVLSQGLLTFRDEAIEFSQEEWKCLDPAQRTLYRDVMLENYRNLVSLGIFSKCEIKELPPKKESNKEKYSRQXCWKDMKSHRHTKIFCFRETQKNVHDSQCLWKHDXRHYKRVRVTYKGKSHCVEETMPGXKGXCHKSQPCXKSSLGLNPAVTCLPRTCQPISKPEGKIYKYDHMEKSVNSSSLVSPPQRISSTVKTHISHTYECNFVDSLFTQKEKANIGTEHYKCSERGKAFHQGLHFTIHQIIHTKETQFKCDICGKIFNKKSNLASHQRIHTGEKPYKCNECGKVFHNMSHLAQHRRIHTGEKPYKCNECGKVFNQISHLAQHQRIHTGEKPYKCNECGKVFHQISHLAQHRTIHTGEKPYECNKCGKVFSRNSYLVQHLIIHTGEKPYRCNVCGKVFHHISHLAQHQRIHTGEKPYKCNECGKVFSHKSSLVNHWRIHTGEKPYKCNECGKVFSHKSSLVNHWRIHTGEKPYKCNECGKVFSRNSYLAQHLIIHAGEKPYKCDECDKAFSRNSHLVQHHRIHTGEKPYKCDECGKVFSQNSYLAYHWRIHTGEKAYRCNECGKVFGLHSFLAHDPKIHTGEKPFKCNECGKAFSMRSSLTNHQRLHTGEKHFKCNECGKLFRDNSYLVRHQRFHAGKKS

SEQ ID NO: 9658 - protein, 171 aa, Homo sapiens
  DOMAIN (7)..(19): KH domain proteins family of RNA binding proteins domain identified by eMATRIX, accession number PF00013, p-value=4.706e-10, raw score of 5.78
  DOMAIN (33)..(117): Ribosomal protein S3, C-terminal domai domain identified by PFam, accession name Ribosomal_S3_C, E-value=2.6e-34, PFam score of 112.8
STRTQNVLGEKGRRIRELTAVVQKRFGFPAESLRYKLLGGLAVRRACYGVLRFIMESGAKGCEVVVSGKLRGQRAKSMKFVDGLMIHSGDPVNYYVDTAVRHVLLRQGVLGIKVKIMLPWDPTGKIGPKKPLPDHVSIVEPKDEILPTTPISEQKGGNAEPPAMPQPVPTA

SEQ ID NO: 9659 - protein, 163 aa, Homo sapiens
  DOMAIN (71)..(101): Ribosomal protein S3 proteins domain identified by eMATRIX, accession number BL00548, p-value=7.000e-19, raw score of 20.58
  DOMAIN (52)..(100): KH domain identified by PFam, accession name KH-domain, E- value=0.0021, PFam score of 24.7
ERGGKMAVQISKKRKFVADGIFKAELNEFLTRELAEDGYSGVEVRVTPTRTEIIILATRTQNVLGEKGRRIRELTAVVQKRFGFPEGSVELYAEKVATRGVLGIKVKIMLPWDPTGKIGPKKPLPDHVSIVEPKDEILPTTPISEQKGGKPEPPAMPQPVPTA

SEQ ID NO: 9660 - protein, 274 aa, Homo sapiens
  DOMAIN (78)..(90): KH domain proteins family of RNA binding proteins domain identified by eMATRIX, accession number PF00013, p-value=4.706e-10, raw score of 5.78
  misc_feature (1)...(274): Xaa = X or * as defined in Table 2
INPPPPRLSFQRSAAARWPVQISKKRKFVANGILSKLNLNEFLTRELAEDGYSGVEVRVTPTRNRKSFIFSHQKHRMVLGEKGRRIRELPAVVQKSFGFPRGAAVELYAXKRWPTXRGLCAICPGQSLCVYKPSXGGLAVRRALCYGVLRGSFIGEVGPKGCEVCGCLGKLRGQRAXNPXSFVDGLMIHSGDPVNYYVDTXVRHVLLRQGVLGIKVKIMLAWDPTGKIGPKKPLPDHVSIVEPRRDEILPTTPISEQKGGKPEPPAMPQPVPTA

SEQ ID NO: 9661 - protein, 201 aa, Homo sapiens
  misc_feature (1)...(201): Xaa = X or * as defined in Table 2
IFLQAGCLKLVIRSKAGDISHVDTHCQTVHPKAVSISTMTENTPFLTLSPALSPIFNNLPFQCIEKXYLILTLIFLIAYEVESLCLXSVFLIYKIFLXPLSNFCCLXVLLYIILNLLFYYMYFPTPLFMKSNFIKVLXKVKGFTFXKCSQIYLFFHGYWVLCLGWECLSYTFITIFFQYFLLVIFNFHVXFILIFFIHDMK

SEQ ID NO: 9662 - protein, 236 aa, Homo sapiens
  misc_feature (1)...(236): Xaa = X or * as defined in Table 2
GSGGNHSVCCDTMEGGGGSGDKTTGVLAGFFGAGGAGYSHADLAGVPLTRMNPLCPYLNVDPRYLVQGYKMKFIFTLPELIKTRGQDLKLAFFTIGGCCMTGAAFGAMNGLRLGLKETQNMAWSKPRNVQILNNGXLGKGALWANTLGLWALLYSAFGVIIEKTRGAEDDLNTVAAGTPAGLLYTCTGGLRGIARGGLTGLTLSSLLCTIYNTWGAHGKGSLASNSSLWKVFAQPP

SEQ ID NO: 9663 - protein, 70 aa, Homo sapiens
  misc_feature (1)...(70): Xaa = X or * as defined in Table 2
VIIRLPIGKKLFRCKPGXTWAPPGILXSGRPRSSSSSPFXNXMHFLFERESSFHRCKWKAGITCVKSWYP

SEQ ID NO: 9664 - protein, 42 aa, Homo sapiens
  misc_feature (1)...(42): Xaa = X or * as defined in Table 2
RWGFTQLLRRLRQENHLNRGVGGCSEPRLCTPAWATEXDSVL

SEQ ID NO: 9665 - protein, 187 aa, Homo sapiens
  DOMAIN (106)..(139): PROLINE-RICH PROTEIN 3 domain identified by eMATRIX, accession number DM00215, p-value=8.941e-11, raw score of 19.43
  misc_feature (1)...(187): Xaa = X or * as defined in Table 2
THVLWAFPGARVHLQTGSWRAGVAAAALALGGQASLSYARGKESXGHSPPPTHTHKAASGGREKAVSPSVAWVSHGPSPLLSEYTSSQVKGHSGPGPDPVVTHLWAPFPDQLPPSPCPPLSRKEPEPSPLSHPPQGVTPGQAQIGQLRTSGLWGHKRGGWARAEGAPVSLLLRGPFDGPATVSEAQR

SEQ ID NO: 9666 - protein, 55 aa, Homo sapiens
RLGDLPRRDRQLAGRERHGGHRRPGERRVCRAAGLEAHYVAGDLPRCRHGRRTRG

SEQ ID NO: 9667 - protein, 137 aa, Homo sapiens
  DOMAIN (107)..(134): Protamine P1 proteins domain identified by eMATRIX, accession number BL00048, p-value=2.238e-09, raw score of 6.39
  misc_feature (1)...(137): Xaa = X or * as defined in Table 2
AWHEETHKVDLGLPEKKKNKKVVKEPETRYSVLNNDDYFADVSPLRATSPSKSVAHGQAPEMPLVKKKKKKKKVSAALGKEVKRSQSKLRLRNTSPXVMTLRPPQRKRXSPKRRXSSQSSRSQLXKGRKRRRGKRGG

SEQ ID NO: 9668 - protein, 111 aa, Homo sapiens
RNNPLLSLLALCLVHSSHLICWALPDEGGGQGKERALNSRKIATFFLSSQGTQFGQWDTAGFENEDQKLKFLRLMGGFKNLSPSFSRPASTIARPHMALGKKAADSLQQNL

SEQ ID NO: 9669 - protein, 107 aa, Homo sapiens
KSISSTGATVITGSCLTLYPSGKGGCSASYSLQICSHRFLLDGSVTCHDETGKLAGRERHGGHRRPGERRVCRAAGLEAHYVAGDLPRCRHGRGFHGNRVRRKAANS

SEQ ID NO: 9670 - protein, 657 aa, Homo sapiens
  misc_feature (1)...(657): Xaa = X or * as defined in Table 2
MEVDFKIRKVGQWTITLQEHPVSVLLFIEETHPENKPTSTAVEESHISRDTVMVNFQCQLDWSKGYLEAYLTKINSICSHRFLLDGSVTCHDETGSSRDARDTVGTGVRVNDESVEQLGLRRTMWLGICRGAAMAAVSTVTAFAGRPRPGRSRNPRGWAGDSKWTSGSRRSWLSRGGGEISPTGMITKTHFVYLGLPEKKKKKRVVKEPETRYSVLNNDDYFADVSPLRATSPSXDVAHGQAPEMPLVKKKKKKKKGVSTLCEEHVEPETTLPARRTEKSPSLRKQVFGHLEFLRGKRKNKKSPLAMSHASGVKTSQDPRQGEEETRVGKKSKKHKKEKKGGPGPHSLPVQDPWFCEAREARDVGDTCSVGKKDEEQAALGQKRKRKSPREHNGKVKKKKKIHQEGDALPGHSKPSRSMESSPRKGSKKKPVKVEAPEYIPISDDPKASAKKKMKSKKKVEQPVIEEPALKRKKKKKRKESGVAGDPWKEVVFPSEMDFAVGELRETDTDLEVVLEKKGNMDEAHIDQVRRKALQEEIDRESGKTEASETRKWTGTQFGQWDTAGFENEDQKLKFLRLMGGFKNLSPSFSRPASTIARPNMALGKKAADSLQQNLQRDYDRAMSWKYSRGAGLGFSTAPNKIFYIDRNASKSVKLED

SEQ ID NO: 9671 - protein, 123 aa, Homo sapiens
  misc_feature (1)...(123): Xaa = X or * as defined in Table 2
VRRFAAAVATLPPGAAPSGPAPGTPGPQTRIPGFPWPPLCPLMSGSLGPXTRLLLVPPAPQGPAGSPGPIQAGRGLAAPPPQPLSPSRGPCAGSSWELRLEGLSDWGTCPVPCPCHYIHPPKN

SEQ ID NO: 9672 - protein, 115 aa, Homo sapiens
GRGWSLLGATAMDALEGESFALSFSSASDAEFDAVVGYLEDIIMDDEFQLLQRNFMDKYYLEFEDTEENKLIYTPIFNEYISLVEKYIEEQLLQRIPEFNMAAFTTTLQPNRLSS

SEQ ID NO: 9673 - protein, 190 aa, Homo sapiens
  misc_feature (1)...(190): Xaa = X or * as defined in Table 2
SGRALHASWAAGGVGAYSGRLRSDALEGESFALSFSSASDAEFDAVVGYLEDIIMDDEFQLLQRNFMDKYYLEFEDTEENKLIYTPIFNEYISLVEKYIEEQLLQRIPEFNMAAFTTTLQHHIRDEVAWVTIFGNAGSTFHKIFLGFXRKCFLDYRAEKESRGLDLSSGLVVTSLCKSSSLPASQNNLRH

SEQ ID NO: 9674 - protein, 231 aa, Homo sapiens
  misc_feature (1)...(231): Xaa = X or * as defined in Table 2
GSVGAATVRPQPNALRCRLRSRAGRSPVLVFGVGIKQPPCPSKKAKTKTTKKRPQRATSNVFAMFDQSQIQGVQRGPFNMIDQNRDGFHSDKEKVLHDMLASLGKNPHXWHYLDAMMNEGPKGPFKFHQCSLTMFWLRKLNGTRSPEDCHPETAFCFAFDXKKATGTHFRKDYLRRSCXPTHGGIRFPDEREVDELYRGGTLLDQKKGNFQITFEFHTASWKHGSQRPKMT

SEQ ID NO: 9675 - protein, 92 aa, Homo sapiens
  DOMAIN (3)..(33): kw TRANSCRIPTASE REVERSE II ORF2 domain identified by eMATRIX, accession number DM01354E, p-value=1.643e-13, raw score of 18.69
  misc_feature (1)...(92): Xaa = X or * as defined in Table 2
HMYVPNLRTSKYMKRTLIELKGEIDSNTILVGDFNTTLSTMGRTFRXDISKETEDLHNTVDPMDLTDSAELSTQQQQNTLSSQAHGIFSRTE

SEQ ID NO: 9676 - protein, 122 aa, Homo sapiens
  misc_feature (1)...(122): Xaa = X or * as defined in Table 2
TRNSFLFFIYIYLFLRMGSCSVAQGWKCSGTILGHCSLCLRLPGSSNSPTSASHVAGDSHGMCRHARLIFAFLVEMGFHPCWPGLGLELLTLRVIHPTLGLPKCWGLXAGGSAKIGRRAQIG

SEQ ID NO: 9677 - protein, 64 aa, Homo sapiens
  misc_feature (1)...(64): Xaa = X or * as defined in Table 2
TFCFFSDLKYSLASCENHLVCFLFVCFAFLVXTXNYFCLXTVNLIFSVRVTELCPFIFIVLIIT

SEQ ID NO: 9678 - protein, 105 aa, Homo sapiens
  misc_feature (1)...(105): Xaa = X or * as defined in Table 2
FKQICLFLLLFFEMESCSVTRLECSGTISAHCNLHLPGSSDSPASASPVTGITGTCHHAQLIFLYFYYMTGFRHVAQVGVELLGXAIHLPWLPKVLGLQAPAPDL

SEQ ID NO: 9679 - protein, 71 aa, Homo sapiens
  DOMAIN (15)..(35): GLUCOSE/RIBITOL DEHYDROGENASE FAMILY SIGNATURE domain identified by eMATRIX, accession number PR00081D, p-value=7.171e- 11, raw score of 15.80
GGPGNGLHRLGFSPYNVSKTALLGLNKTLAIELAPRNIRVNCLAPGLIKTSFSRMLWMDKEKEESMKETLR

SEQ ID NO: 9680 - protein, 477 aa, Homo sapiens
  DOMAIN (34)..(52): GLUCOSE/RIBITOL DEHYDROGENASE FAMILY SIGNATURE domain identified by eMATRIX, accession number PR00081A, p-value=6.226e- 13, raw score of 10.53
  DOMAIN (33)..(218): short chain dehydrogenase domain identified by PFam, accession name adh_short, E-value=1.5e-60, PFam score of 214.6
MHKAGLLGLCARAWNSVRMASSGMTRRDPLANKVALVTASTDGIGFAIARRLAQDGAHVVVSSRKQQNVDQAVATLQGEGLSVTGTVCHVGKAEDRERLVATAVKLHGGIDILVSNAAVNPFFGSIMDVTEEVWDKTLDINVKAPALMTKAVVPEMEKRGGGSVVIVSSIAAFSPSPGFSPYNVSKTALLGLNNTLAIELAPRNIRVNCLAPGLIKTSFSRMLGEPEDCAGIVSFLCSEDASYITGETVVNLSVMFTGGGVCRAASWKEGGTGTPRTPRESPRQREPGETSSTDTQENKVWNGLPANPQRPAAEGPVRRKTNKQKGIASTSAKDSINIRTGKDIHTKTPSIGHQHQRPKVDKTTKMERNQSKKAETSRNQNVSSLPKEYKSSPAREQNWMENKFDDLTDVSFRRSVITNYTQLKEHVLTHCKEAKNLDKMLNEWLTRMKNLEKSLNDLMELITTVQELHEGYTSFNS

SEQ ID NO: 9681 - protein, 65 aa, Homo sapiens
SLRLSSHQTYSPSSFVPLLVRTCIPLEEKRRSDFWKFQPFCSGFSPSLWFYLPLVFDVGDLWMGF

SEQ ID NO: 9682 - protein, 79 aa, Homo sapiens
TSVPSCVRCRYIILRSSSALTNILGTHSNSSFFHASSSALHSCCFPFFSWLQTLDINVKAPALMTKAVVPEMEKRGYRE

SEQ ID NO: 9683 - protein, 44 aa, Homo sapiens
SMHKAGLLGLCARAWNSVRMASSGMTRRDPLANKVALVTASTDG

SEQ ID NO: 9684 - protein, 205 aa, Homo sapiens
  DOMAIN (129)..(139): Short-chain dehydrogenases/reductases family proteins domain identified by eMATRIX, accession number BL00061C, p-value=2.588e- 09, raw score of 7.86
  DOMAIN (33)..(146): short chain dehydrogenase domain identified by PFam, accession name adh_short, E-value=0.02, PFam score of -48.1
  misc_feature (1)...(205): Xaa = X or * as defined in Table 2
MHKARLRGHCARAGKSVRLASSGMTRRDPLTNKVALVTASTDWIGFAVAQRLAQDGAHVVVSRRKQQNVDQAVATLQGEGLSMTGTVCHVGKMKDWERLVATGFSPYNVSKTALLGLAQTLPIELAPRNIRVNCLAPGLIKTSFSRMLWMDKEKEESMKETLRIKKVXASPEDCAGIVSFLCSEDASLHSLGKTVVVDGGTPSRL

SEQ ID NO: 9685 - protein, 80 aa, Homo sapiens
  DOMAIN (6)..(34): !!!! PROTEIN ALU SUBFAMILY WARNING ENTRY NUCLEAR PHOSPHO domain identified by eMATRIX, accession number PD02454B, p-value= 7.818e-31, raw score of 11.61
  misc_feature (1)...(80): Xaa = X or * as defined in Table 2
DRRITRSGVRDQPGQHGETPSLLKIEKLAGHGGQAPVCGGRSYLRRLRQENRLNPGGRGCSEPRLRHCTPAXVTVRDSVS

SEQ ID NO: 9686 - protein, 440 aa, Homo sapiens
  DOMAIN (171)..(191): ALCOHOL DEHYDROGENASE SUPERFAMILY SIGNATURE domain identified by eMATRIX, accession number PR00080C, p-value=8.071e-11, raw score of 17.16
  DOMAIN (21)..(213): short chain dehydrogenase domain identified by PFam, accession name adh_short, E-value=5.1e-37, PFam score of 136.4
  misc_feature (1)...(440): Xaa = X or * as defined in Table 2
ARKSVRMASSRMTRRDPLTNKVALETASTDGIGFAIARRLAQDRAHVFVISRKQQNVDQAVATLQGEGLSVTGTVCHVGKAEDRGAAWWPPAVKLHGGIDILVSNAAVNPFFGSIMDVTEEVWDKTLDINVKGPKPXMTKAVVPEMEKRGGGSVVIVSSIAAFSPSPGFSPYNVSKTALLGLTKTLAIKLAPRNIRVNCLAPGLIKTSFSRMLWMDKEKEESMKETLRIRRLGEPEDCAGIVSFLCSEDASYITGETVVNLSVMFTGGGVCRAASWKEGGTGTPRTPRESPRQREPGENQARSSPRMALRPEFPPESASTSWMGPEPVGNRERPCKPARKVGASPRALRRLGSATRMLSRAALRAGVGARAPRPGGGRGAHATATVWSGLASAAALTARALLKRSLACAAAPQRCGWRRLLCSSLGIRGSGWPCPPWSSI

SEQ ID NO: 9687 - protein, 186 aa, Homo sapiens
  DOMAIN (30)..(74): Synapsins proteins domain identified by eMATRIX, accession number BL00415N, p-value=6.908e-10, raw score of 4.29
MVYRQNQLPSSCAPEMGREDGLRALHPAQPPPPRAQQSPPPPLSAPEEPPPPRAQQSPPPPLLTPHRRHPQSFPAPSAPSALSRQRPGLYSAVTFSGSLSGPRTSTCTPSPASSPSAHGLGHIHTDAGVCSLEAQEEAKAPGGRGPSCSAHGALGPTCTSGVAGDSGPVVGSQERALDPRRQGLQH

SEQ ID NO: 9688 - protein, 211 aa, Homo sapiens
  misc_feature (1)...(211): Xaa = X or * as defined in Table 2
TIPVAYVWADPPLPPKGHSCPHPPGSDDGTRTTGTAPPCLGFQGDPDPVHPAPAPPDWXXFPNMGQPGPPPPFPTWRAQLQLLKSSVNMRGHRWRNVPSGPHLPEQISLSELGHSHKPLFLRQNPNPTVPWDVMLPFPLLNLLYGKMWNWVSLDLWGCHRNEEWRPTNIILLAPWRHGRLQLKGAGARGRQLPQLLLPALLLILVGYEMSF

SEQ ID NO: 9689 - protein, 185 aa, Homo sapiens
  DOMAIN (37)..(70): PROLINE-RICH PROTEIN 3 domain identified by eMATRIX, accession number DM00215, p-value=2.983e-09, raw score of 19.43
GVPPKSASKFLCTRNGKGRWAQSPPPSTAPPPRAQQSPPPPLSAQKKPPPPRAQQSPPPPLLTPHRRHPQSFPAPSAPSALSRQRPGLYSAVTFSGSLSGPRTSTCTPSPASSPSAHGLGHIHTDAGVCSLEAQEEAKAPGGRGPSCSAHGALGPTCTSGVAGDSGPVVGSQERALDPRRQGLQH

SEQ ID NO: 9690 - protein, 140 aa, Homo sapiens
  misc_feature (1)...(140): Xaa = X or * as defined in Table 2
AFLTFNKLHRTDTCRGNKPHPPPPPGSKVRKRTWGFAPPGPGSPWASLPHGLPPTAGRQGRGREGGGPRGGPGKGSAQPSSGTRAWRKPMGGCLTEDGPYGGPKGLWPXTTNGXKPPGARPWPPLPLGCPLEPRHPVLGP

SEQ ID NO: 9691 - protein, 280 aa, Homo sapiens
  misc_feature (1)...(280): Xaa = X or * as defined in Table 2
LKMAAEEPHQQKQEPLGSDSEGVNCLAYDEAIMAQQDRIQQEIAVQNPLVSERLELSVLYKEYAEDDNIYQQKIKDLHKKYSYIRKTRADGNCFYSGFRILPLGRHCWDDSKELQRFKAVSWPRARVDLGCSQWGFTXISQFXGIFHNKFHGTXLSRWRKQTSVADLLASFNDQSTSDYLVVYLRLLTSGYLQRESKFFEHFIEGGRTVKEFCQQEVEPMWKESDHIHIMALAQGLNGAIQGEDMDRGEGGTTNPHIFPEGSEPKGYLLYRPGHYDILYK

SEQ ID NO: 9692 - protein, 240 aa, Homo sapiens
  misc_feature (1)...(240): Xaa = X or * as defined in Table 2
DVSRVGCLPPSRAMGWTLALLRRGSAVSALASGLVEEPMLGPPFHPTPRFKAVSAKSKEDLVSQGFTEFTIEDFHNTFMDLIEQVEKQTSVADLLASFNDQSTSDYLVGYLRLLTSGLLXGPRASSSSTSSKGGRDCPKEFCQQELEPMXKESDHHSHHCAGPGPSACPSRVGVHGTAAEGGNHQSAHLSLRASEPKVYLLYRPGHYDILYKIGLGSSPLLPCCPPLPGARHVTEVFLWL

SEQ ID NO: 9693 - protein, 108 aa, Homo sapiens
HSVNRKRLNRNARRKAAPRIECVRGLGFRVAVGLGRDGPRDDGSAMSLFAGSSHIRHAWDHAKSVRQNLAEMGLAVDPNRAVPLRKRKVLTWQGLGPCLLYSSPAILT

SEQ ID NO: 9694 - protein, 211 aa, Homo sapiens
  misc_feature (1)...(211): Xaa = X or * as defined in Table 2
AAGAVVSAMPKAKGKTRXQKFGYSTLRKRMSRNARRKAARAGLECSHIRHAWDHAKSVRQNLAXMGLAVDPNRAVPSRKRKVKAMEVDIEEEAXKNLYRKPYVLNDLEAEPSLPEKKGNTLSRDLHLTMYRYMVENHGEDYKAIARDEKNYYQDTPKQISELRSNVYKRFYPAEWQDFLDSLQKRKMEVKVPGLHHSCPSAEASPGPSEAG

SEQ ID NO: 9695 - protein, 103 aa, Homo sapiens
EKKPKPRPPERSPRPLWVPEPQLEIRRRRPTPAMLFRLSEHSSPEEEASPHQRASGEGHHLKSKRPNPCAYTPPSLKVIQRIAESHLQSISNLNENQASEEED

SEQ ID NO: 9696 - protein, 180 aa, Homo sapiens
  misc_feature (1)...(180): Xaa = X or * as defined in Table 2
LTVGKKNRKQQQHQPKSPHGKPHLKGQQPSKVQIEDKFLGRXGKELKNPFTTQKGQSGFVYSKLIHNTSYRQGHSPGWRLRWMNXQKXASEGGXXQTSLSXRSTLXPNILERIPELKDWFSKIRRQKXKRIKRKEENLQXVWGYIXRPILQITGIPERRVEISMHWVRACSFSSVKFVIP

SEQ ID NO: 9697 - protein, 237 aa, Homo sapiens
  misc_feature (1)...(237): Xaa = X or * as defined in Table 2
SALQRLEKKPKPRPPERSPRPRWVPEPQLEVGGACSALAQSPSEKLDPACLKPLSXSXIRRRRPTPAMLFRLSEHSSPEEEASPHQRASGEGHHLKSKRPNPCAYTPPSLKAVQRIAESHLQSYSAILNENQGFRGREDELGEFWELGYPREEDEEEEEDDEEEEEEEDSQAEVLKVIRQSAGQKTTCGQGLEGPWERPPPLDESERDGGSEDQVEDPALSEPGEEPQRPSPSEPGT

SEQ ID NO: 9698 - protein, 110 aa, Homo sapiens
  misc_feature (1)...(110): Xaa = X or * as defined in Table 2
RGWSLVQTPNPRFKNVPGPPTPQVIAECEESQCGGLGTLGGLXLSPGPGXTDSRGPPMMPSEAQGGGAASKGPLGPPQAAGIHQGTPLRMGEALEGQAGQTAGPRVQDGL

SEQ ID NO: 9699 - protein, 43 aa, Homo sapiens
RSIMWFLQMAQLSTTISQAQRATAFHFFTSKRFLPAPLLVPLG

SEQ ID NO: 9700 - protein, 43 aa, Homo sapiens; identical to SEQ ID NO: 9699

SEQ ID NO: 9701 - protein, 60 aa, Homo sapiens
  misc_feature (1)...(60): Xaa = X or * as defined in Table 2
KAWWNLLRKSEPKSCGSXGGLSTSRERLVECSSPLGLGYCGXXLCHLQEPHYGSLHRMSS

SEQ ID NO: 9702 - protein, 1128 aa, Homo sapiens
  DOMAIN (13)..(52): kw TRANSCRIPTASE REVERSE II ORF2 domain identified by eMATRIX, accession number DM01354X, p-value=1.000e-40, raw score of 13.86
  DOMAIN (1019)..(1069): Thyroglobulin type-1 repeat domain identified by PFam, accession name thyroglobulin_1, E-value=2.2e-13, PFam score of 57.9
MAILPNVIYRFNAIPIKLPMTFFTELEKTTLKFIWNQKRARIAKSILSQKNKAGGITLPDFKLYYKATVTKTAWYWYQNRDIDQWNRTEPSEIMPHIYNYLIFDKPEKNKQWGKDSLFNKWCWENWLAICRKLKLDPFLTPYTKINSRWIKDLNVRPKTIKTLEENLGITIQDIGVGKDFMSKTPKAMATKAKIDKWDLIKLKSFCTAKETTIRVNRQPTTWEKIFATYSSDKGLISRIYNELKQIYKKKTNNPIKKWAKDMNRHFSKEDIYAAKKHMKKCSSSLAIREMQIKTTMRYHLTPVRMAIIKKSGNNRCWRGCGEIGTLLHCWWDCKLVQPLWKSVWRFLRDLELEIPFDPAIPLLGIYLKDYKSCCYKDTCTRSHPGYHIAFSHQVFLGFANIFLILDDLESSEYWSGLCMLCDEFVATVQCLGEKTYAQCGLAADGAHQNALNSNPSPHEAIISKAFPTDGVGPAHGGVGPVAWMIWFVGEPERWQESQTGSPTLRDGLADRPSLKGSSQQPQAEGEKKEAAQTPVEIALIWPDLNSGANLWQSCECQAQGLRSCLWPHSQGRHASDGRTQPQPTPAVEPTLEVKGSLRAGTYCMVDPEQPVLQGRRECSTWLLESKSFTCWLFDRDFLSAYSRETEPIEGVCVDRKREREREREIVLKELADAVIAAGKSNICRVPLLGPPAGPSHSIVNIPSGSYLGKENLVGKCALNVSVNVNVQFIADVVDGTEAKGPGGEWKRTSDKNHDFSIDAKKAFGKIQQRFMLKALNKLGIDGTYLKIIRDSGTPGDAAGPLLQERVNATTLPSAHIPMAPSTLNQGNDEKAGDQRRARACVKSNNLYTEGCESWKSEGVWVPTLHSSAWSVSCGGACTDKELRNLASRLKDWFGALHEDANRVIKPTSSNTAQGRFDTSILPICKDSLGWMFNKLDMNYDLLLDPSEINAIYLDKYEPCIKPLFNSCDSFKDGKLSNNEWCYCFQKPGELIAFGPLKVKGPVILTNSQPSPSSAADPAADILTWAFIPRCNEEGYYKATQCHGSTGQCWCVDKYGNELAGSRKQGAVSCEEEQETSGDFGSGGSVVLLDDLEYERELGPKDKEGKLRVHTRAVTEDDEDEDDDKEDEV

SEQ ID NO: 9703 - protein, 546 aa, Homo sapiens
  DOMAIN (461)..(476): Thyroglobulin type-1 repeat proteins proteins domain identified by eMATRIX, accession number BL00484C, p-value=3.647e- 12, raw score of 17.01
  DOMAIN (433)..(498): Thyroglobulin type-1 repeat domain identified by PFam, accession name thyroglobulin_1, E-value=3.1e-18, PFam score of 74.0
  misc_feature (1)...(546): Xaa = X or * as defined in Table 2
CGFLQMGTVINHNIPGPEGYWHFHFFNFKALLARAAVGAARGIHIHRCGLTKRPDARRRRVAGAQGREPAISLPGDRAAGARATRTRGPGPAPKMPAIAVLAAAAAAWCFLQVESRHLDALAGGAGPNHGNFLDNDQWLSTVSQYDRDKYWNRFRDEVEDDYFRNWNPNKPFDQALDPSKDPCLKVKCSPHKVCVTQDYQTALCVSRKHLLPRQKEWGTWAQKHWGLDLXILVKCKPCPVAQSAMVCGSRWATPNSIPSCKLEFHACSTGQKSFATLCDGPCPCSSQSLEPPKHKGRKGVPCTDKELRNLASRLKDWFGALHEDANRVIKPTSSNTAQGRFDTSILPICKDSLGWMFNKLDMNYDLLLDPSEINAIYLDKYEPCIKPLFNSCDSFKDGKPFLNNEWCLLPSQNPGGLPCAQNEMNRIQKLSKGKSLLGAFIPRCNEEGYYKATQCHGSTGQCWCVDKYGNELAGSRKQGAVSCEEEQETSGDFGSGGSVVLLDDLEYERELGPKDKEGKLRVHTRAVTEDDEDEDDDKEDEVGYIW

SEQ ID NO: 9704 - protein, 281 aa, Homo sapiens
  misc_feature (1)...(281): Xaa = X or * as defined in Table 2
LHQQAAVAWLPTSFLPSQEHCCSTEWRAPQPAASGVHGICFARPFASSTVSTEVSGSFCYLPAPWVYGFLLXTERPLAWWCLGKYWLQELLGCHPVPLAMLXDCLALLKSSLVPMGSPTHCKAIVTEEPLHLPEPAAAAAHTSSPSSSCRCKGCLGWVWPGGSAPGPLGPLSFDPWTVSHQSGPSPAAPGPTTSSSXRPSAPSHGMQGLADSQGHLCRHSRKGLRSFLLSHTHHSTCPPHLLQTGMPRSPLISIDADSSPPRIHRLRGQGHFSGLAKGGQR

SEQ ID NO: 9705 - protein, 68 aa, Homo sapiens
  misc_feature (1)...(68): Xaa = X or * as defined in Table 2
GFVVSLDSRXGQWESRSSIHAVTNXASSSSSSSSSSSFSRVYPRFIEYLHKDIQSTGQKSPDAWVAGG

SEQ ID NO: 9706 - protein, 227 aa, Homo sapiens
  DOMAIN (113)..(206): Kelch motif domain identified by PFam, accession name Kelch, E-value=2.8e-14, PFam score of 60.9
  misc_feature (1)...(227): Xaa = X or * as defined in Table 2
EQCRSPARARLQPQPDPASTEAERRTPYPGSIGAPAGEGKVPGLVIYLLWPWQNQDEALSCLPSEAYSLSRQHGLPLAVNTMSAGGGRAFAWQVFPPMPTCRVYGTVAHQDGHLLVLGGCGRAGLPLDTAETLDMASHTWVALAPLPTARAGAAAVVLGKQVLVVGGVDEVQSPVAAVEAFLMDEGRWERRATLPQAAMGVATVERDGMVYVSGGNGPXHGPPGPGT

SEQ ID NO: 9707 - protein, 125 aa, Homo sapiens
  misc_feature (1)...(125): Xaa = X or * as defined in Table 2
IGKEEIKLLLFPDNLMEYTVNFXMYKPLELISXFSKVTEYQVNTEKSNCIYTXQLQIENEIAKTIXFMIASKSIKYLEISLTKCNKWRDILCICIGRLSIIKVLVLPKLMCGGEKIFNPNPTGFW

SEQ ID NO: 9708 - protein, 111 aa, Homo sapiens
  misc_feature (1)...(111): Xaa = X or * as defined in Table 2
RSTPDPVCLGIRSSGCRTADFREPXMLLSDRSSGSFVSEEYPAVXSVSLPLLGECLPVRLLRDGHSWXHDSDSSXVFKMADNFPAGFHRLGRSGDGRAEHRRCCLASQRCC

SEQ ID NO: 9709 - protein, 349 aa, Homo sapiens
  DOMAIN (157)..(203): Hexokinases proteins domain identified by eMATRIX, accession number BL00378E, p-value=7.818e-19, raw score of 22.92
  DOMAIN (172)..(343): Hexokinase domain identified by PFam, accession name hexokinase, E-value=2e-105, PFam score of 363.7
MVSISWPRDLPASASQSAGITGLIGALVLSVGIYAEVERQKYKTLESAFLAPAIILILLGVVMFMVSFIGVLASLRDNLYLLQAFMYILGICLIMELIGGVVALTFRNQQLLLRQQVLSHTLGCADLSDGPGSGPVKMFMGVPVIPAQPPELLASLRLSRGYGLVLSWLEPRYEKMISGMYLGEIVRNILIDFTKKGFLFRGQISETLKTRGIFETKFLSQIESDRLALLQVRAILQQLGLNSTCDDSILVKTVCGVVSRRAAQLCGAGMAAVVDKIRENRGLDRLNVTVGVDGTLYKLHPHFSRIMHQTVKELSPKCNVSFLLSEDGSGKGAALITAVGVRLRTEASS

SEQ ID NO: 9710 - protein, 230 aa, Homo sapiens
MVLISGPRDLPASASQSAGITALPSASSIMPSLQFLKYIKLILANPVLGKSYTVRSFCMFTSQFPSPLPLCRYFAAAVDDMNLGLSRAPANPFDPSVPLDCLEATHVLDKQANCWSMQLAVLGTAAAGSQFHVRCAYFPFTFHHDCITGLVPDWHQNPRLGSPLEADALKGFLADRCIPQTTHFCSPLTIPDSAATSSKCLSMKPGESNRYRADYRSGLNRGNVKGRERL

SEQ ID NO: 9711 - protein, 71 aa, Homo sapiens
RGAPSSAARGFSAMPKSKRDKKVSLTKTAKKGLELKQNLIEELRKCVDTYKYLFIFSVANMRNSKLKDIRN

SEQ ID NO: 9712 - protein, 61 aa, Homo sapiens
  misc_feature (1)...(61): Xaa = X or * as defined in Table 2
PRWSRFPDLVICPPRPPKVLGLQAXAIVCASISITKMWLRNAGLTSSMNWPRRSARVLSVS

SEQ ID NO: 9713 - protein, 186 aa, Homo sapiens
RPVGSGERRLVLPIFRCSCKANWVGRQLLNTAPGYACCRFGPLFPTSALSHLPALPPPWLPFPSFSTVSLTKTAKKGLELKQNLIEELRKCVDTYKYLFIFSVANMRNSKLKDIRNAWKHSRMFFGKNKVMMVALGRSPSDEYKDNLHQVSLWPSRGGAKAKPPSLPLLPCDSLPQPLAGQRLRES

SEQ ID NO: 9714 - protein, 431 aa, Homo sapiens
  misc_feature (1)...(431): Xaa = X or * as defined in Table 2
MMRAHAPPTAVPACTAPRAPPPRDHRAGIAREALGRTGRSGFRDCLGTREVALQAREKAQAAAWQGEAGCSAHWVRHTRGAAPEGRPRVPRAAGVLTGCTVFRRTWIQRDAQIQARQERWAKGESGPWGELRGLATQPAVRASGRRGRRLERQDILEVFRCLAASWNGGFGAVKPPEVADARSGLGSGDSFCLVSVSLTKTAKKGLELKQNLIEELRKCVDTYKYLFIFSVANMRNSKLKDIRNAWKHSRMFFGKNKVMMVALGRSPSDEYKDNLHQVSKRLRGEVGLLFTNRTKEEVNEWFTKYTEMDYARAGNKEGFHCXAWDPGPLEQFPHSMEPQLRQLGLPTALKRGVVTLLSDYEVCKEGDVADPRARASRSXKLFGVMRWLNFKVTIPNYMWDSQSGRFQQIGKTDLPESASEFPEESDSEDDD

SEQ ID NO: 9715 - protein, 133 aa, Homo sapiens
  DOMAIN (81)..(109): Synaptobrevin proteins domain identified by eMATRIX, accession number BL00417A, p-value=4.048e-16, raw score of 7.74
  misc_feature (1)...(133): Xaa = X or * as defined in Table 2
RTRGQLNRGVYGPRRSLSVPSTLAGAPLAGRLDETSGEEQTLTLCGGKMSGPTQPPAEGTEGTAPCGGAPVPPPNMTSNRRLQQTKAQVEEEVDIIPVNGDNVLGRDHKLRELDDRSDALQARAXPFESSAAS

SEQ ID NO: 9716 - protein, 118 aa, Homo sapiens
  misc_feature (1)...(118): Xaa = X or * as defined in Table 2
GEPNISGMSLPWGGPSGSTGMPAPAMPLPAMTPQCCXGQGPVGPCASCASACFRCGLXAGRFCGPCPGHCXCFYFSNSVFPNVECMGLREPAVLPAFHLGEEAGRISSGQGRSQNLPA

SEQ ID NO: 9717 - protein, 155 aa, Homo sapiens
  misc_feature (1)...(155): Xaa = X or * as defined in Table 2
LHVPMELQSHSKDEVSPTYLGMSLPGVAPLGSTGDASPCHAPPRPWTPQCSKGQGPCCAPWCPCCPCPPCPWSHGCLXLLCDPCPPPALPAAEGQQPLCKLASAVSGVVSRLGNFATCPWPLLMRPASSPRWKAGRTAGSLRPIHSTLGNTEFEK

SEQ ID NO: 9718 - protein, 195 aa, Homo sapiens
  DOMAIN (165)..(185): Protein kinase C terminal domain identified by PFam, accession name pkinase_C, E-value=1.8e-10, PFam score of 38.1
MAELLLQPLLQQDCDGSCSIPVGPRMQPAEASLTLNVQMKATRPPDGTERNISRLNKRILYKRWSLLCLSDAKLKVTQPKGEHYGISHERFPPVPSRQSDREPPFDGEDEDELFQSIMEHNVSYPKSLSKEAVSVCKGLMTKHPAKRLGCGPEGERDVREHAFFRRIDWEKLENREIQPPFKPKVLDSCRAPPHD

SEQ ID NO: 9719 - protein, 349 aa, Homo sapiens
  DOMAIN (171)..(222): Octicosapeptide repeat proteins domain identified by eMATRIX, accession number PF00564B, p-value=5.970e-14, raw score of 24.74
  DOMAIN (106)..(341): Eukaryotic protein kinase domain identified by PFam, accession name pkinase, E-value=7.7e-41, PFam score of 149.1
MAALRAMGVSSLWTAAQSLEWSEWNPQVFAGVQDRKLRCLQVCRTESSGVRRCAGQKAQVFAGVQDRKRRCSQKAKLGPAGNKVISPSEDRKQPSNNLDRVKLTDFNFLMVLGKGSFGKVMLADRKGTEELYAIKILKKDVVIQDDDVECTMVEKRVLALLDKPPFLTQLHSCFQTVDRLYFVMEYVNGGDLMYHIQQVGKFKEPQAVDLKLDNVMLDSEGHIKIADFGMCKEHMMDGVTTRTFCGTPDYIAPEGLLPRSILPVNTALLAYALLWPVEESVDGCFQGQWDAVRHAGAIGLTTNVIDVFVFTQIIAYQPYGKSVDWWAYGVLLYEMLAGQPSTDQLHRIS

SEQ ID NO: 9720 - protein, 1016 aa, Homo sapiens
  DOMAIN (72)..(85): C2 domain proteins domain identified by eMATRIX, accession number BL00499A, p-value=1.000e-13, raw score of 14.31
  DOMAIN (345)..(889): C2 domain identified by PFam, accession name C2, E-value=1.2e -77, PFam score of 271.4
  misc_feature (1)...(1016): Xaa = X or * as defined in Table 2
MRSQGEVRRYLKRQSCRFGLGSREKDMVTPSASSVCLIDEQIPAAGESYDIIDPRSKHKFKIHTYGSPTFCDHCGSLLYGLIHQGMKCDTCDMNVHKQCVINVPSLCGMDHTEKRGRIYLKAEVADEKLHVTGKACSSRSSIVGRHLDEGYTDIKAGPQLDAFLCISSQPPFGKNAIIITSSSSSIITLLKHGPRRFYSFASCSCMSSTVSVTNPKILGKGFIDSVWVTCHPGPMDCDWRADMGWGPVRLCIWFSTRNHQEQEKFMGPVREPKGPSHNTWGLGELQDEIWVQTQGQTTSRNHIQKPPTQGQVNNMKAKRTKIVSSLIFPYSLQIDCNFQRKKKRAVVVRDAKNLIPMDPNGLSDPYVKLKLIPDPKNESKQKTKTIRSTLNPQWNESFTFKLKPSDKDRRLSVEIWDWDRTTRNDFMGSLSFGVSELMKMPASGWYKLLNQEEGEYYNVPIPEGDEEGNMELRQKFERDDLGXVPXTPSASSVCLIDEQIPAAGESYDIIDPRSKHKFKIHTYGSPTFCDHCGSLLYGLIHQGMKCDTCDMNVHKQCVINVPSLCGMDHTEKRGRIYLKAEVADEKLHVTGKACSSRSSIVGRHLDEGYTDIKAGPQLDAFLCISSQPPFGKNAIIITSSSSSIITLLKHGPRRFYSFASCSCMSSTVSVTNPKILGKGFIDSVWVTCHPGPMDCDWRADMGWGPVRLCIWFSTRNHQEQEKFMGPVREPKGPSHNTWGLGELQDEIWVQTQGQTTSRNHIQKPPTQGQVNNMKAKRTKIVSSLIFPYSLQIDCNFQRKKKRAVVVRDAKNLIPMDPNGLSDPYVKLKLIPDPKNESKQKTKTIRSTLNPQWNESFTFKLKPSDKDRRLSVEIWDWDRTTRNDFMGSLSFGVSELMKMPASGWYKLLNQEEGEYYNVPIPEGDEEGNMELRQKFELMILDKFLKLSDLCFPCLRSGDDNRDCRIGLLGGFTQFTYVRIIHMAVPHLCILSHWKVFRGSNTHGAVITPDNNAFWNTS

SEQ ID NO: 9721 - protein, 692 aa, Homo sapiens
  DOMAIN (421)..(472): Octicosapeptide repeat proteins domain identified by eMATRIX, accession number PF00564B, p-value=6.604e-20, raw score of 24.74
  DOMAIN (363)..(627): Eukaryotic protein kinase domain identified by PFam, accession name pkinase, E-value=5.4e-58, PFam score of 206.1
  misc_feature (1)...(692): Xaa = X or * as defined in Table 2
RPQLPGGGKRWLGGTMADVFPGNDSTASQDVANRFARKGALRQKNVHEVKDHKFIARFFKQPTFCSHCTDFIWGFGKQGFQCQVCCFVVHKRCHEFVTFSCPGCGXGDPTLDDPRRQATRFKIHTYGSPTFCDHCVGSLLYGLIHQGMKCDTCDMNVHKQCVLNVPSLCGMVHTEKRGRIYLKAEVADEKLHVTVRDAKNLIPMDPNGLSDPYVKLKLIPDPKNESKQKTKTIRSTLNPQWNESFTFKLKPSDKDRRLSVEIWDWDRTTRNDFMGSLSFGVSELMKMPASGWYKLLNQEEGEYYNVPIPEGDEEGNMELRQKFEKAKLGPAGNKVISPSEDRKQPSNNLDRVKLTDFNFLMVLGKGSFGKVMLADRKGTEELYAIKILKKDVVIQDDDVECTMVEKRVLALLDKPPFLTQLHSCFQTVDRLYFVMEYVNGGDLMYHIQQVGKFKEPQAVFYAAEISIGLFFLHKRGIIYRDLKLDTVMLDSEGHIKIADFGDVQGNTXWDGSHGPGTFCGTPDYIAPEIIAYQPYGKSVDWWAYGVLLYEMLAGQPPFDGEDEDELFQSIMEHNVSYPKSLSKEAVSICKGLMTKHPAKRMGCGPEGERDVREHAFFRRIDWEKLENREIQPPFKPKVCGKGAENFDKFFTRGQPVLTPPDQLVIANIDQSDFEGFSYVNPQFVHPILQSAV

SEQ ID NO: 9722 - protein, 378 aa, Homo sapiens
MTQISNIKQPFAMQHRFFISLLHWTLQIVYPALFLGLCERGRNGRCDQVPEGSVLSLLVWVVPGLAFPEVAPGTCGTSYVPDAGLHGPEVESKLGLDPGSMTGTQPTRTPAQPAAAEPPALTGPGRVHQEQAVLACGFLGIYHLGAASALCRHGKKLVKDVKAFAGASAGSLVASVLLTAPEKIEECNQFTYKFAEEIRRQSFGAVTPGYDFMARLRSGMESILPPSAHELAQNRLHVSITNAKTRENHLVSTFSSREDLIKVLLASSFVPIYAGLKLVEYKGQKWVDGGLTNALPILPVGRTVTISPFSGRLDISPQDKGQLDLYVNIAKQDIMLSLANLVRLNQALFPPSKRKMESLYQCGFDDTVKFLLKENWFE

SEQ ID NO: 9723 - protein, 295 aa, Homo sapiens
  misc_feature (1)...(295): Xaa = X or * as defined in Table 2
VTARPRASRLKGLVQHGSVPGLHCATARMKHINLSFAACGFLGIYHLGAASALCRHGKKLVKDVKAFAGASAGSLVASVLLTAPEKKLEECNQFTYKFSEEIRRQSFGAVTPGYDFMARLRSGMESILPPSAHELAQNRLHVSITNAKTRENHLVSHFFSSREDPQLRSLLSPASFVPIYARTXSLVEYKGQKWVDGGLTNALPHPCPVGRTVTISPFSGRLDISPQDKGQLRSVCLISAKQDIMLSLANLVRLNQALFPPSKRKMESLYQCGFDDTVKFLLKENWFGIKCIKVL

SEQ ID NO: 9724 - protein, 109 aa, Homo sapiens
  misc_feature (1)...(109): Xaa = X or * as defined in Table 2
GLDSFSATETRRTHTNTEPHSQSQEPSNGEPQKEEPAAESRDPTPGQQTEEDQDTAEIPVRDMEGDLQELASVKHRGXILDLGSSVKVKIIPKEEHCKMPEAGEEQPQV

SEQ ID NO: 9725 - protein, 1374 aa, Homo sapiens
MEEVEEDRFKENLEGALAGQLLGDEATQALQVLAVELDVVVPGALHPQRLHRLGAALVERQPVREVDHLVLPAVDDEHGRRDLGHLLDVREGVEAVGLLGVAEGDAHARGERRVQHHRGTLVARGQVHGGHRADALPVQDDAVRADAVPGGAGAGSAAASNARAPFPPAGVPGPSSGCDPPVSPLSQVSAHWELCGPHILNASYLPARVRKPFLVHWPGQRTLFLPAALAHPLGHEEFRQLCPQMSPPNFGLSESPRPVRCQCNPGQHRGWWLRRWHPLPPAPSLGSGQVLGHLSTTSSHPGAPSPPGHWCAAPDPADPAPVTRPPRAQSQARGTHLPPCPCRDPTTLLPHALGSDPRQTPSCKAGAWAGRSPQLPPGCHHSNERDTSPVEALGTLWPPPHGSGPRFLQDKGAAGQMAEQTELRAGHGRMAKLRSHRASWASPPDLDAAASPHLAPSAASADGLPATRAQTPRPPPTPSRQAELPPGSPSPGAQGLPGGVDVGIEVPLGRPARAGTVAGGVVGEDVAVEAGAQANVEAAHLAQVHGIAVREEDRVPGTRHAANIHAGDTVAAGALGGEDLDGVQLALAVLEVGTLRQGFWWTLRGTDVETYPFSAPRAASHGVGRHEELPDPTGPCGGRLLSLTIHGVTIRYHALLWARGPIMSKSQVLGEWEPVQGGKSSENDKWTMSDPGAEAPTCSRAASGVDKEQQGRWQGLWNSHIKPLKIRMVKQNNIIPGETQILLRFTGWESKVNAKKQLPVGIKCEPMDQENEQTGGHETDGHRIVSVLIHFPLISILSYATWGLSLLECIPGSPVCTLLVRFSNVGTRWSLEVRGSPCGFGSNKVCGVMTPEIKMVCVCEGKAGKAVGSGGVEGTKEVSTGNAEGPVRHEAVDGGVHLAFALLQGLLWSLLLGPPGLAGWGGGELDAVPDSTSSATNVSMVVSAGPWSSEKAEMNILEINEKLRPQLAENKQQFRNLKERCFLTQLAGFLANRQKKYKYEECKDLIKFMLRNERQFKEEKLAEQLKQAEELRQYKVLVHSQERELTQLREKLREGRDASRSLNEHLQALLTPDEPDKSQGQDLQEQLAEGCRLAQHLVQKLSPENDEDEDEDVQVEEDEKVLESSAPREVQKAEESKVPEDSLEECAITCSNSHGPCDSIQPHKNIKITFEEDKVNSSLVVDRESSHDGCQDALNILPVPGPTSSATNVSMVVSAGPLSSEKAEMNILEINEKLCPQLAEKKQQFRSLKEKCFVTQVACFLAKQQNKYKYEECKDLIKSMLRNERQFKEEKLAEQLKQAEELRQYKVLVHSQERELTQLREKLREGRDASRSLNEHLQALLTPDEPDKSQGQDLQEQLAEGCRLAQHLVQKLSP

SEQ ID NO: 9726 - protein, 68 aa, Homo sapiens
  misc_feature (1)...(68): Xaa = X or * as defined in Table 2
AIQFSVYICVPGICISPDRERKRDRGKDGGRHRTRWRQGEXKGEVGRERRRGRERDRQRDRDRIYSPD

SEQ ID NO: 9727 - protein, 158 aa, Homo sapiens
  misc_feature (1)...(158): Xaa = X or * as defined in Table 2
KQIPSLPISRPSVLAVMVTMTLKVGAPPMLFIQRSVVNSPSCSSESRTTVYFWPPSVSPFMTKLDQSLPTRTPTSAGVMLRKVFPPTSREKPTCFSSNAXKELPXGWQESGCSRQCPLSSRETCRASCINESANARGEAVCVLGARVVFLFTSETGNS

SEQ ID NO: 9728 - protein, 126 aa, Homo sapiens
  misc_feature (1)...(126): Xaa = X or * as defined in Table 2
ENVMLCIIRAKEKNHMITLSYTVKAFGKLKTFFMIYKNKPQKTLSMIRREGNTFNPIKGRFEKNSAGNIILNGIGLNAFPIKSEKKVEYLLLFFQFSIILEIXINAIKXEKXIKGRFEKNSEVTLY

SEQ ID NO: 9729 - protein, 139 aa, Homo sapiens
  misc_feature (1)...(139): Xaa = X or * as defined in Table 2
SARLSLPKCWDYRREPPCPASFLYLKNIILYIIRAKEKNRMITLSYTVKAFGKIENFFMIYNNKPQKMLYMMRTEGNTSNPIKGRFEEPTGNIILNRHKIGCFSIKSEKKVEYLLLLFXFSIILELXVNAIKXEKLIKY

SEQ ID NO: 9730 - protein, 156 aa, Homo sapiens
  misc_feature (1)...(156): Xaa = X or * as defined in Table 2
NFWGGGAPKAPPPKKGFFPKIPRGVLNRPPQKEKKLFFPPPVKLGPPKDFLKRAPPXTPKKFFFPPKPYKFLGGGGPKSPPPKKRVFSQNPPRGFKSPPPKRKKIIFPPPRKIGPPQGFFKKGPPPLFIFFCLFPAFMETTCPFSKSLSKKFTKTK

SEQ ID NO: 9731 - protein, 316 aa, Homo sapiens
  DOMAIN (60)..(77): CASEIN KINASE II REGULATORY SUBUNIT FAMILY SIGNATURE domain identified by eMATRIX, accession number PR00472A, p-value=7.600e- 23, raw score of 8.03
  DOMAIN (57)..(263): Casein kinase II regulatory subunit domain identified by PFam, accession name CK_II_beta, E-value=1.7e-17, PFam score of 58.8
  misc_feature (1)...(316): Xaa = X or * as defined in Table 2
PTRPPNFHSPHPTSPAAVGSAALRCSGRRRSLEVATSLPHPSPGPRPAADVKMSSSEEVSWISWFCGLRGNEFFCEVDEDYHPGTNFNLTDLNKQVPHYRTSSKPXSLDPEPDEELEDNPNQSDLIEQAAEMLLWDLIHARYIPLPTRRHRPRCLGKVPSKGDFGYCPRVYCENPANCFPIGLSDIPGEAHGESSYCPQCAMDVXHTPSQSRQPSTRMGAXLRATGFPSHGSFMVAIPELPGPKRPAQPSFVARGFLRGFKIHPMAYPAGSFQGRPATFKKPQFKTDSLIPSPTCPAVFCLFLSFLPTLSGTLYGF

SEQ ID NO: 9732 - protein, 120 aa, Homo sapiens
  DOMAIN (3)..(23): ADP-glucose pyrophosphorylase proteins domain identified by eMATRIX, accession number BL00808A, p-value=1.000e-10, raw score of 10.08
  DOMAIN (2)..(120): Nucleotidyl transferase domain identified by PFam, accession name NTP_transferase, E-value=0.016, PFam score of -77.2
MKALILVGGYGTRLRPLTLSTPKPLVDFCNKPILLHQVEALAAAGVDHVILAVSYMSQVLEKEMKAQEQRLGIRISMSHEEEPLGTAGPLALARDLLSETADPFFVLNSDVICEFPFQAM

SEQ ID NO: 9733 - protein, 50 aa, Homo sapiens
  misc_feature (1)...(50): Xaa = X or * as defined in Table 2
IGPSLALGSKVFLQKKQSLLFIRCWLIQALQDLWPQGWNTAEMGWAXQMG

SEQ ID NO: 9734 - protein, 586 aa, Homo sapiens
  DOMAIN (30)..(50): ADP-glucose pyrophosphorylase proteins domain identified by eMATRIX, accession number BL00808A, p-value=5.817e-10, raw score of 10.08
  DOMAIN (29)..(262): Nucleotidyl transferase domain identified by PFam, accession name NTP_transferase, E-value=3.9e-59, PFam score of 209.9
AACAPSPRTESSTVSSLPLLQECLLGAMKALILVGGYGTRLRSLTLSTPKPLVDFCNKPILLHQVEALAAAGVDHVILAVSYMSQVLEKEMKAQEQRLGIRISMSHEEEPLGTAGPLALARDLLSETADPFFVLNSDVICDFPFQAMVQFHRHHGQEGSILVTKVEEPSKYGVVVCEADTGRIHRFVEKPQVFVSNKINAGMYILSPAVLQRIQLQPTSIEKEVFPIMAKEGQLYAMELQGFWMDIGQPKDFLTGMCLFLQSLRQKQPERLCSGPGIVGNVLVDPSARIGQNCSIGPNVSLGPGVVVEDGVCIRRCTVLRDARIRSHSWQESCIGGSGGSWKLLTIDQDLMVAQFSTPSLPPTLKVGFLPSAGKEQSVLWVSLEEAEPIPDIHWGIRVLQPPPRARECAEVRMENVTVLGEDVIVNDELYLNGASVLPHKSIGESVPEPRIIIHDGGFAEEAVLVVHQVLVDTGSTTGEGMRTALHVPTALPTTKLWGPLLADLWAQGWDTAEMGGGSCCLGRCRGQVRQDLFQLGQLIGTDIIRIWGVVGSVKSEVAEDVMPLEYSQPTTLLFLRLLTRPSPRFP

SEQ ID NO: 9735 - protein, 395 aa, Homo sapiens
  DOMAIN (38)..(58): ADP-glucose pyrophosphorylase proteins domain identified by eMATRIX, accession number BL00808A, p-value=1.000e-10, raw score of 10.08
  DOMAIN (37)..(271): Nucleotidyl transferase domain identified by PFam, accession name NTP_transferase, E-value=2.5e-51, PFam score of 183.9
  misc_feature (1)...(395): Xaa = X or * as defined in Table 2
RARGRARRWECAAGTGQAGCRHLRARDTPSTSAGAMKALILVGGYGTRLRPLTLSTPKPLVDFCNKPILLHQVEALAAAGVDHVILAVSYMSQVLEKEMKAQEQRLXIRISMSHEEEPLGTVGPLPLARDLLSETADPFFVLNSDVICDFPFQAMVQFHRHHGQEGSILVTKVEEPSKYGVVVCEADTGRIHRFVEKPQVFVSNKINAGMYILSPAVLRRIQLQPTSIEKEDLPIMGKEGQLYAMELQGFWMDIGQPKDFLTGMCLFLQSLRQKQPERLCSGPGIVGNVLVDPSARIGQNCSIGPNVSLGPGVVVEDGVCIRRCTVLRDARIRSHSWLESCIVGWRCRVGQWVRMENVTVLGEDVIVNDELYLNGASVLPHKSIGESVPEPRIIM

SEQ ID NO: 9736 - protein, 77 aa, Homo sapiens
  misc_feature (1)...(77): Xaa = X or * as defined in Table 2
PQIPPPPGIPRKRENLSREPGGPNPWGGXAXFPLLEKFLGKKNLGPPPGGGPTPFPPFNPNLLGGPKGGDQKAGKKP

SEQ ID NO: 9737 - protein, 39 aa, Homo sapiens
  misc_feature (1)...(39): Xaa = X or * as defined in Table 2
MGRRANESLNVLIVYHFLFQKGVCQRLQLVQVVLQHLLX

SEQ ID NO: 9738 - protein, 96 aa, Homo sapiens
  DOMAIN (42)..(62): AAA-protein family proteins domain identified by eMATRIX, accession number BL00674E, p-value=7.600e-20, raw score of 15.24
HVFIDLPTLQERREIFEQHLKSLKLTQSSTFYSQRLAELTPGFSGADIANMCNEAALHAAREGHTSVHTLNFEYAVERVLAGTGGAPWVKALLSRA

SEQ ID NO: 9739 - protein, 701 aa, Homo sapiens
  DOMAIN (295)..(315): AAA-protein family proteins domain identified by eMATRIX, accession number BL00674E, p-value=4.462e-21, raw score of 15.24
  DOMAIN (445)..(658): Peptidase family M41 domain identified by PFam, accession name Peptidase_M41, E-value=7.9e-54, PFam score of 192.2
  misc_feature (1)...(701): Xaa = X or * as defined in Table 2
SSCGLGGQHGLGAARVRSLFKEARARAPCIVYIDEIDAAGKKRSTTMFGFSNTEEEQTLNQLLVEMDVFYAKIEELKLVNRRAETGVSLSRCSTQKXKSXNWCILITVFYAAIEELKLMYPYHGVLCSSRRKLSSCSNKEMTQSEKSQAXYRMTPLGMGTTDHVIVLASTNRADILDGALMRPGRLDRHVFIDLPTLQRKGVALSPRLECSAAITTHCGLNLQGSSXGARTTMGVRRRAGXFLTESRCVAKAGVQAAISAHCNHHLPGEARKIFEQHLKSLKLTQSSTFYSQRLAELTPGFSGADIANICNEAALHAAREGHTSVHTLNFEYAVERVLAGPHGFQLWESSGFLPEEWGQLLCQTLQNTPGFSPTALRGREDWRCLCLTENLFSCNHLLLCGNRKAFYNSSKAGRTEWEPQASXKKIHDVLECSGPRADSSCTEWTLTDVWKIXDRKXSLTRTAKKSKILSKEEQKVVAFHESGHALEGWMLEHTEAVMKVSITPRTNAALGFGQMLPKDQHLFTQESSFERRFIALGGRASEHFSLNEVTSGAQDDLRKVTPIAYSMVKQVGMAPGIGPISFPEAQEGLMGIGRRPFNQGLQQMMDHEARLLVAKAYRHTEKVLQDNLDKLQALANALLEKEVINYEDIEALIGPPPHGPKKMIAPQRWIDAQEEKQDLGEEETEETQQPPLGGEEPTWPK

SEQ ID NO: 9740 - protein, 801 aa, Homo sapiens
  DOMAIN (349)..(368): ATP-DEPENDENT CLP PROTEASE ATP-BINDING SUBUNIT SIGNATURE domain identified by eMATRIX, accession number PR00300A, p-value= 7.857e-12, raw score of 9.56
  DOMAIN (549)..(760): Peptidase family M41 domain identified by PFam, accession name Peptidase_M41, E-value=2.5e-96, PFam score of 333.4
  misc_feature (1)...(801): Xaa = X or * as defined in Table 2
FQANMAVLLLLLRALRRGPGPGPRPLWGPGPAWSPGFPARPGRGRPYMASRPPGDLAEAGGRALQSLQLRLLTPTFEGINGLLLKQHLVQNPVRLWQLLGGTFYFNTSRLKQKNKEKDKSKGKAPEEDEEERRRRERDDQMYRERLRTLLVIAVVMSLLNALSTSGGSISWNDFVHEMLAKGEVQRVQVVPESDVVEVYLHPGAVVFGRPRLALMYRMQVANIDKFEEKLRAAEDELNIEAKDRIPVSYKRTGFFGNALYSVGMTAVGLAILWYVFRLAGMTGREGGFSAFNQLKMARFTIVDGKMGKGVSFKDVAGMHEAKLEVREFVDYLKSPERFLQLGAKVPKGALLLGPPGCGKTLLAKAVATEAQVPFLAMAGPEFVEVIGGLGAARVRSLFKEARARAPCIVYIDEIDAVGKKRSTTMSGFSNTEEEQTLNQLLVEMDGMGTTDHVIVLASTNRADILDGALMRPGRLDRHVFIDLPTLQERREIFEQHLKSLKLTQSSTFYSQRLAELTPRFSVADIANICNEAALHAAREGHTSVHTLNFEYAVERVLAGTAKKSKILSKEEQKVVAFHESGHPLVGWMLEHTEAVMKVSITPRTNAALGFAQMLPRDQHLFTKEQLFERMCMALGGRASEALSFNEVTSGAQDDLRKVTRIAYSMVKQFGMAPGIGPISFPEAQEGLMGIGRRPFSQGLQQMMDHEARLLVAKAYRHTEKVLQDNLDKLQALANALLEKEVINYXEDIEALIGPPPHGPKKMIAPQRWVSDAQREKQYLGEEETEETQQPSLGGEEPTWPK

SEQ ID NO: 9741 - protein, 299 aa, Homo sapiens
  DOMAIN (282)..(298): Elongation factor 1 beta/beta'/delta chain proteins domain identified by eMATRIX, accession number BL00824E, p-value=1.000e- 19, raw score of 12.49
  DOMAIN (221)..(299): EF-1 guanine nucleotide exchange domain identified by PFam, accession name EF1BD, E-value=7.7e-22, PFam score of 86.0
  misc_feature (1)...(299): Xaa = X or * as defined in Table 2
LCLFPLPARKMATNFLAHEKNLVDKFKYDDAERRFYEQMNGPVAGCASRQENGATVILRDIARARENIHKSLAGSSGPGASSGTSGDHGELVVRIASLEVENQSLRGVVQELQQAISSLEARLNVLEKTWPGHRATGPQTQHVSPMRQVEPPSPRSPPTPAEGDARDDDIALFGSDNEEEDKGGGTSLREERGFREFPGEKRPKKPRLVAQLSFLLGXNPWDRXKDMAQLEACVRSIQLGTGRSWGASKLGAPWATGIRKLQIQCVVEDDKVGTDLLEEEITKFEEHVQSVDIAAFNKI

SEQ ID NO: 9742 - protein, 100 aa, Homo sapiens
  DOMAIN (1)..(75): Fumarylacetoacetate (FAA) hydrolase fam domain identified by PFam, accession name FAA_hydrolase, E-value=0.00018, PFam score of -38.0
GKTFDTFCPLGPALVTKDSVADPHTLKICCRVNGKVVQSGNTNQMVFKTEDLIAWVSQDVILTGTPPGVGVFRKPPVFLKKGDEVQCEIEELGVIINKVV

SEQ ID NO: 9743 - protein, 309 aa, Homo sapiens
  DOMAIN (139)..(295): Fumarylacetoacetate (FAA) hydrolase fam domain identified by PFam, accession name FAA_hydrolase, E-value=4.4e-54, PFam score of 193.1
MALGSSVSWILHFSLQALMVVSGRRLLTALLQAQKWPFQPSRDMRLVQFWAPHLVGPHLGLETGNGRGIINLNAFDPTLPKTMTQFLEQGEATLSVARRALAAQLPVLPRSEVTFLAPVTWPDKVVCVGMNYVDHCKEQNVPVPKEPIIFSKFASSIVGPYDEVVLPPQSQEVDWEVELAVVIGKKGKHIKATDAMAHVAGFTVAHDVSARDWLTRCNGKQWLLGKTFDTFCPLGPALVTKDSVADPHNLKICCRVNGEVVQSSNTNQMVFKTEDLIAWVSQKPPVFLKKGDEVQCEIEELGVIINKVV

SEQ ID NO: 9744 - protein, 281 aa, Homo sapiens
  DOMAIN (90)..(212): Fumarylacetoacetate (FAA) hydrolase fam domain identified by PFam, accession name FAA_hydrolase, E-value=0.00059, PFam score of -45.3
  misc_feature (1)...(281): Xaa = X or * as defined in Table 2
PSGSDFAAAVVPRLDAVTGASAQAPAALDLPPREPXLSAGGPVAAAAAARALAAQLPVLPRSEVTFLAPVTWPDKVVCVGMNYVDHCKEQNVPVPKEPIIFSKFASSIVGPYDEVVLPPQSQEVDWEVELAVVIWKRKASTSRXSGKGGLPVQSAAEAPAPASPSSDLTHQHTVPAVPDTRKQSASLLPDTAFPFTHLWLALATNMGXQLRDPLPXVLVSPMIXPPVWPNPLPPXATDAMAHVAGFTVAHDVSARDWQMRRNGKQWLLXKTFDTFCPLGPA

SEQ ID NO: 9745 - protein, 137 aa, Homo sapiens
  misc_feature (1)...(137): Xaa = X or * as defined in Table 2
SSYRWPSFPILKTCRGPMAPSLSFPGSFLSGLSVPLPLHHPPCPTXLKAAYPNCQLWPFLASVAPDTAPPECPSCFFLLQRAQAPPFLLDLFPYDCXGLCCTXPHQPRGNPLTPRQGLWLGLKTHCMGTKAGPGIPR

SEQ ID NO: 9746 - protein, 186 aa, Homo sapiens
  misc_feature (1)...(186): Xaa = X or * as defined in Table 2
ITPRFHLCISDPHNLKICCRVNGEVVQSSNTNQMVFKTEDLIAWVSQXVTRAVLSAPLHLPHMWRLTXALHLWLWPLSQPLVSLGPFALLQFVTFYPGDVILTGTPPGVGVFRKPPVFPQGRFSEKQREQGPPKPLAGLPSDLRSTGLCMCVXRKGLTLSWPALLQKGDEVQCEIEELGVIINKVV

SEQ ID NO: 9747 - protein, 201 aa, Homo sapiens
  DOMAIN (1)..(172): Fumarylacetoacetate (FAA) hydrolase fam domain identified by PFam, accession name FAA_hydrolase, E-value=1.6e-07, PFam score of 4.5
  misc_feature (1)...(201): Xaa = X or * as defined in Table 2
LVPVLRRPLPLTSRPASPNSAQEDRLPPPRRQEVNWEGELAGVIGKKGKPIKATDAMAHVGGFTVAHDVSARDWQMRRNGKQWLLGKTFDTFCPLGPALCDQVTGVADPHNLKICCRINGEMVPERQTPNQMVISRQRTXIALGLPSLVTLLPPGDVIPNLGPPHLHPGVGVFRKPPVFLKKGDEVQCEIEELGVIINKVV

SEQ ID NO: 9748 - protein, 228 aa, Homo sapiens
  misc_feature (1)...(228): Xaa = X or * as defined in Table 2
EPGMWQSPPSIGCPHRGTGQASCASPPSTGLSXIPAFPGWRPAWHLHPLLTSPCTCXLXSLGVFPVPPPQPWSTPSQDLDNDIFPVPPSYRWPSFPILKTCRGPMAPSLSFPGSFLSGLSVPLPLHHPPCPTXLKAAYPNCQLWPSSASVAPDTAPPECPLLLCFRGPGSPILLTSPICLLRTLLQLSSPASGESHYPQGRAVGWAEKPSAWSTRSLALGFPMNNNEN

SEQ ID NO: 9749 - protein, 107 aa, Homo sapiens
VRVWVGNAGCRLCFRADGVASGVGCAWDGDRMCLPESFIRAPVLSVSTAGPQSSQGSSGRSATPGEGAQGINRTLPSPALPSPPMAPPPSYLVGTSPAPHSDDGCWP

SEQ ID NO: 9750 - protein, 228 aa, Homo sapiens
  DOMAIN (76)..(90): DEAMINASE ZINC HYDROLASE BIOSYNT domain identified by eMATRIX, accession number PD01010A, p-value=8.116e-10, raw score of 12.36
  misc_feature (1)...(228): Xaa = X or * as defined in Table 2
LKLPIFRDLKVQCGWVELENRLTKMLLSTSVLSCFSSRPNMSEVSCNKRYDYLEWPEYFMAVAFLSAQRSKDPYSQVGACIVNSENKIVGIGYNGKPNGVHNSLFPXRRTPKNKLDTKYPYVCHAELNAILNKKFRPDVKRPEVCMFALVPPGKXNGGLSLIILQAGIKRKLIFHVLINYPGXLTGATAARLLFXYGPGVTFRKFIPKCSKIVIDFDSINSRPSRKLQ

SEQ ID NO: 9751 - protein, 204 aa, Homo sapiens
  misc_feature (1)...(204): Xaa = X or * as defined in Table 2
CALGEGNSGHRAFSKDRARLRPGWWSGRAKDELGKPKPLGPSXRRADRRXGQSACDSSPPSGPGPTGDGARGRCXAARPGPRARRRRLGPSGEDRSCQMGTGEEHHGRLWGLSVGPAPKPESAPSSLTCPREETPGRGRPPAPQFQSLARSHGIRGAGDKPTEEKSLLPQQRHRGGASSVGRGPLGFFPLEEAPLPYPWPPNLQ

SEQ ID NO: 9752 - protein, 300 aa, Homo sapiens
  DOMAIN (118)..(161): kw TRANSCRIPTASE REVERSE II ORF2 domain identified by eMATRIX, accession number DM01354T, p-value=9.850e-32, raw score of 9.48
  DOMAIN (1)..(222): Reverse transcriptase domain identified by PFam, accession name rvt, E-value=5.6e-05, PFam score of 1.0
MDKFLDTYTLPRLNQEEVESLNRPTTGSEIEAIINSLTTKKSPGPDGFTAKFYQRTNDKNCTIISIDVEKAFDKIQQPFMLKTLNKQGTDGTYLKIIRAIYDKPTPNIILNGQKLEEFPLKTGTRKGCPLSPLLFNIVLEVLARVIRQEKEIKAPAPDATAAEMLMPKKNRIAIYELLFKEGAMVAKKDVYTPKQPELADKNVPNLHVMKAMQSLKSRGYMKEQFAWRHFYWYLTNEGIHHLRDYLHLPPEIVPATLCHSRPETGRPRPKGLEGSEEHLCAAAHRLRCGEHLCPTALSGM

SEQ ID NO: 9753 - protein, 265 aa, Homo sapiens
  misc_feature (1)...(265): Xaa = X or * as defined in Table 2
TSSSCSCHPPPNACCRGTSSVLSQKAGQAPHLPGPTGKPLRSSGSLRAVRAPGPIGGGQAPWSDPPVLQAPPRPPQAPRGSWRGAGPRQPGRDAAPRMLLPFQPRYRTLQPQRLLMPKKNRIAIYELLFKEGVMVPKKDVPIPKHPELADKNAPNLRVMKPMQVSQGRGGYVKGQFAWRHFYWYLTKXGSKCQLHTEAARLGQPDIIPTXRTRALXPATGHLSMRARSLEVQRPTAAPSGPSWLSLLQKGMWTGKNEDLHFRRCR

SEQ ID NO: 9754 - protein, 144 aa, Homo sapiens
  DOMAIN (65)..(99): Clathrin adaptor complexes medium chain proteins domain identified by eMATRIX, accession number BL00990C, p-value=7.353e- 38, raw score of 18.78
  DOMAIN (1)..(144): Adaptor complexes medium subunit family domain identified by PFam, accession name Adap_comp_sub, E-value=1.3e-06, PFam score of -132.4
LNLLMSPQGQVLSAHVSGRVVMKSYLSGMPECKFGMNDKIVIEKQGKGTADETSKSGKQSIAIDDCTFHQCVRLSKFDSERSISFIPPDGEFELMRYRTTKDIILSFRVIPLVREVGRTKLEVKVVIKSNFKPSLLAQSSPKGQ

SEQ ID NO: 9755 - protein, 114 aa, Homo sapiens
  DOMAIN (22)..(50): CLATHRIN COAT ASSEMBLY PROTEIN SIGNATURE domain identified by eMATRIX, accession number PR00314B, p-value=5.026e-31, raw score of 15.68
  DOMAIN (1)..(114): Adaptor complexes medium subunit family domain identified by PFam, accession name Adap_comp_sub, E-value=0.00052, PFam score of -190.9
MVFEFLYKMCDVMAAYFGKISEENIKNNFVLIYELLDEILDFGYPQNSETGALKTFITQQGIKSQHQTKEEQSQITSQVTGQIGWRREGIKYRRNELFLDVLEKVNLLMSPQGS

SEQ ID NO: 9756 - protein, 219 aa, Homo sapiens
  misc_feature (1)...(219): Xaa = X or * as defined in Table 2
ASCTPFPTLPVRGRLGYNPDSPGTSNAHWAGDNEMSLVGLGPVTKPYPHGALPQGWGSWWVRGLSRTPAVTLSQGLCSCVLETCWGPGEGAWFLSPQSVMCDLESPRSPADPQDGSLGVYGLASSWTNVQPTWNTSRIGSACQARSEFNKSHLFIFLEGETXGPQKGGGVPPKPHYKAPMQSPGPILWTQPRAPPTGAIYFFLQMGGPPWRFSLFGVGG

SEQ ID NO: 9757 - protein, 521 aa, Homo sapiens
  DOMAIN (166)..(196): Clathrin adaptor complexes medium chain proteins domain identified by eMATRIX, accession number BL00990B, p-value=9.143e- 28, raw score of 20.15
  DOMAIN (8)..(461): Adaptor complexes medium subunit family domain identified by PFam, accession name Adap_comp_sub, E-value=2.7e-173, PFam score of 589.1
  misc_feature (1)...(521): Xaa = X or * as defined in Table 2
SAAMIGGLFIYNHKGEVLISRVYRDDIGRNAVDAFRVNVIHARQQVRSPVTNIARTSFFHVKRANIWLAAVTKQNVNAAMVFEFLYKMSDEMAAYFGKISEENIKNNFVVHYMELLDEILEFGYPQEFRDSGALKTFITPAGHSRSSGFRQKEGSSQFTSQVTGQIGWRREGIKYRRNELFLDVLESVNLLMSPQGQVLSAHVSGPVWVMKNYLSGMPECKFGMNDKIVIEKQGKGTADETKQEPGSNQLLIDDCTFHTQCVRLSKFDSERSISFIPPDGEFELMRYRTTKDIILPFRVIPLVREVGRTKLEVKVVIKSNFKPSLLGQKIEVRIQPPLNTSGVQVICMKGKAKYKAGENSFVWKIKRMAGMKESQIQRRGFELLLTNDKKKWGCRPPFPMNFEVPFAPSGLKVGYLKVLNPKLNYSDHDVIKWVRXIGRSGIYENSACKATRQLAQLPQPPFLQQVQVPLLPQTTHQVSPSLPALLPSPLHQARSLRSGPKQHYKVGPVEPALGLPGQGEF

SEQ ID NO: 9758 - protein, 118 aa, Homo sapiens
HPNRDGFRAPRECLCLVTRISTMFLSLQAENSSYFVSRELCAHSIRKLQESPGGGPGMRLQVLCVSTTSLRLKIFFGKPPWQQGHGRRKVRGGEGSGSRGWAGAVPCLSTGVSGGMPR

SEQ ID NO: 9759 - protein, 157 aa, Homo sapiens
DPKSCGRWRRGRNGNGELADLQAESHRARAAGRGLPGALARVQPEAAAAEVGARCGRGAAENSIDFVSRELCAHSIRKLQAHVLLIKAVHGYFDPRENYSDKESLSFMIDTMKSTLKERFQFVEVPGNHCVHMSEPQHVASIISSFLQCTHTLPAQL

SEQ ID NO: 9760 - protein, 130 aa, Homo sapiens
  misc_feature (1)...(130): Xaa = X or * as defined in Table 2
GALARAXPPQQRWVSCPRGVPGALXREFTMFLSLQAENSIDFISRELCAHSIRKLQAHVLLIKXVAQAGAQRSQLTGYGSLTWACPPLTTVKSHGTAPPHPLLHEPSPTSDLPPSMTLLPGGLPKKDLES

SEQ ID NO: 9761 - protein, 133 aa, Homo sapiens
  misc_feature (1)...(133): Xaa = X or * as defined in Table 2
PNPLSTQMGTSGGKGHQELLEYSPGGGPPPGPRKQFHCSPPPPNPASGKKGHSPPPLSPHSFSKVKFNQPAPPPPTPTPKQERKSXLKMLFNFSAPVDPTPAQMAPPGLFVPSPSPPLHRLPPQAWGQRHSQQ

SEQ ID NO: 9762 - protein, 126 aa, Homo sapiens
  DOMAIN (66)..(106): Heat shock hsp90 proteins family proteins domain identified by eMATRIX, accession number BL00298D, p-value=1.000e-40, raw score of 17.97
  DOMAIN (23)..(125): Hsp90 protein domain identified by PFam, accession name HSP90, E-value=3.3e-64, PFam score of 226.7
TGAVSFQMPEETQTQDQPMEEEEVETFAFQAEIAQLMSLIINTFYSNKEIFLRELISNSSDGEPMGRGTKVILHLKEDQTEYLEERRIKEIVKKHSQFIGYPITLFVEKERDKEVSDDEAEEKEDN

SEQ ID NO: 9763 - protein, 78 aa, Homo sapiens
  DOMAIN (1)..(74): Hsp90 protein domain identified by PFam, accession name HSP90, E-value=1.5e-49, PFam score of 178.0
VDSEDLPLNISREMLQQSTILKVIRKNLVKKCLELFTELAEDKENYKKFYEQFSKNIKLGIHEDSQNRKKLSELYLDV

SEQ ID NO: 9764 - protein, 793 aa, Homo sapiens
  DOMAIN (182)..(205): 90 KD HEAT SHOCK PROTEIN SIGNATURE domain identified by eMATRIX, accession number PR00775E, p-value=7.500e-24, raw score of 8.06
  DOMAIN (64)..(793): Hsp90 protein domain identified by PFam, accession name HSP90, E-value=0, PFam score of 1066.4
  misc_feature (1)...(793): Xaa = X or * as defined in Table 2
RKVREASGKSAARWAGPSLYKAGAGVARQLLQRPGVAVPLVLCGHLAKMPEETQTQDQPMEEEEVETFAFQAEIAQWISLIINTFXLETKRSFLRELISNSSDALDKIPVLNAXHDPHSIRPLGKELHITLLPDQTKIRTLTIVDTWNLEXPKADLINNLGTIARSLGTKAFMEALQAGADISMIGQFGVGFYPAYLVAEKVTVITKHNDDEQYAWESSAGGSFTVRTDTGXTYGSVGTKVILHLKEDQTEYLEERRIKEIVKKHSQFIGYPITLFVEKERDKEVTDDAPQEKEDKEEEKEKEEKESEDKPEIEDVGSDEEEEKKDGDKKKKKKIKEKYIDQEELNKTKPIWTRNPDDLTNEEYGEFYKSLTNDWEDHLAVKHFFQFEGQLEFRALLFVPPTVLPFDLFENKKKKNNIKLYVRRVFIMDNCEELIPEYLNFIRGVGDSEDLPLNISREMLQQKPKFXKFSRKNFGPKKCLELFTELAEDKENYKKFYEQFSKNIKLGIHEDSQNRKKLSELLRYYTSASGDEMVSLKDFCPRMKENQKHIYYITGETKDQVANSAFVERLRKHGLEVIYMIEPIDEYCVPQLKEFEGKTLVSVTKEGLELPEDEEEKKKQEEKKTKFENLCKIMKDIKEKKVEKVVVSNRLVTSPCCIVTSTYGWTANMERIMKAQALRDNSTMGYMAAKKHLEINPDHSIIEPLGPKAEADKNDKSVEGILVIWLKETAPPSSAFSLENPRTHATRIYRMIKPGLGIDEDDPTADDYQWLLVTEENPPLEGDDDTSRMEEVD

SEQ ID NO: 9765 - protein, 90 aa, Homo sapiens
  misc_feature (1)...(90): Xaa = X or * as defined in Table 2
AVSPSEGEQERGEKRAGACGSRLXSQHFVRPRWADHLRSGVXDQPGQHGETPVSTKNTKISWAWWXASVIPATREAEAGEWLEPRRRRLQ

SEQ ID NO: 9766 - protein, 74 aa, Homo sapiens
MTGRSREGKWVSTVPASGCVHVCVNREKATLSHVFPVSLVFLGKPEGLPEVAPSCPGSVGLGPHPPPLVRSRVP

SEQ ID NO: 9767 - protein, 274 aa, Homo sapiens
  misc_feature (1)...(274): Xaa = X or * as defined in Table 2
SHLPSLSLLPRIPPEVIVGSERGPVVFPCPWGSCWGLSRTPAVTLSQGLCSCVLETCWGPGEGAWFLSPQSVMCDLESPRSPADPRGWKFRVYGLASSGQMCNHLEYSRMLVLARHSELISPTYSFFEGETEAQRGXGIPPKPHSRSNAEPGPYTGTHTWPLHTGTFTFSSQMRGPSGLLDSGGWIKTEGDKEKAPGLMGLKDRDTGTCYGCVCSKCPGQGLQAGGVLYLAQPPALIRLPNGPRPARARERRDWHHREETGFLLDEATLLKARP

SEQ ID NO: 9768 - protein, 220 aa, Homo sapiens
  misc_feature (1)...(220): Xaa = X or * as defined in Table 2
TETRFSDSVAQQAGPGTFGPLLLLALPRLTFSPLLSFPTVGTKCGNPLWAPKPCPALAAPSGCRMTWKEQGRKMGVNCPRPVAACMCVXTGKRPPSPMFLPSPRFSSETRRAARGSSELPWVAGAWSASSSDSPLPRSTAPRRSVCTHCGLTQPTRHACQKGAGVCVRGPRSEAKGGWRGRALLLLAATPCPLSCPNLGLPAKVTPEQGLVRRGGRPAGP

SEQ ID NO: 9769 - protein, 259 aa, Homo sapiens
  DOMAIN (90)..(119): TRANSMEMBRANE FOUR FAMILY SIGNATURE domain identified by eMATRIX, accession number PR00259C, p-value=6.769e-20, raw score of 16.40
  DOMAIN (24)..(235): Transmembrane 4 family domain identified by PFam, accession name transmembrane4, E-value=2.3e-88, PFam score of 285.5
  misc_feature (1)...(259): Xaa = X or * as defined in Table 2
LNSRVEPRVRSRTMETKPVITCLKTLLIIYSFVFWITGAILLAVGVWGKLTLGTYISLIAENSTNAPYVLIGTGTTIVVFGLFGCFATCRGSPWMLKLYAMFLSLVFLAELVAGISGVVLRHEIKDTFLRTYTDAMQTYNGNDERSRAVDHVQRSLESCCGVQDYTNWSTSPYFLEHGIPPSCCMNETDCNPQDLHNLTVAATKVNQKGCYDLVTXFSWETNMGIIAGSGRLGIAFSQLIGHAGWACCLSRFHHGPIQY

SEQ ID NO: 9770 - protein, 225 aa, Homo sapiens
YKVLIFTSPCSVDQLCSALCSCFRPKDTERLRGAPEGFSRTDLHLAVVPVLTALISYHNYLDKTKQREMVYRLEQGLIHRCPRQCVVALSICSVEMPDIIIKALPVLVVKLTHISATASMAVPLLEFLSTLARLPHLYRNFAAEQYASVFAISLPYTNPSKFNQYIVCLAHHVIAKPLHRLQPSPHLAMRWASGSASSPRWRTSPSLCEAGALPPALALDGIACQ

SEQ ID NO: 9771 - protein, 51 aa, Homo sapiens
LSHIPEDKDHQVRKLATQLLVDLAEGCHTHHFNSLLDIIEKVRAVVPGAGC

SEQ ID NO: 9772 - protein, 57 aa, Homo sapiens
VGDVDSASSQTAAASPPADFVLQWMDVGLSSEFLLVLVNLVKFNSCYLDEYIAKMVQ

SEQ ID NO: 9773 - protein, 138 aa, Homo sapiens
NYLDKTKQREMVYCLEQGLIHRCASQCVVALSICSVEMPDIIIKALPVLVVKLTHISATASMAVPLLEFLSSESPPCLRMHPRGSGCVTCAGFSGALSQDSLGNLGVSPSAASRPGRLCPAAMSALLPGFEGRLLSPL

SEQ ID NO: 9774 - protein, 2123 aa, Homo sapiens
  DOMAIN (47)..(74): Protamine P1 proteins domain identified by eMATRIX, accession number BL00048, p-value=6.625e-09, raw score of 6.39
  DOMAIN (1837)..(2042): Rap/ran-GAP domain identified by PFam, accession name Rap_GAP, E-value=1.2e-101, PFam score of 351.1
MPDSCGLHIPAAHAAPSRDARIAGLSARGRHRTTTPSKLPRRPSAQCRYRKCGSRFRRRPGARGVRLSPRRGGPERGGAAREGFSGASWSTMAKPTSKDSGLKEKFKILLGLGTPRPNPRSAEGKQTEFIITAEILRELSMECGLNNRIRMIGQICEVAKTKKFEEHAVEALWKAVADLLQPERPLEARHAVLALLKAIVQGQGERLGVLRALFFKVIKDYPSNEDLHERLEVFKALTDNGRHITYLEEELADFVLQWMDVGLSSEFLLVLVNLVKFNSCYLDEYIARMVQMICLLCVRTASSVDIEVSLQVLDAVVCYNCLPAESLPLFIVTLCRTINVKELCEPCWKLMRNLLGTHLGHSAIYNMCHLMEDRAYMEDAPLLRGAVFFVGMALWGAHRLYSLRNSPTSVLPSFYQGRWGDVVFVHSLQPNSGQLSVAAGLAHRVPRIQLLAMACPNEVVSYEIVLSITRLIKKYRKELQVVAWDILLNIIERLLQQLQTLDSPELRTIVHDLLTTVEELCDQNEFHGSQERYFELVERCADQRPESSLLNLISYRAQSIHPAKDGWIQNLQALMERFFRSESRGAVRIKVLDVLSFVLLINRQFYEEELINSVVISQLSHIPEDKDHQVRKLATQLLVDLAEGCHTHHFNSLLDIIEKVMARSLSPPPELEERDVAAYSASLEDVKTAVLGLLVILQTKLYTLPASHATRVYEMLVSHIQLHYKHSYTLPIASSIRLQAFDFLLLLRADSLHRLGLPNKDGVVRFSPYCVCDYMYAGPRPRPMRLRASEALGLWEPERGSEKKTSGPLSPPTGPPGPAPAGPAVRLGSVPYSLLFRVLLQCLKQESDWKVLKLVLGRLPESLRYKVLIFTSPCSVDQLCSALCSMGLPSPSGYPVTWPLGRGFMPGFGHQLSGPKTLERLRGAPEGFSRTDLHLAVVPVLTALISYHNYLDKTKQREMVYCLEQGLIHRCASQCVVALSICSVEMPDIIIKALPVLVVKLTHISATASMAVPLLEFLSTLARLPHLYRNFAAEQYASVFAISLPYTNPSKFNQYIVCLAHHVIAMWFIRCRLPFRKDFVPFITKGLRSNVLLSFDDTPEKDSFRARSTSLNERPKRYGLRGWEYGIFQRDLNSEAVVSSPWGPGAKLGHYGQRLLSGVLVSFPSDLQGLATEASVPPRLRIARPPKQGLNNSPPVKEFKESSAAEAFRCRSISVSEHVVRSRIQTSLTSASLGSADENSVAQADDSLKNLHLELTETCLDMMARYVFSNFTAVPKRSPVGEFLLAGGRTKTWLVGNKLVTVTTSVGTGTRSLLGLDSGELQSGPESSSSPGVHVRQTKEAPAKLESQAGQQVSRGARDRVRSMSGGHGLRVGALDVPASQFLGSATSPGPRTAPAAKPEKASAGTRVPVQEKTNLAAYVPLLTQGWAEILVRRPTGNTSWLMSLENPLSPFSSDINNMPLQELSNALMAAERFKEHRDTALYKSLSVPAASTAKPPPLPRSNTVASFSSLYQSSCQGQLHRSVSWADSAVVMEEGSPGEVPVLVEPPGLEDVEAALGMDRRTDAYSRCGAQLVAVLLRQRAGAVAWCSGWSVALGWRTDRASPPPGQPQSSSVSSQEEKSLHAEELVGRGIPIERVVSSEGGRPSVDLSFQPSQPLSKSSSSPELQTLQDILGDPGDKADVGRLSPEVKARSQSGTLDGESAAWSASGEDSRGQPEGPLPSSSPRSPSGLRPRGYTISDSAPSRRGKRVERDALKSRATASNAEKVPGINPSFVFLQLYHSPFFGDESNKPILLPNESQSFERSVQLLDQIPSYDTHKIAVLYVGEGQSNSELAILSNEHGSYRYTEFLTGLGRLIELKDCQPDKVYLGGLDVCGEDGQFTYCWHDDIMQAVFHIATLMPTKDVDKHRCDKKRHLGNDFVSIVYNDSGEDFKLGTIKAATSVTLFLEVGWVGQCHSTVRGQFNFVHVIVTPLDYECNLVSLQCRKDMEGLVDTSVAKIVSDRNLPFVARQMALHANMASQVHHSRSNPTDIYPSKWIARLRHIKRLRQRVGNMGLPQRGVLAAQAVGRICEEAAYSNPSLPLVHPPSHSKAPAQTPAEPTPGYEVGQRKRLISSVEDFTEFV

SEQ ID NO: 9775 - protein, 1796 aa, Homo sapiens
  DOMAIN (1555)..(1750): Rap/ran-GAP domain identified by PFam, accession name Rap_GAP, E-value=3.5e-72, PFam score of 253.2
  misc_feature (1)...(1796): Xaa = X or * as defined in Table 2
MAKPTSKDSGLKEKFKILLGLGTPRPNPRSAEGKQTEFIITAEILRELSMECGLNNRIRMIGQICEVAKTKKFEEHAVEALWKAVADLLQPERTLEARHAVLALLKAIVQGQGERLGVLRALFFKVIQGDYPSNEDLHERLEVFKALTDNGRHITYLEEELADFVLQWMDVGLSSEFLLVLVNLVKFNKLVTLDEVQSQRNGFKMICLLCVRTASSVDIEVSLARLLDAVGLANNCLPAESLPLFIVTLCRTINVKELCEPCWKLMRNLLGTHLGHSAIYNMCHLMEDRAYMEDAPLLRGAVFFVGMALWGAHRLYSLRKSPTSVFPSFYQAMACPNEVVSYEIVLSITRLIKKYRKELQVVAWDILLNIIERLLQQLQTLDSPELRTIVHDLLTTVEELCDQNEFHGSQERYFELVERCADQRPESSLLNLISYRAQSIHPAKDGWIQNLQALMERFFRSESRGAVRIKVLDVLSFVLLINRQFYEEELINSVVISQLSHIPEDKDHQVRKLATQLLVDLAEGCHTHHFNSLLDIIEKVMARSLSPPPELEERDVAAYSASLEDVKTAVLGLLVILQTKLYTLPASHATRVYEMLVSHIQLHYKHSYTLPIASSIRLQAFDFLFLLRADSLHRLGLPNKDGVVRFSPYCVCDYMEPERGSEKKTSGPLSPPTGPPGPAPAGPAVRLGSVPYSLLFRVLLQCLKQESDWKVLKLVLGRLPESLRYKVLIFTSPCSVDQLCSALCSMLSGPKTLERLRGAPEGFSRTDLHLAVVPVLTALISYHNYLDKTKQREMVYCLEQGLIHRCARQCVVALSICSVEMPDIIIKALPVLVVKLTHISATASMAVPLLEFLSTLARLPHLYRNFAAEQYASVFAISLPYTNPSKFNQYIVCLAHHVIAMWFIRCRLPFRKDFVPFITKGLRSNVLLSFDDTPEKDSFRARSTSLNERPKSLRIARPPKQGLNNSPPVKEFKESSAAEAFRCRSISVSEHVVRSRIQTSLTSASLGSADENSVAQADDSLKNLHLELTETCLDMMARYVFSNFTAVPKRSPVGEFLLAGGRTKTWLVGNKLVTVTTSVGTGTRSLLGLDSGELQSGPESSSSPGVHVRQTKEAPAKLESQAGQQVSRGARDRVRSMSGGHGLRVGALDVPASQFLGSATSPGPRTAPAAKPEKASAGTRVPVQEKTNLAAYVPLLTQGWAEILVRRPTGNTSWLMSLENPLSPFSSDINNMPLQELSNALMAAERFKEHRDTALYKSLSVPAASTAKPPPLPRSNTDSAVVMEEGSPGEVPVLVEPPGLEDVEAALGMDRRTDAYSRSSSVSSQEEKSLHAEELVGRGIPIERVVSSEGGRPSVDLSFQPSQPLSKSSSSPELQTLQDILGDPGDKADVGRLSPEVKARSQSGTLDGESAAWSASGEDSRGQPEGPLPSSSPRSPSGLRPRGYTISDSAPSRRGKRVERDALKSRATASNAEKVPGINPSFVFLQLYHSPFFGDESNKPILLPNESQSFERSVQLLDQIPSYDTHKIAVLYVGEGQSNSELAILSNEHGSYRYTEFLTGLGRLIELKDCQPDKVYLGGLGRVVGEDGPVSPYLLGHDXHSWQAVFHIATLMPTKDVDKHRCDKKRHLGNDFVSIVYNDSGEDFKLGTIKGQFNFVHVIRHPAGITECNLGVPWQCRKDMEGLVDTSVAKIVSDRNLPFVARQMALHANMASQVHHSRSNPTDIYPSKWIARLRHIKRLRQRICEEAAYSNPSLPLVHPPSHSKAPAQTPAEPTPGYEVGQRKRLISSVEDFTEFV

SEQ ID NO: 9776 - protein, 1819 aa, Homo sapiens
  DOMAIN (1567)..(1764): Rap/ran-GAP domain identified by PFam, accession name Rap_GAP, E-value=3.7e-53, PFam score of 190.0
  misc_feature (1)...(1819): Xaa = X or * as defined in Table 2
GASWSTMAKPTSKDSGLKEKFKILLGLGTPRPNPRSAEGKQTEFIITAEILRELSMECGLNNRIRMIGQICEVAKTKKFEEHAVEALWKAVADLLQPERTLEARHAVLALLKAIVQGQGERLGVLRALFFKVIKDYPSNEDLHERLEVFKALTDNGRHITYLEEELADFVLQWMDVGLSSEFLLVLVNLVKFNSCYLDEYIARMVQMICLLCVRTASSVDIEVSLQVLDAVVCYNCLPAESLPLFIVTLCRTINVKELCEPCWKLMRNLLGTHLGHSAIYNMCHLMEDRAYMEDAPLLRGAVFFVGMALWGAHRLYSLRNSPTSVFPSFYQAMACPNEVVSYEIVLSITRLIKKYRKELQVVAWDILLNIIERLLQQLQTLDSPELRTIVHDLLTTVEELCDQNEFHGSQERYFELVERCADQRPESSLLNLISYRAQSIHPAKDGWIQNLQALMERFFRSESRGAVRIKVLDVLSFVLLINRQFYEEELINSVVISQLSHIPEDKDHQVRKLATQLLVDLAEGCHTHHFNSLLDIIEKVMARSLSPPPELEERDVAAYSASLEDVKTAVLGLLVILQTKLYTLPASHATRVYEMLVSHIQLHYKHSYTLPIASSIRLQAFDFLFLLRADSLHRLGLPNKDGVVRFSPYCVCDYMEPERGSEKKTSGPLSPPTGPPGPAPAGPAVRLGSVPYSLLFRVLLQCLKQESDWKVLKLVLGRLPESLRYKVLIFTSPCSVDQLCSALCSMLSGPKTLERLRGAPEGFSRTDLHLAVVPVLTALISYHNYLDKTKQREMVYCLEQGLIHRCARQCVVALSICSVEMPDIIIKALPVLVVKLTHISATASMAVPLLEFLSTLARLPHLYRNFAAEQYASVFAISLPYTNPSKFNQYIVCLAHHVIAMWFIRCRLPFRKDFVPFITKGLRSNVLLSFDDTPEKDSFRARSTSLNERPKSLRIARPPKQGLNNSPPVKEFKESSAAEAFRCRSISVSEHVVRSRIQTSLTSASLGSADENSVAQADDSLKNLHLELTETCLDMMARYVFSNFTAVPKRSPVGEFLLAGGRTKTWLVGNKLVTVTTSVGTGTRSLLGLDSGELQSGPESSSSPGVHVRQTKEAPAKLESQAGQQVSRGARDRVRSMSGGHGLRVGALDVPASQFLGSATSPGPRTAPAAKPEKASAGTRVPVQEKTNLAAYVPLLTQGWAEILVRRPTGNTSWLMSLENPLSPFSSDINNMPLQELSNALMAAERFKEHRDTALYKSLSVPAASTAKPPPLPRSNTVASFSSLYQSSCQGQLHRSVSWADSAVVMEEGSPGEVPVLVEPPGLEDVEAALGMDRRTDAYSRSSSVSSQEEKSLHAEELVGRGIPIERVVSSEGGRPSVDLSFQPSQPLSKSSSSPELQTLQDILGDPGDKADVGRLSPEVKARSQSGTLDGESAAWSASGEDSRGQPEGPLPSSSPRSPSGLRPRGYTISDSAPSRRGKRVERDALKSRATASNAEKVPGINPSFVFLQLYHSPFFGDESNKPILLPNESQSFERSVQLLDQIPSYDTHKIAVLYVGEGQSNSELAILSNEHGSYRYTEFLTGLGRLIELKDCQPDKVYLGGLDVCGEDGQFTYCWHDDIMQAVFHIATLMPTKDVDKHRCDKKRHLGNDLWSIVYNNSGEDFKLGTNQGPVNLWSTXSSTPLDYECNLVPLQCRKDMEGLVENQAWPKNRVXPATLPFVARQMPLHANMASQVHHXPLQTPTDIYPSKWIARLRPIKRLRQRILCEEAALLPTPALPFVHPPSHSKAPAQTPAEPTPGYEVGQRNALISSVEDFTEFV

SEQ ID NO: 9777 - protein, 42 aa, Homo sapiens
  misc_feature (1)...(42): Xaa = X or * as defined in Table 2
SPSSQPPPVIPHXPVCKQPTSCRSPRKRVLNLVGGGEGAASY

SEQ ID NO: 9778 - protein, 257 aa, Homo sapiens
  DOMAIN (69)..(99): PHOSPHOENOLPYRUVATE CARBOXYLASE SIGNATURE domain identified by eMATRIX, accession number PR00150F, p-value=5.631e-09, raw score of 10.45
  misc_feature (1)...(257): Xaa = X or * as defined in Table 2
VPWGNPGSESVGLPGGRGLVTAPAVFLPPKPAPGFGAQHVRSRKPSRRGQLIRAAWLTGSPVRPGQEMLGAGRGGASGRAGXGPAPYRKLSSASARGAGHPESGNCSSSGSGSTWSSSWGSGSGSSWGSRGLSQEMVEEVLHFIQGGAGXAGGTLQWALVSNLGFGVRQGDDIVVVTLIGLHGSIEDGAGVQGRSEAMEPRQAGRGTEGWLGGHSSETPHPPAGTSFCNLRPTVSREAAPAGRRGAESQTSLPSTSA

SEQ ID NO: 9779 - protein, 81 aa, Homo sapiens
  misc_feature (1)...(81): Xaa = X or * as defined in Table 2
AVCKQPTSCRSPCCPSPGCQASPCXAFRRLEICRAGFXAXALGPGKSQGQNCPRSSPPPSPCPLLKYGQNCGXKCPQRLLH

SEQ ID NO: 9780 - protein, 75 aa, Homo sapiens
  DOMAIN (23)..(36): LUTEOVIRUS ORF6 PROTEIN SIGNATURE domain identified by eMATRIX, accession number PR00910A, p-value=2.929e-09, raw score of 2.51
  misc_feature (1)...(75): Xaa = X or * as defined in Table 2
TMQGSLNKPLPSPXPRAATKIPNPSPSPPPQPAPQTTPHSILSTKAMTPVTIQALFSRIVRYLCDCRRDSLTQSF

SEQ ID NO: 9781 - protein, 124 aa, Homo sapiens
EKFRHNIAYFPQIVSVAARMLKDPRSYPGLALTSLYPQNTTLDLLDRGLQVHVVVDACSSRSQVDRLVALARMRQSGAFLSTSEGLILQLVGDAVHPQFKEIQKLIKEPAPDSGLLGLFQGQNS

SEQ ID NO: 9782 - protein, 318 aa, Homo sapiens
  DOMAIN (39)..(190): Isochorismatase family domain identified by PFam, accession name Isochorismatase, E-value=5.7e-07, PFam score of 18.7
  misc_feature (1)...(318): Xaa = X or * as defined in Table 2
GCPRLILLRGRSGLEPGTFRKMAAARPSLGRVLPDSSVLFLCDMQEKFRHNIAYFPQIVSVGSRMLKVARLLEVPVMLTEQYPQGLGPTVPEAGDXGPSAAWQKTCFSMCCLPLQQELDSRPQLRSVLLCGIEAQACILDPRSYPGLALTSLYPQNTTWDLLDRGLQVHVVVDACSSRSQVDRLVALARMRQSGAFLSTSEGLILKLVGDAVHPQFKEIQKLIKEPAPDSGLLGLFQGQNSLPPLNSNPALREDHPPVHPGPQWEARFPPSLGFPRVGAIPPGSCRPLVGGGQWCCLPIGQLLPEMQMRLLETGWEMG

SEQ ID NO: 9783 - protein, 263 aa, Homo sapiens
MGVLPSYFWDEEAEAQEGICLSLKQRMPVGRAGHSGHFLADATSRALARRREEWGKQEERGVKESSESTNTTSRMKTPKEDVRPGMTAFEPEALGNLVEGRTSIDSILKTVSNSFSLGACCLLSFHVLLDGTAGRGSDRDEQNAHSVVPEQQARAHHHPESHIHLMGDESACIAYIRTRSTWTLAASHAPPSRRDPCLAPPGWQMADRPLHRSGAPSVLPHSQDTDTEMNQERYMNASISFPKPPHSTSQQVLFIQPGEEREI

SEQ ID NO: 9784 - protein, 39 aa, Homo sapiens
MTAFRGGTPLPDLRPSLYPADPGGCAALPPEGVVHRDLK

SEQ ID NO: 9785 - protein, 123 aa, Homo sapiens
  DOMAIN (1)..(106): Eukaryotic protein kinase domain identified by PFam, accession name pkinase, E-value=2.1e-13, PFam score of 52.3
  misc_feature (1)...(123): Xaa = X or * as defined in Table 2
HCIQQILEAVLHCHQMGVVHRDLKPGEKKNQTLGRAVLLSFTXRRLQSLGLHQLHSLAPSAGTSWISLLILMVSVAGFAGTPGYLSPEVLRKDPYGKPVDLWACGGXRFSGPLPGVILYILLV

SEQ ID NO: 9786 - protein, 531 aa, Homo sapiens
  DOMAIN (125)..(144): TYROSINE KINASE CATALYTIC DOMAIN SIGNATURE domain identified by eMATRIX, accession number PR00109B, p-value=3.294e-12, raw score of 12.27
  DOMAIN (13)..(271): Eukaryotic protein kinase domain identified by PFam, accession name pkinase, E-value=5e-91, PFam score of 315.8
MATITCTRFTEEYQLFEELGKGAFSVVRRCVKVLAGQEYAAKIINTKKLSARDHQKLEREARICRLLKHPNIVRLHDSISEEGHHYLIFDLVTGGELFEDIVAREYYSEADASHCIQQILEAVLHCHQMGVVHRDLKPENLLLASKLKGAAVKLADFGLAIEVEGEQQAWFGFAGTPGYLSPEVLRKDPYGKPVDLWACGVILYILLVGYPPFWDEDQHRLYQQIKAGAYDFPSPEWDTVTPEAKDLINKMLTINPSKRITAAEALKHPWISHRSTVASCMHRQETVDCLKKFNARRKLKGAILTTMLATRNFSGGKSGGNKKSDGVKKRKSSSSVQLMESSESTNTTIEDEDTKVRKQEIIKVTEQLIEAISNGGFESYTKMCDPGMTAFEPEALGNLVEGLDFHRFYFENLWSRNSKPVHTTILNPHIHLMGDESACIAYIRITQYLDAGGIPRTAQSEETRVWHRRDGKWQIVHFHRSGAPSVLPHSQDTDTEMNQERYMNASISFPKPPHSTSQQVLFIQPGEEREI

SEQ ID NO: 9787 - protein, 532 aa, Homo sapiens
  DOMAIN (178)..(197): TYROSINE KINASE CATALYTIC DOMAIN SIGNATURE domain identified by eMATRIX, accession number PR00109B, p-value=3.294e-12, raw score of 12.27
  DOMAIN (66)..(325): Eukaryotic protein kinase domain identified by PFam, accession name pkinase, E-value=3e-87, PFam score of 303.3
  misc_feature (1)...(532): Xaa = X or * as defined in Table 2
IPGSTISCSSVKPVLCLHSAARACKWSLGSGAEQQRLSPGPPVPSLTCLPSARMATITCTRFTEEYQLFEELGKGAFSVVRRCVKVLAGQEYAAKIINTKKLSARDHQKLEREARICRLLKHPNIVRLHDSISEEGHHYLIFDLVTGGELVEDIVAREYYSEADASHCIQHILEAVLHCHQMGVVHRDLKPENLLLASKLKGAAVKLADFGLAIEVEGEQQACVGFAGTPGYLSPEVLRKDPYGKPVDLWACGVILYILLVGYPPFWDEDQHRLYQQIKAGAYDFPSPEWDTVTPEAKDLINKMLTINPSKRITAAEALKHPWISHRSTVASCMHRQEARGPAXKKFNARRKLKGAILSTMLATRNFSGGKSGGNKKSDGVKESSESANTTIEDEATKVRNQEIIKVTEQLIEAISNGDFESYTKMCDPGMTAFEPEALGNLVEGLDFHRFYFENLWYRNSKPVHTTILNPHIHLMGDESACIAYIRITQYLDAGGIPRTAQSEETRVWHRRDGKWQIVHFHRSGAPSVLPH

SEQ ID NO: 9788 - protein, 53 aa, Homo sapiens
  misc_feature (1)...(53): Xaa = X or * as defined in Table 2
MXXXXXXXXXXXXXXXXXXXXXXXXXXXXXXXXXXXXXXXXXXXXXXXXISKH

SEQ ID NO: 9789 - protein, 128 aa, Homo sapiens
  misc_feature (1)...(128): Xaa = X or * as defined in Table 2
GVSPCWPGWSXTPDLKXSTRLGFPRCWDYRLLEVDPCTGHSLYLXKDPPVLPLPAEGCDYQGKEYALSSCCDKSYLLPDYRTKFLCCHPERGTWKLGTVGGCYAPIQSFGIADEQAWLQHGSGAVYLC

SEQ ID NO: 9790 - protein, 94 aa, Homo sapiens
  misc_feature (1)...(94): Xaa = X or * as defined in Table 2
LQVISEYLFWRINFFLFLFXTVSLSVAQARVQWRDPGSLQPLLPGFKRFLASASRVARVTGAHHLHAQLILYFXVETGFHHVGQAGLELLTSGK

SEQ ID NO: 9791 - protein, 140 aa, Homo sapiens
  misc_feature (1)...(140): Xaa = X or * as defined in Table 2
LQVISEYLFWRINFFLFLFXTVSLSVAQARVQWRDPGSLQPLPPGSRDSXASASRVARVTGAHHLHAQLFCIFKXRQGFHPGWSGWSSNLPDLQANPAASALPKVPGITGTSPLHPPWSINFKNIKIWNQETSILVFFRL

SEQ ID NO: 9792 - protein, 132 aa, Homo sapiens
DSIDARVVFDLIRSINDPEHPLTLEELNVVEQVRVQVSDPESTVAVAFTPTIPHCSMATLIGLSIKVKLLRSLPQRFKMDVHITPGTHASEHAVNKQLAERPLTPQPAYWYPGPSSCQGCYRCFLESLTMRN

SEQ ID NO: 9793 - protein, 87 aa, Homo sapiens
  misc_feature (1)...(87): Xaa = X or * as defined in Table 2
AMVGGGGVGGGLLENANPLIYQRSGERPVTAGEEDEQVPDSIDAREIFDLIRSXAWPLTPQPAYWYPGPSSCQGCYRCFLESLTMRN

SEQ ID NO: 9794 - protein, 314 aa, Homo sapiens
  DOMAIN (119)..(136): PROTEIN TRANSMEMBRANE MG064 ATP-B domain identified by eMATRIX, accession number PD02980A, p-value=7.632e-10, raw score of 16.13
MVIYPLDKHFTSPCRSKLWGRRTPGPMCPLRPGSGLYVSARYWLARPSAAVVPSQRLLLQRPSCSRVRAARAAVTASLAPQAENPQRGVSLARLRRHATPPSRSPEVRGLERKRTPARISGGGSAMVGGGGVGGGLLENANPLIYQRSGERPVTAGEEDEQVPDSIDAREIFDIRRCWARAEELNVVEQVRVQVSHFRGERVVPESQKGFCAAGAGVLYAHEHRRVSDPESTVAVAFTPTIPHCSMATLIGLSIKVKLLRSLPQRFKMDVHITPGTHASEHAVNKQLADKERVAAALENTHLLEVVNQCLSARS

SEQ ID NO: 9795 - protein, 234 aa, Homo sapiens
  misc_feature (1)...(234): Xaa = X or * as defined in Table 2
AMVGGGGVGGGLLENANPLIYQRSGERPVTAGEEDEQVPDSIDAREIFDIRRCWARAGSGGLRWGEQXYRAAGGAASQQGVPGRGFXVGKGAESLFLHFPQLIRFLNDPEHSLTLEELNVVEQVRVQVSDPESTVAVAFTPTIPHCSMATLIGLSIKVKLLRSLPQRFKMDVHITPGTHASEHAGKCGLVVRVLARAPPKQSEASPLHRSLWARLEMGNCVSEIARDSSVWVIA

SEQ ID NO: 9796 - protein, 197 aa, Homo sapiens
  DOMAIN (6)..(23): PROTEIN TRANSMEMBRANE MG064 ATP-B domain identified by eMATRIX, accession number PD02980A, p-value=7.632e-10, raw score of 16.13
ARSHRISGGGSAMVGGGGVGGGLLENANPLIYQRFGERPVTAGEEDEQVPDSIDAREVFDLIRSHQMTPEHPLTLEELNVVEQVRVQVSDPESTVAVGFPKPTHSGTCRHGPPLIGLSIKVKLLRSLPSAFSRWDVAHLLPGDPLPQEHAVEQATLQIKEAGWATALGRTPHLLEVVNQCLSSPAPGTWAFVPLSLA

SEQ ID NO: 9797 - protein, 202 aa, Homo sapiens
  misc_feature (1)...(202): Xaa = X or * as defined in Table 2
KVSKAIAGCLRNYGVCLAHLRTWAIPEPPKMNPVVEPLSWMLGTWLSDPPGAGTYPTLQPFQYLEEVHISHVGQAMLNFSFNSFHPDTRKSMHRECGFHFASKPDTNKVGLCQAPQNTGLGWNWKEGEVKRARSLCIRIPLPFARISFRQGKPHVEQITRGKFRLNSEGKLXADGSPMGNPRHSPMTQHHHDTYQEGEHRKP

SEQ ID NO: 9798 - protein, 135 aa, Homo sapiens
RYHLLAHTTLTLAAVQDGFRTHDLTLASHEENPAWLPLYGSVCCRLAAQPLCMTQPTASGTLRVQETRVRAGELDQALGRPFTLSISNQYGDDEVTHTLQTESREALQSWMEALWQLFFDMSQWKQCCDEIMKIE

SEQ ID NO: 9799 - protein, 479 aa, Homo sapiens
  DOMAIN (287)..(389): PH domain identified by PFam, accession name PH, E-value= 0.0022, PFam score of 17.2
MFSRNHRSRVTVARGSALEMEFKRGRFRLSLFSDLPEDTELQRKLDHEIRMREGACKLLAACSQREQALEATKSLLVCNSRILSYMGELQRRKEAQVLGKTSRRPSDSGPPAERSPCRGRVCISDLRIPLMWKDTEYFKNKGDLHRWAVFLLLQLGEHIQDTEMILVDRTLTDISFQSNVLFAEAGPDFELRLELYGACVEEEGALTGGPKRLATKLSSSLGRSSGRRVRASLDSAGGSGSSPILLPTPVVGGPRYHLLAHTTLTLAAVQDGFRTHDLTLASHENVESFVQQAGEMQNWAQVHGVLKGTNLFCYRQPEDADTGEEPLLTIAVNKVMGPLVETRVRAGELDQALGRPFTLSISNQYGDDEVTHTLQTESREALQSWMEALWQLFFDMSQWKQCCDEIMKIETPAPRKPPQALAKQGSLYHEMVLSEPVAPGGPAIPTDQRPLQQRPTSHLAPVTSVREKGAGIGSAQKRK

SEQ ID NO: 9800 - protein, 70 aa, Homo sapiens
  misc_feature (1)...(70): Xaa = X or * as defined in Table 2
NPKGQKDREAPLSRSVFVLKIKIKRAFALLLHGRFXPSTPAASASPASKSPRGSGKALASALFYIVQLTK

SEQ ID NO: 9801 - protein, 209 aa, Homo sapiens
  misc_feature (1)...(209): Xaa = X or * as defined in Table 2
RGPMERPKQMTAVHCQGHQRGDSEIRNFRCHGPNSCTRWGSPPHASASFSTCLXNKPKYFPWGISFLSFFLSRRSLDSVAQARVQWCNLGSLQPLPPRFXQFSCIRLLSSXDYRCMPPCPANYLXFXXRQGFTIXARLVLNSXPRDPPVLASQSAGITGVSHQARTFFLFFETTFHSVAHAGVQWHDLSSLPPPPPRFKRLSCLSLSSS

SEQ ID NO: 9802 - protein, 107 aa, Homo sapiens
FIHRPSDSGPPAERSPCRGRVCISGKKHSYPSCWYPLPKHTASCPISTSILTPLPLDLRIPLMWKDTEYFKNKGDLHRWAVFLLLQLGEHIQDTEMIIVDRTLTYCI

SEQ ID NO: 9803 - protein, 258 aa, Homo sapiens
  misc_feature (1)...(258): Xaa = X or * as defined in Table 2
VVAGALGCSWLGIGAGFLSGREGACRRERGQQQTGTPLPSSLPLLPSLEKRAGRTAATKARLDTLCLEPPLQLAFPPGDPTYPTSLSFSSLPGLPAWPPEQQWGEENLSQQPEGVXQELQRDKGSFCPLPKSWPPLXRGGGARLQLARNRGWFPVWKGRGLQKGAGTAADRHTPAFLSPSPPFSGKASWENSCHQSETGHSVPRAPSAAGLSSWGPHLSSLRFLFLPCLGSRQAPGAAVGRGKFVTAARGGLTGVAEG

SEQ ID NO: 9804 - protein, 196 aa, Homo sapiens
  misc_feature (1)...(196): Xaa = X or * as defined in Table 2
VRAGELDQALGRPFTLSISNQYGDDEVTHTLQTESREALQSWMEALWQLFFDMSKREGGWVEPLGRTGVCHFYXRPLFQDYVEGNVAGERAAWLSLLISALLPGQWKQCCDEIMKIETPAPRKPPQALAKQGSLYHEMAIEPLDDIAAETDILTQREGARLETPPPWLAMFTDQPALPNPCSPASVAPAPDWTHPL

SEQ ID NO: 9805 - protein, 585 aa, Homo sapiens
  misc_feature (1)...(585): Xaa = X or * as defined in Table 2
AAAGSETGLGSCLEGKGPAEGSGDSSRQAHPCLPLSLSSLLWKSEDTELQRKLDHEIRLRKGPCKLLANLLPSEKQALEATKSLLVCNSRILSYMGELQRRKEAQLLGKTSRRPSDSGPPAERSPCRGRVCISDLRIPLMWKDTEYFKNKGDLHRWAVFLLLQLGEHIQDTEMILVDRTLTDISFQSNVLFAEAGPDFXTCGLELYGACVEEEGALTGGPKRLATKLSSSLGRSSGRRVRASLNSAGGSRGAIPFMLPTPEVGGPRYHLLAHTTLTLAAVQDGFRTHDLTLASHEENPAWLPLYGSVCCRLAAQPLCMTQPTASGTLRVQQAGEMQNWAQVHGVLKGTNLFCYRQPEDADTGEEPLLTIAVNKVMGPLVETRVRAGELDQALGRPFTLSISNQYGDDEVTHTLQTESRGSTCRAWMEALWQLFFDMSQWKQCCDEIMKIETPAPRKPPQALAKQGSLYHEMALFEPLDDIAAVTDILTQREGARLETPPPWLAMFTDQPALPNPCSPASVAPAPDWTHPLPWGRPRTFSLDAVPPDHSPRASLRFAPLPTFSESPRTRGLLQAKGQPRTWLQSPV

SEQ ID NO: 9806 - protein, 123 aa, Homo sapiens
LVTRRAVLACLRQLVQREAAEVSEHAVMLAKDSREELTPDANIREVGLEGALLILLDKETDERLCHDIKETLNYMLTSMAVEKLSLWLKLCKDVLAASAGKYWTLSVKIIKLKFETLHKIVYP

SEQ ID NO: 9807 - protein, 121 aa, Homo sapiens
TMESITACLHALQALLDVPWPRSKIGSDQDLGILLLNVLHRVILTRESPSIQLASLEVVRQIICAAQEHVKEKRRSAEGSISILPTILYLTIGVLRETAVKLPGGQLSSTVAASLQALKGI

SEQ ID NO: 9808 - protein, 47 aa, Homo sapiens
  misc_feature (1)...(47): Xaa = X or * as defined in Table 2
IIMTLAEDLLCSAAQNSRLSAQRTQAGWLLISALMTLGNSLXKVYIP

SEQ ID NO: 9809 - protein, 71 aa, Homo sapiens
CCCNVFNCFSLSLQTWALHSLSLIIDSAGPLYYVHVEPTLSLIIIVVVNVPPTHAEVHQSLGRCLNALITT

SEQ ID NO: 9810 - protein, 145 aa, Homo sapiens
  misc_feature (1)...(145): Xaa = X or * as defined in Table 2
SSYIPSFSIQIQLFPTHTFTLXHPVSWKNCRKXTRENLKITAELEIFQEGIKVLETLVTVAEEHHRAQLVACLLPILISFLLDENSLGSATSIMRNLHDFALQNLMQIGPQYSSVFKSLVASSPALKARLEAAIKGNQESVKVKI

SEQ ID NO: 9811 - protein, 130 aa, Homo sapiens
PKFNEKNCDQLGGLLQGMELAHSLLLNEEAYNQLGEVQKAEFIFEWLRYLEKLLLATSRNDVREKQKTLVEQLLSLLNSSPGPPTRKLLAKNLAILYSIGDTFSVHEAIDKCNDLIRSKDDSPSYLPTKL

SEQ ID NO: 9812 - protein, 173 aa, Homo sapiens
  DOMAIN (38)..(77): PROTEIN ZINC FINGER ZINC-FINGER METAL-BINDING NU domain identified by eMATRIX, accession number PD01066, p-value=4.938e-28, raw score of 19.43
  DOMAIN (36)..(98): KRAB box domain identified by PFam, accession name KRAB, E- value=4.7e-21, PFam score of 83.4
  misc_feature (1)...(173): Xaa = X or * as defined in Table 2
SIQEKRSLGGEQSPTFLKELQEGTSWLLMAKLYEAVTFKDVAVIFTEEELGLLDPAQRKLYRDVMLENFRNLLSQWGINHAMEILSTSXGKEKLWVMGTSSQXERNLGGKIQTEMETVPEAGTHEEFSCKQIWEQIASDLTRSQDTTISNSQLFEQDDNPSQIKARLSTVHTR

SEQ ID NO: 9813 - protein, 2367 aa, Homo sapiens
  DOMAIN (1516)..(1570): ATP synthase c subunit proteins domain identified by eMATRIX, accession number BL00605, p-value=4.558e-24, raw score of 27.67
  DOMAIN (1512)..(1580): ATP synthase subunit C domain identified by PFam, accession name ATP-synt_C, E-value=2.3e-18, PFam score of 74.5
  misc_feature (1)...(2367): Xaa = X or * as defined in Table 2
FPTNTTFPLLKVCYRFHYAEPAVPGHCRAGVRREGADWGTGSADKQRGPFFLLDYGKVWLPCAQQNDVREKQKTLVEQLLSLLNSSPGPPTRKLLAKNLAILYSIGDTFSVHEAIDKCNDLIRSKDDSPSYLPTKLAAVVCLGSLYKKLGRILGNTFTDTVGNILKAMKSAESQGRYEIMLSLQNILNGLGAAAAPCHRDVYKAARSCLTDRSMAVRCAAAKCLLELQNEAIFMWSTDLDSVATLCFKSFEGSNYDVRISVSKLLGIILAKAVISKHPGTASRQSIRRVSLEEVLELLGTGFLRGSSGFLRASGDMLKGTSSVSRDVRVGVTQAYVVFVSTLGGAWLEKNFAAFFSHILSLASPSHPKATQTQIDAVCCRRCVSFILRTTIGGLLGEKAQLAAVKDICQAIWKLKKVMDAVMSDGNLETRLGSTDVAASQHMLVCALQELGNLIHNLGTTAAPLLQDSSTGLLDSILSVILHPSISVRLAAAWCLHCIAVALPSYLTPLLDRCLERLTGHKSSPEAVTGFSFAVAALLGAVKHCPLGIPHGKGKIIMTLAEDLLCSAAQNSRLSAQRTQAGWLLISALMTLASPKDLETEKSRGDSFTWQVTLEGRAGALCAIKSFVSHCGDLLTEEVTQRLLPPLPCAVDLLTQELAADLTAPDIQVAASTFLLPPLCHQDDLLILSPFLQETDHRFIEEQLLLGNGVACGSLEYDPYSIYEKDVEGDSVPKPLPPALSVISSASKLFGVVCAHVGETQRLLILEQLLDSIKHTKGARQQVVQLHVVSSVSSFLKYVAGSKGCLGPEEMKRFALTLVMGALESPNPLLRCAAAESWARLAQVVDDGAFTAGLAQVSFDKLKSARDVVTRTGHSLALGSLHRYLGGISSSQHLNSCIGILYTLAQDSTSPDVQTWALHSLSLIIDSAGPLYYVHVEPTLSLIIMLLLNVPPTHAEVHQSLGRCLNALITTLGPELQGNSTSISTLRTSCLLGCAVMQDNPDCLVQAQAISCLQQLHMFAPRHVNLSSLVSCLCVNPCSPYMXLRRAVLACLRQLVQRQAAEVSEHAVMLAKDSREELTPVNWYQEWGTAIKIPKNLEAALELGNRQWLEWFGGLRRRQEDVAKSGTSRDLLNGFDQNADNNVDNEAQAVPAMAKRDQGTAQAIASESASPKPWQLLHGVGPAGAQNSRTEVWELPPRFLRMHGNAQMSRQKSAAGVKPSWRTSARAVQRENEGSEPPHRVPTEALPSGASETPSQKNKKRRGSLDPRVVDPLTAYTVRLKKPHILNASCENANIREVGLEGALLILLDKETDERLCHDIKETLNYMLTSMAVEKLSLWLKLCKDVLAASADFTAVTCVDTMQEEEGDKGDDASVLTTRRDEKSHPFTNPRWATRVFAAECVCRIINQCENANSAHFDIALAQEMKKRDSRNDFLVLHLADLIRMAFMAATDHSDQLRLSGLEMLLVVIRRFATVPEPEFPGHVILEQYQANVARREFQTSVVSRDTDTAAKFIGAGSATVGVADSGAGIGAVFGSLIIVYARKLSLKQQLLFYAILGFALSEAMGLFCLMISFFILFAIAWIASGVVSDLNDLRRVHQLLVSSLTKIQAGKEALSHLYNESASTMEILAVLKAWAEVYIIAVQRHKNHRQPLKTTTCLEDGIRNGSCSSDGLLDLVYADLGTLSRLWLAALQDFALLTLPSEFASQLPAEGGAFYTAETSENAKLHYYNSWALILHATALWLTSTGFVVADPDEGASNLSRPVTPTSMCQGSSSGATIKSPEDVYTDRFHLILGISVEFLCSLRSDATMESITACLHALQALLDVPWPRSKIGSDQDLGIELLNVLHRVILTRESPSIQLASLEVVRQIICAAQEHVKEKRRSAEVDDGAAEKETLPEFGEGKDTGGLVPGKSLVFATLELCVCILVRQLPELNPKLTGSPGVKATKPQILLEDGSRLVSAALVILSELPAVCSPEGSISILPTILYLTIGVLRETAVKLPGGQLSSTVAASLQALKGILSSPMARAEKSRTAWTDLLRSALTTILDCWDPEHFSLVDETHQELDEVSLLTAITVFILSTSPEVTTIPCLQKRCIDKFKATLEIKDPVVQIKTYQLLHSIFQYPNPAVSYPYIYSLASCIMEKLQEIDKRKPENTAELEIFQEGIKVLETLVTVAEEHHLVSSTRNTSSRSLFKHKSSLKIDFLNYGNAFVSVVNRSILSSAISHARVKSSHSTRSSLVTCKAKEVSSCNTGKQSFRPKKNLPRTLETPQGKQNTPKGMSDDFVLNSLKGFKLLEAFSRFSDTTGGKEGRRFYSRHAVYALGECGLSHREGVEWLYAKKLEASCLLTCDSHGMLQDLIPNISQEEIS

SEQ ID NO: 9814 - protein, 105 aa, Homo sapiens
  misc_feature (1)...(105): Xaa = X or * as defined in Table 2
TTRYLKKTSTTGQRKKRGRGNGSFPTENLVPSGTVTGSQQLGPPFRXNHTEECWGPPTADGRAGKGPRQQPGRAQRIYRWDPSDGTTWHHHRPCGSRGTDQPETK

SEQ ID NO: 9815 - protein, 122 aa, Homo sapiens
  misc_feature (1)...(122): Xaa = X or * as defined in Table 2
FRREGRPAGAGAGFADSGGAPSSCCGPTVRPVAATAENVLHVRGAFQEFPVCQAGVQWRNHGSLRPPPPGSSHPPISASXVVETTGMCHHVWLIFXXNFFVETGSPYVAQALILLMLGIKTL

SEQ ID NO: 9816 - protein, 92 aa, Homo sapiens
LWSRSHPFCCSRGPLAMAGILFEDIFDVKDIDPEGKKFDRGDKFRLVIASTLYEDGTLDDGEYNPTDDRPSRADQFEYVMYGKVYRIEGRRG

SEQ ID NO: 9817 - protein, 72 aa, Homo sapiens
HNSRKMPLLFLRLRLRAAEWQCSRITGWGLLFQLCVTCPMGGLLMRLQGDANNLHGFEVDSRVYLLMKKLAF

SEQ ID NO: 9818 - protein, 261 aa, Homo sapiens
  misc_feature (1)...(261): Xaa = X or * as defined in Table 2
PRAGGCGGSGRVTACLCACATLVWPPRFQEVLLVLSGLVHARGCTYSQLWSRSHPFCCSRGPLAMAGILFEDIFDVEGYXPEGQEVWTECSRLHCESESFRMDLILDVNIQIYPVDLGDKFRLVIASTLYEDGTLDDGEYNPTDDRPSRADQFEYVMYGKVYRIEGDETSTEAATRLSAYVSYGGLLMRLQGDANNLHGFEVGLPRVYLLMKKLSLLNLALNQPSLPSHSGRGHCSSLSGQPLFAHLLRKGWLTVHRWRHL

SEQ ID NO: 9819 - protein, 805 aa, Homo sapiens
MGFHHVGQADLKLLTSDNAYDPDVNAKQIWIDKTVINDHICLTFTDNGNGMTSDKLHKMLSFGFSDKVTMNGHVPVGLYGNGFKSGSMRLGKDAIVFTKNGESMSMINLAESKASLAAILEHSLFSTEQKLLAELDAIIGKKGTRIIIWNLRSYKNATEFDFEKDKYDIRIPEDLDEITGKKGYKKQERMDQIAPESDYSLRSKTVRITFGFNCRNKDHYGIMMYHRNRLIKAYEKVGCQLRANNMGVGVVGIIECNFLKPTHNKQDFDYTNEYRLTITALGEKLNDYWNEMKVKKNTEYPLNLPVEDIQKRPDQTWVQCDACLKWRKLPDGMDQLPEKWYCSNNPDPQFRNCEVPEEPEDEDLVHPTYEKTYKKTGIISEYPPIEAYREGVTEEVIHEFYQFTCCLKRRLSTRSSILNAKNRRLSSQFENSVYKGDDDDEDVIILEENSTPKPAVDHDIDMKSEQSHVEQGGVQVEFVGDSEPCGQTGSTSTSSSRCDQGNTAATQTEVPSLVVKKEETVEDEIDVRNDAVILPSCVEAEAKIHETQETTDKSADDAGCQLQELRNQLLLVTEEKENYKRQCHMFTDQIKVLQQRILEMNDKYVKKETCHQSTETDAVFLLESINGKSESPDHMVSQYQQALEEIERLKKQCSALQHVKAECSQCSNNESKSEMDEMAVQLDDVFRQLDKCSIERDQYKSEVELLEMEKSQIRSQCEELKTEVEQLKSTNQQTATDVSTSSNIEESVNHMDGESLKLRSLRVNVGQLLAMIVPDLDLQQVNYDVDVVDEILGQVVEQMSEISST

SEQ ID NO: 9820 - protein, 321 aa, Homo sapiens
NCEVPEEPEDEDLVHPTYEKTYKKTLKRRLSTRSSILNAKNRRLSSQFENSVYKGDDDDEDVIILEENSTPKPAVDHDIDMKSEQSHVEQGGVQVEFVGDSEPCGQTGSTSTSSSRCDQGNTAATQTEVPSLVVKKEETVEDEIDVRNDAVILPSCVEAEAKIHETQETTDKSADDAGCQLQELRNQLLLVTEEKENYKRQCHMFTDQIKVLQQRILEMNDKYVKKETCHQSTETDAVFLLESINGKSESPDHMVSQYQQALEEIERLKKQCSALQHVKAECSQCSNNESKSEMDEMAVQLDDVFRQLDKCSIERDQYKSE

SEQ ID NO: 9821 - protein, 68 aa, Homo sapiens
GDDFSLQQINAELLFRPTALSTPSFSSPKESVPRRHLSEGTNSYATRLLNNHQVPPQSGTWGANRVSG
